United States Patent Application Publication US 2007/0054278 A1 - sequence listing, part 3

SEQ ID NO: 2326 - DNA, 7544 bp, Homo sapiens
tagagacagggtttcaccatgttagccaggatggcctcgaactcctgacctcatgactcaccacctcggcctcccagagtgctgggattacaggcatgagccaccacgcctggtctgtgtgtgcttgtgaattcttaaaggatgtgtgtaagggagtgatctaggggcactgcacccagtgggaactcgggagagtggccagttgtctgcaccactctcgctctaggccataaatgaaagtatgtgccctgttagaattgctttcttcctcctgctttcaggatgtttgcaggtgtcggggagggcagactatttttacactgttcctctgcgtttatccattaaagtaggagagatgctcccagtgaggctcaggcccttgtcakacagagtccctggacggtagcagagcctttccmtggccaatgacttatcagagcttttytccttccagagatgagaagaatcagtccatcatagtcagtggggagtctggagccgggaagacggtatcagccaagtatgccatgcgctatttcgccaccgttggtggctcggccagtgaaaccaacatcgaagagaaggtgctggcatccagtcccatcatggaggtaaagccttctagaaagccctctttttttttcatacctttgtctgtctggtctgtgcaggccattggaaatgccaagaccacccgcaatgacaacagcagccgttttggcaagtacatccagattggctttgacaaaaggtaccacatcatcggggccaacatgaggacttacctcttggagaagtccagagtggtcttccaggcagatgatgagaggaattaccacatcttttaccagctctgtgctgctgccggtcttccagaatttaaagagcttgcactaatcttctttggtggacactgtaaaaataatcaaatgagatactttgaaagtgcctcatgccttatttcctcgcctcccacagcaagtgcagaggactttttctatacatcacagggaggagacacttccatcgagggtgtkgacgatgctgaggactttgagaakactcgacaagccttcacactcctcggagtgaaagagtcccatcagatgagcatttttaagataattgcttctatcttgcaccttggaagtgtggcgattcaggctgagcgtgatggtgattcctgtagtatatcagatgtatacctaagcaacttctgccgactgctaggggtggagcacagtcagatggagcactggctgtgtcatcgcaagctggtcaccacctyggagacctacgtcaagaccatgtccctgcagcaggtgatcaatgcgcgcaacgccctggcgaagcacatctatgcccagttgttcggctggattgtggagcacatcaacaaggccctgcacacctccctcaagcagcactccttcatcggggtcctggacatctatgggtttgagacatttgaggtaaacagctttgagcagttctgtatcaactatgcaaatgaaaagctccagcagcagttcaactcgcatgttttcaaactggagcaagaagaatacatgaaggaacagatcccttggaccctgattgatttttatgataaccaaccttgtatcgacctcattgaagccaagctgggtatcttggacctgttggatgaagaatgtaaggtccccaaaggaactgaccagaactgggctcagaagctctatgaccggcactccagcagccagcacttccagaagccccgcatgtccaacacggccttcatcatcgtccactttgcagacaaggtggagtacctctctgatggttttctggagaaaaacagagacacggtgtatgaagagcagatcaatatcctgaaggccagcaagttcccactagtggctgacttgtttcatgatgacaaggaccytgttcctgccaccacccctgggaaggggtcatcttcgaagatcagcgtccgttctgccagaccccccatgaaagtctccaacaaggagcacaagaaaaccgttggccaccagttccgtacctccctgcatctgctcatggagaccctgaatgccacgacacctcactatgtccgytgcatcaagcccaacgatgagaagctcccctttcactttgacccaaagagagcagtgcagcaactcagagcctgsggggtrttggaracgattcgaatcagtgcagctggctacccatccaggtgggcctaccatgactttttcaaccggtatcgggtgctggtcaagaagagagagctcgccaacacagacaaaaaggccatctgcaggtctgtcctggagaacctcatcaaggaccccgacaagttccagtttggccgcaccaagatcttctttcgagcaggccaggtggcctacctggagaagctgcgggctgacaagttccggacagccaccatcatgatccagaaaactgtccggggatggctgcagaasgtgaaatatcacaggctgaagggggctaccttaaccctgcagaggtactgccggggacacctggcccgcaggctggctgagcacctgcggaggatcagagcggctgtggtgctccagaaacattaccgcatgcagagggcccgccaggcctaccagagggtccgcagagctgccgttgttatccaggccttcacccgggccatgtttgtgcggagaacctaccgccaggtcctcatggagcacaaggccaccaccatccagaagcacgtgcggggctggatggcacgcaggcacttccagcggctgcgggatgcagccattgtcatccagtgtgccttccggatgctcaaggccaggcgggagctgaaggccctcaggattgaggcccgctcagcagagcatctgaaacrtctcaacgtgggcatggagaacaaggtggtccagctgcagcggaagatcgatgagcagaacaaagagttcargacactttcagagcagttgtccgtgaccacctcaacatacaccatggaggtagagcggctgaagaaggagctggtgcactaccagcagagcccaggtgaggacaccagcctcaggctgcaggaggaggtggagagcctgcgcacagagctgcagagggcccactcrgagcgcaagwtcttggaggacgcccacagcagggagaaagatgagctgaggaagcgagttgcagacctggagcaagaaaatgctctcttgaaagatgagaaagaacagctcaacaaccaaatcctgtgccagtctaaagatgaatttgcccagaastctgtgaaggaaaatctcatgaagaaagaactggaggaggagcgatcccggtaccagaaccttgtgaaggaatattcacagtkggagcagagatacgacaaccttygggatgaaatgaccatcataaaggcaaggggggygcttctgctgtgccatggcacaggtcataggcggaacccatcaaaccaaagtagcttagaatctgactccaattacccctccatctccacatctgagatcggagacactgargatgccctccagcaggtggaggaaattggcctggagaaggcagccatggacatgacrgtcttcctgaagctgcagaagagagtacgggagctggagcaggagaggaaaaagctgcaagtgcagctggagaagagagaacagcaggacagcaagaaagtccagrgagagagccctagggcagggagtaatggcagcggcccttgggctgtcttccagaggcaagagctggagtcagagaacaaaaagctgaagaatgacctgaatgagctgaggaaagccgtggccgaccaagccacgcagaataactccagccacggctccccagatagctacagcctcctgctgaaccagctcaagctggcccacgaggagctcgaggtgcgcaaggaggaggtgctcatcctcaggacccagatcgtgagcgccgaccagcggcgactcgccggcaggaacgcggtaacaagatggcggcccgcggtggggctgccgaggggtgaccctagtgaaaagcatgttgaccaggaggatgccattgaggcctatcacggggtctgccagacaaacaggctgctggaggctcagctgcaggcccagagcctggagcatgaggaggaggtggagcatctcaargctcagctcgaggccctgaaggaggagatggacaaacagcagcagaccttctgccagacgctactgctctccccagaggcccaggtggaattcggcgttcagcaggaaatatcccggctgaccaacgagaatctggtgggtagccatgtctagattttacccccaccatcccaggccgggctgatgtctgttctcacactgcttcctctgcttccaggaccttaaagaactggtagaaaagctggaaaagaatgagaggaagctcaaaaagcaactgaagatttacatgaagaaagcccaggacctagaagctgcccaggcattggcccagagtgagaggaagcgccatgagctcaacaggcaggtcacggtccagcggaaagagaaggatttccagggcatgctggagtaccacaaagaggacgaggccctcctcatccggaacctggtgacagacttraagccccagatgctgtcgggcacagtgccctgtctccccgcctacatcctctacatgtgcatccggcacgcggactacaccaacgacgatctcaaggtgcactccctgctgacctccaccatcaacggcattaagaaagtcctgaaaaagcacaatgatgactttgagatgacgtcattctggttatccaacacctgccgccttcttcactgtctgaagcagtacagcggggatgagggcttcatgactcagaacactgcaaagcagaatgaacactgtcttaagaattttgacctcaccgaataccgtcaggtgctgagtgacctttccattcagatctaccagcagctcattaaaattgccgagggcgtgttacagccgatgatagtttctgccatgttggaaaatgagagcattcagggtctatctggtgtgaagcccaccggctaccggaagcgctcctccagcatggcagatggggataactcatactgcctggaagctatcatccgccagatgaatgcctttcatacagtcatgtgtgaccagggcttggaccctgagatcatcctgcaggtattcaaacagctcttctacatgatcaacgcagtgactcttaacaacctgctcttgcggaaggacgtctgctcttggagcacaggcatgcaactcaggtacaatataagtcagcttgaggagtggcttcggggaagaaaccttcaccagagtggagcagttcagaccatggaacctctgatccaagcagcccagctcctgcaattaaagaagaaaacccaggaggacgcagaggctatctgctccctgtgtacctccctcagcacccagcagattgtcaaaattttaaacctttatactcccctgaatgaatttgaagaacgggtaacagtggcctttatacgaacaatccaggcacaactacaagagcggaatgaccctcagcaactgctattagatgccaagcamatgtttcctgttttgtttccatttmatccatcttctctaaccatggastcaatccacatcccagcrtgtctcaatctggarttcctcaatgaagtctgaagaygcatgtttccagcattagtytgattcccaatgtgtgtttgtagttgctgctaagcgaacgccctttggagcttacggaggccttctgaaagacttcactgctactgacttgtctgaatttgctgccaaggctgccttgtctgctggcaaagtctcacctgaaacagttgacagtgtgattatgggcaatgtcctgcagagttcttcagatgctatatatttggcaaggcatgttggtttgcgtgtgggaatcccaaaggagaccccagctctcacgattaataggctctgtggttctggttttcagtccattgtgaatggatgtcaggaaatttgtgttaaagaagctgargttgttttatgtggaggaaccgaaagcatgagccaagctccctactgtgtcagaaatgtgcgttttggaaccaagcttggatcagatatcaagctggaagattctttatgggtatcattaacagatcagcatgtccagctccccatggcaatgactgcagagaatcttgctgtaaaacacaaaataagcagagaagaatgtgacaaatatgccctgcagtcacagcagagatggaaagctgctaatgatgctggctactttaatgatgaaatggcaccaattgaagtgaagacaaagaaaggaaaacagacaatgcaggtagacgagcatgctcggccccaaaccaccctggaacagttacagaaacttcctccagtattcaagaaagatggaactgttactgcagggaatgcatcgggtgtagctgatggtgctggagctgttatcatagctagtgaagatgctgttaagaaacataacttcacaccactggcaagaattgtgggctactttgtatctggatgtgatccctctatcatgggtattggtcctgtccctgctatcagtggggcactgaagaaagcaggactgagtcttaaggacatggatttggtagaggtgaatgaagcttttgctccccagtacttggctgttgagaggagtttggatcttgacataagtaaaaccaatgtgaatggaggagccattgctttgggtcacccactgggaggatctggtcactgctttctttttcaggcgtcgaggtggaaaatatgccgttggatcagcttgcattggaggtggccaaggtattgctgtcatcattcagagcacagcctgaagagaccagtgagctcactgtgacccatccttactctacttggccaggccacagtaaaacaagtgaccttcagagcagctgccacaactggccatgycctgccattgaaacagtgattaagtttgatcaagccatggtgayacaaaaatgcattgatcatgaataggagcccatgctagaagtacattctctcagatttgaaccagtgaaatatgatgtatttctgagctaaaactcaactatagaagacatyaaaagaaatcgtattcttgccaagtaaccaccacttctgccttagataatatgattataaggaaatcaaataaatgttgccttaacttcagttaatattttcctgtcatttatatttttaaaaattttaaattgtgataagatacacattacataaactttaccatcttaacccttttttagcgtacaattcactggtattaagtacattcacatttttatacaaacatccccactttttatcaacagaactttttcagtcaccacacatggaaacaataactcctgattctcccatcccccatcccctgacaaccaccagtgtattttgtttctataaatttgatgactcgaggtacctcataagtgaaattataaatatctgtcctt

SEQ ID NO: 2327 - DNA, 9344 bp, Homo sapiens
tagagacagggtttcaccatgttagccaggatggcctcgaactcctgacctcatgactcaccacctcggcctcccagagtgctgggattacaggcatgagccaccacgcctggtctgtgtgtgcttgtgaattcttaaaggatgtgtgtaagggagtgatctaggggcactgcacccagtgggaactcgggagagtggccagttgtctgcaccactctcgctctaggccataaatgaaagtatgtgccctgttagaattgctttcttcctcctgctttcaggatgtttgcaggtgtcggggagggcagactatttttacactgttcctctgcgtttatccattaaagtaggagagatgctcccagtgaggctcaggcccttgtcakacagagtccctggacggtagcagagcctttccmtggccaatgacttatcagagcttttytccttccagagatgagaagaatcagtccatcatagtcagtggggagtctggagccgggaagacggtatcagccaagtatgccatgcgctatttcgccaccgttggtggctcggccagtgaaaccaacatcgaagagaaggtgctggcatccagtcccatcatggaggtaaagccttctagaaagccctctttttttttcatacctttgtctgtctggtctgtgcaggccattggaaatgccaagaccacccgcaatgacaacagcagccgttttggcaagtacatccagattggctttgacaaaaggtaccacatcatcggggccaacatgaggacttacctcttggagaagtccagagtggtcttccaggcagatgatgagaggaattaccacatcttttaccagctctgtgctgctgccggtcttccagaatttaaagagcttgcactaatcttctttggtggacactgtaaaaataatcaaatgagatactttgaaagtgcctcatgccttatttcctcgcctcccacagcaagtgcagaggactttttctatacatcacagggaggagacacttccatcgagggtgtkgacgatgctgaggactttgagaakactcgacaagccttcacactcctcggagtgaaagagtcccatcagatgagcatttttaagataattgcttctatcttgcaccttggaagtgtggcgattcaggctgagcgtgatggtgattcctgtagtatatcagatgtatacctaagcaacttctgccgactgctaggggtggagcacagtcagatggagcactggctgtgtcatcgcaagctggtcaccacctyggagacctacgtcaagaccatgtccctgcagcaggtgatcaatgcgcgcaacgccctggcgaagcacatctatgcccagttgttcggctggattgtggagcacatcaacaaggccctgcacacctccctcaagcagcactccttcatcggggtcctggacatctatgggtttgagacatttgaggtaaacagctttgagcagttctgtatcaactatgcaaatgaaaagctccagcagcagttcaactcgcatgttttcaaactggagcaagaagaatacatgaaggaacagatcccttggaccctgattgatttttatgataaccaaccttgtatcgacctcattgaagccaagctgggtatcttggacctgttggatgaagaatgtaaggtccccaaaggaactgaccagaactgggctcagaagctctatgaccggcactccagcagccagcacttccagaagccccgcatgtccaacacggccttcatcatcgtccactttgcagacaaggtggagtacctctctgatggttttctggagaaaaacagagacacggtgtatgaagagcagatcaatatcctgaaggccagcaagttcccactagtggctgacttgtttcatgatgacaaggaccytgttcctgccaccacccctgggaaggggtcatcttcgaagatcagcgtccgttctgccagaccccccatgaaagtctccaacaaggagcacaagaaaaccgttggccaccagttccgtacctccctgcatctgctcatggagaccctgaatgccacgacacctcactatgtccgytgcatcaagcccaacgatgagaagctcccctttcactttgacccaaagagagcagtgcagcaactcagagcctgsggggtrttggaracgattcgaatcagtgcagctggctacccatccaggtgggcctaccatgactttttcaaccggtatcgggtgctggtcaagaagagagagctcgccaacacagacaaaaaggccatctgcaggtctgtcctggagaacctcatcaaggaccccgacaagttccagtttggccgcaccaagatcttctttcgagcaggccaggtggcctacctggagaagctgcgggctgacaagttccggacagccaccatcatgatccagaaaactgtccggggatggctgcagaasgtgaaatatcacaggctgaagggggctaccttaaccctgcagaggtactgccggggacacctggcccgcaggctggctgagcacctgcggaggatcagagcggctgtggtgctccagaaacattaccgcatgcagagggcccgccaggcctaccagagggtccgcagagctgccgttgttatccaggccttcacccgggccatgtttgtgcggagaacctaccgccaggtcctcatggagcacaaggccaccaccatccagaagcacgtgcggggctggatggcacgcaggcacttccagcggctgcgggatgcagccattgtcatccagtgtgccttccggatgctcaaggccaggcgggagctgaaggccctcaggattgaggcccgctcagcagagcatctgaaacrtctcaacgtgggcatggagaacaaggtggtccagctgcagcggaagatcgatgagcagaacaaagagttcargacactttcagagcagttgtccgtgaccacctcaacatacaccatggaggtagagcggctgaagaaggagctggtgcactaccagcagagcccaggtgaggacaccagcctcaggctgcaggaggaggtggagagcctgcgcacagagctgcagagggcccactcrgagcgcaagwtcttggaggacgcccacagcagggagaaagatgagctgaggaagcgagttgcagacctggagcaagaaaatgctctcttgaaagatgagaaagaacagctcaacaaccaaatcctgtgccagtctaaagatgaatttgcccagaastctgtgaaggaaaatctcatgaagaaagaactggaggaggagcgatcccggtaccagaaccttgtgaaggaatattcacagtkggagcagagatacgacaaccttygggatgaaatgaccatcataaagcaaactccaggtcataggcggaacccatcaaaccaaagtagcttagaatctgactccaattacccctccatctccacatctgagatcggagacactgargatgccctccagcaggtggaggaaattggcctggagaaggcagccatggacatgacrgtcttcctgaagctgcagaagagagtacgggagctggagcaggagaggaaaaagctgcaagtgcagctggagaagagagaacagcaggacagcaagaaagtccaggcggaaccaccacagactgacatagatttggacccgaatgcagatctggcctayaatagtctgaagaggcaagagctggagtcagagaacaaaaagctgaagaatgacctgaatgagctgaggaaagccgtggccgaccaagccacgcagaataactccagccacggctccccagatagctacagcctcctgctgaaccagctcaagctggcccacgaggagctcgaggtgcgcaaggaggaggtgctcatcctcaggacccagatcgtgagcgccgaccagcggcgactcgccggcaggaacgcggagccgaacattaatgccagatcaagttggcctaacagtgaaaagcatgttgaccaggaggatgccattgaggcctatcacggggtctgccagacaaacaggctgctggaggctcagctgcaggcccagagcctggagcatgaggaggaggtggagcatctcaargctcagctcgaggccctgaaggaggagatggacaaacagcagcagaccttctgccagacgctactgctctccccagaggcccaggtggaattcggcgttcagcaggaaatatcccggctgaccaacgagaatctggaccttaaagaactggtagaaaagctggaaaagaatgagaggaagctcaaaaagcaactgaagatttacatgaagaaagcccaggacctagaagctgcccaggcattggcccagagtgagaggaagcgccatgagctcaacaggcaggtcacggtccagcggaaagagaaggatttccagggcatgctggagtaccacaaagaggacgaggccctcctcatccggaacctggtgacagacttraagccccagatgctgtcgggcacagtgccctgtctccccgcctacatcctctacatgtgcatccggcacgcggactacaccaacgacgatctcaaggtgcactccctgctgacctccaccatcaacggcattaagaaagtcctgaaaaagcacaatgatgactttgagatgacgtcattctggttatccaacacctgccgccttcttcactgtctgaagcagtacagcggggatgagggcttcatgactcagaacactgcaaagcagaatgaacactgtcttaagaattttgacctcaccgaataccgtcaggtgctgagtgacctttccattcagatctaccagcagctcattaaaattgccgagggcgtgttacagccgatgatagtttctgccatgttggaaaatgagagcattcagggtctatctggtgtgaagcccaccggctaccggaagcgctcctccagcatggcagatggggataactcatactgcctggaagctatcatccgccagatgaatgcctttcatacagtcatgtgtgaccagggcttggaccctgagatcatcctgcaggtattcaaacagctcttctacatgatcaacgcagtgactcttaacaacctgctcttgcggaaggacgtctgctcttggagcacaggcatgcaactcaggtacaatataagtcagcttgaggagtggcttcggggaagaaaccttcaccagagtggagcagttcagaccatggaacctctgatccaagcagcccagctcctgcaattaaagaagaaaacccaggaggacgcagaggctatctgctccctgtgtacctccctcagcacccagcagattgtcaaaattttaaacctttatactcccctgaatgaatttgaagaacgggtaacagtggcctttatacgaacaatccaggcacaactacaagagcggaatgaccctcagcaactgctattagatgccaagcamatgtttcctgttttgtttccatttmatccatcttctctaaccatggastcaatccacatcccagcrtgtctcaatctggarttcctcaatgaagtctgaagaygcatgtttccagcattagtytgattcccaatgtgarcaaraaggaagtatakacagtaaagtaaattcaaggatctgttaaatctggtaaaagtmgatcaaatcagagattgacagcctgtggagggtgctgaactatacagaattagacacaactatgkcrttattttttgtacctactgctcagaataaaaacacttgaaatatggaagattttaagtttgatttcagtccaacacatatacataatttatagacaccaagcagtccccatagacatataaaaggtgtcaattctataaaaygaagctgcctagttttgatctttgcatagaactagagaatgtccaaattaaaataccaaatayatataagtcacataaattgccttcaaagggctttaacaaataatggtactaataaccatgataatggcatatactgacatttcccaaagtttgcaaaccataggtgtggttgagtttgtggtgagatgttttaagaacaaaaatatggggatgagacttctgagaaatattcccaaaatattttttaatggctgattatacacagacagtggtgtaactgacctccagaccagacattttgagtactggtttctgaagcaaaattagaagtgccagtcctcagtgtgctcaaacgcttttgtgttatcttgatttaatggaagagattattaaaatgctgctatcccaaactccaagtgagaaagatggaaaaatattttgtttctgatgctagtccatacactttccaagtcccacaaaactttcacaaaaatgtatataagctaaatattagaaacggataacaaacttgttttatttatagatgtaaaaaccaaacaartcaatatgaaagcttttaatctcttaataccattaagcttccagtaagagcatcacataatgctctactgttccagaaaccmaatagtaaaacaaactaaagttcgcacatcagatcatctgaaaaaccttcaaaaataatcagttcagggatattatacaaaagtttgggttttttttttttaagagaataaaatggcttaggtcaactttcccttttcaggttattttcaacgtttttcaaatttagcacacaaaaaattgtaaatatctctcccacaaaataaggattttaaaaaagtaattcagtaatataacaggcttagatgtttgctgctcttagaattttttttaacttgtttttggtttcttcaaaagcaagcattcaattggaaacccatattctttccacacttttttttactgtcttttctgtatttcttgatagcagtatgctgttcccataagaaaaaaatggtatttgcaaatcatggaagaacagcctctgtattacattgagaaaataagatttatccatgaattggaagtagaacagcctgccttcaccctcttttactcaaccacccaacttaaaaggctcttggaaacacagcacactccacgctaccttctgcactgtgcccttagagcacagcttcctcagttgttctctgcatctcctggggcttaggccagtcttagcctgggttaagkctgctgacattgtgttccaatcagttgtcatgggcattatcccctctacatccacattaaacatgccggcttctcttgggcatckgcagagctgtgcctttttctttcagttacagttacrtaatcactgacgtccatgacacttacccatggatccatgtgctgacttcatttagaaggccaatctaaaacaactgggtttgtggctacctctttaaagttgtttgtgaaggataatttgttttttaatgcactttagtttgaaagtgagtctcttatgtaaggaccatccttaaaagaccaaaaatgccttgttagagtgttaaggagttttgacatgcagtggttccacaaacacagtggcttactatccttatacactgtcttataccatcattctctccatctctcttggtcactactctctgctgtcactggttaatcactaggtgccaagagcttactgaataaaagcttggcaattagaataaatggggagggaaggaccttatgaatagtccatttagcctaagaaatggcagatttagttcttctcttccaaaagataaaggtatatcctggaattgtacttaaaacttacagatgactaacaaatatatactttatatgtagttaatatttagatctgtcttmtttaatacttggaggctagaagaagcatctttaggggaactatataatcttttgttagcattttctctgcattttaaaaaatcatttcaattcaaacatttatcagtgtcatgaaatcagtaatgactctttaacaattcaggtttgaactctgcattagatgtctctttaattttttaatatttaaaatttagttgacatttttttcaccaggtgcctttagcggttactaagataactgacatcagttgtttctctgaaataagtgttgctgtgggaataattttaatgttcaaggtgatatcatgggggagttttgtcttttaaaacattagaagcattttaaatattaagaatcaaatatttatagatcaaaacttgtgttttaagtattatacgggacctgtttacttatagtaaatgtgaatgtacacatgagttgttgctgaagctgacaagcatattacatacatgcattttccctgtgccctcatagttgcagttagmgttccagtacctgtaggctcacctgggaggcagattagacccaaaggtagatktttttcccctttccatgaagcatgtcagtgggagttgcttcctttgatttccctagtactaaattttaaggcttttgtaaaaacaaaacaaaactaggagcttggaacagttaaaaatcaacactgctaccatcaattcatcaaatatttacttagagctttcatacattaagattccagtaaccaataaattagaattcatttcttctgcataaagtaaattttcatacacttgacctactaagacagcaagggtgtcctaaattgaggcatttgtataatgcctgcataactaaatggtcactaaaatgggacagcatggggcaagaccttgtagttcttcacagaatatttgtggtcagtttctccaattaatttgctgcatgagccaaataaccataattcactttttatacccactggtgccataattagagaattagagggtgtagacagaggttaatgccaatgagaaacacaggacagggttttttttattataaaggtcattagatacaaaagattgtttttcaaaaaatttctaattctaacaaaggggatcaatcagaaatgaaactaagctactttctaaagtgacactgtatcagaataatccagatttgaatataacattttgccaccaactgacatttagatgaaggactgcctctctgaaagagttcagatcatattcaggggtgaatccaacaccatggaagaaagactactgatgaaaatattttcccactttgcacaaatctgtaaactacacctttgtttatagaaaaatgcttgtaatagtcactgtaatatttagctgtggataaaaatttgtggaaataaatacttttgaataaagaggtgtgccaaatctaaatgaaatttaaaactctgcagctacaggttgacaaagtttctttgtaatgctctcttgagaagct

SEQ ID NO: 2328 - DNA, 5724 bp, Homo sapiens
gtggagtacctctctgatggttttctggagaaaaacagagacacggtgtatgaagagcagatcaatatcctgaaggccagcaagtggctgacttgtttcatgatgacaaggaccytgttcctgccaccacccctgggaaggggtcatcttcgaagatcagcgtccgttctgccagaccccccatgaaagtctccaacaaggagcacaagaaaaccgttggccaccagttccgtacctccctgcatctgctcatggagaccctgaatgccacgacacctcactatgtccgytgcatcaagcccaacgatgagaagctcccctttcactttgacccaaagagagcagtgcagcaactcagagcctgsggggtrttggaracgattcgaatcagtgcagctggctacccatccaggtgggcctaccatgactttttcaaccggtatcgggtgctggtcaagaagagagagctcgccaacacagacaaaaaggccatctgcaggtctgtcctggagaacctcatcaaggaccccgacaagttccagtttggccgcaccaagatcttctttcgagcaggccaggtggcctacctggagaagctgcgggctgacaagttccggacagccaccatcatgatccagaaaactgtccggggatggctgcagaasgtgaaatatcacaggctgaagggggctaccttaaccctgcagaggtactgccggggacacctggcccgcaggctggctgagcacctgcggaggatcagagcggctgtggtgctccagaaacattaccgcatgcagagggcccgccaggcctaccagagggtccgcagagctgccgttgttatccaggccttcacccgggccatgtttgtgcggagaacctaccgccaggtcctcatggagcacaaggccaccaccatccagaagcacgtgcggggctggatggcacgcaggcacttccagcggctgcgggatgcagccattgtcatccagtgtgccttccggatgctcaaggccaggcgggagctgaaggccctcaggattgaggcccgctcagcagagcatctgaaacrtctcaacgtgggcatggagaacaaggtggtccagctgcagcggaagatcgatgagcagaacaaagagttcargacactttcagagcagttgtccgtgaccacctcaacatacaccatggaggtagagcggctgaagaaggagctggtgcactaccagcagagcccaggtgaggacaccagcctcaggctgcaggaggaggtggagagcctgcgcacagagctgcagagggcccactcrgagcgcaagwtcttggaggacgcccacagcagggagaaagatgagctgaggaagcgagttgcagacctggagcaagaaaatgctctcttgaaagatgagaaagaacagctcaacaaccaaatcctgtgccagtctaaagatgaatttgcccagaastctgtgaaggaaaatctcatgaagaaagaactggaggaggagcgatcccggtaccagaaccttgtgaaggaatattcacagtkggagcagagatacgacaaccttygggatgaaatgaccatcataaagcaaactccaggtcataggcggaacccatcaaaccaaagtagcttagaatctgactccaattacccctccatctccacatctgagatcggagacactgargatgccctccagcaggtggaggaaattggcctggagaaggcagccatggacatgacrgtcttcctgaagctgcagaagagagtacgggagctggagcaggagaggaaaaagctgcaagtgcagctggagaagagagaacagcaggacagcaagaaagtccaggcggaaccaccacagactgacatagatttggacccgaatgcagatctggcctayaatagtctgaagaggcaagagctggagtcagagaacaaaaagctgaagaatgacctgaatgagctgaggaaagccgtggccgaccaagccacgcagaataactccagccacggctccccagatagctacagcctcctgctgaaccagctcaagctggcccacgaggagctcgaggtgcgcaaggaggaggtgctcatcctcaggacccagatcgtgagcgccgaccagcggcgactcgccggcaggaacgcggagccgaacattaatgccagatcaagttggcctaacagtgaaaagcatgttgaccaggaggatgccattgaggcctatcacggggtctgccagacaaacagcaagactgaggattgggratatttaaatgaagatggagaactcggcttggcctaccaaggcctaaagcaagttgccaggctgctggaggctcagctgcaggcccagagcctggagcatgaggaggaggtggagcatctcaargctcagctcgaggccctgaaggaggagatggacaaacagcagcagaccttctgccagacgctactgctctccccagaggcccaggtggaattcggcgttcagcaggaaatatcccggctgaccaacgagaatctggaccttaaagaactggtagaaaagctggaaaagaatgagaggaagctcaaaaagcaactgaagatttacatgaagaaagcccaggacctagaagctgcccaggcattggcccagagtgagaggaagcgccatgagctcaacaggcaggtcacggtccagcggaaagagaaggatttccagggcatgctggagtaccacaaagaggacgaggccctcctcatccggaacctggtgacagacttraagccccagatgctgtcgggcacagtgccctgtctccccgcctacatcctctacatgtgcatccggcacgcggactacaccaacgacgatctcaaggtgcactccctgctgacctccaccatcaacggcattaagaaagtcctgaaaaagcacaatgatgactttgagatgacgtcattctggttatccaacacctgccgccttcttcactgtctgaagcagtacagcggggatgagggcttcatgactcagaacactgcaaagcagaatgaacactgtcttaagaattttgacctcaccgaataccgtcaggtgctgagtgacctttccattcagatctaccagcagctcattaaaattgccgagggcgtgttacagccgatgatagtttctgccatgttggaaaatgagagcattcagggtctatctggtgtgaagcccaccggctaccggaagcgctcctccagcatggcagatggggataactcatactgcctggaagctatcatccgccagatgaatgcctttcatacagtcatgtgtgaccagggcttggaccctgagatcatcctgcaggtattcaaacagctcttctacatgatcaacgcagtgactcttaacaacctgctcttgcggaaggacgtctgctcttggagcacaggcatgcaactcaggtacaatataagtcagcttgaggagtggcttcggggaagaaaccttcaccagagtggagcagttcagaccatggaacctctgatccaagcagcccagctcctgcaattaaagaagaaaacccaggaggacgcagaggctatctgctccctgtgtacctccctcagcacccagcagattgtcaaaattttaaacctttatactcccctgaatgaatttgaagaacgggtaacagtggcctttatacgaacaatccaggcacaactacaagagcggaatgaccctcagcaactgctattagatgccaagcamatgtttcctgttttgtttccatttmatccatcttctctaaccatggastcaatccacatcccagcrtgtctcaatctggarttcctcaatgaagtctgaagaygcatgtttccagcattagtytgattcccaatgtgtgtttgtagttgctgctaagcgaacgccctttggagcttacggaggccttctgaaagacttcactgctactgacttgtctgaatttgctgccaaggctgccttgtctgctggcaaagtctcacctgaaacagttgacagtgtgattatgggcaatgtcctgcagagttcttcagatgctatatatttggcaaggcatgttggtttgcgtgtgggaatcccaaaggagaccccagctctcacgattaataggctctgtggttctggttttcagtccattgtgaatggatgtcaggaaatttgtgttaaagaagctgargttgttttatgtggaggaaccgaaagcatgagccaagctccctactgtgtcagaaatgtgcgttttggaaccaagcttggatcagatatcaagctggaagattctttatgggtatcattaacagatcagcatgtccagctccccatggcaatgactgcagagaatcttgctgtaaaacacaaaataagcagagaagaatgtgacaaatatgccctgcagtcacagcagagatggaaagctgctaatgatgctggctactttaatgatgaaatggcaccaattgaagtgaagacaaagaaaggaaaacagacaatgcaggtagacgagcatgctcggccccaaaccaccctggaacagttacagaaacttcctccagtattcaagaaagatggaactgttactgcagggaatgcatcgggtgtagctgatggtgctggagctgttatcatagctagtgaagatgctgttaagaaacataacttcacaccactggcaagaattgtgggctactttgtatctggatgtgatccctctatcatgggtattggtcctgtccctgctatcagtggggcactgaagaaagcaggactgagtcttaaggacatggatttggtagaggtgaatgaagcttttgctccccagtacttggctgttgagaggagtttggatcttgacataagtaaaaccaatgtgaatggaggagccattgctttgggtcacccactgggaggatctggatcaagaattactgcacacctggttcacgaattaaggcgtcgaggtggaaaatatgccgttggatcagcttgcattggaggtggccaaggtattgctgtcatcattcagagcacagcctgaagagaccagtgagctcactgtgacccatccttactctacttggccaggccacagtaaaacaagtgaccttcagagcagctgccacaactggccatgycctgccattgaaacagtgattaagtttgatcaagccatggtgayacaaaaatgcattgatcatgaataggagcccatgctagaagtacattctctcagatttgaaccagtgaaatatgatgtatttctgagctaaaactcaactatagaagacatyaaaagaaatcgtattcttgccaagtaaccaccacttctgccttagataatatgattataaggaaatcaaataaatgttgccttaacttcagttaatattttcctgtcatttatatttttaaaaattttaaattgtgataagatacacattacataaactttaccatcttaacccttttttagcgtacaattcactggtattaagtacattcacatttttatacaaacatccccactttttatcaacagaactttttcagtcaccacacatggaaacaataactcctgattctcccatcccccatcccctgacaaccaccagtgtattttgtttctataaatttgatgactcgaggtacctcataagtgaaattataaatatctgtcctt

SEQ ID NO: 2329 - DNA, 2417 bp, Homo sapiens
tacccaaaaccggtccgggtccagctcggcggcccaagcctctgcccagcggactgcgcacccgcccgccccagccaatcccgccgccgccgccgcgccccgcccacaggacgttcggtcccgcccccagctggcggccgcggccgcccgcgcgccaagttcctcagcccttggctcctgcccagtgtttagggtgttggcggagacaaaggggaagagtcatcgcctgtcggggctaggatatgatgggtgagaggtgtcaaaccaaattctctcggkttggaaacggagaaaatctaaaaatgaggatgtgaggaaagagtccgctctcaaggcgcgttgtggtctatccgagccccgtcccctgggctccctcgggctggggtgaggcgggcagcgctacgcgtggggtaggaccatcttacgctgggaccccgccaaggagccccaggaagtaggtgaaagggcaggggcgtggctctcggggcgccacccacgctcttgaaatctgggtgattgcgagcggccgctcagcgtcccccacaccacagacccgcgccgccgacgacccagcagccgccatggctctgctccgaggtgtgtttgtagttgctgctaagcgaacgccctttggagcttacggaggccttctgaaagacttcactgctactgacttgtctgaatttgctgccaaggctgccttgtctgctggcaaagtctcacctgaaacagttgacagtgtgattatgggcaatgtcctgcagagttcttcagatgctatatatttggcaaggcatgttggtttgcgtgtgggaatcccaaaggagaccccagctctcacgattaataggctctgtggttctggttttcagtccattgtgaatggatgtcaggaaatttgtgttaaagaagctgargttgttttatgtggaggaaccgaaagcatgagccaagctccctactgtgtcagaaatgtgcgttttggaaccaagcttggatcagatatcaagctggaagattctttatgggtatcattaacagatcagcatgtccagctccccatggcaatgactgcagagaatcttgctgtaaaacacaaaataagcagagaagaatgtgacaaatatgccctgcagtcacagcagagatggaaagctgctaatgatgctggctactttaatgatgaaatggcaccaattgaagtgaagacaaagaaaggaaaacagacaatgcaggtagacgagcatgctcggccccaaaccaccctggaacagttacagaaacttcctccagtattcaagaaagatggaactgttactgcagggaatgcatcgggtgtagctgatggtgctggagctgttatcatagctagtgaagatgctgttaagaaacataacttcacaccactggcaagaattgtgggctactttgtatctggatgtgatccctctatcatgggtattggtcctgtccctgctatcagtggggcactgaagaaagcaggactgagtcttaaggacatggatttggtagaggtgaatgaagcttttgctccccagtacttggctgttgagaggagtttggatcttgacataagtaaaaccaatgtgaatggaggagccattgctttgggtcacccactgggaggatctggatcaagaattactgcacacctggttcacgaattaaggcgtcgaggtggaaaatatgccgttggatcagcttgcattggaggtggccaaggtattgctgtcatcattcagagcacagcctgaagagaccagtgagctcactgtgacccatccttactctacttggccaggccacagtaaaacaagtgaccttcagagcagctgccacaactggccatgycctgccattgaaacagtgattaagtttgatcaagccatggtgayacaaaaatgcattgatcatgaataggagcccatgctagaagtacattctctcagatttgaaccagtgaaatatgatgtatttctgagctaaaactcaactatagaagacatyaaaagaaatcgtattcttgccaagtaaccaccacttctgccttagataatatgattataaggaaatcaaataaatgttgccttaacttcagttaatattttcctgtcatttatatttttaaaaattttaaattgtgataagatacacattacataaactttaccatcttaacccttttttagcgtacaattcactggtattaagtacattcacatttttatacaaacatccccactttttatcaacagaactttttcagtcaccacacatggaaacaataactcctgattctcccatcccccatcccctgacaaccaccagtgtattttgtttctataaatttgatgactcgaggtacctcataagtgaaattataaatatctgtcctt

SEQ ID NO: 2330 - DNA, 1851 bp, Homo sapiens
atgcagtgcagttcttggtacctgcatgtaggtgtgtttgtagttgctgctaagcgaacgccctttggagcttacggaggccttctgaaagacttcactgctactgacttgtctgaatttgctgccaaggctgccttgtctgctggcaaagtctcacctgaaacagttgacagtgtgattatgggcaatgtcctgcagagttcttcagatgctatatatttggcaaggcatgttggtttgcgtgtgggaatcccaaaggagaccccagctctcacgattaataggctctgtggttctggttttcagtccattgtgaatggatgtcaggaaatttgtgttaaagaagctgargttgttttatgtggaggaaccgaaagcatgagccaagctccctactgtgtcagaaatgtgcgttttggaaccaagcttggatcagatatcaagctggaagattctttatgggtatcattaacagatcagcatgtccagctccccatggcaatgactgcagagaatcttgctgtaaaacacaaaataagcagagaagaatgtgacaaatatgccctgcagtcacagcagagatggaaagctgctaatgatgctggctactttaatgatgaaatggcaccaattgaagtgaagacaaagaaaggaaaacagacaatgcaggtagacgagcatgctcggccccaaaccaccctggaacagttacagaaacttcctccagtattcaagaaagatggaactgttactgcagggaatgcatcgggtgtagctgatggtgctggagctgttatcatagctagtgaagatgctgttaagaaacataacttcacaccactggcaagaattgtgggctactttgtatctggatgtgatccctctatcatgggtattggtcctgtccctgctatcagtggggcactgaagaaagcaggactgagtcttaaggacatggatttggtagaggtgaatgaagcttttgctccccagtacttggctgttgagaggagtttggatcttgacataagtaaaaccaatgtgaatggaggagccattgctttgggtcacccactgggaggatctggatcaagaattactgcacacctggttcacgaattaaggcgtcgaggtggaaaatatgccgttggatcagcttgcattggaggtggccaaggtattgctgtcatcattcagagcacagcctgaagagaccagtgagctcactgtgacccatccttactctacttggccaggccacagtaaaacaagtgaccttcagagcagctgccacaactggccatgycctgccattgaaacagtgattaagtttgatcaagccatggtgayacaaaaatgcattgatcatgaataggagcccatgctagaagtacattctctcagatttgaaccagtgaaatatgatgtatttctgagctaaaactcaactatagaagacatyaaaagaaatcgtattcttgccaagtaaccaccacttctgccttagataatatgattataaggaaatcaaataaatgttgccttaacttcagttaatattttcctgtcatttatatttttaaaaattttaaattgtgataagatacacattacataaactttaccatcttaacccttttttagcgtacaattcactggtattaagtacattcacatttttatacaaacatccccactttttatcaacagaactttttcagtcaccacacatggaaacaataactcctgattctcccatcccccatcccctgacaaccaccagtgtattttgtttctataaatttgatgactcgaggtacctcataagtgaaattataaatatctgtcctt

SEQ ID NO: 2331 - DNA, 2598 bp, Homo sapiens
wgccaccctatgctgcctgcccctccttcagccccygctcccatctccatccccagcacaacccccacaccccttccttcacctcctgcacagcccccaccctctgtctcctacttgcccttgcacctgcccccatcttccactccccacacctactctcatcctccccccagctcctgcttacccaaaaccggtccgggtccagctcggcggcccaagcctctgcccagcggactgcgcacccgcccgccccagccaatcccgccgccgccgccgcgccccgcccacaggacgttcggtcccgcccccagctggcggccgcggccgcccgcgcgccaagttcctcagcccttggctcctgcccagtgtttagggtgttggcggagacaaaggggaagagtcatcgcctgtcggggctaggatatgatgggtgagaggtgtcaaaccaaattctctcggkttggaaacggagaaaatctaaaaatgaggatgtgaggaaagagtccgctctcaaggcgcgttgtggtctatccgagccccgtcccctgggctccctcgggctggggtgaggcgggcagcgctacgcgtggggtaggaccatcttacgctgggaccccgccaaggagccccaggaagtaggtgaaagggcaggggcgtggctctcggggcgccacccacgctcttgaaatctgggtgattgcgagcggccgctcagcgtcccccacaccacagacccgcgccgccgacgacccagcagccgccatggctctgctccgaggtgtgtttgtagttgctgctaagcgaacgccctttggagcttacggaggccttctgaaagacttcactgctactgacttgtctgaatttgctgccaaggctgccttgtctgctggcaaagtctcacctgaaacagttgacagtgtgattatgggcaatgtcctgcagagttcttcagatgctatatatttggcaaggcatgttggtttgcgtgtgggaatcccaaaggagaccccagctctcacgattaataggctctgtggttctggttttcagtccattgtgaatggatgtcaggaaatttgtgttaaagaagctgargttgttttatgtggaggaaccgaaagcatgagccaagctccctactgtgtcagaaatgtgcgttttggaaccaagcttggatcagatatcaagctggaagattctttatgggtatcattaacagatcagcatgtccagctccccatggcaatgactgcagagaatcttgctgtaaaacacaaaataagcagagaagaatgtgacaaatatgccctgcagtcacagcagagatggaaagctgctaatgatgctggctactttaatgatgaaatggcaccaattgaagtgaagacaaagaaaggaaaacagacaatgcaggtagacgagcatgctcggccccaaaccaccctggaacagttacagaaacttcctccagtattcaagaaagatggaactgttactgcagggaatgcatcgggtgtagctgatggtgctggagctgttatcatagctagtgaagatgctgttaagaaacataacttcacaccactggcaagaattgtgggctactttgtatctggatgtgatccctctatcatgggtattggtcctgtccctgctatcagtggggcactgaagaaagcaggactgagtcttaaggacatggatttggtagaggtgaatgaagcttttgctccccagtacttggctgttgagaggagtttggatcttgacataagtaaaaccaatgtgaatggaggagccattgctttgggtcacccactgggaggatctggatcaagaattactgcacacctggttcacgaattaaggcgtcgaggtggaaaatatgccgttggatcagcttgcattggaggtggccaaggtattgctgtcatcattcagagcacagcctgaagagaccagtgagctcactgtgacccatccttactctacttggccaggccacagtaaaacaagtgaccttcagagcagctgccacaactggccatgycctgccattgaaacagtgattaagtttgatcaagccatggtgayacaaaaatgcattgatcatgaataggagcccatgctagaagtacattctctcagatttgaaccagtgaaatatgatgtatttctgagctaaaactcaactatagaagacatyaaaagaaatcgtattcttgccaagtaaccaccacttctgccttagataatatgattataaggaaatcaaataaatgttgccttaacttcagttaatattttcctgtcatttatatttttaaaaattttaaattgtgataagatacacattacataaactttaccatcttaacccttttttagcgtacaattcactggtattaagtacattcacatttttatacaaacatccccactttttatcaacagaactttttcagtcaccacacatggaaacaataactcctgattctcccatcccccatcccctgacaaccaccagtgtattttgtttctataaatttgatgactcgaggtacctcataagtgaaattataaatatctgtcctt

SEQ ID NO: 2332 - DNA, 1363 bp, Homo sapiens
cttttaaaggtctcatcttatgcagcagatgatgtctgaatcttgtgaagttgtgtgtaatttaggattctctgtatgccgacttatttcttgaaatgggagaggctgtcagtcggcgccacatgtgggctggtggctctgtggcagtggtggcggctggactccggcaccatgagcggcttcagcactgaggagcgcgccacgcccttctccctgaagtaccgagtcttcctcaaaaatgagaaaggacaatatatgtctccatttcaagatattccaatttatgcagataaggatgtgttccacgtggtagttgaagtaccactgtggtctaatgcaaaaakggaggttgctacaaaggaccctttaaaccccattaaacaagatgtgaaaaaaagaaaacttcgctatgttgcgaatttgttcccgtataaaggatatgtctggaactatggtgccatccctcagacttgggaagacccagggcacaatgataaacatactggctgttgtggtgacaatgacccaattgatgtgtgtgaaattggaagcaaggtatgtgcaagagrtgaaataattggtgtgaaagttctaggcatattggctatgattgacgaaggggaaaccgactggaaagtcattgccattaatatggatgatcctgatgcaggcaattatacygatatcagtgatgtcaaacggctgaaacccggctacttagaggctactgtggactggtttagaaggtataaggttcctgatggaaaaccagaaaatgagtttgcttttaatgcagaatttgaagataaggactttgcaattgatattattaaaagcactcatgaccattggaaagcattagtgactaagaaaatgaatggaaaaggaatcagctgcatgaacaaaactgtgtctgagagcctgttcaagtgtgatcctgatgctgccagagccattgtggatgctttaccaccaccctgtgaatctgcctgcacagtaccaacagacgtggatacgtggttccatcaccagaagaactaatgggatttctctggaatacaagctgatattgctgcatcgtgttcatctggatgtattagatgtaaaatagtagcttttcaaagctttaaatgtgtagaactcatctaagtaaattctgctgtgaccaatcccatgtactcagaacrttacccatctaaagcatttttcatatctcaactaagataactttcagcacgtgcttaaatatcaaggcagttgtcatttggaagtcacttgtgaatagatgtgcaaggggagcacatattggatgtatatgttaccatatgttaggaaataaaattattttgcttaaaaaaaaaga

SEQ ID NO: 2333 - DNA, 809 bp, Homo sapiens
tcgtggctcaataccccaagcagtacctgcaactgaggattcttcccggggagatcgcagcccatctgcatggctcaagagttcgtgaactgcaaaatccagcctgggaagctggttgtgttcatcaagcccacctgtccatactgcaggagggcccaagagatcctcagtcaattgtccaccaaacaaaggcttctggaatttgtcgatatcacagcctccaaccacactaacaagattcaagattacttgcaacagctcacaggagcgagaatggtgcctcgagtctttatyggtaaagattgtataggcggatgcagtgatctagtctctatgcaacagattggggaactgctgacgcggctaaagcagattggagctctgcagtaaccacggaatctcgtaggaaatgttcaaaaattctgtgaaaggtcgcaggacccaattggagaaatcatatgaaaagcatggttggtcttggtgtcacacggatcagaggcacaagcgcagaggctgtggtcatgcggaacactctgctatttaagatggctatccagataatcctgaacacgatgtatttatttgatttagactaccagcaaagattaaagcatgaaatgtaaaacatctgagaaaacttacagcccactataccaactgtgtatctgtgaaggagcccccacactttgaaaacttaagaatcccttatcatgaagtttgcctgttctagaattgtaagattgttaatttccttttgcagtctctagtgacgacacttaatttcttttctaataaaaacctatagatga

SEQ ID NO: 2334 - DNA, 1382 bp, Homo sapiens
tcgtggctcaataccccaagcagtacctgcaactgaggattcttcccggggagatcgcagcccatctgcatggctcaagagttcgtgaactgcaaaatccagcctgggaagctggttgtgttcatcaagcccacctgtccatactgcaggagggcccaagagatcctcagtcaattgtccaccaaacaaaggcttctggaatttgtcgatatcacagcctccaaccacactaacaagattcaagattacttgcaacagctcacaggagcgagaatggtgcctcgagtctttatyggtaaagattgtataggcggatgcagtgatctagtctctatgcaacagattggggaactgctgacgcggctaaagcagattggagctctgcagtaaccacggagcaggccccatgctgacgtccctcctcaagagctggatggcattacatatgatgacagcacttcctggtggatgaatttggggacacatacagcttttttcctcttttggctccgtatttaaaagtggaccaacttgatcttaaccacagggccaagaaggttgatgggccatcttgattttcttctggatgtggtctttggttttcagaagactgtgacaagttctggcccaggattcgctcactgatcctcacttgttctctttggcacgcgtttcttactgttctccatgtgtcggcatgtctctacctctaagccagcgtttttcaactatggttatcctgacttcttctccacaatgatgaatccatagttggttatctgctactgcccgttagctgaaatcattttgttgcttgactttctggagtttgtattatgaaatcagtgggtattctgaatgtgttctttcaaactacatgcatctctccactcaactccacgccatcgcatcccatcccaccttgaaaatcactgctctgaaccagtgttctccaccttgtcctccacagatctcgtaggaaatgttcaaaaattctgtgaaaggtcgcaggacccaattggagaaatcatatgaaaagcatggttggtcttggtgtcacacggatcagaggcacaagcgcagaggctgtggtcatgcggaacactctgctatttaagatggctatccagataatcctgaacacgatgtatttatttgatttagactaccagcaaagattaaagcatgaaatgtaaaacatctgagaaaacttacagcccactataccaactgtgtatctgtgaaggagcccccacactttgaaaacttaagaatcccttatcatgaagtttgcctgttctagaattgtaagattgttaatttccttttgcagtctctagtgacgacacttaatttcttttctaataaaaacctatagatga

SEQ ID NO: 2335 - DNA, 3048 bp, Homo sapiens
aattaaattatgagaattaaaaagacaacattgagcagagatgaaaaaggaagggaggaaaaggtggaaaagaaaagaagacaagaagcgagtagtggtctctaacttgctctttgaaggatggtctcacaaagagaaccccaacagacatcatcgtgggaatcaaatcaagaccagcaagtacaccgtgttgtccttcgtccccaaaaacatttttgagcagctacaccggtttgccaatctctattttgtgggcattgcggttctgaattttatccctgtggtcaatgctttccagcctgaggtgagcatgataccaatctgtgttatcctggcagtcactgccatcaaggacgcttgggaagacctccggaggtacaaatcggataaagtcatcaataaccgagagtgcctcatctacagcagaaaagagcagacctatgtgcagaagtgctggaaggatgtgcgygtgggagacttcatccaaatgaaatgcaatgagattgtcccagcagacatactcctccttttttcctctgaccccaatgggatatgccatctggaaactgccagcttggatggagagacaaacctcaagcaaagaygtgtcgtgaagggcttctcacagcaggaggtacagttcgaaccagagcttttccacaataccatcgtgtgtgagaaacccaacaaccacctcaacaaatttaagggttatatggagcatcctgaccagaccaggactggctttggctgtgagagtcttctgcttcgaggctgcaccatcagaaacacckagatggctgttggcattgtcatctatgcaggccatgagacgaaagccatgctgaacaacagtggcccccggtacaaacgcagcaagattgagcggcgcatgaatatagacatcttcttctgcattgggatcctcatcctcatgtgccttattggagctgtaggtcacagcatctggaatgggacctttgaagaacaccctcccttcgatgtgccagatgccaatggcagcttccttcccagtgcccttgggggcttctacatgttcctcacaatgatcatcctgctccaggtgctgatccccatctctttgtatgtctccattgagctggtgaagctcgggcaagtgttcttcttgagcaatgaccttgacctgtatgatgaagagaccgatttatccattcaatgtcgagccctcaacatcgcagaggacttgggccagatccagtacatcttctccgataagacggggaccctgacagagaacaagatggtgttccgacgttgcaccatcatgggcagcgagtattctcaccaagaaaatggtatagaagctcccaagggctccatccctctttctaaaaggaaataccctgctctcctaagaaacgaggagataaaagacattctcctggctctcttagaggctgtgtggcatttccacaagttgcttcctgtatccctgtggtcttccttgtcacagatcagggctgttccaattacttgtaaactttcatttgtttacaaaggttagaagttatcccatatgtggttccccttcagctgatctttgtctggtgccagacaaagcactttatgagacgagttttttatctgtcagcaatggattggagacatttcccaattgtgtgccagtcacacaaccaaggcttaggaatttctcaggccaccttacctgacatgtcagggcaggtctgtgtctaggtgcatggtcagatttaatacatccagaagatgtcttctattctaacagatctcttagcttgtcactgaggcaaagttttgatttaggagatagggctataaaatgcctggactgttaccttgcatggactgaatatgactcataaaactgatctgattccttcagccatcatctgcccaacttcgttcccctccccaccccccsacaacacacacacacactttctaagaaaagaaaagaaattcttttttttcaatactttaagttctgggatacatgtgcagaatgtgcaggtttgttacataggtatacatgtgtcatggtggtttgcagcacccaccaacccatcatctaccttaggtatttctcctaatgctatccctcccctagcccccaaccccccgatgggctccagtgtgtgatgttcccctccatgtccatgtgttctcattgttcaattcccacttatgagtgagaacatgcagtatttggttttctgttcttgtgttagtttgctgatggtttcctgttcatcygtgtccctgcaaaggacatgaactcatccttttttatggctgcataatattccatggtgtatatgtgccacattttctttatccagtctatcgctgatgggcactggggttggttccaagtctttgctattgtgaacagtgctgcaataaacttacatgtgcatgtgtctttagtagaatgatttataatcctttgggtatatacccagtaatgggattgctggtcaaatggtatttctggttctagatccttgaggaatctttgtcttccacaatggttgaactaatttgtactcccaccaacagtgtaaaagtattcctgtttctctacatcctcttcagcatctgttgtgtcctgacattttaatgatcactattctcactggygtgagatgttatctcattgtggttttgatttgcatttctctaatgaccagtaatgatgagctttttttcatatgtttgttggctgcataaatgtcttcttttgagaagtgtctgttcatatccttcacccattttttgaagaaaacaaactcttaagagagmagtattcattcttttgagtgtgagggatggagaaagagaaagatggagagagtattataagcagctgtatcccctttgccatggtgatagcagaccattcacatgggagcttctggtctctttgtaataataataagagccacattaccagtacttagagtatgctagttattttaacacattgtatcattaaatcttcaaaacatccctatgagttagaamcct

SEQ ID NO: 2336 - DNA, 4339 bp, Homo sapiens
aattaaattatgagaattaaaaagacaacattgagcagagatgaaaaaggaagggaggaaaaggtggaaaagaaaagaagacaagaagcgagtagtggtctctaacttgctctttgaaggatggtctcacaaagagaaccccaacagacatcatcgtgggaatcaaatcaagaccagcaagtacaccgtgttgtccttcgtccccaaaaacatttttgagcagctacaccggtttgccaatctctattttgtgggcattgcggttctgaattttatccctgtggtcaatgctttccagcctgaggtgagcatgataccaatctgtgttatcctggcagtcactgccatcaaggacgcttgggaagacctccggaggtacaaatcggataaagtcatcaataaccgagagtgcctcatctacagcagaaaagagcagacctatgtgcagaagtgctggaaggatgtgcgygtgggagacttcatccaaatgaaatgcaatgagattgtcccagcagacatactcctccttttttcctctgaccccaatgggatatgccatctggaaactgccagcttggatggagagacaaacctcaagcaaagaygtgtcgtgaagggcttctcacagcaggaggtacagttcgaaccagagcttttccacaataccatcgtgtgtgagaaacccaacaaccacctcaacaaatttaagggttatatggagcatcctgaccagaccaggactggctttggctgtgagagtcttctgcttcgaggctgcaccatcagaaacacckagatggctgttggcattgtcatctatgcaggccatgagacgaaagccatgctgaacaacagtggcccccggtacaaacgcagcaagattgagcggcgcatgaatatagacatcttcttctgcattgggatcctcatcctcatgtgccttattggagctgtaggtcacagcatctggaatgggacctttgaagaacaccctcccttcgatgtgccagatgccaatggcagcttccttcccagtgcccttgggggcttctacatgttcctcacaatgatcatcctgctccaggtgctgatccccatctctttgtatgtctccattgagctggtgaagctcgggcaagtgttcttcttgagcaatgaccttgacctgtatgatgaagagaccgatttatccattcaatgtcgagccctcaacatcgcagaggacttgggccagatccagtacatcttctccgataagacggggaccctgacagagaacaagatggtgttccgacgttgcaccatcatgggcagcgagtattctcaccaagaaaatgctaagcgactggagaccccaaaggagctggactcagatggtgaagagtggacccaataccaatgcctgtccttctcggctagatgggcccaggatccagcaactatgagaagccaaaaaggtgctcagcctctgaggaggagccagagtgcccgggtgcccatccagggccactaccggcaaaggtctatggggcaccgtgaaagctcacagcctcctgtggccttcagcagctccatagaaaaagatgtaactccagataaaaacctactgaccaaggttcgagatgctgccctgtggttggagaccttgtcagacagcagacctgccaaggcttccctctccaccacctcctccattgctgatttcttccttgccttaaccatctgcaactctgtcatggtgtccacaaccaccgagcccaggcagagggtcaccatcaaaccctcaagcaaggctctggggacgtccctggagaagattcagcagctcttccagaagttgaagctattgagcctcagccagtcattctcatccactgcaccctctgacacagacctcggggagagcttaggggccaacgtggccaccacagactcggatgagagagatgatgcatctgtgtgcagtrgaggtgactccactgatgacggtggctacaggagcagcatgtgggaccagggcgacatcctggagtctgggtcaggcacttccttggaggaggcattggaggccccagccacagacctggccaggcctgagttctgttacgaggctgagagccctgatgaggccgccctggtgcacgctgcccatgcctacagcttcacactagtgtcccggacacctgagcaggtgactgtgcgcctgccccagggcacctgcctcaccttcagcctcctctgcaccctgggctttgactctgtcaggaagagaatgtctgtggttgtgaggcacccactgactggcgagattgttgtctacaccaagggtgctgactcggtcatcatggacctgctggaagacccagcctgcgtacctgacattaatatggaaaagaagctgagaaaaatccgagccyggacccaaaagcatctagacttgtatgcaagagatggcctgcgcacactatgcattgccaagaaggttgtaagcgaagaggacttccggagatgggccagtttccggcgtgaggctgaggcatccctcgacaamcgagatgagcttctcatggaaactgcacagcatctggagaatcaactcaccttacttggagccactgggatcgaagaccggctgcaggaaggagttccagatacgattgccactctgcgggaggctgggatccagctctgggtcctgactggagataagcaggagacagcggtcaacattgcccattcctgcagactgttaaatcagaccgacactgtttataccatcaatacagagaatcaggagacctgtgaatccatcctcaattgtgcattggaagagctaaagcaatttcgtgaactacagaagccagaccrcaagctctttggattccgcttaccttccaagacaccatccatcacctcagaagctgtggttccagaagctggattggtcatcgatgggaagacattgaatgccatcttccagggaaagctagagaagaagtttctggaattgacccagtattgtcggtccgtcctgtgctgccgctccacgccactccagaagagtatgatagtcaagctggtgcgagacaagttgcgcgtcatgaccctttccataggtgatggagcaaatgatgtaagcatgattcaagctgctgatattggaattggaatatctggacaggaaggcatgcaggctgtcatgtccagcgactttgccatcacccgctttaagcatctcaagaagttgctgctcgtgcatggccactggtgttactcgcgcctggccaggatggtggtgtactacctctacaagaacgtgtgctacgtcaacctgctcttctggtatcagttcttctgtggtttctccagctccaccatgattgattactggcagatgrtattcttcaatctcttctttacctccttgcctcctcttgtctttggagtccttgacaaagacatctctgcagaaacactcctggcattgcctgagctatacaagagtggccagaactctgagtgctataacctgtcgactttctggatttctatggtggatgcattctaccagagcctcatctgtttctttatcccttacctggcctataagggctctgatatagatgtctttacctttgggacaccaatcaacaccatctccctcaccacaatccttttgcaccaggcaatggaaatgaagacatggaccattttccacggagtcgtgctcctcggcagcttcctgatgtactttctggtatccctcctgtacaatgccacctgcgtcatctgcaacagccccaccaatccctattgggtgatggaaggccagctctcaaaccccactttctacctcgtctgctttctcacaccagttgttgctcttctcccaagatactttttcctgtctctgcaaggaacttgtgggaagtctctaatctcaaaagctcagaaaattgacaaactccccccagacaaaagaaacctggaaatccagagttggagaagcagacagaggcctgcccctgtccccgaagtggctcgaccmacycaccacccagtgtcatctatcacaggacaggacttcagtgccagcaccccaaaragctctaaccctcccaagaggaagcatgtggaagagtcagtrctccacgaacagrgatgtggcacggagtgcatgagggatgactcatgctcaggggactcctcagctcaaytctcatccggggagcacctgctgggacctaacaggataatggcctactcaagaggacagactgatatgtgccggtgctcaaagaggagcagccatcgccgatcccagagttcactgaccata

SEQ ID NO: 2337 - DNA, 4733 bp, Homo sapiens
atggaaacctaaggaaaaacgtctgacctgcggaggtagtttgggtggctacttggtgttggacttggctaaataaataccagaggcagataaaacaagcgaggggcctaggtcaagagttccaagtttgttcctcgataaaaaacgacaaacgcggtcgggggcggtgatgcccgcctgcagtcccaacactttaggaagctgaggcggggggatcgcaggagttcgagaccagtctgggcaacataatgagaccatccccaccacctcccgtccttaattttttttaataaaaaaaatctttaagtgagaaatgcatctgtaatgtccttattaaccaaaaacgcctaagggataaagaagcacacgctccctagccaacgctagaggaacacaccccgagagctggtgctgtmggacccagttttcccgcgaaaacgctgccgcgcagggggtcagaccatctggaccaaggggggccgagcgaggcctacttctggtttacgcacgggcgctgaaagaagcggcactgtccccccctgccgatgcgcacgcgccggcggggagggcgtggcgcggagccgacgggaacgtccgcgctgcggagcagggcagggaagccgggaggcgggcccggcccgagcttgtccttgtcgcgcaggtactccgagcactatgtcgtccccggcgtcgaccccgagccgccgcggcagccggcctcggagtgaggatgccaggtcatctccctctcagagacgtagaggcgaggattccacctccacgggggagttgcagccgatgccaacctcgcctggagtggacctgcagagccctgctgcgcaggacgtgctgttttccagccctccccaaatgcattcttcagctatccctcttgactttgatgttagttcaccactgacatacggcactcccagctctcgggtagagggaaccccaagaagtggtgttaggggcacacctgtgagacagaggcctgacctgggctctgcacagaagggcctgcaagtggatctgcagtctgacggggcagcagcagaagatatagtggcaagtgagcagtctctaggccaaaaacttgtgatctggggaacagatgtaaatgtggcagcatgcraagaaaactttcagagatttcttcagcgttttattgaccctctggctaaagaagaagaaaatgttggcatagatattactgaacctctatacatgcaacgacttggggagattaatgttattggtgagccatttttaaatgtgaactgtgaacacatcaaatcatttgacaaaaatttgtacagacaactcatctcttacccacaggaagttattccaacttttgacatggctgtcaatgaaatcttctttgaccgttaccctgactcaatcttagaacatcagattcaagtaagaccattcaacgcattgaagactaagaatatgagaaacctgaatccagaagacattgaccagctcatcaccatcagcggcatggtgatcaggacatcccagctgattcccgagatgcaggaggccttcttccagtgccaagtgtgtgcccacacgacccgggtggagatggaccgcggccgcattgcagagcccagtgtgtgcgggcgctgccacaccacccacagcatggcactcatccacaaccgctccctcttctctgacaagcagatgatcaagcttcaggagtctccggaagacatgcctgcagggcagacaccacacacagttatcctgtttgctcacaatgatctcgttgacaaggtccagcctggggacagagtgaatgttacaggcatctatcgagctgtgcctattcgagtcartccaagagtgagtaatgtgaagtctgtctacaaaacccacattgatgtcattcattatcggaaaacggatgcaaaacgtctgcatggccttgatgaagaagcagaacagaaacttttttcagagaaacgtgtggaattgcttaaggaactttccaggaaaccagacatttatgagaggcttgcttcagccttggctccaagcatttatgaacatgaagatataaagaagggaattttgcttcagctctttggcgggacaaggaaggattttagtcacactggaaggggcaaatttcgggctgagatcaacatcttgctgtgtggcgaccctggtaccagcaagtcccagctgctgcagtacgtgtacaacctygtccccaggggccagtacacgtctgggaagggctccagtgcagttggcctcactgcgtacgtaatgaaagaccctgagacaaggcagctggtcctgcagacaggtgctcttgtcctgagtgacaacggcatctgctgtatcgatgagttcgacaagatgaatgaaagtacaagatcggtattgcatgaagtcatggaacagcagactctgtccattgcaaaggctgggatcatctgtcagctcaatgcgcgcacctctgtcctggcagcagcaaatcccattgagtctcagtggaatcctaaaaaaacaaccattgaaaacatccagctgcctcatactttattatcaaggtttgatttgatcttcctcwtgctggaccctcaggacgaagcctatgacaggcgtctggctcaccacctggtcgcactgtactaccagagcgaggagcaggcagaggaggagctcctggacatggcggtgctaaaggactacattgcctacgcgcacagcaccatcatgccgcggctaagtgaggaagccagccaggctctcatcgaggcttatgtagacatgaggaagattggcagtagccggggaatggtttctgcataccctcgacagctagagtcattaatccgcttagcagaagcccatgctaaagtaagattgtctaacaaagttgaagccattgatgtggaagaggccaaacgcctccatcgggaagctctgaagcagtctgcaactgatccccggactggcatcgtggacatatctattcttactacggggatgagtgccacctctcgtaaacggaaagaagaattagctgaagcattgaaaaagcttattttatctaagggcaaaacaccagctctaaaataccagcaactttttgaagatattcggggacaatctgacatagcaattactaaagatatgtttgaagaagcactgcgtgccctggcagatgatgatttcctgacagtgactgggaagacygtgcgcttgctctgaagccttgtgagcaaggaaggctccctgcatctcagttggccgccatcagtgtaaatagagcttaaagtcatggtttggctgcataaaaattttctaacttgggttcaatatttgtagtgaagtatctgttttcatttttttcacgttataaataaaaatactatgctggccgggcgcggtggctcacacctgtaatcccagcactttgggaggccaatgtgggtggatcatgaggtcaggagttcaagaccagcctagccaagatggtgaaaccccgtctctagtaaagataacaaaaaattagctgggcttgatggcatgcgcctgtaatcccagctactcgggaggttgaggcaggagaatcgcttaaacccaggcggcagaggttgcagtgagccaagatcgcgccactgcactccagcctcagcaatagagtgagactgtctcaaaaaaaaaaaaaaaaaaaaacctgccaattttcaaacataccgtagagattattttcaggtgccattttatagtatagcagcagggcttttactctgtgtatgcacagatgcagtctggggcatggtttgtgtgctggactttctcatggccatcatcagtatgcttatggatttgatgacaggcatagcctgggcatatcacctcattggtaaagggctagagcctttcttttttatggcacttctttttttgagatagggtcttactctgtcaccctggctagagtacactggtacaatcacggctcaatgtaggcttaacctcctgggctcaggtgtatgtcactatgcccrgctactttttgtattttttggtagagacggcttcgccacgttgcccaggctgcaagcgatatgcctrggctcaagcgatctgcccacctcaacttccggaagtgctgagattacaggtgtgagccactgcacccagcctttgttttattttttattttttgagaggtatgattctttctagagattttttctcatggctactattagatcaggaatgggtgattggagattattagattctaggttaacttctaccactttaccctaatacataaaactttttcctaaataaatgatggaaggaataatacttggttacctggcattatttttcagtaagaaaaaagctttactaaccactacatttatggaaatttgtaggggtaagtattttataggtcataaaaaacaccataatataacgaatctcattttctttaaatgtgaattaaatcctaacagtcatctttataaaatgaccataggctaaaatcttacgtgtaagtactactacaataaataatttctgaaacctttaaatcatatgagttgggccttttttataacttggaatcaacattttttaataaagtatccatagaaaatgatagatctggccgggcgcggtggctcacacctgtaatcccagcactttgggaggccgagatggctggatcatgaggtcaggag

SEQ ID NO: 2338 - DNA, 3259 bp, Homo sapiens
tgagaagggacaaactccaattgctccagttcaaactggtcctggcctggtcaaacggaggagacagagcagtgattcacagcaggacgtggtacttgcagactgaccgtcctctcaggactcactagggtctcttctctgacgagatgatacctggaattgggacactcacccaggacacactatggtgcttcagccaagtgaaaggcactatcgagattggaaccacagaaggctcggaccatggtgcagtcccactggctcccctgcccccctctcctgtgagactggctgcggggagggatcatggatacttgtctgccggcttctggttcccacgcaagtaagcctgctgtcaatggaggaggacattgatacccgcaaaatcaacaacagtttcctgcgcgaccacagctatgcgaccgaagctgacattatctctacggtagaattcaaccacacgggagaattactagcgacaggggacaaggggggtcgggttgtaatatttcaacgagagcaggagagtaaaaatcaggttcatcgtaggggtgaatacaatgtttacagcacattccagagccatgaacccgagttcgattacctgaagagtttagaaatagaagaaaaaatcaataaaataagatggctcccccagcagaatgcagcttactttcttctgtctactaatgataaaactgtgaagctgtggaaagtcagcgagcgtgataagaggccagaaggctacaatctgaaagatgaggagggccggctccgggatcctgccaccatcacaaccctgcgggtgcctgtcctgagacccatggacctgatggtggaggccaccccacgaagagtatttgccaacgcacacacatatcacatcaactccatatctgtcaacagcgactatgaaacctacatgtccgctgatgacctgaggattaacctatggaactttgaaataaccaatcaaagttttaatattgtggacattaagccagccaacatggaggagctcacggaggtgatcacagcagccgagttccacccscatcattgcaacaccttcgtgtacagcagcagcaaagggacaatccggctgtgtgacatgcgggcatctgccctgtgtgacaggcacaccaaattttttgaagagccggaagatccaagcaacagatcatttttctctgaaattatctcttcgatttcggatgtgaagttcagccacagtgggaggtatatcatgaccagggactacttgaccgtcaaagtctgggatctcaacatggaaaaccgccccatcgagacttaccaggttcatgactacctccgcagcaagctgtgttccctctatgaaaatgactgcatttttgataaatttgagtgtgtgtggaatgggtcagacagtgtcatcatgacaggctcctacaacaacttcttcaggatgttcgacagaaacaccaagcgtgatgtgacccttgaggcttcgagggaaaacagcaagccccgggctatcctcaaaccccgaaaagtgtgtgtggggggcaagcggagaaaagacgagatcagtgtcgacagtctggactttagcaaaaagatcttgcatacagcttggcatccttcagaaaatattatagcagtggcggctacaaataacctatatatattccaggacaaggttaactaggtggacaagttattacttaataatctcacatactgaatactagtcaaacaagtttttaaatgtttctttgggtcttcatttgatgcattgactttaatttccctatacaggaaatgattggaatagaattaaaaggagtccaacattcccagctccccagttctaagaaacttttgtcaaacccaataggtttgggacacttctgtttagaattgaaagctgccagctaacagtaattcttccatagttgacttgaacttctgatgcttttattgcccagttttctctggtgggtccagtgttttgttcctaggtgtctgctgcgataaaatgaggttgtctgtagtatttaaggagaaaagagataagttttttttaattaagcaattccatttgattgaaaaaaatcaacaaaaaataaacaccgtttactcttagacaaattcttcttgttttgtgaaaaaccagaactagtcagtatctcctgcccctccaccatttttttttccattttccattttcctttgaacaatttcatttaagccagagatttattgcatgaagctgagaagaggatgcagaatgacaaggaaagggcacatcaaccctgctatgctctttttttgtaagctccatagaaacagcctgagaatttggctagggaacttgaatgcttcaggggacagaaagagagcactttcgacacagtgcttcccagagtgagcttggcagggccaggcggggccaaattccatcwgctgccttgttactcttgctttttgtgctcttaaatggctccatataatcttctacttacatgttccttggcttttttytcttcaaccttttccagcttatttattccattgacttctaaaggccgagtcctgggtgcttattatctggtgttctaaatgaagcagtaagttggaagcagtgccaccacccctgagtccctgagaaaggctggtctgttctttttgggtgtttctcctaagcagcaccctcccctcctcctggttttggtaaccaaaagtaacaatccatcaacctccattgtacctagaacaaaaatagccaataaaaacgytgagttgtgaagtccaatcaggcacttctaactcaccccaagctcgccatctggaaaaacagaccagaaggctctcttctacagaaatgaactgtggggaaatcaagcagctgtgacatgaagtgaatgaagtccacttgaagctgtggaagatggttcatccttttccccagttgaggatccagatttataacttctagaaagccatttccagaaggttctatgtggcacacccctaggaaaggcactaaatgcatgcaaaggatttataaacttaggaaagtagatgggtggagtccagaaaactggttctgggttaatatctctacatctgtcttgatgactcatttctcctaactcccatttagtgcagggtaaatggtttgagatgagagtttttcaatgaaagggaaattttctttcagtttacagatgtattagaagtcctgactttcaagtgtaatttgctttggaggagg

SEQ ID NO: 2339 - DNA, 3093 bp, Homo sapiens
cagcctcctgcagcagcagcagcagcagcagcagcagcagctgcgagtgcgcgcgtgtgggtgtgagggctcggaccatggtgcagtcccactggctcccctgcccccctctcctgtgagactggctgcggggagggatcatggatacttgtctgccggcttctggttcccacgcaagtaagcctgctgtcaatggaggaggacattgatacccgcaaaatcaacaacagtttcctgcgcgaccacagctatgcgaccgaagctgacattatctctacggtagaattcaaccacacgggagaattactagcgacaggggacaaggggggtcgggttgtaatatttcaacgagagcaggagagtaaaaatcaggttcatcgtaggggtgaatacaatgtttacagcacattccagagccatgaacccgagttcgattacctgaagagtttagaaatagaagaaaaaatcaataaaataagatggctcccccagcagaatgcagcttactttcttctgtctactaatgataaaactgtgaagctgtggaaagtcagcgagcgtgataagaggccagaaggctacaatctgaaagatgaggagggccggctccgggatcctgccaccatcacaaccctgcgggtgcctgtcctgagacccatggacctgatggtggaggccaccccacgaagagtatttgccaacgcacacacatatcacatcaactccatatctgtcaacagcgactatgaaacctacatgtccgctgatgacctgaggattaacctatggaactttgaaataaccaatcaaagttttaatattgtggacattaagccagccaacatggaggagctcacggaggtgatcacagcagccgagttccacccscatcattgcaacaccttcgtgtacagcagcagcaaagggacaatccggctgtgtgacatgcgggcatctgccctgtgtgacaggcacaccaaattttttgaagagccggaagatccaagcaacagatcatttttctctgaaattatctcttcgatttcggatgtgaagttcagccacagtgggaggtatatcatgaccagggactacttgaccgtcaaagtctgggatctcaacatggaaaaccgccccatcgagacttaccaggttcatgactacctccgcagcaagctgtgttccctctatgaaaatgactgcatttttgataaatttgagtgtgtgtggaatgggtcagacagtgtcatcatgacaggctcctacaacaacttcttcaggatgttcgacagaaacaccaagcgtgatgtgacccttgaggcttcgagggaaaacagcaagccccgggctatcctcaaaccccgaaaagtgtgtgtggggggcaagcggagaaaagacgagatcagtgtcgacagtctggactttagcaaaaagatcttgcatacagcttggcatccttcagaaaatattatagcagtggcggctacaaataacctatatatattccaggacaaggttaactaggtggacaagttattacttaataatctcacatactgaatactagtcaaacaagtttttaaatgtttctttgggtcttcatttgatgcattgactttaatttccctatacaggaaatgattggaatagaattaaaaggagtccaacattcccagctccccagttctaagaaacttttgtcaaacccaataggtttgggacacttctgtttagaattgaaagctgccagctaacagtaattcttccatagttgacttgaacttctgatgcttttattgcccagttttctctggtgggtccagtgttttgttcctaggtgtctgctgcgataaaatgaggttgtctgtagtatttaaggagaaaagagataagttttttttaattaagcaattccatttgattgaaaaaaatcaacaaaaaataaacaccgtttactcttagacaaattcttcttgttttgtgaaaaaccagaactagtcagtatctcctgcccctccaccatttttttttccattttccattttcctttgaacaatttcatttaagccagagatttattgcatgaagctgagaagaggatgcagaatgacaaggaaagggcacatcaaccctgctatgctctttttttgtaagctccatagaaacagcctgagaatttggctagggaacttgaatgcttcaggggacagaaagagagcactttcgacacagtgcttcccagagtgagcttggcagggccaggcggggccaaattccatcwgctgccttgttactcttgctttttgtgctcttaaatggctccatataatcttctacttacatgttccttggcttttttytcttcaaccttttccagcttatttattccattgacttctaaaggccgagtcctgggtgcttattatctggtgttctaaatgaagcagtaagttggaagcagtgccaccacccctgagtccctgagaaaggctggtctgttctttttgggtgtttctcctaagcagcaccctcccctcctcctggttttggtaaccaaaagtaacaatccatcaacctccattgtacctagaacaaaaatagccaataaaaacgytgagttgtgaagtccaatcaggcacttctaactcaccccaagctcgccatctggaaaaacagaccagaaggctctcttctacagaaatgaactgtggggaaatcaagcagctgtgacatgaagtgaatgaagtccacttgaagctgtggaagatggttcatccttttccccagttgaggatccagatttataacttctagaaagccatttccagaaggttctatgtggcacacccctaggaaaggcactaaatgcatgcaaaggatttataaacttaggaaagtagatgggtggagtccagaaaactggttctgggttaatatctctacatctgtcttgatgactcatttctcctaactcccatttagtgcagggtaaatggtttgagatgagagtttttcaatgaaagggaaattttctttcagtttacagatgtattagaagtcctgactttcaagtgtaatttgctttggaggagg

SEQ ID NO: 2340 - DNA, 3180 bp, Homo sapiens
agcagcagcagcagcagctgcgagtgcgcgcgtgtgggtgtgagggtgagtgcgctggcgccggctgcagcgccctgcccagctccccgccagcttccctacccccgcctgccggagccgccctcccgtgggaccagcaccctcattccggccaggctcggaccatggtgcagtcccactggctcccctgcccccctctcctgtgagactggctgcggggagggatcatggatacttgtctgccggcttctggttcccacgcaagtaagcctgctgtcaatggaggaggacattgatacccgcaaaatcaacaacagtttcctgcgcgaccacagctatgcgaccgaagctgacattatctctacggtagaattcaaccacacgggagaattactagcgacaggggacaaggggggtcgggttgtaatatttcaacgagagcaggagagtaaaaatcaggttcatcgtaggggtgaatacaatgtttacagcacattccagagccatgaacccgagttcgattacctgaagagtttagaaatagaagaaaaaatcaataaaataagatggctcccccagcagaatgcagcttactttcttctgtctactaatgataaaactgtgaagctgtggaaagtcagcgagcgtgataagaggccagaaggctacaatctgaaagatgaggagggccggctccgggatcctgccaccatcacaaccctgcgggtgcctgtcctgagacccatggacctgatggtggaggccaccccacgaagagtatttgccaacgcacacacatatcacatcaactccatatctgtcaacagcgactatgaaacctacatgtccgctgatgacctgaggattaacctatggaactttgaaataaccaatcaaagttttaatattgtggacattaagccagccaacatggaggagctcacggaggtgatcacagcagccgagttccacccscatcattgcaacaccttcgtgtacagcagcagcaaagggacaatccggctgtgtgacatgcgggcatctgccctgtgtgacaggcacaccaaattttttgaagagccggaagatccaagcaacagatcatttttctctgaaattatctcttcgatttcggatgtgaagttcagccacagtgggaggtatatcatgaccagggactacttgaccgtcaaagtctgggatctcaacatggaaaaccgccccatcgagacttaccaggttcatgactacctccgcagcaagctgtgttccctctatgaaaatgactgcatttttgataaatttgagtgtgtgtggaatgggtcagacagtgtcatcatgacaggctcctacaacaacttcttcaggatgttcgacagaaacaccaagcgtgatgtgacccttgaggcttcgagggaaaacagcaagccccgggctatcctcaaaccccgaaaagtgtgtgtggggggcaagcggagaaaagacgagatcagtgtcgacagtctggactttagcaaaaagatcttgcatacagcttggcatccttcagaaaatattatagcagtggcggctacaaataacctatatatattccaggacaaggttaactaggtggacaagttattacttaataatctcacatactgaatactagtcaaacaagtttttaaatgtttctttgggtcttcatttgatgcattgactttaatttccctatacaggaaatgattggaatagaattaaaaggagtccaacattcccagctccccagttctaagaaacttttgtcaaacccaataggtttgggacacttctgtttagaattgaaagctgccagctaacagtaattcttccatagttgacttgaacttctgatgcttttattgcccagttttctctggtgggtccagtgttttgttcctaggtgtctgctgcgataaaatgaggttgtctgtagtatttaaggagaaaagagataagttttttttaattaagcaattccatttgattgaaaaaaatcaacaaaaaataaacaccgtttactcttagacaaattcttcttgttttgtgaaaaaccagaactagtcagtatctcctgcccctccaccatttttttttccattttccattttcctttgaacaatttcatttaagccagagatttattgcatgaagctgagaagaggatgcagaatgacaaggaaagggcacatcaaccctgctatgctctttttttgtaagctccatagaaacagcctgagaatttggctagggaacttgaatgcttcaggggacagaaagagagcactttcgacacagtgcttcccagagtgagcttggcagggccaggcggggccaaattccatcwgctgccttgttactcttgctttttgtgctcttaaatggctccatataatcttctacttacatgttccttggcttttttytcttcaaccttttccagcttatttattccattgacttctaaaggccgagtcctgggtgcttattatctggtgttctaaatgaagcagtaagttggaagcagtgccaccacccctgagtccctgagaaaggctggtctgttctttttgggtgtttctcctaagcagcaccctcccctcctcctggttttggtaaccaaaagtaacaatccatcaacctccattgtacctagaacaaaaatagccaataaaaacgytgagttgtgaagtccaatcaggcacttctaactcaccccaagctcgccatctggaaaaacagaccagaaggctctcttctacagaaatgaactgtggggaaatcaagcagctgtgacatgaagtgaatgaagtccacttgaagctgtggaagatggttcatccttttccccagttgaggatccagatttataacttctagaaagccatttccagaaggttctatgtggcacacccctaggaaaggcactaaatgcatgcaaaggatttataaacttaggaaagtagatgggtggagtccagaaaactggttctgggttaatatctctacatctgtcttgatgactcatttctcctaactcccatttagtgcagggtaaatggtttgagatgagagtttttcaatgaaagggaaattttctttcagtttacagatgtattagaagtcctgactttcaagtgtaatttgctttggaggagg

SEQ ID NO: 2341 - DNA, 3388 bp, Homo sapiens
gcaaatcctgytcagaggagcttcagccaatgaagaggctatatcccggcttgcttgggggcttctgagtttgagctgcatgcagaaatgtaaggcagtgcttcctggcgctgatggcaaaatgggacccatctccagttattcctcgggcaccccagctttgcaaatctgggaaagaacctacataaacatattggtgatgtagccagcttaaaaggccgagagaatccttatggattcaggagactgtttttttatttagatttttattttttatttggaagatgaaatgcttctctcgttacctgccttacatcttcagacctccgaacaccatcctttcttccagctgccacacagaaggctcggaccatggtgcagtcccactggctcccctgcccccctctcctgtgagactggctgcggggagggatcatggatacttgtctgccggcttctggttcccacgcaagtaagcctgctgtcaatggaggaggacattgatacccgcaaaatcaacaacagtttcctgcgcgaccacagctatgcgaccgaagctgacattatctctacggtagaattcaaccacacgggagaattactagcgacaggggacaaggggggtcgggttgtaatatttcaacgagagcaggagagtaaaaatcaggttcatcgtaggggtgaatacaatgtttacagcacattccagagccatgaacccgagttcgattacctgaagagtttagaaatagaagaaaaaatcaataaaataagatggctcccccagcagaatgcagcttactttcttctgtctactaatgataaaactgtgaagctgtggaaagtcagcgagcgtgataagaggccagaaggctacaatctgaaagatgaggagggccggctccgggatcctgccaccatcacaaccctgcgggtgcctgtcctgagacccatggacctgatggtggaggccaccccacgaagagtatttgccaacgcacacacatatcacatcaactccatatctgtcaacagcgactatgaaacctacatgtccgctgatgacctgaggattaacctatggaactttgaaataaccaatcaaagttttaatattgtggacattaagccagccaacatggaggagctcacggaggtgatcacagcagccgagttccacccscatcattgcaacaccttcgtgtacagcagcagcaaagggacaatccggctgtgtgacatgcgggcatctgccctgtgtgacaggcacaccaaattttttgaagagccggaagatccaagcaacagatcatttttctctgaaattatctcttcgatttcggatgtgaagttcagccacagtgggaggtatatcatgaccagggactacttgaccgtcaaagtctgggatctcaacatggaaaaccgccccatcgagacttaccaggttcatgactacctccgcagcaagctgtgttccctctatgaaaatgactgcatttttgataaatttgagtgtgtgtggaatgggtcagacagtgtcatcatgacaggctcctacaacaacttcttcaggatgttcgacagaaacaccaagcgtgatgtgacccttgaggcttcgagggaaaacagcaagccccgggctatcctcaaaccccgaaaagtgtgtgtggggggcaagcggagaaaagacgagatcagtgtcgacagtctggactttagcaaaaagatcttgcatacagcttggcatccttcagaaaatattatagcagtggcggctacaaataacctatatatattccaggacaaggttaactaggtggacaagttattacttaataatctcacatactgaatactagtcaaacaagtttttaaatgtttctttgggtcttcatttgatgcattgactttaatttccctatacaggaaatgattggaatagaattaaaaggagtccaacattcccagctccccagttctaagaaacttttgtcaaacccaataggtttgggacacttctgtttagaattgaaagctgccagctaacagtaattcttccatagttgacttgaacttctgatgcttttattgcccagttttctctggtgggtccagtgttttgttcctaggtgtctgctgcgataaaatgaggttgtctgtagtatttaaggagaaaagagataagttttttttaattaagcaattccatttgattgaaaaaaatcaacaaaaaataaacaccgtttactcttagacaaattcttcttgttttgtgaaaaaccagaactagtcagtatctcctgcccctccaccatttttttttccattttccattttcctttgaacaatttcatttaagccagagatttattgcatgaagctgagaagaggatgcagaatgacaaggaaagggcacatcaaccctgctatgctctttttttgtaagctccatagaaacagcctgagaatttggctagggaacttgaatgcttcaggggacagaaagagagcactttcgacacagtgcttcccagagtgagcttggcagggccaggcggggccaaattccatcwgctgccttgttactcttgctttttgtgctcttaaatggctccatataatcttctacttacatgttccttggcttttttytcttcaaccttttccagcttatttattccattgacttctaaaggccgagtcctgggtgcttattatctggtgttctaaatgaagcagtaagttggaagcagtgccaccacccctgagtccctgagaaaggctggtctgttctttttgggtgtttctcctaagcagcaccctcccctcctcctggttttggtaaccaaaagtaacaatccatcaacctccattgtacctagaacaaaaatagccaataaaaacgytgagttgtgaagtccaatcaggcacttctaactcaccccaagctcgccatctggaaaaacagaccagaaggctctcttctacagaaatgaactgtggggaaatcaagcagctgtgacatgaagtgaatgaagtccacttgaagctgtggaagatggttcatccttttccccagttgaggatccagatttataacttctagaaagccatttccagaaggttctatgtggcacacccctaggaaaggcactaaatgcatgcaaaggatttataaacttaggaaagtagatgggtggagtccagaaaactggttctgggttaatatctctacatctgtcttgatgactcatttctcctaactcccatttagtgcagggtaaatggtttgagatgagagtttttcaatgaaagggaaattttctttcagtttacagatgtattagaagtcctgactttcaagtgtaatttgctttggaggagg

SEQ ID NO: 2342 - DNA, 3236 bp, Homo sapiens
actgcaagtccttcgtaaccactccaggacgctgccagggcctgagaagggacaaactccaattgctccagttcaaactggtcctggcctggtcaaacggaggagacagagcagtgattcacagcaggacgtggaattgggacactcacccaggacacactatggtgcttcagccaagtgaaaggcactatcgagattggaaccacagaaggctcggaccatggtgcagtcccactggctcccctgcccccctctcctgtgagactggctgcggggagggatcatggatacttgtctgccggcttctggttcccacgcaagtaagcctgctgtcaatggaggaggacattgatacccgcaaaatcaacaacagtttcctgcgcgaccacagctatgcgaccgaagctgacattatctctacggtagaattcaaccacacgggagaattactagcgacaggggacaaggggggtcgggttgtaatatttcaacgagagcaggagagtaaaaatcaggttcatcgtaggggtgaatacaatgtttacagcacattccagagccatgaacccgagttcgattacctgaagagtttagaaatagaagaaaaaatcaataaaataagatggctcccccagcagaatgcagcttactttcttctgtctactaatgataaaactgtgaagctgtggaaagtcagcgagcgtgataagaggccagaaggctacaatctgaaagatgaggagggccggctccgggatcctgccaccatcacaaccctgcgggtgcctgtcctgagacccatggacctgatggtggaggccaccccacgaagagtatttgccaacgcacacacatatcacatcaactccatatctgtcaacagcgactatgaaacctacatgtccgctgatgacctgaggattaacctatggaactttgaaataaccaatcaaagttttaatattgtggacattaagccagccaacatggaggagctcacggaggtgatcacagcagccgagttccacccscatcattgcaacaccttcgtgtacagcagcagcaaagggacaatccggctgtgtgacatgcgggcatctgccctgtgtgacaggcacaccaaattttttgaagagccggaagatccaagcaacagatcatttttctctgaaattatctcttcgatttcggatgtgaagttcagccacagtgggaggtatatcatgaccagggactacttgaccgtcaaagtctgggatctcaacatggaaaaccgccccatcgagacttaccaggttcatgactacctccgcagcaagctgtgttccctctatgaaaatgactgcatttttgataaatttgagtgtgtgtggaatgggtcagacagtgtcatcatgacaggctcctacaacaacttcttcaggatgttcgacagaaacaccaagcgtgatgtgacccttgaggcttcgagggaaaacagcaagccccgggctatcctcaaaccccgaaaagtgtgtgtggggggcaagcggagaaaagacgagatcagtgtcgacagtctggactttagcaaaaagatcttgcatacagcttggcatccttcagaaaatattatagcagtggcggctacaaataacctatatatattccaggacaaggttaactaggtggacaagttattacttaataatctcacatactgaatactagtcaaacaagtttttaaatgtttctttgggtcttcatttgatgcattgactttaatttccctatacaggaaatgattggaatagaattaaaaggagtccaacattcccagctccccagttctaagaaacttttgtcaaacccaataggtttgggacacttctgtttagaattgaaagctgccagctaacagtaattcttccatagttgacttgaacttctgatgcttttattgcccagttttctctggtgggtccagtgttttgttcctaggtgtctgctgcgataaaatgaggttgtctgtagtatttaaggagaaaagagataagttttttttaattaagcaattccatttgattgaaaaaaatcaacaaaaaataaacaccgtttactcttagacaaattcttcttgttttgtgaaaaaccagaactagtcagtatctcctgcccctccaccatttttttttccattttccattttcctttgaacaatttcatttaagccagagatttattgcatgaagctgagaagaggatgcagaatgacaaggaaagggcacatcaaccctgctatgctctttttttgtaagctccatagaaacagcctgagaatttggctagggaacttgaatgcttcaggggacagaaagagagcactttcgacacagtgcttcccagagtgagcttggcagggccaggcggggccaaattccatcwgctgccttgttactcttgctttttgtgctcttaaatggctccatataatcttctacttacatgttccttggcttttttytcttcaaccttttccagcttatttattccattgacttctaaaggccgagtcctgggtgcttattatctggtgttctaaatgaagcagtaagttggaagcagtgccaccacccctgagtccctgagaaaggctggtctgttctttttgggtgtttctcctaagcagcaccctcccctcctcctggttttggtaaccaaaagtaacaatccatcaacctccattgtacctagaacaaaaatagccaataaaaacgytgagttgtgaagtccaatcaggcacttctaactcaccccaagctcgccatctggaaaaacagaccagaaggctctcttctacagaaatgaactgtggggaaatcaagcagctgtgacatgaagtgaatgaagtccacttgaagctgtggaagatggttcatccttttccccagttgaggatccagatttataacttctagaaagccatttccagaaggttctatgtggcacacccctaggaaaggcactaaatgcatgcaaaggatttataaacttaggaaagtagatgggtggagtccagaaaactggttctgggttaatatctctacatctgtcttgatgactcatttctcctaactcccatttagtgcagggtaaatggtttgagatgagagtttttcaatgaaagggaaattttctttcagtttacagatgtattagaagtcctgactttcaagtgtaatttgctttggaggagg

SEQ ID NO: 2343 - DNA, 3426 bp, Homo sapiens
ggccaggcaagcctgaatcctgtccctgccatctcgccactgcagctcgggtccagaaaggcaccattttgtcgcggctgcccgctctcccagggggaggagggatcttttttgcattttggagcggctgccaaggaggggaacctgttgggcatctccccagacccgcttgtgagcgcctccggggcgggcgggcgggaccagacccctcggggcacggcgtatcttggcacccggaggcagcggaggcaggcgcagcatcctcgctgggaactggagctggagtgagcgcaccgcgcgggaggagccgccgcagcctcgcagaacccgagtggaggaggtgacagctccattgccgggtttttattttttttctctccgcctccccgtctcctcctcaggctcggaccatggtgcagtcccactggctcccctgcccccctctcctgtgagactggctgcggggagggatcatggatacttgtctgccggcttctggttcccacgcaagtaagcctgctgtcaatggaggaggacattgatacccgcaaaatcaacaacagtttcctgcgcgaccacagctatgcgaccgaagctgacattatctctacggtagaattcaaccacacgggagaattactagcgacaggggacaaggggggtcgggttgtaatatttcaacgagagcaggagagtaaaaatcaggttcatcgtaggggtgaatacaatgtttacagcacattccagagccatgaacccgagttcgattacctgaagagtttagaaatagaagaaaaaatcaataaaataagatggctcccccagcagaatgcagcttactttcttctgtctactaatgataaaactgtgaagctgtggaaagtcagcgagcgtgataagaggccagaaggctacaatctgaaagatgaggagggccggctccgggatcctgccaccatcacaaccctgcgggtgcctgtcctgagacccatggacctgatggtggaggccaccccacgaagagtatttgccaacgcacacacatatcacatcaactccatatctgtcaacagcgactatgaaacctacatgtccgctgatgacctgaggattaacctatggaactttgaaataaccaatcaaagttttaatattgtggacattaagccagccaacatggaggagctcacggaggtgatcacagcagccgagttccacccscatcattgcaacaccttcgtgtacagcagcagcaaagggacaatccggctgtgtgacatgcgggcatctgccctgtgtgacaggcacaccaaattttttgaagagccggaagatccaagcaacagatcatttttctctgaaattatctcttcgatttcggatgtgaagttcagccacagtgggaggtatatcatgaccagggactacttgaccgtcaaagtctgggatctcaacatggaaaaccgccccatcgagacttaccaggttcatgactacctccgcagcaagctgtgttccctctatgaaaatgactgcatttttgataaatttgagtgtgtgtggaatgggtcagacagtgtcatcatgacaggctcctacaacaacttcttcaggatgttcgacagaaacaccaagcgtgatgtgacccttgaggcttcgagggaaaacagcaagccccgggctatcctcaaaccccgaaaagtgtgtgtggggggcaagcggagaaaagacgagatcagtgtcgacagtctggactttagcaaaaagatcttgcatacagcttggcatccttcagaaaatattatagcagtggcggctacaaataacctatatatattccaggacaaggttaactaggtggacaagttattacttaataatctcacatactgaatactagtcaaacaagtttttaaatgtttctttgggtcttcatttgatgcattgactttaatttccctatacaggaaatgattggaatagaattaaaaggagtccaacattcccagctccccagttctaagaaacttttgtcaaacccaataggtttgggacacttctgtttagaattgaaagctgccagctaacagtaattcttccatagttgacttgaacttctgatgcttttattgcccagttttctctggtgggtccagtgttttgttcctaggtgtctgctgcgataaaatgaggttgtctgtagtatttaaggagaaaagagataagttttttttaattaagcaattccatttgattgaaaaaaatcaacaaaaaataaacaccgtttactcttagacaaattcttcttgttttgtgaaaaaccagaactagtcagtatctcctgcccctccaccatttttttttccattttccattttcctttgaacaatttcatttaagccagagatttattgcatgaagctgagaagaggatgcagaatgacaaggaaagggcacatcaaccctgctatgctctttttttgtaagctccatagaaacagcctgagaatttggctagggaacttgaatgcttcaggggacagaaagagagcactttcgacacagtgcttcccagagtgagcttggcagggccaggcggggccaaattccatcwgctgccttgttactcttgctttttgtgctcttaaatggctccatataatcttctacttacatgttccttggcttttttytcttcaaccttttccagcttatttattccattgacttctaaaggccgagtcctgggtgcttattatctggtgttctaaatgaagcagtaagttggaagcagtgccaccacccctgagtccctgagaaaggctggtctgttctttttgggtgtttctcctaagcagcaccctcccctcctcctggttttggtaaccaaaagtaacaatccatcaacctccattgtacctagaacaaaaatagccaataaaaacgytgagttgtgaagtccaatcaggcacttctaactcaccccaagctcgccatctggaaaaacagaccagaaggctctcttctacagaaatgaactgtggggaaatcaagcagctgtgacatgaagtgaatgaagtccacttgaagctgtggaagatggttcatccttttccccagttgaggatccagatttataacttctagaaagccatttccagaaggttctatgtggcacacccctaggaaaggcactaaatgcatgcaaaggatttataaacttaggaaagtagatgggtggagtccagaaaactggttctgggttaatatctctacatctgtcttgatgactcatttctcctaactcccatttagtgcagggtaaatggtttgagatgagagtttttcaatgaaagggaaattttctttcagtttacagatgtattagaagtcctgactttcaagtgtaatttgctttggaggagg

SEQ ID NO: 2344 - DNA, 847 bp, Homo sapiens
cgccccctcgcctgggagtctccgccctccacgctctgcccagtcaggctctgtcccgcccccgcggcaccgcctccgcgcctccatccagccggctccctccggccgcgaactgcccctccccgccccgcctcccggcgcgggtggccgaggcgtagcgctgcgacccccgcacccctgcgaacatggcgctgcgagtggtgcggagcgtgcgggccctgctctgcaccctgcgcgcggtcccgttacccgccgcgccctgcccgccgaggccctggcagctgggggtgggcgccgtccgtacgctgcgcactggacccgctctgctctcggtgcgtaaattcacagagaaacacgaatgggtaacaacagaaaatggcattggaacagtgggaatcagcaattttgcacaggttggctgatcaagatgacactgagtaacccttcagaactagatgaacttatgagtgaagaagcatatgagaaatacataaaatctattgaggagtgaaaatggaactcctaaataaactagtatgaaataacgcaagccagcagagttgtcytaaattagtggtggatagaagacttagaatagaaacttttagtattaccgatggggaaaaaaaaactactgttaacactgctaatgaaagaaaatgccctttaactttctaatgattrtagataaatataatatrygtctttttcacaatatcctatgatttttagactaggctctagtgttcagaattcatgaaattatccatggtaaaaactagttataaaaattacataattcaaagataacattgttattcttaagccttatataatattgtaactt

SEQ ID NO: 2345 - DNA, 791 bp, Homo sapiens
cgccccctcgcctgggagtctccgccctccacgctctgcccagtcaggctctgtcccgcccccgcggcaccgcctccgcgcctccatccagccggctccctccggccgcgaactgcccctccccgccccgcctcccggcgcgggtggccgaggcgtagcgctgcgacccccgcacccctgcgaacatggcgctgcgagtggtgcggagcgtgcgggccctgctctgcaccctgcgcgcggtcccgttacccgccgcgccctgcccgccgaggccctggcagctgggggtgggcgccgtccgtacgctgcgcactggacccgctctgctctcggtgcgtaaattcacagagaaacacgaatgggtaacaacagaaaatggcattggaacagtgggaatcagcaattttgcacaggaagcgttgggagatgttgtttaytgtagtctscctgaagttgggacaaaattgaacaaacaagatgagtttggtgctttggaaagtgtgaaagctgctagtgaactctattctcctttatcaggagaagtaactgaaattaatgaagctcttgcagaaaatccaggacttgtaaacaaatcttgttatgaagatggttggctgatcaagatgacactgagtaacccttcagaactagatgaacttatgagtgaagaagcatatgagaaatacataaaatctattgaggaagttgtcytaaattagtggtggatagaagacttagaatagaaacttttagtattaccgatggggaaaaaaaaactactgttaacactg

SEQ ID NO: 2346 - DNA, 2955 bp, Homo sapiens
cgccccctcgcctgggagtctccgccctccacgctctgcccagtcaggctctgtcccgcccccgcggcaccgcctccgcgcctccatccagccggctccctccggccgcgaactgcccctccccgccccgcctcccggcgcgggtggccgaggcgtagcgctgcgacccccgcacccctgcgaacatggcgctgcgagtggtgcggagcgtgcgggccctgctctgcaccctgcgcgcggtcccgttacccgccgcgccctgcccgccgaggccctggcagctgggggtgggcgccgtccgtacgctgcgcactggacccgctctgctctcggtgcgtaaattcacagagaaacacgaatgggtaacaacagaaaatggcattggaacagtgggaatcagcaattttgcacaggaagcgttgggagatgttgtttaytgtagtctscctgaagttgggacaaaattgaacaaacaagatgagtttggtgctttggaaagtgtgaaagctgctagtgaactctattctcctttatcaggagaagtaactgaaattaatgaagctcttgcagaaaatccaggacttgtaaacaaatcttgttatgaagatggtaagctgttgctagaaatttctcaaggaattactactacagtaaatattttatctagaatttaaagcaagtttagctgattgtgacttcatctttttctacttcttggtactaaatagagatgttctgctttaaaagaaaaacagaggttagttgaatacttaaagttatgtttaagatttctggctaggcgcagtggctcgcgcctgtgatcccagcactttgggaggccaaggtgggtggattgctttagtccaggagttggagaccagcctgggcaacatggtgaaactctgtctctatagaaatacaaaaattagctggctgtggtggaatgtgcctgtagtctcagttactagggaggctgaggtgggagaattgcttgaacctgggaggtcaaggctgcagtctatagtgagccaagatcgcaccactccactccagcctgagtgacagagcgagaccttctcaaaaaaagaaaaaaaaatctctgatgataaaagcattaccttattttgcaggttcttgatatcagttgtagattctttggttttggtgtaaacatctgcaaagtatttactttttcagacataaagcagccactcatattgtgtgacatgggaggtaaaaaaatatatattttgcattaatttttggttttctcacattttcacccttataatctaatcaggtaagctaacagcaattttctctattttgtagatgaatagaggctccaaaggatttatctgtcagggtctcatggctgataaatggcaaagctaggattaggttgtagttctcttttgtctgtcacctagcccttctaattactactgctttctaatcccgttaacctcagtagttagtgttccatttgttaaagacatacctggtcttgtgtatttggatcatatatttaaggacttatttttattatttttttgagacagagtctccctctgtcgcccaggctggagtgcagtggcgtgatctcggtgcactgcaacctccccttctcgggttcaagcacttcttctgcctcagcttcccagtagctgggatcaagggcaactgccaccacgcccagctaatttttgtggttttggtagagatggggttccactatgttggccaggctggtcyagagctcctagcctcaagtgatttgcttgccttcgcttcccaaagtactgggattacaggcatgagccaccgtgcccggcccttaaagatttaaatgtcattttctgatgcttattacaacctaagagttcttaatttattatggtggaatctattctagccataattattttcatttgttatatacaagtattttaattcttaaggctaaaatttaaagttctatgaacaaataatgtatggtttttgtaaagaatacaagattgaggcgctcagaaatttattttacgttttggatgaatttgactttttaaaaagttaatgtggaatataaggttgtcttttggttgcaggttggctgatcaagatgacactgagtaacccttcagaactagatgaacttatgagtgaagaagcatatgagaaatacataaaatctattgaggagtgaaaatggaactcctaaataaactagtatgaaataacgcaagccagcagagttgtcytaaattagtggtggatagaagacttagaatagaaacttttagtattaccgatggggaaaaaaaaactactgttaacactgctaatgaaagaaaatgccctttaactttctaatgattrtagataaatataatatrygtctttttcacaatatcctatgatttttagactaggctctagtgttcagaattcatgaaattatccatggtaaaaactagttataaaaattacataattcaaagataacattgttattcttaagccttatataatattgtaacttgcatgtatccatacctrgatttgggatgaaatacttaatgatctttccattggaaataactggaagtgaagargttttgttgcttgtacagtgtcagatgargaacaccactatcttaattttgygatacactgcatttgctggtgctatttttatacagtgaagcaacagctttgcagcaaaataataaaatacttcttcgttaatcatgtttgttttgatgttaatatttcatttagtaactctgctagtatttgtgaaagtgctaactttaactyacggaaagttacttyttaaaaggmaatttaagccagaacaatgcaaagctccaagaaaatgttttctttagtcacaaatctggtttttcttaagccaagatctgtcacctttaacataataaaaaataaatcacc

SEQ ID NO: 2347 - DNA, 1459 bp, Homo sapiens
cgccccctcgcctgggagtctccgccctccacgctctgcccagtcaggctctgtcccgcccccgcggcaccgcctccgcgcctccatccagccggctccctccggccgcgaactgcccctccccgccccgcctcccggcgcgggtggccgaggcgtagcgctgcgacccccgcacccctgcgaacatggcgctgcgagtggtgcggagcgtgcgggccctgctctgcaccctgcgcgcggtcccgttacccgccgcgccctgcccgccgaggccctggcagctgggggtgggcgccgtccgtacgctgcgcactggacccgctctgctctcggtgcgtaaattcacagagaaacacgaatgggtaacaacagaaaatggcattggaacagtgggaatcagcaattttgcacaggaagcgttgggagatgttgtttaytgtagtctscctgaagttgggacaaaattgaacaaacaagatgagtttggtgctttggaaagtgtgaaagctgctagtgaactctattctcctttatcaggagaagtaactgaaattaatgaagctcttgcagaaaatccaggacttgtaaacaaatcttgttatgaagatggttggctgatcaagatgacactgagtaacccttcagaactagatgaacttatgagtgaagaagcatatgagaaatacataaaatctattgaggagtgaaaatggaactcctaaataaactagtatgaaataacgcaagccagcagagttgtcytaaattagtggtggatagaagacttagaatagaaacttttagtattaccgatggggaaaaaaaaactactgttaacactgctaatgaaagaaaatgccctttaactttctaatgattrtagataaatataatatrygtctttttcacaatatcctatgatttttagactaggctctagtgttcagaattcatgaaattatccatggtaaaaactagttataaaaattacataattcaaagataacattgttattcttaagccttatataatattgtaacttgcatgtatccatacctrgatttgggatgaaatacttaatgatctttccattggaaataactggaagtgaagargttttgttgcttgtacagtgtcagatgargaacaccactatcttaattttgygatacactgcatttgctggtgctatttttatacagtgaagcaacagctttgcagcaaaataataaaatacttcttcgttaatcatgtttgttttgatgttaatatttcatttagtaactctgctagtatttgtgaaagtgctaactttaactyacggaaagttacttyttaaaaggmaatttaagccagaacaatgcaaagctccaagaaaatgttttctttagtcacaaatctggtttttcttaagccaagatctgtcacctttaacataataaaaaataaatcaccaac

SEQ ID NO: 2348 - DNA, 1621 bp, Homo sapiens
gtctgccgcgcccttgttcctgcagctggcggaggaaacagaggttcagtgaattgcctagggtmacacagggaattggtggaagagcsaagtctaatgcccagatttccaaactgggagtcttaacccttcatcagtgctacctgtgccacatgggagaagatgggccacctccaattcattttctctgggaactgcaggaaccacaatgaggttgcagaatgtgttaacagtgaaagccctcacaggactcaggtccagttatcttttgactgccacatatggaccccaaaagatctcaaaaggaaagtgtcctcattacaggaggaagtggctattttggttttcggtaacctgggctgtgccctgaaccaaaatggagtccatgtgattctgtttgacatcagcagccctgctcaaaccattccagaaggaatcaagtttatacaaggagacatccgccacctgtctgacgtagagaaagccttccaggatgcagacgtcacttgtgtgttccatattgcctcttatggtatgtcagggcgggagcaactcaatcgaaacctgatcaaagaagtcaacgtcaggggcacagacaacatcctccaggtttgccaaaggagaagggtgcccaggttagtttacaccagcactttcaatgtcatctttggaggtcaagttatcagaaatggggatgaatctctgccctacctgcctcttcacctccaccctgatcactactctcggacaaagtcaattgcagagcagaaggtgctggaggcgaatgctacacccctggacagaggcgacggtgtcttaagaacctgcgctctgaggccagctggcatctatgggcctggagaacaaagacaccttcccaggatagtcagctacatcgagaagggtctgttcaagtttgtctacggggaccccaggagcctggttgagtttgtccacgtggataacttggtgcaggctcacattctggcctcagaagccctgagagctgacaagggccatattgcctctgggcagccctacttcatctcagatggcagacccgtgaacaactttgagttcttccggcctctggttgagggcctgggctacacattcccgtctacccgcctgccattgaccttggtctactgctttgctttyctaacagagatggttcacttcattttgggtcgactytacaacttccagcccttcctcactcgcactgaagtttacaaaactgrtgtcacacattattttagcttagagaaagccaagaaagagctaggttataaggctcagccatttgacctccaggaagcagtggaatggtttaaagcccatggtcatggcagaagttctggaagtcgtgactcggagtgttttgtttgggatgggctattggtcttcctcctgattatagcagttctcatgtggctgccttcttctgtgattctgtcactgtgaaggaggggccagaaataaggtgatcacagttggctgagatggttctcaagaaacatgggttttaaaatgtgtacagtgatatctggtgccaaacattggctcttcaaattgctacttaagaataggttcttggattgaatctttatgtcttatt

SEQ ID NO: 2349 - DNA, 4024 bp, Homo sapiens
ttaaagaagggggggcctgagcgaaggggttggaagcggagtgattccccacccctgctccatctagctctttccagtgcagccactgccgccgcccaggagccctcgtcccctgccttgtccccctactcgttcccgctcccacggcatggagcaggacactgccgcagtggcagccaccgtggcagccgcggatgcgaccgccactatcgtggtcatagaggacgagcagcccgggccgtccacctctcaggaggagggagcggccgccgcggccaccgaagccaccgcggccacggagaagggcgagaagaagaaggagaaaaacgtttcttcatttcaactcaaacttgctgctaaagcgcctaaatctgaaaaggaaatggacccagaatatgaagagaaaatgaaagccgaccgagcaaagagatttgaatttttactgaagcagacagaactttttgcacatttcattcagccttcagcacagaaatctccaacatctccactgaacatgaaattgggacgtccccgaataaagaaagatgaaaagcagagcttaatttctgctggagactaccgccataggcgcacagagcaagaagaagatgaagagctactgtctgagagtcggaaaacatctaatgtgtgtattagatttgaggtgtcaccttcatatgtgaaaggggggccactgagagattatcagattcgaggactgaattggttgatctctttatatgaaaatggagtcaatggcattttggctgatgaaatgggccttgggaaaactttacaaacaattgctttgcttggttacctgaaacactaccgaaatattcctggacctcacatggttttagttccaaagtctactttacacaactggatgaatgaatttaaacgatgggtcccatctctccgtgtcatttgttttgtcggagacaaggatgccagagctgcttttattcgtgatgaaatgatgccaggagagtgggatgtttgcgttacttcttatgagatggtaattaaagaaaaatctgtattcaaaaagtttcactggcgatacctggtcattgatgaagctcacagaataaagaatgaaaaatctaagctttcagagattgttcgtgagttcaagtcgactaaccgcttgctcctaactggaacacctttgcagaataacctgcatgaactgtgggccttactcaactttttattgcctgatgtctttaattctgcagatgactttgattcttggtttgacactaaaaattgtcttggtgatcaaaaactcgtggaaagacttcatgcagttttaaaaccatttttgttacgccgtataaaaactgatgtagagaagagtctgccacctaaaaaggaaataaagatttacttggggctgagtaagatgcaacgagaatggtatacaaaaatcctgatgaaagatattgatgttttaaactcttctggcaagatggacaagatgcgactcttaaacattctgatgcagcttcgaaagtgttgtaatcatccatatctgtttgatggtgctgaacctggtccaccttataccactgatgagcatattgtcagcaacagtggtaaaatggtagttctggataaactattggccaaactcaaagaacagggttcaagggttctcattttcagccagatgactcgcttgctggatattttggaagattattgcatgtggcgtggttatgagtattgtcgactggatggacaaaccccgcatgaagaaagagaggataaattcctagaagtggaatttctgggtcaaagggaagcaatagaggcttttaatgctcctaatagtagcaaattcatctttatgctaagtaccagggctggaggtctcggaattaacctggcaagtgctgatgtggttatactatatgattcagactggaacccacaggttgatctacaagctatggatcgagcacatcgtattggtcagaagaaaccagtacgtgtattccgtctcatcactgacaacactgttgaagagaggattgtagaaagagctgagataaaactgagactcgattcaattgttatacaacaaggaagactcattgaccaacagtctaacaagctggcaaaagaggaaatgttacaaatgatacggcatggagccacccatgtttttgcttctaaagagagtgagttgacagatgaagacattacaactattctggaaagaggggaaaagaagactgcagagatgaatgaacgcctgcaaaaaatgggagagtcttctctaagaaattttagaatggacattgaacaaagtttatacaaatttgagggagaagattatagagaaaaacagaagcttggcatggtggaatggattgaacctcctaaacgagaacgcaaagcaaactacgcagtggatgcctactttagagaggctttgcgtgtcagcgagccaaagattccaaaggctccacggcctccaaaacagccaaatgttcaggattttcaatttttcccaccacgcttatttgagctcctggaaaaggaaattctttattatcggaagacaataggctataaggttccaaggaatcctgatatcccaaatccagctctggctcaaagagaagagcaaaaaaagattgatgsagctgaacctcttacaccagaagagactgaagaaaaggaaaaacttctcacacaaggtttcacaaactggactaaacgagattttaaccagtttattaaagctaatgagaaatatggaagagatgacattgataacatagctcgagaggtagagggcaaatcccctgaggaggtcatggagtattcagctgtattttgggaacgttgcaatgaattacaggacattgagaaaattatggctcaaattgaacgtggagaagcaagaattcaacgaaggatcagtatcaagaaagccctggatgccaaaattgcaagatacaaggctccatttcatcagttgcgcattcagtatggaaccagcaaaggaaagaactatactgaggaagaagatagattcttgatttgtatgttacacaaaatgggctttgatagagaaaatgtatatgaagaattaagacagtgtgtacgaaatgctccccagtttagatttgactggtttatcaagtctaggactgccatggaattccagagacgctgtaacactctgatttcattgattgagaaagaaaatatggaaattgaggaaagagagagagcagaaaagaagaaacgggcaactaaaactccaatgtcacagaaaagaaaagcagagtcagctactgagagctctggaaagaaggatgtcaagaaggtgaaatcctaaagcctagaaataaagttttaaatgggaaactgctattttcttgttcccatcttcaaatgctaattgccagttccagtgtattcatggtactctaagaaaaatctctttggttttgatttcttgcatattttatatattttacaatgctttctacctgaaatgtgtagctttatattttatggcattctagtatttttgtgtactgtattttgtgcatttcatgtcttcatcaaaatcctctcagtccttgttcttttgaagcttgtgctgaggttttagcttttctatgttttatatgccgctgctttgaaagagaacctagattctatagttgtattattgttgtttcatactttaaatttatatggctgtggaaaaacgaattaaaatgttttgaggagaaagactttttcacttctttgttgctttcttttctattgagtctgggcttgtttgtrttactgcatactgtgattagcataataattgtttctttgaggtcatctaaatatttttttcctaaaggaataaagggtgaggaaagaaaaatattaaaaaagctaatatttgatactgtgcttgctgtcagtatgcattacatttaaattattctctattcaagtgggaaaatataataaagaaatgtctataagaaatttaatt

SEQ ID NO: 2350 - DNA, 4121 bp, Homo sapiens
ttaaagaagggggggcctgagcgaaggggttggaagcggagtgattccccacccctgctccatctagctctttccagtgcagccactgccgccgcccaggagccctcgtcccctgccttgtccccctactcgttcccgctcccacggcatggagcaggacactgccgcagtggcagccaccgtggcagccgcggatgcgaccgccactatcgtggtcatagaggacgagcagcccgggccgtccacctctcaggaggagggagcggccgccgcggccaccgaagccaccgcggccacggagaagggcgagaagaagaaggagaaaaacgtttcttcatttcaactcaaacttgctgctaaagcgcctaaatctgaaaaggaaatggacccagaatatgaagagaaaatgaaagccgaccgagcaaagagatttgaatttttactgaagcagacagaactttttgcacatttcattcagccttcagcacagaaatctccaacatctccactgaacatgaaattgggacgtccccgaataaagaaagatgaaaagcagagcttaatttctgctggagactaccgccataggcgcacagagcaagaagaagatgaagagctactgtctgagagtcggaaaacatctaatgtgtgtattagatttgaggtgtcaccttcatatgtgaaaggggggccactgagagattatcagattcgaggactgaattggttgatctctttatatgaaaatggagtcaatggcattttggctgatgaaatgggccttgggaaaactttacaaacaattgctttgcttggttacctgaaacactaccgaaatattcctggacctcacatggttttagttccaaagtctactttacacaactggatgaatgaatttaaacgatgggtcccatctctccgtgtcatttgttttgtcggagacaaggatgccagagctgcttttattcgtgatgaaatgatgccaggagagtgggatgtttgcgttacttcttatgagatggtaattaaagaaaaatctgtattcaaaaagtttcactggcgatacctggtcattgatgaagctcacagaataaagaatgaaaaatctaagctttcagagattgttcgtgagttcaagtcgactaaccgcttgctcctaactggaacacctttgcagaataacctgcatgaactgtgggccttactcaactttttattgcctgatgtctttaattctgcagatgactttgattcttggtttgacactaaaaattgtcttggtgatcaaaaactcgtggaaagacttcatgcagttttaaaaccatttttgttacgccgtataaaaactgatgtagagaagagtctgccacctaaaaaggaaataaagatttacttggggctgagtaagatgcaacgagaatggtatacaaaaatcctgatgaaagatattgatgttttaaactcttctggcaagatggacaagatgcgactcttaaacattctgatgcagcttcgaaagtgttgtaatcatccatatctgtttgatggtgctgaacctggtccaccttataccactgatgagcatattgtcagcaacagtggtaaaatggtagttctggataaactattggccaaactcaaagaacagggttcaagggttctcattttcagccagatgactcgcttgctggatattttggaagattattgcatgtggcgtggttatgagtattgtcgactggatggacaaaccccgcatgaagaaagagaggataaattcctagaagtggaatttctgggtcaaagggaagcaatagaggcttttaatgctcctaatagtagcaaattcatctttatgctaagtaccagggctggaggtctcggaattaacctggcaagtgctgatgtggttatactatatgattcagactggaacccacaggttgatctacaagctatggatcgagcacatcgtattggtcagaagaaaccagtacgtgtattccgtctcatcactgacaacactgttgaagagaggattgtagaaagagctgagataaaactgagactcgattcaattgttatacaacaaggaagactcattgaccaacagtctaacaagctggcaaaagaggaaatgttacaaatgatacggcatggagccacccatgtttttgcttctaaagagagtgagttgacagatgaagacattacaactattctggaaagaggggaaaagaagactgcagagatgaatgaacgcctgcaaaaaatgggagagtcttctctaagaaattttagaatggacattgaacaaagtttatacaaatttgagggagaagattatagagaaaaacagaagcttggcatggtggaatggattgaacctcctaaacgagaacgcaaagcaaactacgcagtggatgcctactttagagaggctttgcgtgtcagcgagccaaagattccaaaggctccacggcctccaaaacagccaaatgttcaggattttcaatttttcccaccacgcttatttgagctcctggaaaaggaaattctttattatcggaagacaataggctataaggttccaaggaatcctgatatcccaaatccagctctggctcaaagagaagagcaaaaaaagattgatgsagctgaacctcttacaccagaagagactgaagaaaaggaaaaacttctcacacaaggtttcacaaactggactaaacgagattttaaccagtttattaaagctaatgagaaatatggaagagatgacattgataacatagctcgagaggtagagggcaaatcccctgaggaggtcatggagtattcagctgtattttgggaacgttgcaatgaattacaggacattgagaaaattatggctcaaattgaacgtggagaagcaagaattcaacgaaggatcagtatcaagaaagccctggatgccaaaattgcaagatacaaggctccatttcatcagttgcgcattcagtatggaaccagcaaaggaaagaactatactgaggaagaagatagattcttgatttgtatgttacacaaaatgggctttgatagagaaaatgtatatgaagaattaagacagtgtgtacgaaatgctccccagtttagatttgactggtttatcaagtctaggactgccatggaattccagagacgctgtaacactctgatttcattgattgagaaagaaaatatggaaattgaggaaagagagagagcagaaaagaagaaacgggcaactaaaactccaatggtaaaattttcagcattttcctaacttttagatttaacattgttgggccatttaaaatgtgcatattggagcagaacattaaatctgtttccattttagtcacagaaaagaaaagcagagtcagctactgagagctctggaaagaaggatgtcaagaaggtgaaatcctaaagcctagaaataaagttttaaatgggaaactgctattttcttgttcccatcttcaaatgctaattgccagttccagtgtattcatggtactctaagaaaaatctctttggttttgatttcttgcatattttatatattttacaatgctttctacctgaaatgtgtagctttatattttatggcattctagtatttttgtgtactgtattttgtgcatttcatgtcttcatcaaaatcctctcagtccttgttcttttgaagcttgtgctgaggttttagcttttctatgttttatatgccgctgctttgaaagagaacctagattctatagttgtattattgttgtttcatactttaaatttatatggctgtggaaaaacgaattaaaatgttttgaggagaaagactttttcacttctttgttgctttcttttctattgagtctgggcttgtttgtrttactgcatactgtgattagcataataattgtttctttgaggtcatctaaatatttttttcctaaaggaataaagggtgaggaaagaaaaatattaaaaaagctaatatttgatactgtgcttgctgtcagtatgcattacatttaaattattctctattcaagtgggaaaatataataaagaaatgtctataagaaatttaa

SEQ ID NO: 2351 - DNA, 3901 bp, Homo sapiens
ttaaagaagggggggcctgagcgaaggggttggaagcggagtgattccccacccctgctccatctagctctttccagtgcagccactgccgccgcccaggagccctcgtcccctgccttgtccccctactcgttcccgctcccacggcatggagcaggacactgccgcagtggcagccaccgtggcagccgcggatgcgaccgccactatcgtggtcatagaggacgagcagcccgggccgtccacctctcaggaggagggagcggccgccgcggccaccgaagccaccgcggccacggagaagggcgagaagaagaaggagaaagccgaccgagcaaagagatttgaatttttactgaagcagacagaactttttgcacatttcattcagccttcagcacagaaatctccaacatctccactgaacatgaaattgggacgtccccgaataaagaaagatgaaaagcagagcttaatttctgctggagactaccgccataggcgcacagagcaagaagaagatgaagagctactgtctgagagtcggaaaacatctaatgtgtgtattagatttgaggtgtcaccttcatatgtgaaaggggggccactgagagattatcagattcgaggactgaattggttgatctctttatatgaaaatggagtcaatggcattttggctgatgaaatgggccttgggaaaactttacaaacaattgctttgcttggttacctgaaacactaccgaaatattcctggacctcacatggttttagttccaaagtctactttacacaactggatgaatgaatttaaacgatgggtcccatctctccgtgtcatttgttttgtcggagacaaggatgccagagctgcttttattcgtgatgaaatgatgccaggagagtgggatgtttgcgttacttcttatgagatggtaattaaagaaaaatctgtattcaaaaagtttcactggcgatacctggtcattgatgaagctcacagaataaagaatgaaaaatctaagctttcagagattgttcgtgagttcaagtcgactaaccgcttgctcctaactggaacacctttgcagaataacctgcatgaactgtgggccttactcaactttttattgcctgatgtctttaattctgcagatgactttgattcttggtttgacactaaaaattgtcttggtgatcaaaaactcgtggaaagacttcatgcagttttaaaaccatttttgttacgccgtataaaaactgatgtagagaagagtctgccacctaaaaaggaaataaagatttacttggggctgagtaagatgcaacgagaatggtatacaaaaatcctgatgaaagatattgatgttttaaactcttctggcaagatggacaagatgcgactcttaaacattctgatgcagcttcgaaagtgttgtaatcatccatatctgtttgatggtgctgaacctggtccaccttataccactgatgagcatattgtcagcaacagtggtaaaatggtagttctggataaactattggccaaactcaaagaacagggttcaagggttctcattttcagccagatgactcgcttgctggatattttggaagattattgcatgtggcgtggttatgagtattgtcgactggatggacaaaccccgcatgaagaaagagaggaagcaatagaggcttttaatgctcctaatagtagcaaattcatctttatgctaagtaccagggctggaggtctcggaattaacctggcaagtgctgatgtggttatactatatgattcagactggaacccacaggttgatctacaagctatggatcgagcacatcgtattggtcagaagaaaccagtacgtgtattccgtctcatcactgacaacactgttgaagagaggattgtagaaagagctgagataaaactgagactcgattcaattgttatacaacaaggaagactcattgaccaacagtctaacaagctggcaaaagaggaaatgttacaaatgatacggcatggagccacccatgtttttgcttctaaagagagtgagttgacagatgaagacattacaactattctggaaagaggggaaaagaagactgcagagatgaatgaacgcctgcaaaaaatgggagagtcttctctaagaaattttagaatggacattgaacaaagtttatacaaatttgagggagaagattatagagaaaaacagaagcttggcatggtggaatggattgaacctcctaaacgagaacgcaaagcaaactacgcagtggatgcctactttagagaggctttgcgtgtcagcgagccaaagattccaaaggctccacggcctccaaaacagccaaatgttcaggattttcaatttttcccaccacgcttatttgagctcctggaaaaggaaattctttattatcggaagacaataggctataaggttccaaggaatcctgatatcccaaatccagctctggctcaaagagaagagcaaaaaaagattgatgsagctgaacctcttacaccagaagagactgaagaaaaggaaaaacttctcacacaaggtttcacaaactggactaaacgagattttaaccagtttattaaagctaatgagaaatatggaagagatgacattgataacatagctcgagaggtagagggcaaatcccctgaggaggtcatggagtattcagctgtattttgggaacgttgcaatgaattacaggacattgagaaaattatggctcaaattgaacgtggagaagcaagaattcaacgaaggatcagtatcaagaaagccctggatgccaaaattgcaagatacaaggctccatttcatcagttgcgcattcagtatggaaccagcaaaggaaagaactatactgaggaagaagatagattcttgatttgtatgttacacaaaatgggctttgatagagaaaatgtatatgaagaattaagacagtgtgtacgaaatgctccccagtttagatttgactggtttatcaagtctaggactgccatggaattccagagacgctgtaacactctgatttcattgattgagaaagaaaatatggaaattgaggaaagagagagagcagaaaagaagaaacgggcaactaaaactccaatgtcacagaaaagaaaagcagagtcagctactgagagctctggaaagaaggatgtcaagaaggtgaaatcctaaagcctagaaataaagttttaaatgggaaactgctattttcttgttcccatcttcaaatgctaattgccagttccagtgtattcatggtactctaagaaaaatctctttggttttgatttcttgcatattttatatattttacaatgctttctacctgaaatgtgtagctttatattttatggcattctagtatttttgtgtactgtattttgtgcatttcatgtcttcatcaaaatcctctcagtccttgttcttttgaagcttgtgctgaggttttagcttttctatgttttatatgccgctgctttgaaagagaacctagattctatagttgtattattgttgtttcatactttaaatttatatggctgtggaaaaacgaattaaaatgttttgaggagaaagactttttcacttctttgttgctttcttttctattgagtctgggcttgtttgtrttactgcatactgtgattagcataataattgtttctttgaggtcatctaaatatttttttcctaaaggaataaagggtgaggaaagaaaaatattaaaaaagctaatatttgatactgtgcttgctgtcagtatgcattacatttaaattattctctattcaagtgggaaaatataataaagaaatgtctataagaaatttaatt

SEQ ID NO: 2352 - DNA, 2738 bp, Homo sapiens
acccggaggtccggcgccctggttggcgccctgcccccaaagtccgtcctccccgttaggtggcgcccaaggggaggggacagccgggcagcagaagcggaaccgggtgcgcggcatcctgcggatcatcaagccctgcaaccatgtgctgagtctctccttccccatccggcgcgacgacggctcctgggaggtcatcgaaggctaccgggcccagcacagccagcaccgcacgccctgcaagggaggtatccgttacagcactgatgtgagtgtagatgaagtaaaagctttggcttctctgatgacatacaagtgtgcagtggttgatgtgccgtttgggggtgctaaagctggtgttaagatcaatcccaagaactataccgaaaatgaattggaaaagatcacaaggaggttcaccatggagctagcaaagaagggctttattggtcctggcgttgatgtgcctgctccagacatgaacacaggtgagcgggagatgtcctggattgctgatacctatgccagcaccatagggcactatgatattaatgcacacgcctgtgttactggtaaacccatcagccaagggggaatccatggacgcatctctgctactggcygtggtgtcttccatgggattgaaaacttcatcaatgaagcttcttacatgagcattttaggaatgacaccagggtttagagataaaacatttgttgttcagggatttggtaatgtgggcctacactctatgaratatttacatcrttttggtgctaaatgtattgctgttggtgagtctgatgggagtatatggaatccagatggtattgacccaaaggaactggmagacttcaaattgcaacatgggtccattctgggcttccccaaggcaaagccctatgaaggaagcatcttggaggtcgactgtgacatactgatcccagctgccactgagaagcagttgaccaaatccaacgcacccagagtcaaagccaagatcattgctgaaggtgccaatgggccaacaactccagaagctgrtaagatcttcctggagagaaacattttggttattccagatctctacttgaatgctggaggagtgacagtatcttactttgagtggctgaagaatctaaatcatgtcagctatggccgtttgaccttcaaatatgaaagggattctamctaccacktgctcctgtctgttcaakagagtttagaaagaaaatttggaaagcatggtggaactattcccattgtacccacggcagagttmcragacagtatakygvdtrcayctgagraagacattgtgyactctgccttggcatacacaatggagcgttctgccaggcaaattatgcacacagccatgaagtataacctgggattggacctgagaacagctgcctatgtcaatgccattgaaaaagtcttcaaagtgtacagtgaagctggtgtgaccttcacatagatggatcatggctgacttcctcactaacctcttcacgtgtaacttctgcagacctaccacaagtttacatgtaaccacagaaatccctttctctcctgactcattactaatggataccattctcaacaagtcaatccaaatcagcccgttaaggagaaagaaattaatatacaagctgagtgtgaaagtagaaatcacctacaccagagagctattttggtattttgcctttaaataaaaagcctcctccatatggctgtgcagccttgctctgtggcttttcccagcacaatcagtgctagtgctggggaagggacagtcaagagcagtcagttgcttacttattttgctctggatgagtctgggacacgctgtaactttaacacatttaagaagaaggtgtgtggccttttcagaaggtggcatggtcctcaagtgagttcttagtattttatatcagcaaaataactcaattttgcagattgcaaacaaatataaaagctgtttctgtttatgaattttattcttttagaatagaataagtacatgctgctgtaataaaattgcctttaatcacttaacaagcctaaccttgactcagtgaatgcctataaaaataataaatgaaaaaaaacagtatttttatatcataaaagtttcatttgtagcttatcattcacgtattgttgtccagcaaacattaaaagccctgtggataattacgttatcttcatacctgcaaaacggtggaggctattttcgttaaaactgtcagaattcgctgttataattatgacacatagtccaaagaatgcagtaacctttttatcatgttaactaattgttctcttttgaagatctatggttgactaattaaacaataattcaagtagagtgtcccagaaaaaaaccacttgggctccctgattggagtctggctggctctgagcattgccaatggcccctactcacctgactttgtatcctcttcttttagaggctttgcattctgcacccagcttcactaacagtgggctgaaaccaaccttgggttgagtgtttcatttgggagttatttggccagggccttttgaacaatagtgtccccatgaagtgctagataatatatgtgtaagaatcagcttttttttttttaactataatatccttcagaaatttctaactactttgtaactgcatggcttaacctggtgataaaagcagttattaaaagtctacatttttttttaaaaaaaga

SEQ ID NO: 2353 - DNA, 3134 bp, Homo sapiens
ccggcgccctggttggcgccctgcccccaaagtccgtcctccccgttaggtggcgcccaaggggaggggacagccgggcaggcaggaagctgcggcttaaaagggcaacccgcgccggacccttccttcctagtcgcggggagtctgagaaagcgcacctgttccgcgaccgtcacgcacccctcctccgcctgccgcgatgtaccgctacctggccaaagcgctgctgccgtcccgggccgggcccgctgccctgggctccgcggccaaccactcggccgcgttgctgggccggggccgcggacagcccgccgccgcctcgcagccggggctcgcattggccgcccggcgccactacagcgagttggtggccgaccgcgaggacgaccccaacttcttcaagatggtggagggcttcttcgatcgcggcgccagcatcgtggaggacaagttggtgaaggacctgaggacccaggaaagcgaggagcagaagcggaaccgggtgcgcggcatcctgcggatcatcaagccctgcaaccatgtgctgagtctctccttccccatccggcgcgacgacggctcctgggaggtcatcgaaggctaccgggcccagcacagccagcaccgcacgccctgcaagggaggtatccgttacagcactgatgtgagtgtagatgaagtaaaagctttggcttctctgatgacatacaagtgtgcagtggttgatgtgccgtttgggggtgctaaagctggtgttaagatcaatcccaagaactataccgaaaatgaattggaaaagatcacaaggaggttcaccatggagctagcaaagaagggctttattggtcctggcgttgatgtgcctgctccagacatgaacacaggtgagcgggagatgtcctggattgctgatacctatgccagcaccatagggcactatgatattaatgcacacgcctgtgttactggtaaacccatcagccaagggggaatccatggacgcatctctgctactggcygtggtgtcttccatgggattgaaaacttcatcaatgaagcttcttacatgagcattttaggaatgacaccagggtttagagataaaacatttgttgttcagggatttggtaatgtgggcctacactctatgaratatttacatcrttttggtgctaaatgtattgctgttggtgagtctgatgggagtatatggaatccagatggtattgacccaaaggaactggmagacttcaaattgcaacatgggtccattctgggcttccccaaggcaaagccctatgaaggaagcatcttggaggtcgactgtgacatactgatcccagctgccactgagaagcagttgaccaaatccaacgcacccagagtcaaagccaagatcattgctgaaggtgccaatgggccaacaactccagaagctgrtaagatcttcctggagagaaacattttggttattccagatctctacttgaatgctggaggagtgacagtatcttactttgagtggctgaagaatctaaatcatgtcagctatggccgtttgaccttcaaatatgaaagggattctamctaccacktgctcctgtctgttcaakagagtttagaaagaaaatttggaaagcatggtggaactattcccattgtacccacggcagagttmcragacagtatakygvdtrcayctgagraagacattgtgyactctgccttggcatacacaatggagcgttctgccaggcaaattatgcacacagccatgaagtataacctgggattggacctgagaacagctgcctatgtcaatgccattgaaaaagtcttcaaagtgtacagtgaagctggtgtgaccttcacatagatggatcatggctgacttcctcactaacctcttcacgtgtaacttctgcagacctaccacaagtttacatgtaaccacagaaatccctttctctcctgactcattactaatggataccattctcaacaagtcaatccaaatcagcccgttaaggagaaagaaattaatatacaagctgagtgtgaaagtagaaatcacctacaccagagagctattttggtattttgcctttaaataaaaagcctcctccatatggctgtgcagccttgctctgtggcttttcccagcacaatcagtgctagtgctggggaagggacagtcaagagcagtcagttgcttacttattttgctctggatgagtctgggacacgctgtaactttaacacatttaagaagaaggtgtgtggccttttcagaaggtggcatggtcctcaagtgagttcttagtattttatatcagcaaaataactcaattttgcagattgcaaacaaatataaaagctgtttctgtttatgaattttattcttttagaatagaataagtacatgctgctgtaataaaattgcctttaatcacttaacaagcctaaccttgactcagtgaatgcctataaaaataataaatgaaaaaaaacagtatttttatatcataaaagtttcatttgtagcttatcattcacgtattgttgtccagcaaacattaaaagccctgtggataattacgttatcttcatacctgcaaaacggtggaggctattttcgttaaaactgtcagaattcgctgttataattatgacacatagtccaaagaatgcagtaacctttttatcatgttaactaattgttctcttttgaagatctatggttgactaattaaacaataattcaagtagagtgtcccagaaaaaaaccacttgggctccctgattggagtctggctggctctgagcattgccaatggcccctactcacctgactttgtatcctcttcttttagaggctttgcattctgcacccagcttcactaacagtgggctgaaaccaaccttgggttgagtgtttcatttgggagttatttggccagggccttttgaacaatagtgtccccatgaagtgctagataatatatgtgtaagaatcagcttttttttttttaactataatatccttcagaaatttctaactactttgtaactgcatggcttaacctggtgataaaagcagttattaaaagtctacatttttttttaaaaaaaga

SEQ ID NO: 2354 - DNA, 1808 bp, Homo sapiens
ctatttatccttaggactgagggttgtgggttctaattggatgggaggtctgggatgggtctggattctgattgattgctccatctgggggcccactggtggttaggcgtttgattggctttttagaactggcatatggagattgagggtcttcatgccaattggtcagtaggactgagaggcctgggttctaactagttcttctgacttgaggtcgggagaagagagaatgaccgctgctattaggactgaggagttctgagcactgaagagctggggagggggtggttgcagtgtatagcgtgtgatctgcttgtaacagtttcgttgcattatactaagggttactctacctagaaaagggcggaggtgaaaggatgcaacgcaacgctaatttcaccagcggaagaagcgggtacagaccttaatgagtccccgttttgatcgactgataagggaatggggaaattgaagccaggactcgatgcagattggctacggatccaaaacgcccactaaccttggcgcgtcccagtctccaccccaaacctaactcaggtgaaaatggcgccacgcgcgggggcggggctagaggtacaaagagagtgtctattggttgggagcggcacgggccgccttcttcgcttcaccattggctcgctccgtaaggcaagagaacccactaggggatgagcccgaactagggatgtgacagagcgcgagacccagcctaaagagagcccggagccagcgtgggaggccgctgccgtcgcgcgccttggtttttctgttccttttttttttttttttttaacttcctgcctatacacacgcagccatcagcccacaaagacatgrctaccaacgckggccccttgcacccatastggcctcagcacctaagacyggacaactttgtacctaatgaccgccccacctgrcatatactggctggcctcttctctgtcacaggggtcttagtcgtgaccacatgrctgttgtcwggtcgtgctgcggttgtcccattggggacttggcggygactgtccctgtgctrgtttgcagtgtgtgggttcattcacctggtgatcragggctgsttcgttctctactacgaagacctgcttggagaccaagccttcttatctcaactctggaaagagtatgccaagggagacagccgatacatcctgggtgacaacttcacagtgtgcatggaaaccatcacagcttgcctgtrgggaccactcagsctgtgggtggtgatcgcctttctccgccagcatcccctccgcttcattctacagcttgtggtctctgtgggccagatctatggggatgtgctctacttcctgacagagcaccgcracggattcyagcacggagagctgggccaccctctctacttctgrttttactttgtcttcatgaatgccctgtrgctggtgctgcctggagtccytgtgcttgatgctgtgaagcacctcactcatgcccagagcacgctggatgccaaggccacaaaagccaagagcaagaagaactgaggagtggtggaccaggctcgaacactggccgaggaggagctctctgcctgccagaagagtctagtcctgctcccacagtttggagggacaaagctaattgatctgtcacactcaggctcatgggcaggcacaagaaggggaataaaggggctgtgtgaaggcactgctgggagccattagaacmcagatacaagagaagccaggaggtctatgatggtgacgatttttaaaatcaggaaataaaagatcttgmctctaaca

SEQ ID NO: 2355 - DNA, 1844 bp, Homo sapiens
gcccggcttccgcccggtctcccggcaacgctgcggccccgcccacgccatggcgccctaggagaacgcggggacagaactcttgctgcagagtttcgagcgccacttcctggcggcgcgctcactgcgctccttcccctggcagagcttagaagcaaagttaagagactcatcagattctgagctgcggcgggatattttgcagaagactgtgaagcatcctgtgtgtgtgaagcacccgccgtcagtcaagtatgcccggtgctttctctcagaactcatgaaaaagacgtgctgtattgcccagaagccatcgtgtcgctagtcggggtcctgcggaggctggctgcctgccgggagcaccagcgggctcctgaggtctacgtggcctttaccgtccacaacccacagacgtgccagctgttcaccactgagctagccaggccaggatcagatgggaagtggaagcttgtcatgaccagaaactgtttccctacaaagagcacttggagatggcaatgctgaacctaatactgtaggactcacacrcgacttcaacgggattgtgaggatcaagtcactctcatgggaagaatttttacatgggaaagcggataaaactttcattggactggaatgtttggagaatrttaatttccaaatcaggaaccacaaactgccctctaataagacatcrgctrtctaagcgtgtgggtgccccctttctgccagcagttctggttcttaagaaaatcaccataaatcagacatgaaaattctggctcyaaaaatagcattttctttgtgcaaataaaaacgtgtgtatcaagtatgtcacaaagccaagcccgctgcagctgccacatccctgggcttactgtgcagcaggtgcttttttcaagacaggaatcaaaatattaggaacacggcagaaaggcgacacctggagaccaaacgcaggatgaggagtactgcagaggtcacagggaagtcacagaacagtagtacgctagcaggggcatggggcgtgaagaacagaagaagagaggaagtgtttccaagcctccaaaaaagaaatcagagccaaccacagcttcccgggtcacagaagcaattcactcaccaggcggcacyactgccgtcatttcagcttctggccactgggaggcgctgcttgaaagggtttgccctgagactccaagaagaagctgcgggaaggacagcaggggccctggggttttagcctctggcccrggagttatgtgtccataaccaaagggagcacagtctgcacccagctctcatcccatcggagctgctgcractcccgcaggttcttccggaacaggtttagcttgcctgcaggatcaggaaagtttgagaaaagcatctgcataatactaaagagcagagcttacctcattgcctgtccccaccgcatcccaggtcaccacctggctgaccccaggtgcccgacccamcaacarcccctaccaagttcttaactccctcacttggactcragactcttcacgccccagcagcgctccgcctccaacttgacatcacgctttctggraacttccccgcatgtcccactttcccacacttggtgtcctggggcacctcccggcctcttcatgctgtatgctcccctgcgagcaccctcctcttggcctctggccaagtcccacccatctgtgggtaacaagggggtgtcggtgttcttttcagccttgctaaactgtctgaatcaaggatcacaaactacagcctgcaggccaaatccagcccacagcctgtgtttgtaaataaagatttattggaacaaagccacacccctt

SEQ ID NO: 2356 - DNA, 1815 bp, Homo sapiens
gcccggcttccgcccggtctcccggcaacgctgcggccccgcccacgccatggcgccctaggagaacgcggggacagaactcttgctgcagagtttcgagcgccacttcctggcggcgcgctcactgcgctccttcccctggcagagcttagaagcaaagttaagagactcatcagattctgagctgcggcgggatattttgcagaagccctcgggaggctcggtcacactctccaagagcacagccatcatctcccacggcaccacaggcctggtcacatgggacgctgccctctaccttgcagaatgggccgagaacccagcagccttcactcacaggactgtcctaaagcttggcagtggcgccggcctcacaggcctggccatctgcaagatgtgccgcccccgggcgtacatcttcagcgactgtcacagccgggtcctcgagcagctccgagggaatgtccttctcaatggcctctcattagaggcagacatcactgccaacttagacggccccagggtgacagtggcccagctggactgggacgtcgcgacggtctgtcagctctctgccgtccagccagatgttgtcattgcagcagacgtgctgtattgcccagaagccatcgtgtcgctagtcggggtcctgcggaggctggctgcctgccgggagcaccagcgggctcctgaggtctacgtggcctttaccgtccacaacccacagacgtgccagctgttcaccactgagctagttgagatcagatgggaagtggaagcttgtcatgaccagaaactgtttccctacaaagagcacttggagatggcaatgctgaacctaatactytaggactcacacrcgacttcaacgggattgtgaggatcaagtcactctcatgggaagaatttttacatgggaaagcggataaaactttcattggactggaatgtttggagaatrttaatttccaaatcaggaaccacaaactgccctctaataagacatcrgctrtctaagcgtgtgggtgccccctttctgccagcagttctggttcttaagaaaatcaccataaatcagacatgaaaattctggcttcactcaccaggcggcacyactgccgtcatttcagcttctggccactgggaggcgctgcttgaaagggtttgccctgagactccaagaagaagctgcgggaaggacagcaggggccctggggttttagcctctggcccrggagttatgtgtccataaccaaagggagcacagtctgcacccagctctcatcccatcggagctgctgcractcccgcaggttcttccggaacaggtttagcttgcctgcaggatcaggaaagtttgagaaaagcatctgcataatactaaagagcagagcttacctcattgcctgtccccaccgcatcccaggtcaccacctggctgaccccaggtgcccgacccamcaacarcccctaccaagttcttaactccctcacttggactcragactcttcacgccccagcagcgctccgcctccaacttgacatcacgctttctggraacttccccgcatgtcccactttcccacacttggtgtcctggggcacctcccggcctcttcatgctgtatgctcccctgcgagcaccctcctcttggcctctggccaagtcccacccatctgtgggtaacaagggggtgtcggtgttcttttcagccttgctaaactgtctgaatcaaggatcacaaactacagcctgcaggccaaatccagcccacagcctgtgtttgtaaataaagatttattggaacaaagcc

SEQ ID NO: 2357 - DNA, 1486 bp, Homo sapiens
cctagcagccccacacaatacgctcatgtcctgtccccaaacaccgccatcctcaaacacatgtgctctgtttccaggccaggccaggatcagatgggaagtggaagcttgtcatgaccagaaactgtttccctacaaagagcacttggagatggcaatgctgaacctaatactgtaggactcacacrcgacttcaacgggattgtgaggatcaagtcactctcatgggaagaatttttacatgggaaagcggataaaactttcattggactggaatgtttggagaatrttaatttccaaatcaggaaccacaaactgccctctaataagacatcrgctrtctaagcgtgtgggtgccccctttctgccagcagttctggttcttaagaaaatcaccataaatcagacatgaaaattctggctcyaaaaatagcattttctttgtgcaaataaaaacgtgtgtatcaagtatgatgttcccccaacgtggacacacccggttcctcacaaagccaagcccgctgcagctgccacatccctgggcttactgtgcagcaggtgcttttttcaagacaggaatcaaaatattaggaacacggcagaaaggcgacacctggagaccaaacgcaggatgaggagtactgcagaggtcacagggaagtcacagaacagtagtacgctagcaggggcatggggcgtgaagaacagaagaagagaggaagtgtttccaagcctccaaaaaagaaatcagagccaaccacagcttcccgggtcacagaagcaattcactcaccaggcggcacyactgccgtcatttcagcttctggccactgggaggcgctgcttgaaagggtttgccctgagactccaagaagaagctgcgggaaggacagcaggggccctggggttttagcctctggcccrggagttatgtgtccataaccaaagggagcacagtctgcacccagctctcatcccatcggagctgctgcractcccgcaggttcttccggaacaggtttagcttgcctgcaggatcaggaaagtttgagaaaagcatctgcataatactaaagagcagagcttacctcattgcctgtccccaccgcatcccaggtcaccacctggctgaccccaggtgcccgacccamcaacarcccctaccaagttcttaactccctcacttggactcragactcttcacgccccagcagcgctccgcctccaacttgacatcacgctttctggraacttccccgcatgtcccactttcccacacttggtgtcctggggcacctcccggcctcttcatgctgtatgctcccctgcgagcaccctcctcttggcctctggccaagtcccacccatctgtgggtaacaagggggtgtcggtgttcttttcagccttgctaaactgtctgaatcaaggatcacaaactacagcctgcaggccaaatccagcccacagcctgtgtttgtaaataaa

SEQ ID NO: 2358 - DNA, 1568 bp, Homo sapiens
gcccggcttccgcccggtctcccggcaacgctgcggccccgcccacgccatggcgccctaggagaacgcggggacagaactcttgctgcagagtttcgagcgccacttcctggcggcgcgctcactgcgctccttcccctggcagagcttagaagcaaagttaagagactcatcagattctgagctgcggcgggatattttgcagaagcacgaggctgtccacacagagcctttggacgagctgtacgaggtgctggcggagactttgatggccaaggagtccacccagggccactggagctatttgctgacgtgctgtattgcccagaagccatcgtgtcgctagtcggggtcctgcggaggctggctgcctgccgggagcaccagcgggctcctggatcagatgggaagtggaagcttgtcatgaccagaaactgtttccctacaaagagcacttggagatggcaatgctgaacctaatactgtaggactcacacrcgacttcaacgggattgtgaggatcaagtcactctcatgggaagaatttttacatgggaaagcggataaaactttcattggactggaatgtttggagaatrttaatttccaaatcaggaaccacaaactgccctctaataagacatcrgctrtctaagcgtgtgggtgccccctttctgccagcagttctggttcttaagaaaatcaccataaatcagacatgaaaattctggctcyaaaaatagcattttctttgtgcaaataaaaacgtgtgtatcaagtatgatgttcccccaacgtggacacacccggttcctcacaaagccaagcccgctgcagctgccacatccctggtcaccaggcggcacyactgccgtcatttcagcttctggccactgggaggcgctgcttgaaagggtttgccctgagactccaagaagaagctgcgggaaggacagcaggggccctggggttttagcctctggcccrggagttatgtgtccataaccaaagggagcacagtctgcacccagctctcatcccatcggagctgctgcractcccgcaggttcttccggaacaggtttagcttgcctgcaggatcaggaaagtttgagaaaagcatctgcataatactaaagagcagagcttacctcattgcctgtccccaccgcatcccaggtcaccacctggctgaccccaggtgcccgacccamcaacarcccctaccaagttcttaactccctcacttggactcragactcttcacgccccagcagcgctccgcctccaacttgacatcacgctttctggraacttccccgcatgtcccactttcccacacttggtgtcctggggcacctcccggcctcttcatgctgtatgctcccctgcgagcaccctcctcttggcctctggccaagtcccacccatctgtgggtaacaagggggtgtcggtgttcttttcagccttgctaaactgtctgaatcaaggatcacaaactacagcctgcaggccaaatccagcccacagcctgtgtttgtaaataaagatttattggaacaaagcc

SEQ ID NO: 2359 - DNA, 2255 bp, Homo sapiens
cgcccggtctcccggcaacgctgcggccccgcccacgccatggcgccctaggagaacgcggggacagaactcttgctgcagagtttcgagcgccacttcctggcggcgcgctcactgcgctccttcccctggcaggtgggcggcggggcgagcggagaggcccgcggggctcgcgggagtccaggggcagacgggatgtgtctccgtgctgaagcccccggcgctcccgccacgtgagtgcctgggctcccgccggtcaggtcggcgcgacccggtccccgtccctggggcctggccagagtcgctcgcacccctcctgccccgcgggctggcggcgtaagctgggggcgtctccaccgtcttggggggcagacgcgcgctcgttgtggggtacagttcacgatcattttcacgactttttaaaggcagtaatcgttctggtcactgcgacacagctgccctcgcccattctaaaaagtcagcgccctcaggaccgcagagcttagaagcaaagttaagagactcatcagattctgagctgcggcgggatattttgcagaagactgtgaagcatcctgtgtgtgtgaagcacccgccgtcagtcaagtatgcccggtgctttctctcagaactcatgaaaaagccctcgggaggctcggtcacactctccaagagcacagccatcatctcccacggcaccacaggcctggtcacatgggacgctgccctctaccttgcagaatgggccgagaacccagcagccttcactcacaggactgtcctaaagcttggcagtggcgccggcctcacaggcctggccatctgcaagatgtgccgcccccgggcgtacatcttcagcgactgtcacagccgggtcctcgagcagctccgagggaatgtccttctcaatggcctctcattagaggcagacatcactgccaacttagacggccccagggtgacagtggcccagctggactgggacgtcgcgacggtctgtcagctctctgccgtccagccagatgttgtcattgcagcagacgtgctgtattgcccagaagccatcgtgtcgctagtcggggtcctgcggaggctggctgcctgccgggagcaccagcgggctcctgaggtctacgtggcctttaccgtccacaacccacagacgtgccagctgttcaccactgagctagccaggccaggatcagatgggaagtggaagcttgtcatgaccagaaactgtttccctacaaagagcacttggagatggcaatgytgaacctaatactgtaggactcacacrcgacttcaacgggattgtgaggatcaagtcactctcatgggaagaatttttacatgggaaagcggataaaactttcattggactggaatgtttggagaatrttaatttccaaatcaggaaccacaaactgccctctaataagacatcrgctrtctaagcgtgtgggtgccccctttctgccagcagttctggttcttaagaaaatcaccataaatcagacatgaaaattctggcttcactcaccaggcggcacyactgccgtcatttcagcttctggccactgggaggcgctgcttgaaagggtttgccctgagactccaagaagaagctgcgggaaggacagcaggggccctggggttttagcctctggcccrggagttatgtgtccataaccaaagggagcacagtctgcacccagctctcatcccatcggagctgctgcractcccgcaggttcttccggaacaggtttagcttgcctgcaggatcaggaaagtttgagaaaagcatctgcataatactaaagagcagagcttacctcattgcctgtccccaccgcatcccaggtcaccacctggctgaccccaggtgcccgacccamcaacarcccctaccaagttcttaactccctcacttggactcragactcttcacgccccagcagcgctccgcctccaacttgacatcacgctttctggraacttccccgcatgtcccactttcccacacttggtgtcctggggcacctcccggcctcttcatgctgtatgctcccctgcgagcaccctcctcttggcctctggccaagtcccacccatctgtgggtaacaagggggtgtcggtgttcttttcagccttgctaaactgtctgaatcaaggatcacaaactacagcctgcaggccaaatccagcccacagcctgtgtttgtaaataaagatttattggaacaaagcc

SEQ ID NO: 2360 - DNA, 3285 bp, Homo sapiens
gccggaagtggaaatgcgtcatagagggcgggcggcgacggcggtggcggcgtcggaggcgcctccgggggacggtggcggctcccggcggtgaggccgcgcctgtccggggatcgtcgagggacggcgggagcttgggccagcggcggcggcggcctgggacgcaggcggagccccgcgcaggcccarggtcccggaggctatggcagcggctaccatcgtgcacgacacgtctgaggccgtggagctctgccctgcttacggcttgtacctgaagcccatcaccaagatgaccatcagcgtggcactcccgcagctgaagcagccrgggaagtccatctccaactgggaggtgatggagaggctgaagggcatggtgcagaaccaccagttctccacgctgcgtatttccaagagcaccatggacttcatccgcttcgagggggaggtggagaacaagagcctggtcaagtcttttctggcctgcctggacggcaagaccatcaagctcagcggcttctccgacatcctgaaggtgcgcgcggccgagttcaagatcgacttccccacccgccacgactgggactccttcttccgcgacgccaaggacatgaacgagaccctgccgggggagcggccggacaccatccacctggaggggctgccctgcaagtggttcgccctgaaggagtcgggctccgagaagcccagcgaggacgtcctggtcaaggtgtttgagaagttcggggagatccggaatgtggacatccccatgctggacccctaccgggaggagatgacgggccgcaacttccacaccttcagtttcggggggcacttgaacttcgaggcctatgtgcagtaccgygagtacatgggcttcatccaggccatgagcgccctgcgcgggatgaaactcatgtacaagggcgaggacggcaaggccgtggcctgcaacatcaaggtttcttttgattcgaccaaacacctgagtgatgcctcaattaagaagcggcagctggagaggcagaagcttcaggaactggagcagcaaagagaagaacaaaagcgcagagagaaggaagcggaggagaggcagcgagcggaggaaaggaaacaaaaggagctggaagagctggagcgagagaggaaaagagaagagaagcttcgcaagagggagcagaagcagagggaccgtgagctgcgccggaatcagaagaagctggagaagctgcaggcggaggagcagaagcagctgcaggagaagatcaagctggaggagcgcaagctgctgctggcccagaggaacctgcagtccatccggctcatcgccgagctgctcagcagagccaagttgtgataagtccccgggaaggagcatgacaagaggctgagacatgtggcagcccagtccttacctcatggctgtgaagctacgggaacaggagcagaaggaggagaagctgaggctccagcagcaggaggagcggcggcggctgcaggaggccgagctgcggcgcgtggaggaggagaaggagcgcgcgctgggcctgcagcggaaagagcgggagctgcgcgagcggctgctgagcatcctgctgagcaagaagccggacgacagccacacacacgacgagctgggcgtggcacacgccgacctgctgcagcccgtcctggacatcctgcagaccgtgtcgtccggctgtgtgagcgccaccacrctgcaccccctcgggggccagcccccggccggtgcccccaaggagagcscggcccacccagaggccgacggcgctcccaraagcrtgaacgggagcgtggccgaggaggccccatgcaaggaggttcagagctcctgtcgtgtggtccccgaggatggctctccagagaagaggtgccygggcggcgtcctctcctgcattcctgacaacaaccaacagcccaagggcatccctgcctgcgagcagaatgtctccagaaaggacacccggtcagaacaggacaagtgcaaccgggagcccagcaagggccggggccgggccaccggagacgggcttgctgaccggcacaagcgggagaggagccgggccaggcgggccagcagcagggaggacgggaggccacgcaaggagcggcggccccacaagaagcacgcctacaaggatgacagcccccgccggcgcagcacgagcccggaccacacccggtcccggaggtcccacagcaaagacaggcaccggagggagcggagccgggagcggaggggcagcgccagcaggaagcacagycgccacygccgccgaagcgagcggtcgcgctcccggtccccgagcaggcaccgcagtacctggaacaggtaatgacgggcacggcctccccacggcctgtccgggaaagaccaggacctgctcgagcctcctggccgctccttggccgctctccgtccacccctgcaaagccaagacccttctgcagccacgaatgtccacggagcccgccggcaggaaggaagacaccatgctttagagatccatctttctccactcaccgcagcgtacttggcacttcagtttcaaacacgtagtcctttaaaacttgatccgatagctttaatgcggccggtcctctctcagtcaggaaaattgcacagaccgacagtcgtgaggatggcagagctgctgcattcccccacayggggatttctgtgtctgcttggcgacctccctgcgtgcacggcctaggaggtgcacgggccaccatagtcacactggcactgaaaagaaagcgttgccctggtgattctttcccccccgtttgtaatgttaactgatcaggaagtgcagtttgggtgggatgccgaatcgtcgtgctgacattgagtcacggatgaggaaggtacaagtcctttaagatcaaaactcaaacgggccgttctttctaaggtgtcggtatgtggggagtggtacaaaatggtctgatgctccttcaaaaacattcactttttacaacgtcaaggaattaagcataaaaaagattggttaaaagctttggtttctagtaaaggttagtgtgtgtggtttttttaagaagctgttttgctaaattatttttacttggaatgtttcaaacagatttcaggctgcaaacttgttttataatcgtttgcttctccaagtgaagctcagaaatacctaaaaatagctgtaacgttcgygttaggaaagatggtgtttattccagtttgcatttttatggtgaaataaaatccttttccaatgaactaaa

SEQ ID NO: 2361 - DNA, 1370 bp, Homo sapiens
tcaggaactggagcagcaaagagaagaacaaaagcgcagagagaaggaagcggaggagaggcagcgagcggaggaaagcagcygtgagcgggtggctcttccccaccttgccagcaggctctgtgctccttgaagcaagcgctccagaggctccggaagccacggctggattggagacaagatgggatcctcagaggaccaggcctatcgcctccttaatgactacgccaacggcttcatggtgtcccaggttctcttcgccgcctgcgagctgggcgtgtttgaccttctcgccgaggccccagggcccctggacgtggcggcagtggctgcaggtgtgagggccagcgcccatgggacagagctcctgctggacatctgtgtgtccctgaagctgctgaaagtggagacgaggggaggaaaagctttctatcgaaacacagagctgtccagcgactacctgaccacggtcagcccgacgtcacaatgcagcatgctgaagtacatgggcaggaccagctaccggtgctggggccacctggcagacgccgtgagagaaggaaggaaccagtacctggagacgtttggcgttcccgctgaagagctttttacggccatctacaggtccgagggcgagcggctacagttcatgcaagctctgcaggaggtctggagcgtcaacgggagaagcgtgctgaccgcctttgacctgtcagtgttcccacttatgtgtgaccttggtgggacatggataaagctggaaaccatcattctcagcaaactatcgcaaggacagaaaaccaaacaccgcgtgttctcactcataggtggggctggagctctggctaaggaatgcatgtctctgtaccctggatgtaagatcaccgtttttgacatcccagaagtggtgtggacggcaaagcagcacttctcattccaggaggaagaacagattgacttccaggaaggggatttcttcaaagaccctcttccggaagctgatctgtacatcctggccagggtcctccatgactgggcagayggaaagtgctcacacctgctggagaggatctaccacacttgcaagccaggtggtggcattctggtaattgaaagcctcctggatgaagacaggcgaggtcctctgctcacgcagctctactctctgaacatgcttgtgcagacggaagggcaggagaggacccccacccactaccacatgctcctctcttctgctggcttcagagacttccagtttaagaaaacaggagccatttatgatgccattttagccaggaaataactgtttcttgtgacctggaactaacgtcaaagcacacaagacataataataaagacatgtacctcca

SEQ ID NO: 2362 - DNA, 3215 bp, Homo sapiens
gccggaagtggaaatgcgtcatagagggcgggcggcgacggcggtggcggcgtcggaggcgcctccgggggacggtggcggctcccggcggtgaggccgcgcctgtccggggatcgtcgagggacggcgggagcttgggccagcggcggcggcggcctgggacgcaggcggagccccgcgcaggcccarggtcccggaggctatggcagcggctaccatcgtgcacgacacgtctgaggccgtggagctctgccctgcttacggcttgtacctgaagcccatcaccaagatgaccatcagcgtggcactcccgcagctgaagcagccrgggaagtccatctccaactgggaggtgatggagaggctgaagggcatggtgcagaaccaccagttctccacgctgcgtatttccaagagcaccatggacttcatccgcttcgagggggaggtggagaacaagagcctggtcaagtcttttctggcctgcctggacggcaagaccatcaagctcagcggcttctccgacatcctgaaggtgcgcgcggccgagttcaagatcgacttccccacccgccacgactgggactccttcttccgcgacgccaaggacatgaacgagaccctgccgggggagcggccggacaccatccacctggaggggctgccctgcaagtggttcgccctgaaggagtcgggctccgagaagcccagcgaggacgtcctggtcaaggtgtttgagaagttcggggagatccggaatgtggacatccccatgctggacccctaccgggaggagatgacgggccgcaacttccacaccttcagtttcggggggcacttgaacttcgaggcctatgtgcagtaccgygagtacatgggcttcatccaggccatgagcgccctgcgcgggatgaaactcatgtacaagggcgaggacggcaaggccgtggcctgcaacatcaaggtttcttttgattcgaccaaacacctgagtgatgcctcaattaagaagcggcagctggagaggcagaagcttcaggaactggagcagcaaagagaagaacaaaagcgcagagagaaggaagcggaggagaggcagcgagcggaggaaaggaaacaaaaggagctggaagagctggagcgagagaggaaaagagaagagaagcttcgcaagagggagcagaagcagagggaccgtgagctgcgccggaatcagaagaagctggagaagctgcaggcggaggagcagaagcagctgcaggagaagatcaagctggaggagcgcaagctgctgctggcccagaggaacctgcagtccatccggctcatcgccgagctgctcagcagagccaaggctgtgaagctacgggaacaggagcagaaggaggagaagctgaggctccagcagcaggaggagcggcggcggctgcaggaggccgagctgcggcgcgtggaggaggagaaggagcgcgcgctgggcctgcagcggaaagagcgggagctgcgcgagcggctgctgagcatcctgctgagcaagaagccggacgacagccacacacacgacgagctgggcgtggcacacgccgacctgctgcagcccgtcctggacatcctgcagaccgtgtcgtccggctgtgtgagcgccaccacrctgcaccccctcgggggccagcccccggccggtgcccccaaggagagcscggcccacccagaggccgacggcgctcccaraagcrtgaacgggagcgtggccgaggaggccccatgcaaggaggttcagagctcctgtcgtgtggtccccgaggatggctctccagagaagaggtgccygggcggcgtcctctcctgcattcctgacaacaaccaacagcccaagggcatccctgcctgcgagcagaatgtctccagaaaggacacccggtcagaacaggacaagtgcaaccgggagcccagcaagggccggggccgggccaccggagacgggcttgctgaccggcacaagcgggagaggagccgggccaggcgggccagcagcagggaggacgggaggccacgcaaggagcggcggccccacaagaagcacgcctacaaggatgacagcccccgccggcgcagcacgagcccggaccacacccggtcccggaggtcccacagcaaagacaggcaccggagggagcggagccgggagcggaggggcagcgccagcaggaagcacagycgccacygccgccgaagcgagcggtcgcgctcccggtccccgagcaggcaccgcagtacctggaacaggtaatgacgggcacggcctccccacggcctgtccgggaaagaccaggacctgctcgagcctcctggccgctccttggccgctctccgtccacccctgcaaagccaagacccttctgcagccacgaatgtccacggagcccgccggcaggaaggaagacaccatgctttagagatccatctttctccactcaccgcagcgtacttggcacttcagtttcaaacacgtagtcctttaaaacttgatccgatagctttaatgcggccggtcctctctcagtcaggaaaattgcacagaccgacagtcgtgaggatggcagagctgctgcattcccccacayggggatttctgtgtctgcttggcgacctccctgcgtgcacggcctaggaggtgcacgggccaccatagtcacactggcactgaaaagaaagcgttgccctggtgattctttcccccccgtttgtaatgttaactgatcaggaagtgcagtttgggtgggatgccgaatcgtcgtgctgacattgagtcacggatgaggaaggtacaagtcctttaagatcaaaactcaaacgggccgttctttctaaggtgtcggtatgtggggagtggtacaaaatggtctgatgctccttcaaaaacattcactttttacaacgtcaaggaattaagcataaaaaagattggttaaaagctttggtttctagtaaaggttagtgtgtgtggtttttttaagaagctgttttgctaaattatttttacttggaatgtttcaaacagatttcaggctgcaaacttgttttataatcgtttgcttctccaagtgaagctcagaaatacctaaaaatagctgtaacgttcgygttaggaaagatggtgtttattccagtttgcatttttatggtgaaataaaatccttttccaatgaactaaa

SEQ ID NO: 2363 - DNA, 2169 bp, Homo sapiens
gccggaagtggaaatgcgtcatagagggcgggcggcgacggcggtggcggcgtcggaggcgcctccgggggacggtggcggctcccggcggtgaggccgcgcctgtccggggatcgtcgagggacggcgggagcttgggccagcggcggcggcggcctgggacgcaggcggagccccgcgcaggcccarggtcccggaggctatggcagcggctaccatcgtgcacgacacgtctgaggccgtggagctctgccctgcttacggcttgtacctgaagcccatcaccaagatgaccatcagcgtggcactcccgcagctgaagcagccrgggaagtccatctccaactgggaggtgatggagaggctgaagggcatggtgcagaaccaccagttctccacgctgcgtatttccaagagcaccatggacttcatccgcttcgagggggaggtggagaacaagagcctggtcaagtcttttctggcctgcctggacggcaagaccatcaagctcagcggcttctccgacatcctgaaggtgcgcgcggccgagttcaagatcgacttccccacccgccacgactgggactccttcttccgcgacgccaaggacatgaacgagaccctgccgggggagcggccggacaccatccacctggaggggctgccctgcaagtggttcgccctgaaggagtcgggctccgagaagcccagcgaggacgtcctggtcaaggtgtttgagaagttcggggagatccggaatgtggacatccccatgctggacccctaccgggaggagatgacgggccgcaacttccacaccttcagtttcggggggcacttgaacttcgaggcctatgtgcagtaccgygagtacatgggcttcatccaggccatgagcgccctgcgcgggatgaaactcatgtacaagggcgaggacggcaaggccgtggcctgcaacatcaaggtttcttttgattcgaccaaacacctgagtgatgcctcaattaagaagcggcagctggagaggcagaagcttcaggaactggagcagcaaagagaagaacaaaagcgcagagagaaggaagcggaggagaggcagcgagcggaggaaaggaaacaaaaggagctggaagagctggagcgagagaggaaaagagaagagaagcttcgcaagagggagcagaagcagagggaccgtgagctgcgccggaatcagaagaagctggagaagctgcaggcggaggagcagaagcagctgcaggagaagatcaagctggaggagcgcaagctgctgctggcccagaggaacctgcagtccatccggctcatcgccgagctgctcagcagagccaaggtacccgggggctccctctgcagccgccagccgcrcccgggctgccctcagtgccctcccctgaaatgcgggcgrcgtcacggcgccgtttccccgccggctgcagctgtagctacgaaaccagctttaatgccgaggatgacggctccttcccgggagggtgtagcgctcgtctgtcgttcccgatgatttcagagctgtgacggtttccttttgcaaagctggtgcattcaggttccccgagcaggctggcagcctcccgggggccagggcagaggctctctgtttcctttgggtcggggcagtggcagagagtgcagggggccgctccctctggcccgcgcctctgtgtgtggtcagctggcctggctgtgacctcaccagtggcccagagcagaggggcaaggtgggctggggggagggctgagcgcacagagggggcctgccgtgggcccgggtccctcctccgcagcgtgaacctgacaggtctcaccagcgccggtactgacgaccccctcagcaccaagagcctccctgctcctcctgcaggcgcgactggtaactcccatgagcccggggccagggcccacagacagacagacctccccaggacagacgtccccggcacgctccttgtcctcaggagggstgcgtccccctggagtccaacgcggggcgaccccataacctgttgtctgattacagttgtgataagtccccgggaaggagcatgacaagaggctgagacatgtggcagcccagtccttacctcatggtgaatattgaagacactaacccaggctaggccaggctcg

SEQ ID NO: 2364 - DNA, 1452 bp, Homo sapiens
tttcattgcagggctgtgaccrtctatgacaagccggcatctttctttcaagacacacctctggacctgcagcgccrgctcttcatgaagctsagcggcacacactctccgttcagggcccgctcagaacctgaggacccagccacggagcggtcggccttcatgaagagggatgctgggagcgggctggtgatgcgtctccacgagcggccagccttgctggtcagcagcacaggctggacagaggacgaagacttctccatcctgctggcagctttagaaaagtttgaacaactgactcttgacggacacaaccttccttctctcgtctgtgtgataacaggcaaagggcctctgagggagtattacagccgcctcatccaccagtagcatttccagcacatccaggtctgcaccccctggctggagggccgaggactacccccgcttctagggtcggtggacctgggygtctgtctagacacgtcctccagtggcctggacctgcccatgaaggtggtggacatgttcaggagctgtttgcctgtgtgtgcgttgtgaacttcaagtgtttacatgagctggtgaaacatcaagaaaacggcttggtctttgaggactcagaggaactggcagctcagctgcagatgcttttctcaaactttcctgatcctgcaggcaagctaaacctgttccggaagaacctgcgggagtygcagcagctccgatgggatgagagctgggtgcagactgtgctccctttggttatggacacataactccygggccagaggctaaaaccccagggcccctgctgtccttcccgcagcttcttcttggagtctcagggcaaaccctttcaagcagcgcctcccagtggccagaagctgaaatgacggcagtrgtgccgcctggtgagtgaattgcttctgtgacccgggaagctgtggttggctctgatttcttttttggaggcttggaaacacttcctctcttcttctgttcttcacgccccatgcccctgctagcgtactactgttctgtgacttccctgtgacctctgcagtactcctcatcctgcgtttggtctccaggtgtcgcctttctgccgtgttcctaatattttgattcctgtcttgaaaaaagcacctgctgcacagtaagcccagggatgtggcagctgcagcgggcttggctttgtgaggaaccgggtgtgtccacgttgggggaacatcatacttgatacacacgtttttatttgcacaaagaaaatgctatttttrgagccagaattttcatgtctgatttatggtgattttcttaagaaccagaactgctggcagaaagggggcacccacacgcttagayagcygatgtcttattagagggcagtttgtggttcctgatttggaaattaayattctccaaacattccagtccaatgaaagtttt

SEQ ID NO: 2365 - DNA, 1479 bp, Homo sapiens
tttcattgcagggctgtgaccrtctatgacaagccggcatctttctttcaagacacacctctggacctgcagcgccrgctcttcatgaagctsagcggcacacactctccgttcagggcccgctcagaacctgaggacccagccacggagcggtcggccttcatgaagagggatgctgggagcgggctggtgatgcgtctccacgagcggccagccttgctggtcagcagcacaggctggacaggtctgcacgacccctgcaacacttgggaggacgaagacttctccatcctgctggcagctttagaaaagtttgaacaactgactcttgacggacacaaccttccttctctcgtctgtgtgataacaggcaaagggcctctgagggagtattacagccgcctcatccaccagtagcatttccagcacatccaggtctgcaccccctggctggagggccgaggactacccccgcttctagggtcggtggacctgggygtctgtctagacacgtcctccagtggcctggacctgcccatgaaggtggtggacatgttcaggagctgtttgcctgtgtgtgcgttgtgaacttcaagtgtttacatgagctggtgaaacatcaagaaaacggcttggtctttgaggactcagaggaactggcagctcagctgcagatgcttttctcaaactttcctgatcctgcaggcaagctaaacctgttccggaagaacctgcgggagtygcagcagctccgatgggatgagagctgggtgcagactgtgctccctttggttatggacacataactccygggccagaggctaaaaccccagggcccctgctgtccttcccgcagcttcttcttggagtctcagggcaaaccctttcaagcagcgcctcccagtggccagaagctgaaatgacggcagtrgtgccgcctggtgagtgaattgcttctgtgacccgggaagctgtggttggctctgatttcttttttggaggcttggaaacacttcctctcttcttctgttcttcacgccccatgcccctgctagcgtactactgttctgtgacttccctgtgacctctgcagtactcctcatcctgcgtttggtctccaggtgtcgcctttctgccgtgttcctaatattttgattcctgtcttgaaaaaagcacctgctgcacagtaagcccagggatgtggcagctgcagcgggcttggctttgtgaggaaccgggtgtgtccacgttgggggaacatcatacttgatacacacgtttttatttgcacaaagaaaatgctatttttrgagccagaattttcatgtctgatttatggtgattttcttaagaaccagaactgctggcagaaagggggcacccacacgcttagayagcygatgtcttattagagggcagtttgtggttcctgatttggaaattaayattctccaaacattccagtccaatgaaagtttt

SEQ ID NO: 2366 - DNA, 4099 bp, Homo sapiens
agtcgagagacgaggcccaatggaaaagaaaagcctgagcgctcgcgtccccacaggtcgccagaaacttggtggagcgagccaagggcggagtttgagaaaggggctgcgtccaatgagtggagcgaaccgcggcaggggccaagcctcctcaactatgacctcaaccggccaggattccaccacaaccaggcagcgaagaagtaggcagaacccccagtcgccccctcaggactccagtgtcacttcgaagcgaaatattaaaaagggagccgttccccgctctatccccaatctagcggaggtaaagaagaaaggcaaaatgaagaagctcggccaagcaatggaagaagacctaatcgtgggactgcaagggatggatctgaaccttgaggctgaagcactggctggcactggcttggtgttggatgagcagttaaatgaattccattgcctctgggatgacagcttcccggaaggccctgagcggctccatgccatcaaggagcaactgatccaggagggcctcctagatcgctgcgtgtcctttcaggcccggtttgctgaaaaggaagagctgatgttggttcacagcctagaatatattgatctgatggaaacaacccagtacatgaatgagggagaactccgtgtcctagcagacacctacgactcagtttatctgcatccgaactcatactcctgtgcctgcctggcctcaggctctgtcctcaggctggtggatgcggtcctgggggctgagatccggaatggcatggccatcattaggcctcctggacatcacgcccagcacagtcttatggatggctattgcatgttcaaccacgtggctgtggcagcccgctatgctcaacagaaacaccgcatccggagggtccttatcgtagattgggatgtgcaccacggtcaaggaacacagttcaccttcgaccaggaccccagtgtcctctatttctccayccaccgctacgagcagggtaggttctggccccacctgaaggcctctaactggtccaccacaggtttcggccaaggccaaggatataccatcaatgtgccttggaaccaggtggggatgcgggatgctgactacattgctgctttcctgcacgtcctgctgccagtcgccctcgagttccagcctcagctggtcctggtggctgctggatttgatgccctgcaaggggaccccaagggtgagatggccgccactccggcagggttcgcccagctaacccacctgctcatgggtctggcaggaggcaagctgatcctgtctctggagggtggctacaacctccgcgccctggctgaaggcgtcagtgcttcgctccacacccttctgggagacccttgccccatgctggagtcacctggtgccccctgccggagtgcccaggcttcagtttcctgtgctctggaagcccttgagcccttctgggaggttcttgtgagatcaactgagaccgtggagagggacaacatggaggaggacaatgtagaggagagcgaggaggaaggaccctgggagccccctgtgctcccaatcctgacatggccagtgctacagtctcgcacagggctggtctatgaccaaaatatgatgaatcactgcaacttgtgggacagccaccaccctgaggtaccccagcgcatcttgcggatcatgtgccgtctggaggagctgggccttgccgggcgctgcctcaccctgacaccgcgccctgccacagaggctgagctgctcacctgtcacagtgctgagtacgtgggtcatctccgggccacagagaaaatgaaaacccgggagctgcaccgtgagagttccaactttgactccatctatatctgccccagtaccttcgcctgtgcacagcttgccactggcgctgcctgccgcctggtggaggctgtgctctcaggagaggttctgaatggtgctgctgtggtgcgtcccccaggacaccacgcagagcaggatgcagcttgcggtttttgctttttcaactctgtggctgtggctgctcgccatgcccagactatcagtgggcatgccctacggatcctgattgtggattgggatgtccaccacggtaatggaactcagcacatgtttgaggatgaccccagtgtgctatatgtgtccctgcaccgctatgatcatggcaccttcttccccatgggggatgagggtgccagcagccagatcggccgggctgcgggcacaggcttcaccgycaacgtggcatggaacgggccccgcatgggtgatgctgactacctagctgcctggcatcgcctggtgcttcccattgcctacgagtttaacccagaactggtgctggtctcagctggctttgatgctgcacggggggatccgctggggggctgccaggtgtcacctgagggttatgcccacctcacccacctgctgatgggccttgccagtggccgcattatccttatcctagagggtggctataacctgacatccatctcagagtccatggctgcctgcactcgctccctccttggagacccaccacccctgctgaccctgccacggcccccactatcaggggccctggcctcaatcactgagaccatccaagtccatcgcagatactggcrcagcttacgggtcatgaaggtagaagacagagaaggaccctccagttctaagttggtcaccaagaaggcaccccaaccagccaaacctaggttagctgagcggatgaccacacgagaaaagaaggttctggaagcaggcatggggaaagtcacctcggcatcatttggggaagagtccactccaggccagactaactcagagacagctgtggtggccctcactcaggaccagccctcagaggcagccacagggggagccactctggcccagaccatttctgaggcagccattgggggagccatgctgggccagaccacctcagaggaggctgtcgggggagccactccggaccagaccacctcagaggagactgtgggaggagccattctggaccagaccacctcagaggatgctgttgggggagccacgctgggccagactacctcagaggaggctgtaggaggagctacactggcccagaccayctcggaggcagccatggagggagccacactggaccagactacgtcagaggaggctccagggggcaccgagctgatccaaactcctctagcctcgagcacagaccaccagacccccccaacctcacctgtgcagggaactacaccccagatatctcccagtacactgattgggagtctcaggaccttggagctaggcagcgaatctcagggggcctcagaatctcaggccccaggagaggagaacctactaggagaggcagctggaggtcaggacatggctgattcgatgctgatgcagggatctaggggcctcactgatcaggccatattttatgctgtgacaccactgccctggtgtccccatttggtggcagtatgccccatacctgcagcaggcctagacgtgacccaaccttgtggggactgtggaacaatccaagagaattgggtgtgtctctcttgctatcaggtctactgtggtcgttacatcaatggccacatgctccaacaccatggaaattctggacacccgctggtcctcagctacatcgacctgtcagcctggtgttactactgtcaggcctatgtccaccaccaggctctcctagatgtgaagaacatcgcccaccagaacaagtttggggaggatatgccccacccacactaagccccagaatacggtccctcttcaccttctgagcccatcctgaatatcctttgcaactccccaagagtgcttatttaagtgttaatacttttaagagaactgcgacgattaattgtggatctccccctgcccattgcctgcttgaggggcaccactactccagcccagaaggaaaggggggcagctcagtggccccaagagggagctgatatcatgaggataacattggcgggaggggagttaactggcaggcatggcaaggttgcatatgtaataaagtacaagctgttaaaa

SEQ ID NO: 2367 - DNA, 4113 bp, Homo sapiens
ggaacggggcagtcccctgaggagcggggctggttgaaacgctaggggcgggatctggcggagtggaagaaccgcggcaggggccaagcctcctcaactatgacctcaaccggccaggattccaccacaaccaggcagcgaagaagtaggcagaacccccagtcgccccctcaggactccagtgtcacttcgaagcgaaatattaaaaagggagccgttccccgctctatccccaatctagcggaggtaaagaagaaaggcaaaatgaagaagctcggccaagcaatggaagaagacctaatcgtgggactgcaagggatggatctgaaccttgaggctgaagcactggctggcactggcttggtgttggatgagcagttaaatgaattccattgcctctgggatgacagcttcccggaaggccctgagcggctccatgccatcaaggagcaactgatccaggagggcctcctagatcgctgcgtgtcctttcaggcccggtttgctgaaaaggaagagctgatgttggttcacagcctagaatatattgatctgatggaaacaacccagtacatgaatgagggagaactccgtgtcctagcagacacctacgactcagtttatctgcatccgaactcatactcctgtgcctgcctggcctcaggctctgtcctcaggctggtggatgcggtcctgggggctgagatccggaatggcatggccatcattaggcctcctggacatcacgcccagcacagtcttatggatggctattgcatgttcaaccacgtggctgtggcagcccgctatgctcaacagaaacaccgcatccggagggtccttatcgtagattgggatgtgcaccacggtcaaggaacacagttcaccttcgaccaggaccccagtgtcctctatttctccayccaccgctacgagcagggtaggttctggccccacctgaaggcctctaactggtccaccacaggtttcggccaaggccaaggatataccatcaatgtgccttggaaccaggtggggatgcgggatgctgactacattgctgctttcctgcacgtcctgctgccagtcgccctcgagttccagcctcagctggtcctggtggctgctggatttgatgccctgcaaggggaccccaagggtgagatggccgccactccggcagggttcgcccagctaacccacctgctcatgggtctggcaggaggcaagctgatcctgtctctggagggtggctacaacctccgcgccctggctgaaggcgtcagtgcttcgctccacacccttctgggagacccttgccccatgctggagtcacctggtgccccctgccggagtgcccaggcttcagtttcctgtgctctggaagcccttgagcccttctgggaggttcttgtgagatcaactgagaccgtggagagggacaacatggaggaggacaatgtagaggagagcgaggaggaaggaccctgggagccccctgtgctcccaatcctgacatggccagtgctacagtctcgcacagggctggtctatgaccaaaatatgatgaatcactgcaacttgtgggacagccaccaccctgaggtaccccagcgcatcttgcggatcatgtgccgtctggaggagctgggccttgccgggcgctgcctcaccctgacaccgcgccctgccacagaggctgagctgctcacctgtcacagtgctgagtacgtgggtcatctccgggccacagagaaaatgaaaacccgggagctgcaccgtgagagttccaactttgactccatctatatctgccccagtaccttcgcctgtgcacagcttgccactggcgctgcctgccgcctggtggaggctgtgctctcaggagaggttctgaatggtgctgctgtggtgcgtcccccaggacaccacgcagagcaggatgcagcttgcggtttttgctttttcaactctgtggctgtggctgctcgccatgcccagactatcagtgggcatgccctacggatcctgattgtggattgggatgtccaccacggtaatggaactcagcacatgtttgaggatgaccccagtgtgctatatgtgtccctgcaccgctatgatcatggcaccttcttccccatgggggatgagggtgccagcagccagatcggccgggctgcgggcacaggcttcaccgycaacgtggcatggaacgggccccgcatgggtgatgctgactacctagctgcctggcatcgcctggtgcttcccattgcctacgagtttaacccagaactggtgctggtctcagctggctttgatgctgcacggggggatccgctggggggctgccaggtgtcacctgagggttatgcccacctcacccacctgctgatgggccttgccagtggccgcattatccttatcctagagggtggctataacctgacatccatctcagagtccatggctgcctgcactcgctccctccttggagacccaccacccctgctgaccctgccacggcccccactatcaggggccctggcctcaatcactgagaccatccaagtccatcgcagatactggcrcagcttacgggtcatgaaggtagaagacagagaaggaccctccagttctaagttggtcaccaagaaggcaccccaaccagccaaacctaggttagctgagcggatgaccacacgagaaaagaaggttctggaagcaggcatggggaaagtcacctcggcatcatttggggaagagtccactccaggccagactaactcagagacagctgtggtggccctcactcaggaccagccctcagaggcagccacagggggagccactctggcccagaccatttctgaggcagccattgggggagccatgctgggccagaccacctcagaggaggctgtcgggggagccactccggaccagaccacctcagaggagactgtgggaggagccattctggaccagaccacctcagaggatgctgttgggggagccacgctgggccagactacctcagaggaggctgtaggaggagctacactggcccagaccayctcggaggcagccatggagggagccacactggaccagactacgtcagaggaggctccagggggcaccgagctgatccaaactcctctagcctcgagcacagaccaccagacccccccaacctcacctgtgcagggaactacaccccagatatctcccagtacactgattgggagtctcaggaccttggagctaggcagcgaatctcagggggcctcagaatctcaggccccaggagaggagaacctactaggagaggcagctggaggtcaggacatggctgattcgatgctgatgcagggatctaggggcctcactgatcaggccatattttatgctgtgacaccactgccctggtgtccccatttggtggcagtatgccccatacctgcagcaggcctagacgtgacccaaccttgtggggactgtggaacaatccaagagaattgggtgtgtctctcttgctatcaggtctactgtggtcgttacatcaatggccacatgctccaacaccatggaaattctggacacccgctggtcctcagctacatcgacctgtcagcctggtgttactactgtcaggcctatgtccaccaccaggctctcctagatgtgaagaacatcgcccaccagaacaagtttggggaggatatgccccacccacactaagccccagaatacggtccctcttcaccttctgaggcccacgatagaccagctgtagctcattccagcctgtaccttggatgaggggtagcctcccactgcatcccatcctgaatatcctttgcaactccccaagagtgcttatttaagtgttaatacttttaagagaactgcgacgattaattgtggatctccccctgcccattgcctgcttgaggggcaccactactccagcccagaaggaaaggggggcagctcagtggccccaagagggagctgatatcatgaggataacattggcgggaggggagttaactggcaggcatggcaaggttgcatatgtaataaagtacaagctgttaaaaaacc

SEQ ID NO: 2368 - DNA, 1275 bp, Homo sapiens
ggttattaccattttatatatcaggaagcagatccagagaggcagaatttaaatggaatcccgaggttgctgtttacatgccttccttgagcctcagtttccccatcttcaaggctggagaactagatgatctgtaaggtctcttcggttcagagtgtgtcattccattcatgatcctggaatagggcatgaaagccagtggcagamacccgaggccttaagaggtgtgtcccatgaggatgggaaggtggtaaagtttatgcaaacaatagtgtgagggatgcctctccttccggtcggccctcctccaggaggcgcatgggtggtggtagcaagtgggagtcttgggtgccctgtctcgaatctacaaggtgggagcgggtgagaacccagcgactgcgcggctgaatgacagggagtagccccgccgcctccaacatggcagcttctatccagcgaagccgggtccccgcttcckggttccgtactgtcggccaggctacttccggcagcgcgatggctgggttcccgggactcgaacggaagttccggcgggggcggccgagggggaagagtgtgtctgcgggagaaagaggagaatcgcccaagcggcctcggaagtcccagggagtggaggcccccgccgtggagccgtgtggtgtatgtgtggtaacaccatgtctgtgcccctgctcaccgatgctgccaccgtgtctggagctgagcgggaaacggccgcrgcacagctgggctgacgccctctccaccatccggctccctcacgtcaagtacatctgtccccatgcgcctaggatccctgtgaccctcaacatgaagatggtgatgccctcctggtttgacctgatggggctgagtccagatgccccagaggacgaggctggcatcaagaaggcagcagagaacatcaaggccttgattgagcatgaaatgaagaacgggatccctgccaatcgaatcgtcctgggaggcttttcacagggcggggccctgtccctctacacggccctcacctgcccccaccctctggctggcatcgtggcgttgagctgctggctgcctctgcaccgggccttcccccaggcagctaatggcagtgccaaggacctggccatactccagtgccatggggagctggaccccatggtgcccgtacggtttggggccctgacggctgagaagctccggtctgttgtcacacctgccagggtccagttcaagacatacccgggtgtcatgcacagctcctgtcctcag

SEQ ID NO: 2369 - DNA, 1233 bp, Homo sapiens
ggttattaccattttatatatcaggaagcagatccagagaggcagaatttaaatggaatcccgaggttgctgtttacatgccttccttgagcctcagtttccccatcttcaaggctggagaactagatgatctgtaaggtctcttcggttcagagtgtgtcattccattcatgatcctggaatagggcatgaaagccagtggcagamacccgaggccttaagaggtgtgtcccatgaggatgggaaggtggtaaagtttatgcaaacaatagtgtgagggatgcctctccttccggtcggccctcctccaggaggcgcatgggtggtggtagcaagtgggagtcttgggtgccctgtctcgaatctacaaggtgggagcgggtgagaacccagcgactgcgcggctgaatgacagggagtagccccgccgcctccaacatggcagcttctatccagcgaagccgggtccccgcttcckggttccgtactgtcggccaggctacttccggcagcgcgatggctgggttcccgggactcgaacggaagttccggcgggggcggccgagggggaagagtgtgtctgcgggagaaagaggagaatcgcccaagcggcctcggaagtcccagggagtggaggcccccgccgtggagccgtgtggtgtatgtgtggtaacaccatgtctgtgcccctgctcaccgatgctgccaccgtgtctggagctgagcgggaaacggccgcrgttatttttttacatggacttggagacacagggcacagctgggctgacgccctctccaccatccggctccctcacgtcaagtacatctgtccccatgcgcctaggatccctgtgaccctcaacatgaagatggtgatgccctcctggtttgacctgatggggctgagtccagatgccccagaggacgaggctggcatcaagaaggcagcagagaacaggcggggccctgtccctctacacggccctcacctgcccccaccctctggctggcatcgtggcgttgagctgctggctgcctctgcaccgggccttcccccaggcagctaatggcagtgccaaggacctggccatactccagtgccatggggagctggaccccatggtgcccgtacggtttggggccctgacggctgagaagctccggtctgttgtcacacctgccagggtccagttcaagacatacccgggtgtcatgcacagctcctgtcctcag

SEQ ID NO: 2370 - DNA, 2152 bp, Homo sapiens
ggttattaccattttatatatcaggaagcagatccagagaggcagaatttaaatggaatcccgaggttgctgtttacatgccttccttgagcctcagtttccccatcttcaaggctggagaactagatgatctgtaaggtctcttcggttcagagtgtgtcattccattcatgatcctggaatagggcatgaaagccagtggcagamacccgaggccttaagaggtgtgtcccatgaggatgggaaggtggtaaagtttatgcaaacaatagtgtgagggatgcctctccttccggtcggccctcctccaggaggcgcatgggtggtggtagcaagtgggagtcttgggtgccctgtctcgaatctacaaggtgggagcgggtgagaacccagcgactgcgcggctgaatgacagggagtagccccgccgcctccaacatggcagcttctatccagcgaagccgggtccccgcttcckggttccgtactgtcggccaggctacttccggcagcgcgatggctgggttcccgggactcgaacggaagttccggcgggggcggccgagggggaagagtgtgtctgcgggagaaagaggagaatcgcccaagcggcctcggaagtcccagggagtggaggcccccgccgtggagccgtgtggtgtatgtgtggtaacaccatgtctgtgcccctgctcaccgatgctgccaccgtgtctggagctgagcgggaaacggccgcrgttatttttttacatggacttggagacacagggcacagctgggctgacgccctctccaccatccggctccctcacgtcaagtacatctgtccccatgcgcctaggatccctgtgaccctcaacatgaagatggtgatgccctcctggtttgacctgatggggctgagtccagatgccccagaggacgaggctggcatcaagaaggcagcagagaacatcaaggccttgattgagcatgaaatgaagaacgggatccctgccaatcgaatcgtcctgggaggcttttcacagggcggggccctgtccctctacacggccctcacctgcccccaccctctggctggcatcgtggcgttgagctgctggctgcctctgcaccgggccttcccccaggcagctaatggcagtgccaaggacctggccatactccagtgccatggggagctggaccccatggtgcccgtacggtttggggccctgacggtctgttgtcacacctgccagggtccagttcaagacatacccgggtgtcatgcacagctcctgtcctcaggagatggcagctgtgaaggaatttcttgagaagctgctgcctcctgtctaactagtcgctggccccagtgcagtaccccagctcatgggggactcagcaagcaagcgtggcaccatcttggatctgagccggtcgagcccctgtcccyaccyttcctgacctgtccttttcccacaggcctctgggggcaggtggcaaggcctggcygggccttccttcctggccttagccacctggctctgtctgcagcaggggcaggctgctttcttatccatttccctggaggcgggcccccctggcagcagtattggaggggctacaggcagctggagaaaggggcccagccgctgacccactcactcaggacctcactcactagccccgctttgggccccctcctgtgacctcagggtttggcccatggggcccycccaggcccctgccccaactgattctgcccagataatcgtgtctcctgcctccactcagctgcttctcagtcatgaatgtggccatggccccggggtccccttgctgctgtgggctccctgtccctgggcaggagtgctggtgaggaggtggagccttttgaggggggccttccctcagctgtttccccacactggggggctggrccctgcctccccgttaccctccttccctgcaggcctggagcctgtagggctggactgaggttcaggtctccccccagctgtctcacccccactttgtccccactctagagcagggaggcrgtgggggaggagttgtgtctcgtcttctgtctccatgtggtttttgggtgtttttcttsttgtgtcctggattccgataaaattaaagaaattgcttcctcaac

SEQ ID NO: 2371 - DNA, 424 bp, Homo sapiens
agcggggctaggcaagggggtgtctgagtataaagagacagacttcagggtcggaaatagaagagcccattgtggggcgggggcttccccagagtcaaaggcccccgccgtggagccgtgtggtgtatgtgtggtaacaccatgtctgtgcccctgctcaccgatgctgccaccgtgtctggagctgagcgggaaacggccgcrgttatttttttacatggacttggagacacagggcacagctgggctgacgccctctccaccatccggctccctcacgtcaagtacatctgtccccatgcgcctaggatccctgtgaccctcaacatgaagatggtgatgccctcctgtcaaggccttgattgagcatgaaatgaagaacgggatccctgccaatcgaatcgtcctgggaggcttttcacag

SEQ ID NO: 2372 - DNA, 1454 bp, Homo sapiens
cgcggccccactccgggctctgagctctggcctcctcattcctcctgagcatgatgggccctctggctctctttccccaggcctaggatccctgtgaccctcaacatgaagatggtgatgccctcctggtttgacctgatggggctgagtccagatgccccagaggacgaggctggcatcaagaaggcagcagagaacatcaaggccttgattgagcatgaaatgaagaacgggatccctgccaatcgaatcgtcctgggaggcttttcacagggcggggccctgtccctctacacggccctcacctgcccccaccctctggctggcatcgtggcgttgagctgctggctgcctctgcaccgggccttcccccaggtgaatgtccccactgacccccccgccctttgtgtctgcatcctcgtggcttggggactgctgcagcactagctttgccctgagtcctgtccggcctccaggcagctaatggcagtgccaaggacctggccatactccagtgccatggggagctggaccccatggtgcccgtacggtttggggccctgacggctgagaagctccggtctgttgtcacacctgccagggtccagttcaagacatacccgggtgtcatgcacagctcctgtcctcaggtcagtggggggaccatttcccactcccacttctctgcctccagccaggtgcctctcgtgatcccctcttaatcccctcaggagatggcagctgtgaaggaatttcttgagaagctgctgcctcctgtctaactagtcgctggccccagtgcagtaccccagctcatgggggactcagcaagcaagcgtggcaccatcttggatctgagccggtcgagcccctgtcccyaccyttcctgacctgtccttttcccacaggcctctgggggcaggtggcaaggcctggcygggccttccttcctggccttagccacctggctctgtctgcagcaggggcaggctgctttcttatccatttccctggaggcgggcccccctggcagcagtattggaggggctacaggcagctggagaaaggggcccagccgctgacccactcactcaggacctcactcactagccccgctttgggccccctcctgtgacctcagggtttggcccatggggcccycccaggcccctgccccaactgattctgcccagataatcgtgtctcctgcctccactcagctgcttctcagtcatgaatgtggccatggccccggggtccccttgctgctgtgggctccctgtccctgggcaggagtgctggtgaggaggtggagccttttgaggggggccttccctcagctgtttccccacactggggggctggrccctgcctccccgttaccctccttccctgcaggcctggagcctgtagggctggactgaggttcaggtctccccccagctgtctcaccc

SEQ ID NO: 2373 - DNA, 2092 bp, Homo sapiens
ggttattaccattttatatatcaggaagcagatccagagaggcagaatttaaatggaatcccgaggttgctgtttacatgccttccttgagcctcagtttccccatcttcaaggctggagaactagatgatctgtaaggtctcttcggttcagagtgtgtcattccattcatgatcctggaatagggcatgaaagccagtggcagamacccgaggccttaagaggtgtgtcccatgaggatgggaaggtggtaaagtttatgcaaacaatagtgtgagggatgcctctccttccggtcggccctcctccaggaggcgcatgggtggtggtagcaagtgggagtcttgggtgccctgtctcgaatctacaaggtgggagcgggtgagaacccagcgactgcgcggctgaatgacagggagtagccccgccgcctccaacatggcagcttctatccagcgaagccgggtccccgcttcckggttccgtactgtcggccaggctacttccggcagcgcgatggctgggttcccgggactcgaacggaagttccggcgggggcggccgagggggaagagtgtgtctgcgggagaaagaggagaatcgcccaagcggcctcggaagtcccagggagtggaggcccccgccgtggagccgtgtggtgtatgtgtggtaacaccatgtctgtgcccctgctcaccgatgctgccaccgtgtctggagctgagcgggaaacggccgcrgttatttttttacatggacttggagacacagggcacagctgggctgacgccctctccaccatccggctccctcacgtcaagtacatctgtccccatgcgcctaggatccctgtgaccctcaacatgaagatggtgatgccctcctggtttgacctgatggggctgagtccagatgccccagaggacgaggctggcatcaagaaggcagcagagaacaggcggggccctgtccctctacacggccctcacctgcccccaccctctggctggcatcgtggcgttgagctgctggctgcctctgcaccgggccttcccccaggcagctaatggcagtgccaaggacctggccatactccagtgccatggggagctggaccccatggtgcccgtacggtttggggccctgacggctgagaagctccggtctgttgtcacacctgccagggtccagttcaagacatacccgggtgtcatgcacagctcctgtcctcaggagatggcagctgtgaaggaatttcttgagaagctgctgcctcctgtctaactagtcgctggccccagtgcagtaccccagctcatgggggactcagcaagcaagcgtggcaccatcttggatctgagccggtcgagcccctgtcccyaccyttcctgacctgtccttttcccacaggcctctgggggcaggtggcaaggcctggcygggccttccttcctggccttagccacctggctctgtctgcagcaggggcaggctgctttcttatccatttccctggaggcgggcccccctggcagcagtattggaggggctacaggcagctggagaaaggggcccagccgctgacccactcactcaggacctcactcactagccccgctttgggccccctcctgtgacctcagggtttggcccatggggcccycccaggcccctgccccaactgattctgcccagataatcgtgtctcctgcctccactcagctgcttctcagtcatgaatgtggccatggccccggggtccccttgctgctgtgggctccctgtccctgggcaggagtgctggtgaggaggtggagccttttgaggggggccttccctcagctgtttccccacactggggggctggrccctgcctccccgttaccctccttccctgcaggcctggagcctgtagggctggactgaggttcaggtctccccccagctgtctcacccccactttgtccccactctagagcagggaggcrgtgggggaggagttgtgtctcgtcttctgtctccatgtggtttttgggtgtttttcttsttgtgtcctggattccgataaaattaaagaaattgcttcctcaac

SEQ ID NO: 2374 - DNA, 2166 bp, Homo sapiens
ggttattaccattttatatatcaggaagcagatccagagaggcagaatttaaatggaatcccgaggttgctgtttacatgccttccttgagcctcagtttccccatcttcaaggctggagaactagatgatctgtaaggtctcttcggttcagagtgtgtcattccattcatgatcctggaatagggcatgaaagccagtggcagamacccgaggccttaagaggtgtgtcccatgaggatgggaaggtggtaaagtttatgcaaacaatagtgtgagggatgcctctccttccggtcggccctcctccaggaggcgcatgggtggtggtagcaagtgggagtcttgggtgccctgtctcgaatctacaaggtgggagcgggtgagaacccagcgactgcgcggctgaatgacagggagtagccccgccgcctccaacatggcagcttctatccagcgaagccgggtccccgcttcckggttccgtactgtcggccaggctacttccggcagcgcgatggctgggttcccgggactcgaacggaagttccggcgggggcggccgagggggaagagtgtgtctgcgggagaaagaggagaatcgcccaagcggcctcggaagtcccagggagtggaggcccccgccgtggagccgtgtggtgtatgtgtggtaacaccatgtctgtgcccctgctcaccgatgctgccaccgtgtctggagctgagcgggaaacggccgcrgttatttttttacatggacttggagacacagggcacagctgggctgacgccctctccaccatccggctccctcacgtcaagtacatctgtccccatgcgcctaggatccctgtgaccctcaacatgaagatggtgatgccctcctggtttgacctgatggggctgagtccagatgccccagaggacgaggctggcatcaagaaggcagcagagaacatcaaggccttgattgagcatgaaatgaagaacgggatccctgccaatcgaatcgtcctgggaggcttttcacagggcggggccctgtccctctacacggccctcacctgcccccaccctctggctggcatcgtggcgttgagctgctggctgcctctgcaccgggccttcccccaggcagctaatggcagtgccaaggacctggccatactccagtgccatggggagctggaccccatggtgcccgtacggtttggggccctgacggctgagaagctccggtctgttgtcacacctgccagggtccagttcaagacatacccgggtgtcatgcacagctcctgtcctcaggagatggcagctgtgaaggaatttcttgagaagctgctgcctcctgtctaactagtcgctggccccagtgcagtaccccagctcatgggggactcagcaagcaagcgtggcaccatcttggatctgagccggtcgagcccctgtcccyaccyttcctgacctgtccttttcccacaggcctctgggggcaggtggcaaggcctggcygggccttccttcctggccttagccacctggctctgtctgcagcaggggcaggctgctttcttatccatttccctggaggcgggcccccctggcagcagtattggaggggctacaggcagctggagaaaggggcccagccgctgacccactcactcaggacctcactcactagccccgctttgggccccctcctgtgacctcagggtttggcccatggggcccycccaggcccctgccccaactgattctgcccagataatcgtgtctcctgcctccactcagctgcttctcagtcatgaatgtggccatggccccggggtccccttgctgctgtgggctccctgtccctgggcaggagtgctggtgaggaggtggagccttttgaggggggccttccctcagctgtttccccacactggggggctggrccctgcctccccgttaccctccttccctgcaggcctggagcctgtagggctggactgaggttcaggtctccccccagctgtctcacccccactttgtccccactctagagcagggaggcrgtgggggaggagttgtgtctcgtcttctgtctccatgtggtttttgggtgtttttcttsttgtgtcctggattccgataaaattaaagaaattgcttcctcaac

SEQ ID NO: 2375 - DNA, 1559 bp, Homo sapiens
agcggggctaggcaagggggtgtctgagtataaagagacagacttcagggtcggaaatagaagagcccattgtggggcgggggcttccccagagtcaaaggcccccgccgtggagccgtgtggtgtatgtgtggtaacaccatgtctgtgcccctgctcaccgatgctgccaccgtgtctggagctgagcgggaaacggccgcrgttatttttttacatggacttggagacacagggcacagctgggctgacgccctctccaccatccggctccctcacgtcaagtacatctgtccccatgcgcctaggatccctgtgaccctcaacatgaagatggtgatgccctcctgtcaaggccttgattgagcatgaaatgaagaacgggatccctgccaatcgaatcgtcctgggaggcttttcacagggcggggccctgtccctctacacggccctcacctgcccccaccctctggctggcatcgtggcgttgagctgctggctgcctctgcaccgggccttcccccaggcagctaatggcagtgccaaggacctggccatactccagtgccatggggagctggaccccatggtgcccgtacggtttggggccctgacggctgagaagctccggtctgttgtcacacctgccagggtccagttcaagacatacccgggtgtcatgcacagctcctgtcctcaggagatggcagctgtgaaggaatttcttgagaagctgctgcctcctgtctaactagtcgctggccccagtgcagtaccccagctcatgggggactcagcaagcaagcgtggcaccatcttggatctgagccggtcgagcccctgtcccyaccyttcctgacctgtccttttcccacaggcctctgggggcaggtggcaaggcctggcygggccttccttcctggccttagccacctggctctgtctgcagcaggggcaggctgctttcttatccatttccctggaggcgggcccccctggcagcagtattggaggggctacaggcagctggagaaaggggcccagccgctgacccactcactcaggacctcactcactagccccgctttgggccccctcctgtgacctcagggtttggcccatggggcccycccaggcccctgccccaactgattctgcccagataatcgtgtctcctgcctccactcagctgcttctcagtcatgaatgtggccatggccccggggtccccttgctgctgtgggctccctgtccctgggcaggagtgctggtgaggaggtggagccttttgaggggggccttccctcagctgtttccccacactggggggctggrccctgcctccccgttaccctccttccctgcaggcctggagcctgtagggctggactgaggttcaggtctccccccagctgtctcacccccactttgtccccactctagagcagggaggcrgtgggggaggagttgtgtctcgtcttctgtctccatgtggtttttgggtgtttttcttsttgtgtcctggattccgataaaattaaagaaattgcttcctcaac

SEQ ID NO: 2376 - DNA, 5601 bp, Homo sapiens
ggaagtgggcctggcaccttcccggcctgccgcagggatggggcagctgtgctggctgccgctgctggcaccgctcctgttgctgcgaccgccaggggtccagtccgccggccccatccgggccttcgtggtgccccacagccacatggacgtgggctgggtctacactgtgcaggaaagcatgcgggcgtacgccgccaatgtctacacctcagtggtggaagagctggcccgcggccagcagcgccggttcatcgctgtggagcaggagtttttccggctgtggtgggatggcgtcgcctcggaccagcagaaataccaggtccgccagctcctggaggaaggacgcctggaatttgtcatcggaggccaggtcatgcatgacgaggctgtgacgcaccttgatgaccagatcctgcactgtctttgcagaaggacacgggtttctctatgaaacatttgggatccggccacagttctcctggcacgttgacccgtttggcgcctctgccacgacgcccaccctatttgcgctggcgggcttcaatgcccacctcggctcccggatcgactacgacctgaaggcagccatgcaggaggcccgggggctgcagttcgtgtggcgagggtccccatccctctcagagcggcaggaaatcttcacgcacatcatggaccagtacagctactgcaccccgtcccacatccctttctccaacaggtcaggattttactggaatggcgtggctgtcttccccaagcctccccmagatggggtgtaccccaacatgagtgagcctgtcaccccagccaacatcaacctctatgccgaggccctggtggccaacgtgaagcagagggccgcctggttccggacaccgcacgtcctctggccctggggatgtgacaagcagttcttcaatgcctcggtgcagtttgccaacatggacccgctgctggaccacatcaacagccatgctgccgagctcggtgtctcgrtgcagtatgccacgctgggcgactacttccgtgccctgcacgctctcaatgtcacctggcgtgtccgcgaccaccacgacttcctgccctattccacagaaccattccaggcctggacgggcttctacacgtccygcagctcactgaaggggctggcccggcgagccagcgccttgttgtatgccggggagtccatgttcacacgctacctgtggccggccccccgtgggcatctrgaccccacctgggccctgcagcagctccagcagcttcgctgggccgtctccgaggtccagcaccatgatgccatcactgggactgagtcccccaaggtgagagacatgtacgcaacgcacctggcctcggggatgctgggcrtgcgcaagctgatggcctccatcgtcctagatgagctccagccccaggcacccatggcggccagctccgatgcaggacctgcaggacattttgcctcggtctacaacccgctggcctggacggtcaccaccatcgtcaccctgactgttggtttccctggagtccgcgtcacagatgaggcgggccacccagtgccctcgcagatccagaactcaacagagaccccatctgcgtatgacctgcttattctgaccacaatcccaggcctcagttaccggcactacarcatcagacccactgcaggggcccaagagggcacccaggagccrgctgccactgtggcgagcacccttcaatttggccgcaggctgaggagacgcaccagccatgcgggcaggtacttggtgcctgtggcaaacgactgctacattgtgctgctcgaccaggataccaacctgatgcacagcatctgggagagacagagtaaccgaacggtgcgcgtgacccaggaattcctggagtaccacgtcaacrgggatgtgaaacagggccccatttccgataactacctgttcacaccgggcaaggccgcggtgcctgcgtgggaagctgtggaaatggagattgtggcgggacagcttgtgactgagatccggcagtacttctacaggaacaygacagcacagaatyacacgtatgcaatccrctcccggctcacccatgtgccgcagggccatgacggggagctgctctgccaccggatagagcaggagtaccaagccggccccctggagctgaaccgtgaggctgtcctgaggaccagcaccaacctaaacagccagcaggtcatctactcagacaacaacggctaccagatgcagcggaggccctacgtttcctatgtgaacaacagcatcgcccggaattactaccccatggttcagtcggccttcatggaggatggcaaaagcaggcttgtgttgctgtcggagcgggcacatggcatctccagccaagggaatgggcaggtggaggtcatgctccaccggcggctgtggaacaacttcgactgggacctgggctacaacctcacgctgaacgacacctcagtcgtccacccagtgctctggcttctgctgggatcctggtccctcaccactgccctgcgccagaggagcgcactggcgctgcagcacaggcccgtggtgctgttcggagacctcgctgggamtgcgccgaagctcccaggaccccagcagcaagaggccgtgacgctgcccccgaatcttcacctgcagatcctgagcatccctggctggcgctacagctccaaccacayggagcactctcagaatctccggaaaggccatcgaggggaagcccaggctgacctccgccgtgtcctgctgcggctctaccacctrtatgaagtgggcgaggacccagtcctgtctcagccagtracagtgaatctggaggtgaacttccccacccccatccagaccataagccagggaagcaaaccctagatgaagccccaagaaactgccttggcaaagagatccacgagggcttcctcccaaatggacgctggtatgggccccaccccgcccttcttcatggtcttctgggtttgycaggtattacaactggcctggttttttagggttttttgtgtatatgtgagacaggatctcactctgttgcccagtctggggtgcagtggcacaatctcagctcactgcaacctctgcctccctggctcaagtgatcctcccacctcaacctcccaagtaactgggatcacaggggcgcgccaccacgmtggctaagtttttttttttttttttttgagacsgagtttcgctctcgtcccccaggctggagtgcaatggtgcgctctcagctggctgcaacctccatctcccaggttcaagtgattctcctgcctcagcctcccgagtagctgggattacaggcatgtgccaccacgcccggctaatttttttgtacttttagtagagacagggtttctccatgttggtcaggctggtcacgaacccctgacttcaggtgatccacctgcctcggcctcgcaaagtgctgggattacaggcgtgagccaccaagcctggcctagtttttttatttttagtagagacacggtcttgctgtgttgctcaggctggtctcgaacgtctggcctcaagcaatctgcctgtcttagcctcctgaagtgctgggattacaggcgtgagtggcctgtattttctttcttatttattctgtggtaaaacttttaaaacacagacaacatctgtgtaatccaaaaacaaaacagattccccatagagttgctttgaaaggtgacttagagtcagacaatccagggtccacacccaggcccctctacgggggcatctccggcaccccatgcctctgggcctcagtttccccccatgtaaaatggggagaggtgagagttctttgcccagaaggttgctgagaggccctggcactaaggggcctcgtgcagtgtcagggcccccaggcctcgtccccttccaggttcccctcttggctgatgttgccctctcagctctactatcaggcgaggcttccgccacctggcctgcccacgctccctccccagaaggcatgacctgagccgcctcatttctttcccagtttgcattctttctatttcatttcctgctcatggagaatttctgtgaatctctgtgtttctgccttgggcctccttcgacatctgagtcttcaggggaatccagagaagccccagtaccttttcgccatgatgtcttactgggccacccacctcctctttcatgatcctcgccasggaggatcctttcctcacggtccctggcctgcctgagagcaggtctaggccatggcgggtaccagtgcccagcacagggccagcctgccctgggaagcaaggaggccrgcgtgggacctggaagttggtcatctgatgctcccccgtttcacagatggaagcaccaaggccctgagacaaggagacggttgggatggacaccatgactccctgcccaacgtggacggtggtggggtggaaagaccattgagttaggaacgcagtgagtttggctgcaagtcacaaaacacctaacagatgtgcttagaacagaggacagagtgttttctcaccgaacaggcatgtccgatggaccccaagcgctgtcaccgtgggcccgatcactgtcatcttcccgccatcgccggcagactggcttttgtcttttgccgtctgcttgtttgcggtcacaagatggcacaggcctccctcatgagcaaatttcaaggcagggtagggctcagcagtagtggccagaaaggccttgccctagcgtggctctctccctccgtcagcacacagaagcttctccaagagccacccccagccctcctgctccacagacttttccagacccctaagggcctcctgcctcccctaggtgtaagggaggctgggacaaggcctattgggaaagggggatggggtaactgtggctggcttcctccctggactgggcacggggccacctgagcaatgtggggagaggagaactccgcggtggggtgggcagctcaaaatgccacacctcccgggctgctcctccagctcggccacctggtaaagcatgcacctcccgcttcagtgtcctcatctgtaaagtacacggccagtcctgtcctcgcagatgtgctgtgagaagcagatgagggagctgtgtcaggcaccaggggaggacctgggctcctgaggacaccgagttcgtggtgtgtctgccctgctgctgtcttggttctctgctcagctctggaacttggtgcagctcactctccctctgctcctctccctgcaggctgtgctgcaggcgctggggtccgtggtggcagtggaggagcgctcgctcacagggacctgggatttgagcatgctgcaccgctggagctggaggacggggcctggccgccacagaggtttggggacccccgcttcagctccctacccaggactcccagccaggctcagcagctggtcagacccggtgcacatccaaccatctgcctgtcccggcctgtgcgaccttgcgaggctgctttcctactctgaacccgcagccctcccaaatctacyacagtcggttaagaaaggctttgggttagtctctg

SEQ ID NO: 2377 - DNA, 3276 bp, Homo sapiens
ggaagtgggcctggcaccttcccggcctgccgcagggatggggcagctgtgctggctgccgctgctggcaccgctcctgttgctgcgaccgccaggggtccagtccgccggccccatccgggccttcgtggtgccccacagccacatggacgtgggctgggtctacactgtgcaggaaagcatgcgggcgtacgccgccaatgtctacacctcagtggtggaagagctggcccgcggccagcagcgccggttcatcgctgtggagcaggagtttttccggctgtggtgggatggcgtcgcctcggaccagcagaaataccaggtccgccagctcctggaggaaggacgcctggaatttgtcatcggaggccaggtcatgcatgacgaggctgtgacgcaccttgatgaccagatcctgcagctcacagaaggacacgggtttctctatgaaacatttgggatccggccacagttctcctggcacgttgacccgtttggcgcctctgccacgacgcacccatggcggccagctccgatgcaggacctgcaggacattttgcctcggtctacaacccgctggcctggacggtcaccaccatcgtcaccctgactgttggtttccctggagtccgcgtcacagatgaggcgggccacccagtgccctcgcagatccagaactcaacagagaccccatctgcgtatgacctgcttattctgaccacaatcccaggcctcagttaccggcactacarcatcagacccactgcaggggcccaagagggcacccaggagccrgctgccactgtggcgagcacccttcaatttggccgcaggctgaggagacgcaccagccatgcgggcaggtacttggtgcctgtggcaaacgactgctacattgtgctgctcgaccaggataccaacctgatgcacagcatctgggagagacagagtaaccgaacggtgcgcgtgacccaggaattcctggagtaccacgtcaacrgggatgtgaaacagggccccatttccgataactacctgttcacaccgggcaaggccgcggtgcctgcgtgggaagctgtggaaatggagattgtggcgggacagcttgtgactgagatccggcagtacttctacaggaacaygacagcacagaatyacacgtatgcaatccrctcccggctcacccatgtgccgcagggccatgacggggagctgctctgccaccggatagagcaggagtaccaagccggccccctggagctgaaccgtgaggctgtcctgaggaccagcaccaacctaaacagccagcaggtcatctactcagacaacaacggctaccagatgcagcggaggccctacgtttcctatgtgaacaacagcatcgcccggaattactaccccatggttcagtcggccttcatggaggatggcaaaagcaggcttgtgttgctgtcggagcgggcacatggcatctccagccaagggaatgggcaggtggaggtcatgctccaccggcggctgtggaacaacttcgactgggacctgggctacaacctcacgctgaacgacacctcagtcgtccacccagtgctctggcttctgctgggatcctggtccctcaccactgccctgcgccagaggagcgcactggcgctgcagcacaggcccgtggtgctgttcggagacctcgctgggamtgcgccgaagctcccaggaccccagcagcaagaggccgtgacgctgcccccgaatcttcacctgcagatcctgagcatccctggctggcgctacagctccaaccacayggagcactctcagaatctccggaaaggccatcgaggggaagcccaggctgacctccgccgtgtcctgctgcggctctaccacctrtatgaagtgggcgaggacccagtcctgtctcagccagtracagtgaatctggaggctgtgctgcaggcgctggggtccgtggtggcagtggaggagcgctcgctcacagggacctgggatttgagcatgctgcaccgctggagctggaggacggggcctggccgccacagaggtgacaccacctctccctcgaggccaccaggaggccccatcatcaccgtccacccaaaggaaatccggacgttctttattcactttcaacagcagtgagccctgggcagatgccccgtccccagggcttcccccaggaactccatgtaacagaacagacccaggacagggaaaagcagtgcggagggatgggactggggagtcagctgctcatctgcaggctaatggcaggaaatggtcatatttggggtttttccctaatttttttaaacaaaaattacattacaagatccaggttcttcccccccacactcaatcaagccagccctctcctcttctgtcacgtaaaggatatttggcacactcatgcgtcattcattcacaaaacacaaacccaggactttctgcctaaggcagarcacaagactcacagcagcaccgaagcgcatctgccgtccgggccctgccaggcttgccaggctgccagtggtaactgtggacctactgcgtgccacgtgttttcatagactcatcccatgctggcaacagccctgcaaggggcttggctctgccacagggcaggagaggaagttgtagcgcctagcgagagttccagccccagacgcccacctgtgcctcagggcaccgcctgccgagcagagaaggcacagcagccgtcagagtccatgagaggtgaaaccacacagcagggatgtccaatatcagaactattaatatcaataaaagtataaccttcccaggtctatgcccaagagaattgaaaacatccatccacacaatacctgtgctcccgcgttcatagcagcattactcaaaagtcaaacggtagcaacaacccaaatgtccatccacagatgaattaagacatgaagtgtgttctgtccatacaatggaatattatttggccataaaaaggaaggaaattctgacgcatgccacagcctgagtgaatcctacaaatattacgctaagtgaaagaagccaatcacgagtttatgtgaaatgtccagaataggcaaatctgtgtatcagagacaaagcacattggtggttgccaggtactggaggaagagagaagaggcatracagctaacagggacgggctttctttggaagatgatgaaattgtggaatgatggttgcacaactttgtgaatatactagaaaccaatgaattaaaaactttggaagatg

SEQ ID NO: 2378 - DNA, 4183 bp, Homo sapiens
ggaagtgggcctggcaccttcccggcctgccgcagggatggggcagctgtgctggctgccgctgctggcaccgctcctgttgctgcgaccgccaggggtccagtccgccggccccatccgggccttcgtggtgccccacagccacatggacgtgggctgggtctacactgtgcaggaaagcatgcgggcgtacgccgccaatgtctacacctcagtggtggaagagctggcccgcggccagcagcgccggttcatcgctgtggagcaggagtttttccggctgtggtgggatggcgtcgcctcggaccagcagaaataccaggtccgccagctcctggaggaaggacgcctggaatttgtcatcggaggccaggtcatgcatgacgaggctgtgacgcaccttgatgaccagatcctgcagctcacagaaggacacgggtttctctatgaaacatttgggatccggccacagttctcctggcacgttgacccgtttggcgcctctgccacgacgcccaccctatttgcgctggcgggcttcaatgcccacctcggctcccggatcgactacgacctgaaggcagccatgcaggaggcccgggggctgcagttcgtgtggcgagggtccccatccctctcagagcggcaggaaatcttcacgcacatcatggaccagtacagctactgcaccccgtcccacatccctttctccaacaggtcaggattttactggaatggcgtggctgtcttccccaagcctccccmagatggggtgtaccccaacatgagtgagcctgtcaccccagccaacatcaacctctatgccgaggccctggtggccaacgtgaagcagagggccgcctggttccggacaccgcacgtcctctggccctggggatgtgacaagcagttcttcaatgcctcggtgcagtttgccaacatggacccgctgctggaccacatcaacagccatgctgccgagctcggtgtctcgrtgcagtatgccacgctgggcgactacttccgtgccctgcacgctctcaatgtcacctggcgtgtccgcgaccaccacgacttcctgccctattccacagaaccattccaggcctggacgggcttctacacgtccygcagctcactgaaggggctggcccggcgagccagcgccttgttgtatgccggggagtccatgttcacacgctacctgtggccggccccccgtgggcatctrgaccccacctgggccctgcagcagctccagcagcttcgctgggccgtctccgaggtccagcaccatgatgccatcactgggactgagtcccccaaggtgagagacatgtacgcaacgcacctggcctcggggatgctgggcrtgcgcaagctgatggcctccatcgtcctagatgagctccagccccaggcacccatggcggccagctccgatgcaggacctgcaggacattttgcctcggtctacaacccgctggcctggacggtcaccaccatcgtcaccctgactgttggtttccctggagtccgcgtcacagatgaggcgggccacccagtgccctcgcagatccagaactcaacagagaccccatctgcgtatgacctgcttattctgaccacaatcccaggcctcagttaccggcactacarcatcagacccactgcaggggcccaagagggcacccaggagccrgctgccactgtggcgagcacccttcaatttggccgcaggctgaggagacgcaccagccatgcgggcaggtacttggtgcctgtggcaaacgactgctacattgtgctgctcgaccaggataccaacctgatgcacagcatctgggagagacagagtaaccgaacggtgcgcgtgacccaggaattcctggagtaccacgtcaacrgggatgtgaaacagggccccatttccgataactacctgttcacaccgggcaaggccgcggtgcctgcgtgggaagctgtggaaatggagattgtggcgggacagcttgtgactgagatccggcagtacttctacaggaacaygacagcacagaatyacacgtatgcaatccrctcccggctcacccatgtgccgcagggccatgacggggagctgctctgccaccggatagagcaggagtaccaagccggccccctggagctgaaccgtgaggctgtcctgaggaccagcaccaacctaaacagccagcaggtcatctactcagacaacaacggctaccagatgcagcggaggccctacgtttcctatgtgaacaacagcatcgcccggaattactaccccatggttcagtcggccttcatggaggatggcaaaagcaggcttgtgttgctgtcggagcgggcacatggcatctccagccaagggaatgggcaggtggaggtcatgctccaccggcggctgtggaacaacttcgactgggacctgggctacaacctcacgctgaacgacacctcagtcgtccacccagtgctctggcttctgctgggatcctggtccctcaccactgccctgcgccagaggagcgcactggcgctgcagcacaggcccgtggtgctgttcggagacctcgctgggamtgcgccgaagctcccaggaccccagcagcaagaggccgtgacgctgcccccgaatcttcacctgcagatcctgagcatccctggctggcgctacagctccaaccacayggagcactctcagaatctccggaaaggccatcgaggggaagcccaggctgacctccgccgtgtcctgctgcggctctaccacctrtatgaagtgggcgaggacccagtcctgtctcagccagtracagtgaatctggaggctgtgctgcaggcgctggggtccgtggtggcagtggaggagcgctcgctcacagggacctgggatttgagcatgctgcaccgctggagctggaggacggggcctggccgccacagaggtgacaccacctctccctcgaggccaccaggaggccccatcatcaccgtccacccaaaggaaatccggacgttctttattcactttcaacagcagtgagccctgggcagatgccccgtccccagggcttcccccaggaactccatgtaacagaacagacccaggacagggaaaagcagtgcggagggatgggactggggagtcagctgctcatctgcaggctaatggcaggaaatggtcatatttggggtttttccctaatttttttaaacaaaaattacattacaagatccaggttcttcccccccacactcaatcaagccagccctctcctcttctgtcacgtaaaggatatttggcacactcatgcgtcattcattcacaaaacacaaacccaggactttctgcctaaggcagarcacaagactcacagcagcaccgaagcgcatctgccgtccgggccctgccaggcttgccaggctgccagtggtaactgtggacctactgcgtgccacgtgttttcatagactcatcccatgctggcaacagccctgcaaggggcttggctctgccacagggcaggagaggaagttgtagcgcctagcgagagttccagccccagacgcccacctgtgcctcagggcaccgcctgccgagcagagaaggcacagcagccgtcagagtccatgagaggtgaaaccacacagcagggatgtccaatatcagaactattaatatcaataaaagtataaccttcccaggtctatgcccaagagaattgaaaacatccatccacacaatacctgtgctcccgcgttcatagcagcattactcaaaagtcaaacggtagcaacaacccaaatgtccatccacagatgaattaagacatgaagtgtgttctgtccatacaatggaatattatttggccataaaaaggaaggaaattctgacgcatgccacagcctgagtgaatcctacaaatattacgctaagtgaaagaagccaatcacgagtttatgtgaaatgtccagaataggcaaatctgtgtatcagagacaaagcacattggtggttgccaggtactggaggaagagagaagaggcatracagctaacagggacgggctttctttggaagatgatgaaattgtggaatgatggttgcacaactttgtgaatatactagaaaccaatgaattaaaaactttggaagatg

SEQ ID NO: 2379 - DNA, 6619 bp, Homo sapiens
ggaagtgggcctggcaccttcccggcctgccgcagggatggggcagctgtgctggctgccgctgctggcaccgctcctgttgctgcgaccgccaggggtccagtccgccggccccatccgggccttcgtggtgccccacagccacatggacgtgggctgggtctacactgtgcaggaaagcatgcgggcgtacgccgccaatgtctacacctcagtggtggaagagctggcccgcggccagcagcgccggttcatcgctgtggagcaggagtttttccggctgtggtgggatggcgtcgcctcggaccagcagaaataccaggtccgccagctcctggaggaaggacgcctggaatttgtcatcggaggccaggtcatgcatgacgaggctgtgacgcaccttgatgaccagatcctgcagctcacagaaggacacgggtttctctatgaaacatttgggatccggccacagttctcctggcacgttgacccgtttggcgcctctgccacgacgcccaccctatttgcgctggcgggcttcaatgcccacctcggctcccggatcgactacgacctgaaggcagccatgcaggaggcccgggggctgcagttcgtgtggcgagggtccccatccctctcagagcggcaggaaatcttcacgcacatcatggaccagtacagctactgcaccccgtcccacatccctttctccaacaggtcaggattttactggaatggcgtggctgtcttccccaagcctccccmagatggggtgtaccccaacatgagtgagcctgtcaccccagccaacatcaacctctatgccgaggccctggtggccaacgtgaagcagagggccgcctggttccggacaccgcacgtcctctggccctggggatgtgacaagcagttcttcaatgcctcggtgcagtttgccaacatggacccgctgctggaccacatcaacagccatgctgccgagctcggtgtctcgrtgcagtatgccacgctgggcgactacttccgtgccctgcacgctctcaatgtcacctggcgtgtccgcgaccaccacgacttcctgccctattccacagaaccattccaggcctggacgggcttctacacgtccygcagctcactgaaggggctggcccggcgagccagcgccttgttgtatgccggggagtccatgttcacacgctacctgtggccggccccccgtgggcatctrgaccccacctgggccctgcagcagctccagcagcttcgctgggccgtctccgaggtccagcaccatgatgccatcactgggactgagtcccccaaggtgagagacatgtacgcaacgcacctggcctcggggatgctgggcrtgcgcaagctgatggcctccatcgtcctagatgagctccagccccaggcacccatggcggccagctccgatgcaggacctgcaggacattttgcctcggtctacaacccgctggcctggacggtcaccaccatcgtcaccctgactgttggtttccctggagtccgcgtcacagatgaggcgggccacccagtgccctcgcagatccagaactcaacagagaccccatctgcgtatgacctgcttattctgaccacaatcccaggcctcagttaccggcactacarcatcagacccactgcaggggcccaagagggcacccaggagccrgctgccactgtggcgagcacccttcaatttggccgcaggctgaggagacgcaccagccatgcgggcaggtacttggtgcctgtggcaaacgactgctacattgtgctgctcgaccaggataccaacctgatgcacagcatctgggagagacagagtaaccgaacggtgcgcgtgacccaggaattcctggagtaccacgtcaacrgggatgtgaaacagggccccatttccgataactacctgttcacaccgggcaaggccgcggtgcctgcgtgggaagctgtggaaatggagattgtggcgggacagcttgtgactgagatccggcagtacttctacaggaacaygacagcacagaatyacacgtatgcaatccrctcccggctcacccatgtgccgcagggccatgacggggagctgctctgccaccggatagagcaggagtaccaagccggccccctggagctgaaccgtgaggctgtcctgaggaccagcaccaacctaaacagccagcaggtcatctactcagacaacaacggctaccagatgcagcggaggccctacgtttcctatgtgaacaacagcatcgcccggaattactaccccatggttcagtcggccttcatggaggatggcaaaagcaggcttgtgttgctgtcggagcgggcacatggcatctccagccaagggaatgggcaggtggaggtcatgctccaccggcggctgtggaacaacttcgactgggacctgggctacaacctcacgctgaacgacacctcagtcgtccacccagtgctctggcttctgctgggatcctggtccctcaccactgccctgcgccagaggagcgcactggcgctgcagcacaggcccgtggtgctgttcggagacctcgctgggamtgcgccgaagctcccaggaccccagcagcaagaggccgtgacgctgcccccgaatcttcacctgcagatcctgagcatccctggctggcgctacagctccaaccacayggagcactctcagaatctccggaaaggccatcgaggggaagcccaggctgacctccgccgtgtcctgctgcggctctaccacctrtatgaagtgggcgaggacccagtcctgtctcagccagtracagtgaatctggaggtgaacttccccacccccatccagaccataagccagggaagcaaaccctagatgaagccccaagaaactgccttggcaaagagatccacgagggcttcctcccaaatggacgctggtatgggccccaccccgcccttcttcatggtcttctgggtttgycaggtattacaactggcctggttttttagggttttttgtgtatatgtgagacaggatctcactctgttgcccagtctggggtgcagtggcacaatctcagctcactgcaacctctgcctccctggctcaagtgatcctcccacctcaacctcccaagtaactgggatcacaggggcgcgccaccacgmtggctaagtttttttttttttttttttgagacsgagtttcgctctcgtcccccaggctggagtgcaatggtgcgctctcagctggctgcaacctccatctcccaggttcaagtgattctcctgcctcagcctcccgagtagctgggattacaggcatgtgccaccacgcccggctaatttttttgtacttttagtagagacagggtttctccatgttggtcaggctggtcacgaacccctgacttcaggtgatccacctgcctcggcctcgcaaagtgctgggattacaggcgtgagccaccaagcctggcctagtttttttatttttagtagagacacggtcttgctgtgttgctcaggctggtctcgaacgtctggcctcaagcaatctgcctgtcttagcctcctgaagtgctgggattacaggcgtgagtggcctgtattttctttcttatttattctgtggtaaaacttttaaaacacagacaacatctgtgtaatccaaaaacaaaacagattccccatagagttgctttgaaaggtgacttagagtcagacaatccagggtccacacccaggcccctctacgggggcatctccggcaccccatgcctctgggcctcagtttccccccatgtaaaatggggagaggtgagagttctttgcccagaaggttgctgagaggccctggcactaaggggcctcgtgcagtgtcagggcccccaggcctcgtccccttccaggttcccctcttggctgatgttgccctctcagctctactatcaggcgaggcttccgccacctggcctgcccacgctccctccccagaaggcatgacctgagccgcctcatttctttcccagtttgcattctttctatttcatttcctgctcatggagaatttctgtgaatctctgtgtttctgccttgggcctccttcgacatctgagtcttcaggggaatccagagaagccccagtaccttttcgccatgatgtcttactgggccacccacctcctctttcatgatcctcgccasggaggatcctttcctcacggtccctggcctgcctgagagcaggtctaggccatggcgggtaccagtgcccagcacagggccagcctgccctgggaagcaaggaggccrgcgtgggacctggaagttggtcatctgatgctcccccgtttcacagatggaagcaccaaggccctgagacaaggagacggttgggatggacaccatgactccctgcccaacgtggacggtggtggggtggaaagaccattgagttaggaacgcagtgagtttggctgcaagtcacaaaacacctaacagatgtgcttagaacagaggacagagtgttttctcaccgaacaggcatgtccgatggaccccaagcgctgtcaccgtgggcccgatcactgtcatcttcccgccatcgccggcagactggcttttgtcttttgccgtctgcttgtttgcggtcacaagatggcacaggcctccctcatgagcaaatttcaaggcagggtagggctcagcagtagtggccagaaaggccttgccctagcgtggctctctccctccgtcagcacacagaagcttctccaagagccacccccagccctcctgctccacagacttttccagacccctaagggcctcctgcctcccctaggtgtaagggaggctgggacaaggcctattgggaaagggggatggggtaactgtggctggcttcctccctggactgggcacggggccacctgagcaatgtggggagaggagaactccgcggtggggtgggcagctcaaaatgccacacctcccgggctgctcctccagctcggccacctggtaaagcatgcacctcccgcttcagtgtcctcatctgtaaagtacacggccagtcctgtcctcgcagatgtgctgtgagaagcagatgagggagctgtgtcaggcaccaggggaggacctgggctcctgaggacaccgagttcgtggtgtgtctgccctgctgctgtcttggttctctgctcagctctggaacttggtgcagctcactctccctctgctcctctccctgcaggctgtgctgcaggcgctggggtccgtggtggcagtggaggagcgctcgctcacagggacctgggatttgagcatgctgcaccgctggagctggaggacggggcctggccgccacagaggtgacaccacctctccctcgaggccaccaggaggccccatcatcaccgtccacccaaaggaaatccggacgttctttattcactttcaacagcagtgagccctgggcagatgccccgtccccagggcttcccccaggaactccatgtaacagaacagacccaggacagggaaaagcagtgcggagggatgggactggggagtcagctgctcatctgcaggctaatggcaggaaatggtcatatttggggtttttccctaatttttttaaacaaaaattacattacaagatccaggttcttcccccccacactcaatcaagccagccctctcctcttctgtcacgtaaaggatatttggcacactcatgcgtcattcattcacaaaacacaaacccaggactttctgcctaaggcagarcacaagactcacagcagcaccgaagcgcatctgccgtccgggccctgccaggcttgccaggctgccagtggtaactgtggacctactgcgtgccacgtgttttcatagactcatcccatgctggcaacagccctgcaaggggcttggctctgccacagggcaggagaggaagttgtagcgcctagcgagagttccagccccagacgcccacctgtgcctcagggcaccgcctgccgagcagagaaggcacagcagccgtcagagtccatgagaggtgaaaccacacagcagggatgtccaatatcagaactattaatatcaataaaagtataaccttcccaggtctatgcccaagagaattgaaaacatccatccacacaatacctgtgctcccgcgttcatagcagcattactcaaaagtcaaacggtagcaacaacccaaatgtccatccacagatgaattaagacatgaagtgtgttctgtccatacaatggaatattatttggccataaaaaggaaggaaattctgacgcatgccacagcctgagtgaatcctacaaatattacgctaagtgaaagaagccaatcacgagtttatgtgaaatgtccagaataggcaaatctgtgtatcagagacaaagcacattggtggttgccaggtactggaggaagagagaagaggcatracagctaacagggacgggctttctttggaagatgatgaaattgtggaatgatggttgcacaactttgtgaatatactagaaaccaatgaattaaaaactttggaagatg

SEQ ID NO: 2380 - DNA, 4367 bp, Homo sapiens
cttctcagcaggtccccacgcatgagcagccgtccagcaggcaggctccggtggagaagcaatggagaataaaagcctggagagctcccagacagacctgaagctggtggcccacccccgcgccaagagcaaggtgtggaagtatttcggcttcgacaccaaygccgagggatgcatcctgcagtggaagaaaatctactgccgcatctgcatggcccagatcgcctactccggaaacacctccaacctgtcctaccacctggagaagaaccaccccgaggaattctgcgagttcgtcaagagcaacacggagcagatgcgtgaagccttcgccaccgccttctccaagctgaagcccgagtcgtcccagcagcccgggcaggaygcgctggccgtcaaggccggccacggctacgacagcaagaagcagcaggagctgacggccgccgtgctgggcctcatctgcgaggggctgtacccagcctccatcgtggacgagcccaccttcaaggtgctgctgaagacggcygacccccggtatgagctgcccagccggaagtacatctctaccaaggccatccctgagaagtacggggccgtccgggaggtgatcctgaaggagctggcygaggccacctggtgtggcatctccaccgacatgtggaggagtgagaatcagaaccgcgcctacgtcacgctggccgcccacttcctgggcctgggcgcccccaactgcctgtccatgggctcccgctgcctgaagaccttcgaggtgcccgaagagaacacggcggagaccatcacgcgagtgctctatgaggtcttcatcgagtggggcatcagcgccaaggtcttcggggccaccaccaactatggcaaggacatcgtgaaggcgtgctccctgctggacgtcgcagtgcacatgccctgcctgggccacaccttcaatgccggcatccagcaggccttccagctmccgaagctgggggcgctgctgtcgcgctgccgcaaactggtggagtacttccagcagtctgccgtggccatgtacatgctctatgagaagcagaagcagcagaacgtggcccactgcatgctggtgagcaaccgcgtctcctggtgggggagcacgctggccatgctgcagcgcctcaaggagcagcagttcgtcatcgccggggtcttggtggaggacagcaacaaccaccacctcatgctggaggccagcgagtgggccaccatcgaggggctggtggagctcctgcagcccttcaagcaggtggccgagatgctgtcggcctccaggtaccccaccatcagcatggtgaagccgctgctgcacatgctcctgaacaccacgctcaacatcaaggagaccgactccaaggagctcagcatggccaaggaggtcatcgccaaggagctttccaagacctaccaggagacgcccgagatcgacatgtttctcaacgtggccaccttcctggacccccgctacaagaggctgcccttcctctccgccttcgagcggcagcaggtggagaatcgcgtggtggaagaggccaagggcctgctggacaaggtcaaagacggcggctaccggccggctgaggayaagatcttcccggtgcccgaggagcctcccgtcaagaagctcatgcggacatccacgccgccgcccgccagcgtcatcaacaacatgctggccgagatcttctgccagacaggcggcgtggaggaccaggaagagtggcatgcccaggtggtggaggagctgagcaacttcaagtcccagaaggtgcttggcctcaacgaagaccccctcaagtggtggtcagaccgcctggccctcttccccctgctgcccaaggtgctgcagaagtactggtgcgtgacggccacgcgcgtcgcccctgagcgtctcttcggatccgccgccaacgtggtcagcgccaagaggaaccggctggctcccgcgcacgtggacgagcaggtgtttctgtatgagaacgcccggagtggggcagaggcggaacccgaggaccaggacgagggggagtggggcctggaccaggagcaggtgttctccttgggggatggcgtcagcggcggtttctttggcattagggacagcagcttcctgtagcgaggaagcgtgttgtcttacaagtcatccccgcagcagcccattggatgctttgctgtaaatacttacccggtcagcttggttttgaacctcagagaccatccactgtctttgacacctagaaggtggaaaaaggaaagagattygagaagtgagagagggtcgggggcggtggctcctgtctataatcgcagcactttgggaggccgaggtgggcagatcarctgaggtcaggagatcgagaccagcctggccaacatggcgaaaccccgtctctactaaaaatacaaaaattagccaggactgatggcatgtgcctgtaatcccagcttctggaggctgaggccagagaatcgcttgaacctgggaggtggaggttgcagtaagctgagatcgctgcactccagcctgggcgacaagagcgagactctctcaaaaagaaaaaagaagacacaagagaggtggctttgagtgggtttcctttcctcccctattcccggggccckgacgacttctgcttgggaactgccaacgcttctgcttgggaattgcgtgcagcagagcctagaggagctgttccttccttcacagatacttaagacctccaccatgtctgattcgagttctccctgggagggtttagaagaaacgcaggaacattctgggtggcgtcgaaggagcctttcccgatcatcatgtgtgacttctgcgaggtccagatcactgaattcatgtttacattctcgtgcaagcagggacctcttgcttctgagaaatggggaagagaccttttagccaaaatgcccttcttaaaaagagagacctttttttttaatgttcggttaaaaatgtgacagatgagtasaaaaatgcagacacttaacaaaaagcaaacagaaaaaaaagtgtggaatgtgttgtattttcgacaggttgctgccagagagcctgcttcctgctgcctgccgaaatttcactttgcggagttggtccttaaaactgggcggtggccgggcgtggtggctcacgctgaggtcaggagttcgagaccagcctggccaaccaacatggtgaaacctcgtgtctactaaaaatacaagaaactagccagatgcggtggcacccgcctgtaatcccagctactcgggaggctgaggcggaagattcgcttgagcccaggaggtggaggttgcagtgagccaagactacgccactgcactccagcctggaggccagagtgagactccgtctcaaaacaaaacaaaagtgggtggctcackggtccggaggttatgtcttcggtgtctcagccctaaaagtccagttcccccgtgcggccagcttttccacataaggtgtttttgatttgattaccggaaaggactcttgattcttctcttttaaactgaataccataggggaaatgaattttaaaatattgcccccggaggggttttccgtggctggattcctgcgagttgctttcagtcattcagggaaacagaaagacgttttccaacatgtagaactgctttttaactggaggaaaaatacttcaggaggcttagcatattgcttggattctacgtgcagcgggttctctgcctccgtgaagacaagctgggctggggaggacggtgtctaggagggatgaccccactcagctccaggcagtgttctgccgagaccccaagaactcggggtgtcagagggcaaaggaactacctgcctttcacggctgctgacttctcagggctgcaagcagcacagaatgttatccttacgtcctgagccggtttaagtctgtggaaaaggaagcacgggagaaatccacgtaacctttgctttctttttaagggaagcggttccgccgtgaacttggaaccctcagctccgggtgttctcggcagaagggcagctggaaggsacacagtggggcaggctttggggttgctccctgttctgccccgaggccggggacgcasggcagcccacgcctccgtgggctccattctgtagcattgccagcgttctcttcacgtctctaacaatccttygcttttcctcactcacgtggaaatgtgaactgtcccggctctgtcttcatttttatttttaagccatcgttcccctcctgaacggttgccccttatttaatgctgtaaagttggactgttgttcaataaaccagagcaatgcattagctcctcattcatttgtc

SEQ ID NO: 2381 - DNA, 1459 bp, Homo sapiens
ggcgcagagtcccgcgggcggcgcggaagcggcggcggcgcggccggggcagccatgtcgccattgtctgcggcgcgggcggccctgcgggtctacgcggtaggcgccgcggtgatcctggcgcagctgctgcggcgctgccgcgggggcttcctggagccagttttccccccacgacctgaccgtgtcgctatagtgacgggagggacagatggcattggctattctacagcgaagcatctggcgagacttggcatgcatgttatcatagctggaaataatgacagcaaagccaaacaagttgtaagcaaaataaaagaagaaaccttgaacgacaaagtggaatttttatactgtgacttggcttccatgacttccatccggcagtttgtgcagaagttcaagatgaagaagattcctctccatgtcctgatcaacaatgctggggtgatgatggtccctcagaggaaaaccagagatggattcgaagaacatttcggcctgaactacctagggcacttcctgctgaccaaccttctcttggatacgctgaaagagtctgggtcccctggccacagtgcgagggtggtcaccgtctcctctgccacccattacgtcgctgagctgaacatggatgaccttcagagcagtgcctgctactcaccccacgcagcctacgcccagagcaagctggcccttgtcctgttcacctaccacctccagcggctgctggcggctgagggaagccacgtgaccgccaacgtggtggaycccggggtggtcaacacggacstctacaagcacgtgttctgggccacccgtctggcgaagaagcttctcggctggttgcttttcaagacccccgatgaaggagcgtggacttccatctacgcagcagtcaccccagagctggaaggagttggtggccrttacctatacaatragaaagagaccaagtccctccacgtcacctacaaccagaaactgcagcagcagctgtggtctaagagttgtgagatgactggggtccttgatgtgaccctgtgatatcctgtctcaggatagctgctgccccaagaaacacattgcacctgccaatagcttgtgggtctgtgaagactgcagtgtttgagtttctcacacccacctgcccacagggctctgtcctctagttttgagacagctgcctcaacctctgcagaacttcaagaagccaaataaacattttggaggataatcaccccaagtggtcttcaaccataaactttgtgattccaaagtgcccagttgtcacaggtgccataaataattacattttccaacataaatgtgccattttccttgccgcgttaatacaactgagtacaaaagttccaagagagatgctctcttttcaggggctgcaatgtcctctctgagacctagtggtggatgaggtctcctgtttgattttgttcct

SEQ ID NO: 2382 - DNA, 4507 bp, Homo sapiens
cgcgggcggcgcggaagcggcggcggcgcggccggggcagccatgtcgccattgtctgcggcgcgggcggccctgcgggtctacgcggtaggcgccgcggtgatcctggcgcagctgctgcggcgctgccgcgggggcttcctggagccaggtccccacgcatgagcagccgtccagcaggcaggctccggtggagaagcaatggagaataaaagcctggagagctcccagacagacctgaagctggtggcccacccccgcgccaagagcaaggtgtggaagtatttcggcttcgacaccaaygccgagggatgcatcctgcagtggaagaaaatctactgccgcatctgcatggcccagatcgcctactccggaaacacctccaacctgtcctaccacctggagaagaaccaccccgaggaattctgcgagttcgtcaagagcaacacggagcagatgcgtgaagccttcgccaccgccttctccaagctgaagcccgagtcgtcccagcagcccgggcaggaygcgctggccgtcaaggccggccacggctacgacagcaagaagcagcaggagctgacggccgccgtgctgggcctcatctgcgaggggctgtacccagcctccatcgtggacgagcccaccttcaaggtgctgctgaagacggcygacccccggtatgagctgcccagccggaagtacatctctaccaaggccatccctgagaagtacggggccgtccgggaggtgatcctgaaggagctggcygaggccacctggtgtggcatctccaccgacatgtggaggagtgagaatcagaaccgcgcctacgtcacgctggccgcccacttcctgggcctgggcgcccccaactgcctgtccatgggctcccgctgcctgaagaccttcgaggtgcccgaagagaacacggcggagaccatcacgcgagtgctctatgaggtcttcatcgagtggggcatcagcgccaaggtcttcggggccaccaccaactatggcaaggacatcgtgaaggcgtgctccctgctggacgtcgcagtgcacatgccctgcctgggccacaccttcaatgccggcatccagcaggccttccagctmccgaagctgggggcgctgctgtcgcgctgccgcaaactggtggagtacttccagcagtctgccgtggccatgtacatgctctatgagaagcagaagcagcagaacgtggcccactgcatgctggtgagcaaccgcgtctcctggtgggggagcacgctggccatgctgcagcgcctcaaggagcagcagttcgtcatcgccggggtcttggtggaggacagcaacaaccaccacctcatgctggaggccagcgagtgggccaccatcgaggggctggtggagctcctgcagcccttcaagcaggtggccgagatgctgtcggcctccaggtaccccaccatcagcatggtgaagccgctgctgcacatgctcctgaacaccacgctcaacatcaaggagaccgactccaaggagctcagcatggccaaggaggtcatcgccaaggagctttccaagacctaccaggagacgcccgagatcgacatgtttctcaacgtggccaccttcctggacccccgctacaagaggctgcccttcctctccgccttcgagcggcagcaggtggagaatcgcgtggtggaagaggccaagggcctgctggacaaggtcaaagacggcggctaccggccggctgaggayaagatcttcccggtgcccgaggagcctcccgtcaagaagctcatgcggacatccacgccgccgcccgccagcgtcatcaacaacatgctggccgagatcttctgccagacaggcggcgtggaggaccaggaagagtggcatgcccaggtggtggaggagctgagcaacttcaagtcccagaaggtgcttggcctcaacgaagaccccctcaagtggtggtcagaccgcctggccctcttccccctgctgcccaaggtgctgcagaagtactggtgcgtgacggccacgcgcgtcgcccctgagcgtctcttcggatccgccgccaacgtggtcagcgccaagaggaaccggctggctcccgcgcacgtggacgagcaggtgtttctgtatgagaacgcccggagtggggcagaggcggaacccgaggaccaggacgagggggagtggggcctggaccaggagcaggtgttctccttgggggatggcgtcagcggcggtttctttggcattagggacagcagcttcctgtagcgaggaagcgtgttgtcttacaagtcatccccgcagcagcccattggatgctttgctgtaaatacttacccggtcagcttggttttgaacctcagagaccatccactgtctttgacacctagaaggtggaaaaaggaaagagattygagaagtgagagagggtcgggggcggtggctcctgtctataatcgcagcactttgggaggccgaggtgggcagatcarctgaggtcaggagatcgagaccagcctggccaacatggcgaaaccccgtctctactaaaaatacaaaaattagccaggactgatggcatgtgcctgtaatcccagcttctggaggctgaggccagagaatcgcttgaacctgggaggtggaggttgcagtaagctgagatcgctgcactccagcctgggcgacaagagcgagactctctcaaaaagaaaaaagaagacacaagagaggtggctttgagtgggtttcctttcctcccctattcccggggccckgacgacttctgcttgggaactgccaacgcttctgcttgggaattgcgtgcagcagagcctagaggagctgttccttccttcacagatacttaagacctccaccatgtctgattcgagttctccctgggagggtttagaagaaacgcaggaacattctgggtggcgtcgaaggagcctttcccgatcatcatgtgtgacttctgcgaggtccagatcactgaattcatgtttacattctcgtgcaagcagggacctcttgcttctgagaaatggggaagagaccttttagccaaaatgcccttcttaaaaagagagacctttttttttaatgttcggttaaaaatgtgacagatgagtasaaaaatgcagacacttaacaaaaagcaaacagaaaaaaaagtgtggaatgtgttgtattttcgacaggttgctgccagagagcctgcttcctgctgcctgccgaaatttcactttgcggagttggtccttaaaactgggcggtggccgggcgtggtggctcacgctgaggtcaggagttcgagaccagcctggccaaccaacatggtgaaacctcgtgtctactaaaaatacaagaaactagccagatgcggtggcacccgcctgtaatcccagctactcgggaggctgaggcggaagattcgcttgagcccaggaggtggaggttgcagtgagccaagactacgccactgcactccagcctggaggccagagtgagactccgtctcaaaacaaaacaaaagtgggtggctcackggtccggaggttatgtcttcggtgtctcagccctaaaagtccagttcccccgtgcggccagcttttccacataaggtgtttttgatttgattaccggaaaggactcttgattcttctcttttaaactgaataccataggggaaatgaattttaaaatattgcccccggaggggttttccgtggctggattcctgcgagttgctttcagtcattcagggaaacagaaagacgttttccaacatgtagaactgctttttaactggaggaaaaatacttcaggaggcttagcatattgcttggattctacgtgcagcgggttctctgcctccgtgaagacaagctgggctggggaggacggtgtctaggagggatgaccccactcagctccaggcagtgttctgccgagaccccaagaactcggggtgtcagagggcaaaggaactacctgcctttcacggctgctgacttctcagggctgcaagcagcacagaatgttatccttacgtcctgagccggtttaagtctgtggaaaaggaagcacgggagaaatccacgtaacctttgctttctttttaagggaagcggttccgccgtgaacttggaaccctcagctccgggtgttctcggcagaagggcagctggaaggsacacagtggggcaggctttggggttgctccctgttctgccccgaggccggggacgcasggcagcccacgcctccgtgggctccattctgtagcattgccagcgttctcttcacgtctctaacaatccttygcttttcctcactcacgtggaaatgtgaactgtcccggctctgtcttcatttttatttttaagccatcgttcccctcctgaacggttgccccttatttaatgctgtaaagttggactgttgttcaataaaccagagcaatgcattagctcctcattcatttgtc

SEQ ID NO: 2383 - DNA, 1511 bp, Homo sapiens
gggcagccatgtcgccattgtctgcggcgcgggcggccctgcgggtctacgcggtaggcgccgcggtgatcctggcgcagctgctgcggcgctgccgcgggggcttcctggagccaggctggagtgcagtggtgtgatctcggctcactgctacctctgcctcccgggttcaagtgattctcctgcctcagcttcccgagtagctgggattacagttttccccccacgacctgaccgtgtcgctatagtgacgggagggacagatggcattggctattctacagcgaagcatctggcgagacttggcatgcatgttatcatagctggaaataatgacagcaaagccaaacaagttgtaagcaaaataaaagaagaaaccttgaacgacaaagtggaatttttatactgtgacttggcttccatgacttccatccggcagtttgtgcagaagttcaagatgaagaagattcctctccatgtcctgatcaacaatgctggggtgatgatggtccctcagaggaaaaccagagatggattcgaagaacatttcggcctgaactacctagggcacttcctgctgaccaaccttctcttggatacgctgaaagagtctgggtcccctggccacagtgcgagggtggtcaccgtctcctctgccacccattacgtcgctgagctgaacatggatgaccttcagagcagtgcctgctactcaccccacgcagcctacgcccagagcaagctggcccttgtcctgttcacctaccacctccagcggctgctggcggctgagggaagccacgtgaccgccaacgtggtggaycccggggtggtcaacacggacstctacaagcacgtgttctgggccacccgtctggcgaagaagcttctcggctggttgcttttcaagacccccgatgaaggagcgtggacttccatctacgcagcagtcaccccagagctggaaggagttggtggccrttacctatacaatragaaagagaccaagtccctccacgtcacctacaaccagaaactgcagcagcagctgtggtctaagagttgtgagatgactggggtccttgatgtgaccctgtgatatcctgtctcaggatagctgctgccccaagaaacacattgcacctgccaatagcttgtgggtctgtgaagactgcagtgtttgagtttctcacacccacctgcccacagggctctgtcctctagttttgagacagctgcctcaacctctgcagaacttcaagaagccaaataaacattttggaggataatcaccccaagtggtcttcaaccataaactttgtgattccaaagtgcccagttgtcacaggtgccataaataattacattttccaacataaatgtgccattttccttgccgcgttaatacaactgagtacaaaagttccaagagagatgctctcttttcaggggctgcaatgtcctctctgagacctagtggtggatgaggtctcctgtttgattttgttcct

SEQ ID NO: 2384 - DNA, 1100 bp, Homo sapiens
tgagagactcagggagagagaaacttcaaacaagtgaaacaagcagaaaagttaaatcagccaggctgagcatctatttctggtttttaaccactttcttttgtttctgttcaaacccaggtgggaagggcatgggaggatgggaaggtgggatccgcgtgcccgggatcttccgctggcccggggtgctcccggccggccgagtgattggcgagcccacgagtctgatggacgtgttccccaccgtggtccggctggcgggcrgcgaggtgccccaggacagtgattgacggccaagaccttctgcccttgctyctggggacagcccaacactcagaccacgagttcctgatgcattattgtgagaggtttctgcacgcagccaggtggcatcaacggsacagaggaacaatgtggaaagtccactttgtgacgcctgtgttccagccagagggagccggtgcctrctatggaagaaaggtctgcccgtgctttggggaaaaagtagtccaccacgatccacctttgctctttgacctctcaagagacccttctgagacccacatcctcacaccagcctcagagcccgtgttctatcaggtgatggaacgagtccagcaggcggtgtgggaacaccagcggacactcagcccagttcctctgcagctggacaggctgggcaayatctggagaccgtggctgcagccctgctgtggcccrttccccctctgctgrtgccttagggaagatgacccacaataaatgtctgcagtgaaaagctggagccccgattcctaaattttgtcactcaaattgaaacaaaccagctggccatggtggttgtcatcccagcactttaggaggccaccacaggaggatcactcccgtgatcaaaaccaacctgggcaacatgatgaaactctagctctacaaaacaaaaataaaaaaaaaattagcctgcatggtggcacacgcctgtagttctagcttctcaggaggctaaggcaggaggatcatttgagcaccggagttggaggctgtactgagctatgattgtaccactgcaccccagcctgggcaacagagcaagaccctgtctc

SEQ ID NO: 2385 - DNA, 2228 bp, Homo sapiens
aaagccttgtgcaagtgctctctgccttcacgcttgcttcctttgggagagaaccttcctcttcttgatcggggattcaggaaggagcccaggagcagaggaagtagagagagagacaacatgttacatctgcaccattcttgtttgtgtttcaggagctggctgccagcgatgctcgctgtactgctaagtttggcrccatcagcttccagcgacatttccgcctcccgaccgaacatccttcttctgatggcggacgaccttggcattggggacrttggctgctatggcaacaacaccatgaggactccgaatattgaccgccttgcagaggacggcgtgaagctgacccaacacatctctgccgcatctttgtgcaccccaagcagagccgccttcctcacgggcagataccctgtgcgatcagggatggtttccagcattggttaccgtgttcttcagtggaccrgagcatctggaggtcttccaacaaatgagacaacttttgcaaaaatactgaaagagaaagbctatgccactggactcattggaaaatggcatctgggtctcaactgtgagtcagccagtgatcattgccaccaccctctccatcayggctttgaccatttctacggaatgcctttctccttgatgggtgattgcgcccrytgggaactctcagagaagcgtgtcaacctggaacaaaaactcaacttcctcttccaagtcctggccttggttgccctcacactggtagcagggaagctcacacacctgatacccgtctcgtggatgccggtcatctggtcagccctttcggccgtcctcctcctygcaagctcctattttgtgsgtgctctgattgtccatgccgattgctttctgatgagaaaccacaccatcacrgagcagcccatgtgcttccaaagaacgacaccccttattctgcaggaggttgcgtcctttctcaaaaggaataagcatgggcctttcctcctctttgtttcctttctacacgttcacatccctcttatcactatggagaacttcctcgggaagagtctccacrggctgtatggggacaacgtagaggagatggactggatggtaggacggatccttgacactttggacgtggagggtttgagcaacagcaccctcatttattttacgtcggatcacggcggttccctagagaatcaacttggaaacacccagtatggtggctggaatggaatttataaaggtgggaagggcatgggaggatgggaaggtgggatccgcgtgcccgggatcttccgctggcccggggtgctcccggccggccgagtgattggcgagcccacgagtctgatggacgtgttccccaccgtggtccggctggcgggcrgcgaggtgccccaggacagagtgattgacggccaagaccttctgcccttgctyctggggacagcccaacactcagaccacgagttcctgatgcattattgtgagaggtttctgcacgcagccaggtggcatcaacggsacagaggaacaatgtggaaagtccactttgtgacgcctgtgttccagccagagggagccggtgcctrctatggaagaaaggtctgcccgtgctttggggaaaaagtagtccaccacgatccacctttgctctttgacctctcaagagacccttctgagacccacatcctcacaccagcctcagagcccgtgttctatcaggtgatggaacgagtccagcaggcggtgtgggaacaccagcggacactcagcccagttcctctgcagctggacaggctgggcaayatctggagaccgtggctgcagccctgctgtggcccrttccccctctgctgrtgccttagggaagatgacccacaataaatgtctgcagtgaaaagctggagccccgattcctaaattttgtcactcaaattgaaacaaaccagctggccatggtggttgtcatcccagcactttaggaggccaccacaggaggatcactcccgtgatcaaaaccaacctgggcaacatgatgaaactctagctctacaaaacaaaaataaaaaaaaaattagcctgcatggtggcacacgcctgtagttctagcttctcaggaggctaaggcaggaggatcatttgagcaccggagttggaggctgtactgagctatgattgtaccactgcaccccagcctgggcaacagagcaagaccctgtctc

SEQ ID NO: 2386 - DNA, 2230 bp, Homo sapiens
ccagtgcgtgtctgttttggcaggaagaagacgtttcttccaaggagcagcctccccgctacatccagccagtgtcgcccttacacagctgcatgtcaggaagtagagagagagacaacatgttacatctgcaccattcttgtttgtgtttcaggagctggctgccagcgatgctcgctgtactgctaagtttggcrccatcagcttccagcgacatttccgcctcccgaccgaacatccttcttctgatggcggacgaccttggcattggggacrttggctgctatggcaacaacaccatgaggcagactccgaatattgaccgccttgcagaggacggcgtgaagctgacccaacacatctctgccgcatctttgtgcaccccaagcagagccgccttcctcacgggcagataccctgtgcgatcagggatggtttccagcattggttaccgtgttcttcagtggaccrgagcatctggaggtcttccaacaaatgagacaacttttgcaaaaatactgaaagagaaagbctatgccactggactcattggaaaatggcatctgggtctcaactgtgagtcagccagtgatcattgccaccaccctctccatcayggctttgaccatttctacggaatgcctttctccttgatgggtgattgcgcccrytgggaactctcagagaagcgtgtcaacctggaacaaaaactcaacttcctcttccaagtcctggccttggttgccctcacactggtagcagggaagctcacacacctgatacccgtctcgtggatgccggtcatctggtcagccctttcggccgtcctcctcctygcaagctcctattttgtgsgtgctctgattgtccatgccgattgctttctgatgagaaaccacaccatcacrgagcagcccatgtgcttccaaagaacgacaccccttattctgcaggaggttgcgtcctttctcaaaaggaataagcatgggcctttcctcctctttgtttcctttctacacgttcacatccctcttatcactatggagaacttcctcgggaagagtctccacrggctgtatggggacaacgtagaggagatggactggatggtaggacggatccttgacactttggacgtggagggtttgagcaacagcaccctcatttattttacgtcggatcacggcggttccctagagaatcaacttggaaacacccagtatggtggctggaatggaatttataaaggtgggaagggcatgggaggatgggaaggtgggatccgcgtgcccgggatcttccgctggcccggggtgctcccggccggccgagtgattggcgagcccacgagtctgatggacgtgttccccaccgtggtccggctggcgggcrgcgaggtgccccaggacagagtgattgacggccaagaccttctgcccttgctyctggggacagcccaacactcagaccacgagttcctgatgcattattgtgagaggtttctgcacgcagccaggtggcatcaacggsacagaggaacaatgtggaaagtccactttgtgacgcctgtgttccagccagagggagccggtgcctrctatggaagaaaggtctgcccgtgctttggggaaaaagtagtccaccacgatccacctttgctctttgacctctcaagagacccttctgagacccacatcctcacaccagcctcagagcccgtgttctatcaggtgatggaacgagtccagcaggcggtgtgggaacaccagcggacactcagcccagttcctctgcagctggacaggctgggcaayatctggagaccgtggctgcagccctgctgtggcccrttccccctctgctgrtgccttagggaagatgacccacaataaatgtctgcagtgaaaagctggagccccgattcctaaattttgtcactcaaattgaaacaaaccagctggccatggtggttgtcatcccagcactttaggaggccaccacaggaggatcactcccgtgatcaaaaccaacctgggcaacatgatgaaactctagctctacaaaacaaaaataaaaaaaaaattagcctgcatggtggcacacgcctgtagttctagcttctcaggaggctaaggcaggaggatcatttgagcaccggagttggaggctgtactgagctatgattgtaccactgcaccccagcctgggcaacagagcaagaccctgtctc

SEQ ID NO: 2387 - DNA, 5028 bp, Homo sapiens
ctgagagggcggaagccttggcactagcggcgyccgggcgcggagtgcgcagggcaaggtcctgcgctctgggccagcgctcggccatgcgatccgccgcgcggaggggacgcgccgcgcccgccgccagggactctttgccggtgctactgtttttatgcttgcttctgaagacgtgtgaacctaaaactgcaaatgcctttaaaccaaatatcctactgatcatggcggatgatctaggcactggggatctcggttgctaygggaacaatacactgagaacgccgaatattgaccagcttgcagaggaaggtgtgaggctcactcagcacctggcggccgccccgctctgcaccccaagccgagctgcattcctcacagggagacattccttcagatcaggcatggacgccagcaatggataccgggcccttcagtggaacgcaggctcaggtggactccctgagaacgaaaccacttttgcaagaatcttgcagcagcatggctatgcaaccggcctcataggaaaatggcaccagggtgtgaattgtgcatcccgcggggatcactgccaccaccccctgaaccacggatttgactatttctacggcatgcccttcacgctcacaaacgactgtgacccaggcaggccccccgaagtggacgccgccctgagggcgcagctctggggttacacccagttcctggcgctggggattctcaccctggctgccggccagacctgcggtttcttctstgtctccgcgagagcagtcaccggcatggccggcgtgggctgcctgtttttcatctcttggtactcctccttcgggtttgtgcgacgctggaactgtatcctgatgagaaaccatgacgtcacggagcaacccatggttctggagaaaacagcgagtcttatgctaaaggaagctgtttcctatattgaaagacacaagcatgggccatttctcctcttcctttctttgctgcatgtgcacattccccttgtgaccacgagtgcrttcctggggaaaagtcagcatggcttatatggtgataatgtggaggagatggactggctcataggtaaggttcttaatgccatcgaagacaatggtttraagaactcaayattcacgtatttcacctctgaccatggaggacatttagaggcaagagatggacacagccagttagggggatggaacggaatttacaaaggtgggaagggcatgggaggatgggaaggtgggatccgcgtgcccgggatcttccactggccgggggtgctcccggccggccgagtgattgragagcccacgagcctgatggacgtgttccctactgtggtccagctggtgggtggcgaggtgccccaggacagggtgattgatggccacagcctggtacccttgctgcagggagctgaggcacgctcggcacatgagttcctgtttcattactgtgggcagcatcttcacgcagcacgctggcaccagaaggacagtggaagcgtctggaaggttcattacacgaccccgcagttccaccccgagggagcgggggcctgctacggccgaggcrtctgcccatgctccggggagggcgtgacccatcacagaccccctttgctctttgacctctccagggacccctccgaggcacggcccctgacccccgactccgagcccctgtaccacgccgtgatagcaagggtaggtgccgcggtgtcggagcatcggcagaccctgagtcctgtgccccagcagttttccaygagcaacatcctgtggaagccgtggctgcagccgtgctgyggacatttcccgttctgttcatgccacgaggatggggatggcaccccctgaatgccaggactgtgagagaggatccaggagagcctgactgcrttgcaaacaaaattctccaagcttggttctatcttcagcttccctttttgcaaggaacatgccctggactgagagtgggtccccactttctttctttctttctttcttttttgagacagagtgtcgctctgtccctcaggctggaatgcaatggcacgatctctgctcactgcaacctccgcctcccgggttcaagcgattttcctgcctcagcctcctgagtacccaggattacaggcaccaggcacctgccaccatgcctagctaatttttgtagttttagtagagacagggtttcaccatgttgcccaggctggtctcgcactcctgacctcaagtcatccacctgcctcagcctcccaaagtgctgggattacaggcacgagccactgcgcccatgtagggtttccctttcctgatttgtgaaataagactgtcccagtaggcacccactgatgcctcctcttcctcttctaaatctcagggttcgtcattgtgccaatgcccgatgttttcacccctccgtcttaaagcattgttgcaatttcatcacctagatgacataacagccttacaaaaggacagggaggagtgtctgttcctactctcacatagcggaggaaagttagagcctctcagtctctgtttatgaggactcattaatctcaaataattgatgcatttttcatacattagggtctctgtccatgtgtcttcctgatattgttatagaaatggcttcaggctgctggtaacagatgctgcggaaaaagaatgccttaaacaaagccaggcacggtgactcacacctgtaatcccagcactttgggaggctgaggcgggaggattatttgagcctgggaggtcaaaactgcartgagctaagattgcactactgcactccgggctgggagacagagtaagaccctgccttaaaaaaaaaaaaaaaaaaatgccttaaagaaaataataagagaagggtgtgttctcttccaagtaatgagccgatcaaggggaagcaacccaaggctagcaggctcttttcaattcccagctctgccactcttagcatggcagagagttggcctcattatgccagtatggctgccacagtgtcagacatcacattccaggcagtggaaaggagaaagaaccaaagggcatccctttctcttgaagcagtccctgtgaggggggattatctggaagccccaacccaatttctgcttccaaccattatccatagaaacaactggaagttgagaagtgcagtcttttaggtgggcacctggctgccctgtatgaaaccagaattaggttggtcagcaggaaaacaagaaaacacttactgtgttgactgaggtttttgacgcatcgctttattgtcaaattaaacaactctatctcattctgcactgaaacacgtactaccattgcctataattggmaaatgatcctcagaggcacagaagwtgccctgatggaaagtttgccccttgggcaaagagacagccatgggaaccttcagacatagagagagaaggtrgcttttctccctacattcctcaaatagctaagatttggccagtgtgttttctaagtcaattctagtgtgtttcatcctcacctcttccctctgtggctttgatgatggaagtgtagtcctaacctactgcacagctgggaccccctgcccctagatcccaatactggggatgggaggaccttgcactattcccctcagtccatctatcgaggtctttgcaggaagcatactgggaattgaaacgagagcctaaatgacatctaagaaaggcagtgttcaataccaggtattaggtgaggatgggattctaaggacatcagtgggaggcagggagccaccttcagacctcagcatggaagcttccaagatccagaggaagaggcaacagcactgagagtcataggtagaagaatcatcacagccctgctaaccaggcagctgatgcccctctcccctggctccctgtgtccaaatcctacaggggcatctgttggctgaactcaacctgaagccaaagagaagatgagtggagagaggcaacatttatagagctcaggtttctagggctggagagggatctggagggacacacaggagacacctggcataaccaaaaaatgattaaaaaaaaaaaaaaaaagaaacatctatggagcatgggacacggggagtggaggcagctaaaagccatctcatctttcaccgtattcaacaagcccattataacaagtctttcacgctcaaccattcaaacaatcccaacaatcccagcctaagaatttcctggcatttgatgaaaatggctgtgggttttgctatctttaagctccctgggaagcaggatataagcccagggctggcaggctctttctagctacctgctcttgcacatagagtttgcctcatggttgcaagaaggctgccatagctccagatggcacatagacattccaggcagcaggaaaaaggaaggagcacttaaccgaaggaggtcagggagttggttagtctccacctgaagaagagagccatgaaccagcttcagttgactaacgggctcctgtgagtgcatctttggacttttctggaggttgaaatctagatgtggtatgtgtcttaaagcagccaccaactcctcccattaccttccaagtgagcccaactacacgatggagcctcttccctgcccttggatctgggctgagcctctgacttgcgttgaccaacagaatgcagtgaaagtgatgccgatactaccctccctgccctagacttgggatacctggcagctatattcttccattcctcaggacttgcaaaaacgggtctcarcatgccttcccagagccatgaggtgtttctttgcccattcattgatctgagaagtgagtgtaaggagtttaaatcaacctctgttctgtgctagttaaggtaataaagttgctgcagtccagggggtaggtacctgtggacggctctgcgaataggacagttgcatttcttgggaatcaagtgcatccctaggctggcagtgcagcagaaatactgaataaaatgtgacaaatctccctg

SEQ ID NO: 2388 - DNA, 742 bp, Homo sapiens
ctgagagggcggaagccttggcactagcggcgyccgggcgcggagtgcgcagggcaaggtcctgcgctctgggccagcgctcggccatgcgatccgccgcgcggaggggacgcgccgcgcccgccgccagggactctttgccggtgctactgtttttatgcttgcttctgaagacgtgtgaacctaaaactgcaaatgcctttaaaccaaatatcctactgatcatggcggatgatctaggcactggggatctcggttgctaygggaacaatacactgagaacgccgaatattgaccagcttgcagaggaaggtgtgaggctcactcagcacctggcggccgccccgctctgcaccccaagccgagctgcattcctcacagggagacattccttcagatcaggcatggacgccagcaatggataccgggcccttcagtggaacgcaggctcaggtggactccctgagaacgaaaccacttttgcaagaatcttgcagcagcatggctatgcaaccggcctcataggtgtggatatgtgggagcctcacattatacggtggttgggaatattcgtgataaaaaagatcccaggccaggcgtggtggcgcacgcctgtagtcccagctacttaggaggctgaggcaggagaatcgcttgaacccgggaagcggaggttgcagggagccgagatcacaccactgcactccagtctaggtgacaaagcgagactctgtctcaaaga

SEQ ID NO: 2389 - DNA, 2245 bp, Homo sapiens
ctgagagggcggaagccttggcactagcggcgyccgggcgcggagtgcgcagggcaaggtcctgcgctctgggccagcgctcggccatgcgatccgccgcgcggaggggacgcgccgcgcccgccgccagggactctttgccggtgctactgtttttatgcttgcttctgaagacgtgtgaacctaaaactgcaaatgcctttaaaccaaatatcctactgatcatggcggatgatctaggcactggggatctcggttgctaygggaacaatacactgagaacgccgaatattgaccagcttgcagaggaaggtgtgaggctcactcagcacctggcggccgccccgctctgcaccccaagccgagctgcattcctcacagggagacattccttcagatcaggcatggacgccagcaatggataccgggcccttcagtggaacgcaggctcaggtggactccctgagaacgaaaccacttttgcaagaatcttgcagcagcatggctatgcaaccggcctcataggaaaatggcaccagggtgtgaattgtgcatcccgcggggatcactgccaccaccccctgaaccacggatttgactatttctacggcatgcccttcacgctcacaaacgactgtgacccaggcaggccccccgaagtggacgccgccctgagggcgcagctctggggttacacccagttcctggcgctggggattctcaccctggctgccggccagacctgcggtttcttctstgtctccgcgagagcagtcaccggcatggccggcgtgggctgcctgtttttcatctcttggtactcctccttcgggtttgtgcgacgctggaactgtatcctgatgagaaaccatgacgtcacggagcaacccatggttctggagaaaacagcgagtcttatgctaaaggaagctgtttcctatattgaaagacacaagcatgggccatttctcctcttcctttctttgctgcatgtgcacattccccttgtgaccacgagtgcrttcctggggaaaagtcagcatggcttatatggtgataatgtggaggagatggactggctcatagccagtgacttcatgtcatcatcagaagttaccgaaagtgaagcgataaagttaatgttcaggacaatgcagasacrctgtcttccttctatggccttcaagaaaccctggagaggaccagtgaggctgcagattcttaaaagagcatagacattaaaattcttgcagaatctgaatgtgtctcctgagacaagcatcgtgatagagttcacagtcttaaaagtctgcattttcaggtggggcaaggtggctcatgcctttaatcccagcattttgggaggctaaggcagggagatggcttgagaccaggagttcaagaccagcctgggcaacatagtgagacgcccccccccccatctctacaaaaaatttaaaaaattagccatggtggtgtgcacctgtggtcccagctactccagaggctgaggtgggaagatcatttgagcccaggaggctgaggctgcaatgagctataattattgcaccactgaactccagcctgggccacatagcaagaccctgtctccaaaaaaaaaaagaaataaaagacgaagaatagggagaaaaacttctctcatatcatttatttggtccttcagtatttctgattacttagtctaattttgcacaaaatcaactgtattagtccattcttgcaaagaaatacctgagactgggtaatttataaagaaaagaggttggattggctcacggttctgcaggctgcacaggaagcatggcagcatctgcttctggggagacctcggggagcttttgctcatggtggaaggcgaagggggagcaggcgtcttgyggcaggagaaggaccaagagaggagaggaagagccgcacacttttaaacaaccagatctcgtgagaagctactccctccgcagcaccaagcgggggatggtgctcaaccattcatgagaactctgtccccatcattcagtcacctccccccaggccccaccgccgattctgaggatgacaattccacatgagatttgggcggggacacacatccaaactatattgtcaaccttctacacagccaatgacttaacagcctcattagaagttacagaaactaaagcaataaagttcggacaatgcagagaggtcaccttccttctatggccttgaagaaaccctggag

SEQ ID NO: 2390 - DNA, 2806 bp, Homo sapiens
ctgagagggcggaagccttggcactagcggcgyccgggcgcggagtgcgcagggcaaggtcctgcgctctgggccagcgctcggccatgcgatccgccgcgcggaggggacgcgccgcgcccgccgccagggactctttgccggtgctactgtttttatgcttgcttctgaagacgtgtgaacctaaaactgcaaatgcctttaaaccaaatatcctactgatcatggcggatgatctaggcactggggatctcggttgctaygggaacaatacactgagaacgccgaatattgaccagcttgcagaggaaggtgtgaggctcactcagcacctggcggccgccccgctctgcaccccaagccgagctgcattcctcacagggagacattccttcagatcaggcatggacgccagcaatggataccgggcccttcagtggaacgcaggctcaggtggactccctgagaacgaaaccacttttgcaagaatcttgcagcagcatggctatgcaaccggcctcataggaaaatggcaccagggtgtgaattgtgcatcccgcggggatcactgccaccaccccctgaaccacggatttgactatttctacggcatgcccttcacgctcacaaacgactgtgacccaggcaggccccccgaagtggacgccgccctgagggcgcagctctggggttacacccagttcctggcgctggggattctcaccctggctgccggccagacctgcggtttcttctstgtctccgcgagagcagtcaccggcatggccggcgtgggctgcctgtttttcatctcttggtactcctccttcgggtttgtgcgacgctggaactgtatcctgatgagaaaccatgacgtcacggagcaacccatggttctggagaaaacagcgagtcttatgctaaaggaagctgtttcctatattgaaagacacaagcatgggccatttctcctcttcctttctttgctgcatgtgcacattccccttgtgaccacgagtgcrttcctggggaaaagtcagcatggcttatatggtgataatgtggaggagatggactggctcataggtaaggttcttaatgccatcgaagacaatggtttraagaactcaayattcacgtatttcacctctgaccatggaggacatttagaggcaagagatggacacagccagttagggggatggaacggaatttacaaaggtgggaagggcatgggaggatgggaaggtgggatccgcgtgcccgggatcttccactggccgggggtgctcccggccggccgagtgattgragagcccacgagcctgatggacgtgttccctactgtggtccagctggtgggtggcgaggtgccccaggacagggtgattgatggccacagcctggtacccttgctgcagggagctgaggcacgctcggcacatgagttcctgtttcattactgtgggcagcatcttcacgcagcacgctggcaccagaaggacagtggaagcgtctggaaggttcattacacgaccccgcagttccaccccgagggagcgggggcctgctacggccgaggcrtctgcccatgctccggggagggcgtgacccatcacagaccccctttgctctttgacctctccagggacccctccgaggcacggcccctgacccccgactccgagcccctgtaccacgccgtgatagcaagggggcatctgttggctgaactcaacctgaagccaaagagaagatgagtggagagaggcaacatttatagagctcaggtttctagggctggagagggatctggagggacacacaggagacacctggcataaccaaaaaatgattaaaaaaaaaaaaaaaaagaaacatctatggagcatgggacacggggagtggaggcagctaaaagccatctcatctttcaccgtattcaacaagcccattataacaagtctttcacgctcaaccattcaaacaatcccaacaatcccagcctaagaatttcctggcatttgatgaaaatggctgtgggttttgctatctttaagctccctgggaagcaggatataagcccagggctggcaggctctttctagctacctgctcttgcacatagagtttgcctcatggttgcaagaaggctgccatagctccagatggcacatagacattccaggcagcaggaaaaaggaaggagcacttaaccgaaggaggtcagggagttggttagtctccacctgaagaagagagccatgaaccagcttcagttgactaacgggctcctgtgagtgcatctttggacttttctggaggttgaaatctagatgtggtatgtgtcttaaagcagccaccaactcctcccattaccttccaagtgagcccaactacacgatggagcctcttccctgcccttggatctgggctgagcctctgacttgcgttgaccaacagaatgcagtgaaagtgatgccgatactaccctccctgccctagacttgggatacctggcagctatattcttccattcctcaggacttgcaaaaacgggtctcarcatgccttcccagagccatgaggtgtttctttgcccattcattgatctgagaagtgagtgtaaggagtttaaatcaacctctgttctgtgctagttaaggtaataaagttgctgcagtccagggggtaggtacctgtggacggctctgcgaataggacagttgcatttcttgggaatcaagtgcatccctaggctggcagtgcagcagaaatactgaataaaatgtgacaaatctccctg

SEQ ID NO: 2391 - DNA, 2742 bp, Homo sapiens
ctgagagggcggaagccttggcactagcggcgyccgggcgcggagtgcgcagggcaaggtcctgcgctctgggccagcgctcggccatgcgatccgccgcgcggaggggacgcgccgcgcccgccgccagggactctttgccggtgctactgtttttatgcttgcttctgaagacgtgtgaacctaaaactgcaaatgcctttaaaccaaatatcctactgatcatggcggatgatctaggcactggggatctcggttgctaygggaacaatacactgagaacgccgaatattgaccagcttgcagaggaaggtgtgaggctcactcagcacctggcggccgccccgctctgcaccccaagccgagctgcattcctcacagggagacattccttcagatcaggcatggacgccagcaatggataccgggcccttcagtggaacgcaggctcaggtggactccctgagaacgaaaccacttttgcaagaatcttgcagcagcatggctatgcaaccggcctcataggaaaatggcaccagggtgtgaattgtgcatcccgcggggatcactgccaccaccccctgaaccacggatttgactatttctacggcatgcccttcacgctcacaaacgactgtgacccaggcaggccccccgaagtggacgccgccctgagggcgcagctctggggttacacccagttcctggcgctggggattctcaccctggctgccggccagacctgcggtttcttctstgtctccgcgagagcagtcaccggcatggccggcgtgggctgcctgtttttcatctcttggtactcctccttcgggtttgtgcgacgctggaactgtatcctgatgagaaaccatgacgtcacggagcaacccatggttctggagaaaacagcgagtcttatgctaaaggaagctgtttcctatattgaaagacacaagcatgggccatttctcctcttcctttctttgctgcatgtgcacattccccttgtgaccacgagtgcrttcctggggaaaagtcagcatggcttatatggtgataatgtggaggagatggactggctcataggtaaggttcttaatgccatcgaagacaatggtttraagaactcaayattcacgtatttcacctctgaccatggaggacatttagaggcaagagatggacacagccagttagggggatggaacggaatttacaaaggtgggaagggcatgggaggatgggaaggtgggatccgcgtgcccgggatcttccactggccgggggtgctcccggccggccgagtgattgragagcccacgagcctgatggacgtgttccctactgtggtccagctggtgggtggcgaggtgccccaggacagggtgattgatggccacagcctggtacccttgctgcagggagctgaggcacgctcggcacatgagttcctgtttcattactgtgggcagcatcttcacgcagcacgctggcaccagaaggacagtggaagcgtctggaaggttcattacacgaccccgcagttccaccccgagggagcgggggcctgctacggccgaggcrtctgcccatgctccggggagggcgtgacccatcacagaccccctttgctctttgacctctccagggacccctccgaggcacggcccctgacccccgactccgagcccctgtaccacgccgtgatagcaagggtaggtgccgcggtgtcggagcatcggcagaccctgagtcctgtgccccagcagttttccaygagcaacatcctgtggaagccgtggctgcagccgtgctgyggacatttcccgttctgttcatgccacgaggatggggatggcaccccctgaatgccaggactgtgagagaggatccaggagagcctgactgcrttgcaaacaaaattctccaagcttggttctatcttcagcttccctttttgcaaggaacatgccctggactgagagtgggtccccactttctttctttctttctttcttttttgagacagagtgtcgctctgtccctcaggctggaatgcaatggcacgatctctgctcactgcaacctccgcctcccgggttcaagcgattttcctgcctcagcctcctgagtacccaggattacaggcaccaggcacctgccaccatgcctagctaatttttgtagttttagtagagacagggtttcaccatgttgcccaggctggtctcgcactcctgacctcaagtcatccacctgcctcagcctcccaaagtgctgggattacaggcacgagccactgcgcccatgtagggtttccctttcctgatttgtgaaataagactgtcccagtaggcacccactgatgcctcctcttcctcttctaaatctcagggttcgtcattgtgccaatgcccgatgttttcacccctccgtcttaaagcattgttgcaatttcatcacctagatgacataacagccttacaaaaggacagggaggagtgtctgttcctactctcacatagcggaggaaagttagagcctctcagtctctgtttatgaggactcattaatctcaaataattgatgcatttttcatacattagggtctctgtccatgtgtcttcctgatattgttatagaaatggcttcaggctgctggtaacagatgctgcggaaaaagaatgccttaaacaaagccaggcacggtgactcacacctgtaatcccagcactttgggag

SEQ ID NO: 2392 - DNA, 1817 bp, Homo sapiens
aagttaaaagtggatgcagaagcgagcacagacggggctaggggtttcagagaaagtaattgagagtgctggcaacagcagctgaaatatagagaagttgtaggattaactttttcgcccaaagcagcttcagcccacgttttattcccatcgagggagggagaatgggtgccgctgagtgggcgggggagtggtccctgaaaggaggtggagtgctacagyccctccccgttggctctcgctgtttgtccgttgttggtttatastaatttgacaacagccgcctgttgagtctcctccagatcgcagctgaaggatctgttgagcgcttcaggaaaggcggtgagatccggtaccgcagcagagcactctcagctctgggtcttgcaggcgcagggctcccccatgccagcagaaagatttcctctggtgaagaggaccgtcgaatctgtcctcctcaagacacctcttgtacagaatttattcgaatgccacggccaakgtcttccttgaaaaatgttaaccgatgtgtgctttttgtcttttgtcatcctttctttaggacaggcgacactaacaggtgaagatctcgggagaccatgactaagaaaagaattgctgtgattgggggaggagtgagcgggctctcttccatcaagtgctgcgtagaagaaggcttggaacctgtctgctttgaaaggactgatgacatcggagggctctggaggttccaggaaaatcctgaagaaggaagggccagtatttacaaatcagtgatcatcaatacttctaaagagatgatgtgcttcagtgactatccaatcccagatcattatcccaacttcatgcataatgcccaggtcctggagtatttcaggatgtatgccaaagaatttgaccttctaaagtatattcgatttaagaccactgtgtgcagtgtgaagaagcagcctgattttgccacttcaggccaatgggaagtggtcactgaatctgaagggaaaaaggagatgaatgtctttgatggagtcatggtttgcactggccatcacaccaatgctcatctacctctggaaagcttccctggaattgagragttcaaagggcagtacttccacagtcgagactataagaacccagagggattcactggaaagagagtcattataattggcattgggaattctggaggggatctggctgtagagattagccaaacagccaagcaggttttcctcagcaccaggagaggggcttggatcctgaatcgtgtaggggactacggatatcctgctgatgtgttgttctcttctcgacttacacattttatatggaagatctgtggccaatcattagcaaacaaatatttggaaaaaaagataaaccaaaggtttgaccatgaaatgtttggcctgaagcctaaacacaggtatgttcccaggatgggagtgcagggatagtggccaaagcacaagaataaggactcttcacactggctaatagtaaagccacctctacccatacattaagaaaacccacagtggctgggcatggtggctcacgcctgtaatcccagcactytgggaggcggaggcgggtggatcacctgagctcaggagtttgagaccatcctggccaacacggtgaaaccccatctctactaaaaacacaaaattagccaggtgtggtggcacctgtctgtagtcccagctattcaggaggctgaggcaggagaatcacctgagccctggaggcagaggttgcagtgagctgagattgcaccactgcactccagcctgggcaacagactctgtctc

SEQ ID NO: 2393 - DNA, 2682 bp, Homo sapiens
ccggccccgcgcgccgcgcaggcgggggccgtggccaccaagcccgggcgcagtttctctccgcccacggcaggagcgaaggaaggccctggcgcgrgcgggtaaactgcccaccgggcggcccacccgctgcgcccccggcccgcaagaggcagtcccaataggttggcccgcctggccgaagtccgcccggagcccgctcacctgtcagcccccactgccgacaggcgacactaacaggtgaagatctcgggagaccatgactaagaaaagaattgctgtgattgggggaggagtgagcgggctctcttccatcaagtgctgcgtagaagaaggcttggaacctgtctgctttgaaaggactgatgacatcggagggctctggaggttccaggaaaatcctgaagaaggaagggccagtatttacaaatcagtgatcatcaatacttctaaagagatgatgtgcttcagtgactatccaatcccagatcattatcccaacttcatgcataatgcccaggtcctggagtatttcaggatgtatgccaaagaatttgaccttctaaagtatattcgatttaagaccactgtgtgcagtgtgaagaagcagcctgattttgccacttcaggccaatgggaagtggtcactgaatctgaagggaaaaaggagatgaatgtctttgatggagtcatggtttgcactggccatcacaccaatgctcatctacctctggaaagcttccctggaattgagragttcaaagggcagtacttccacagtcgagactataagaacccagagggattcactggaaagagagtcattataattggcattgggaattctggaggggatctggctgtagagattagccaaacagccaagcaggttttcctcagcaccaggagaggggcttggatcctgaatcgtgtaggggactacggatatcctgctgatgtgttgttctcttctcgacttacacattttatatggaagatctgtggccaatcattagcaaacaaatatttggaaaaaaagataaaccaaaggtttgaccatgaaatgtttggcctgaagcctaaacacagagctctgagtcagcatccaaccttaaatgatgacctgccaaatcgtatcatttctggcttggtgaaagtgaaaggaaatgtgaaggaattcacggagacagctgccatatttgaggatggctccagggaggatgacattgatgctgttatctttgccacaggctatagctttgactttccrtttctggaagattccgtcaaagtggtcaaaaacaagatayccctgtataaaaaggtcttccctcctaacctggaaaggccaactcttgcaatcataggcttgattcagcccttaggagccattatgcccatttcagagctccaaggacgctgggccactcaggtatttaaaggtctaaagacattgccctcacagagtgaaatgatggcagaaatatctaaagctcaagaggaaattgacaaaaggtatgtggagagccaacgccataccattcagggagactacatagataccatggaagagcttgctgatttggtgggggtcaggcccaatctgctgtctctggccttcactgaccccaagctggcattacacttattactgggaccctgcactccaatccactatcgtgtacagggccctggaaagtgggatggggctcgaaaagctatcctcaccacagatgatcgcatcaggaagcctctgatgacaagagtagttgaaagkagtagttctatgacttcaacaatgacaataggcaagtttatgctagctcttgccttctttgctataattatagcttacttctagttgtcctattgtcactgccctgtttttcattgggaagcttatctacagatgccttcagaatctgacgagattgactctcagtttcatattgcccagaaatctactttaatgtctctttcgaaagcattaattcactttcctttttcctacaatgaaacctgttttccatttgtattaactcatctcccttccactcatgatccgtcactcttccttgtggtaatccctagactgggagctcaggtactcttttagtcatctttgtatgtctttagcagagttcttgacatgtggtaggtgcttaataaatgtttgttgtttatcaaattttatggtagggagagtaagtcagcatcrgtataaaatcgcttactccacgtaactcttcttctgatagggtttgattttctattagaagctcaattttagttttttttcatattataactaaatatgtttcctgagagataagagaaataatgttcctacaatagttgtatgtatctaagataagacatatagatgcttaagacattttgtttcacttgctattcactagtgtacttgaaacatggtcatttttagcccttttccttaggaaccatgtctttattttctcaataaagaaattactttcaactttctaggctcacagtcattcagatcatctaccatctgccaatgagatcaacttggttgagaattttgggattttaaattagctgtcctacctttttaaatctcttttaaatccttcccatattaggatccaacaaaactttatcttaggaaatatgataagtagcttccaattgttgtag

SEQ ID NO: 2394 - DNA, 2669 bp, Homo sapiens
aagttaaaagtggatgcagaagcgagcacagacggggctaggggtttcagagaaagtaattgagagtgctggcaacagcagctgaaatatagagaagttgtaggattaactttttcgcccaaagcagcttcagcccacgttttattcccatcgagggagggagaatgggtgccgctgagtgggcgggggagtggtccctgaaaggaggtggagtgctacagyccctccccgttggctctcgctgtttgtccgttgttggtttatastaatttgacaacagccgcctgttgagtctcctccagatcgcagctgaaggatctgttgagcgcttcaggaaaggcggtgagatccggtaccgcagcagagcactctcagctctgggtcttgcaggcgcagggctcccccatgccagcagaaagatttcctctggtgaagaggaccgtcgaatctgtcctcctcaagacacctcttgtacagaatttattcgaatgccacggccaakgtcttccttgaaaaatgttaaccgatgtgtgctttttgtcttttgtcatcctttctttaggacaggcgacactaacaggtgaagatctcgggagaccatgactaagaaaagaattgctgtgattgggggaggagtgagcgggctctcttccatcaagtgctgcgtagaagaaggcttggaacctgtctgctttgaaaggactgatgacatcggagggctctggaggttccaggaaaatcctgaagaaggaagggccagtatttacaaatcagtgatcatcaatacttctaaagagatgatgtgcttcagtgactatccaatcccagatcattatcccaacttcatgcataatgcccaggtcctggagtatttcaggatgtatgccaaagaatttgaccttctaaagtatattcgatttaagaccactgtgtgcagtgtgaagaagcagcctgattttgccacttcaggccaatgggaagtggtcactgaatctgaagggaaaaaggagatgaatgtctttgatggagtcatggtttgcactggccatcacaccaatgctcatctacctctggaaagcttccctggaattgagragttcaaagggcagtacttccacagtcgagactataagaacccagagggattcactggaaagagagtcattataattggcattgggaattctggaggggatctggctgtagagattagccaaacagccaagcaggttttcctcagcaccaggagaggggcttggatcctgaatcgtgtaggggactacggatatcctgctgatgtgttgttctcttctcgacttacacattttatatggaagatctgtggccaatcattagcaaacaaatatttggaaaaaaagataaaccaaaggtttgaccatgaaatgtttggcctgaagcctaaacacaggtctaaagacattgccctcacagagtgaaatgatggcagaaatatctaaagctcaagaggaaattgacaaaaggtatgtggagagccaacgccataccattcagggagactacatagataccatggaagagcttgctgatttggtgggggtcaggcccaatctgctgtctctggccttcactgaccccaagctggcattacacttattactgggaccctgcactccaatccactatcgtgtacagggccctggaaagtgggatggggctcgaaaagctatcctcaccacagatgatcgcatcaggaagcctctgatgacaagagtagttgaaagkagtagttctatgacttcaacaatgacaataggcaagtttatgctagctcttgccttctttgctataattatagcttacttctagttgtcctattgtcactgccctgtttttcattgggaagcttatctacagatgccttcagaatctgacgagattgactctcagtttcatattgcccagaaatctactttaatgtctctttcgaaagcattaattcactttcctttttcctacaatgaaacctgttttccatttgtattaactcatctcccttccactcatgatccgtcactcttccttgtggtaatccctagactgggagctcaggtactcttttagtcatctttgtatgtctttagcagagttcttgacatgtggtaggtgcttaataaatgtttgttgtttatcaaattttatggtagggagagtaagtcagcatcrgtataaaatcgcttactccacgtaactcttcttctgatagggtttgattttctattagaagctcaattttagttttttttcatattataactaaatatgtttcctgagagataagagaaataatgttcctacaatagttgtatgtatctaagataagacatatagatgcttaagacattttgtttcacttgctattcactagtgtacttgaaacatggtcatttttagcccttttccttaggaaccatgtctttattttctcaataaagaaattactttcaactttctaggctcacagtcattcagatcatctaccatctgccaatgagatcaacttggttgagaattttgggattttaaattagctgtcctacctttttaaatctcttttaaatccttcccatattaggatccaacaaaactttatcttaggaaatatgataagtagcttccaattgttgtag

SEQ ID NO: 2395 - DNA, 2784 bp, Homo sapiens
gaagcgagcacagacggggctaggggtttcagagaaagtaattgagagtgctggcaacagcagctgaaatatagagaagttgtaggattaactttttcgcccaaagcagcttcagcccacgttttattcccatcgagggagggagaatgggtgccgctgagtgggcgggggagtggtccctgaaaggaggtggagtgctacagyccctccccgttggctctcgctgtttgtccgttgttggtttatastaatttgacaacagccgcctgttgagtctcctccagatcgcagctgaaggatctgttgagcgcttcaggaaaggcggacaggcgacactaacaggtgaagatctcgggagaccatgactaagaaaagaattgctgtgattgggggaggagtgagcgggctctcttccatcaagtgctgcgtagaagaaggcttggaacctgtctgctttgaaaggactgatgacatcggagggctctggaggttccaggaaaatcctgaagaaggaagggccagtatttacaaatcagtgatcatcaatacttctaaagagatgatgtgcttcagtgactatccaatcccagatcattatcccaacttcatgcataatgcccaggtcctggagtatttcaggatgtatgccaaagaatttgaccttctaaagtatattcgatttaagaccactgtgtgcagtgtgaagaagcagcctgattttgccacttcaggccaatgggaagtggtcactgaatctgaagggaaaaaggagatgaatgtctttgatggagtcatggtttgcactggccatcacaccaatgctcatctacctctggaaagcttccctggaattgagragttcaaagggcagtacttccacagtcgagactataagaacccagagggattcactggaaagagagtcattataattggcattgggaattctggaggggatctggctgtagagattagccaaacagccaagcaggttttcctcagcaccaggagaggggcttggatcctgaatcgtgtaggggactacggatatcctgctgatgtgttgttctcttctcgacttacacattttatatggaagatctgtggccaatcattagcaaacaaatatttggaaaaaaagataaaccaaaggtttgaccatgaaatgtttggcctgaagcctaaacacagagctctgagtcagcatccaaccttaaatgatgacctgccaaatcgtatcatttctggcttggtgaaagtgaaaggaaatgtgaaggaattcacggagacagctgccatatttgaggatggctccagggaggatgacattgatgctgttatctttgccacaggctatagctttgactttccrtttctggaagattccgtcaaagtggtcaaaaacaagatayccctgtataaaaaggtcttccctcctaacctggaaaggccaactcttgcaatcataggcttgattcagcccttaggagccattatgcccatttcagagctccaaggacgctgggccactcaggtatttaaaggtctaaagacattgccctcacagagtgaaatgatggcagaaatatctaaagctcaagaggaaattgacaaaaggtatgtggagagccaacgccataccattcagggagactacatagataccatggaagagcttgctgatttggtgggggtcaggcccaatctgctgtctctggccttcactgaccccaagctggcattacacttattactgggaccctgcactccaatccactatcgtgtacagggccctggaaagtgggatggggctcgaaaagctatcctcaccacagatgatcgcatcaggaagcctctgatgacaagagtagttgaaagkagtagttctatgacttcaacaatgacaataggcaagtttatgctagctcttgccttctttgctataattatagcttacttctagttgtcctattgtcactgccctgtttttcattgggaagcttatctacagatgccttcagaatctgacgagattgactctcagtttcatattgcccagaaatctactttaatgtctctttcgaaagcattaattcactttcctttttcctacaatgaaacctgttttccatttgtattaactcatctcccttccactcatgatccgtcactcttccttgtggtaatccctagactgggagctcaggtactcttttagtcatctttgtatgtctttagcagagttcttgacatgtggtaggtgcttaataaatgtttgttgtttatcaaattttatggtagggagagtaagtcagcatcrgtataaaatcgcttactccacgtaactcttcttctgatagggtttgattttctattagaagctcaattttagttttttttcatattataactaaatatgtttcctgagagataagagaaataatgttcctacaatagttgtatgtatctaagataagacatatagatgcttaagacattttgtttcacttgctattcactagtgtacttgaaacatggtcatttttagcccttttccttaggaaccatgtctttattttctcaataaagaaattactttcaactttctaggctcacagtcattcagatcatctaccatctgccaatgagatcaacttggttgagaattttgggattttaaattagctgtcctacctttttaaatctcttttaaatccttcccatattaggatccaacaaaactttatcttaggaaatatgataagtagcttccaattgttgtag

SEQ ID NO: 2396 - DNA, 2779 bp, Homo sapiens
gaagcgagcacagacggggctaggggtttcagagaaagtaattgagagtgctggcaacagcagctgaaatatagagaagttgtaggattaactttttcgcccaaagcagcttcagcccacgttttattcccatcgagggagggagaatgggtgccgctgagtgggcgggggagtggtccctgaaaggaggtggagtgctacagyccctccccgttggctctcgctgtttgtccgttgttggtttatastaatttgacaacagccgcctgttgagtctcctccagatcgcagctgaaggatctgttgagcgcttcaggaaaggcggcgacactaacaggtgaagatctcgggagaccatgactaagaaaagaattgctgtgattgggggaggagtgagcgggctctcttccatcaagtgctgcgtagaagaaggcttggaacctgtctgctttgaaaggactgatgacatcggagggctctggaggttccaggaaaatcctgaagaaggaagggccagtatttacaaatcagtgatcatcaatacttctaaagagatgatgtgcttcagtgactatccaatcccagatcattatcccaacttcatgcataatgcccaggtcctggagtatttcaggatgtatgccaaagaatttgaccttctaaagtatattcgatttaagaccactgtgtgcagtgtgaagaagcagcctgattttgccacttcaggccaatgggaagtggtcactgaatctgaagggaaaaaggagatgaatgtctttgatggagtcatggtttgcactggccatcacaccaatgctcatctacctctggaaagcttccctggaattgagragttcaaagggcagtacttccacagtcgagactataagaacccagagggattcactggaaagagagtcattataattggcattgggaattctggaggggatctggctgtagagattagccaaacagccaagcaggttttcctcagcaccaggagaggggcttggatcctgaatcgtgtaggggactacggatatcctgctgatgtgttgttctcttctcgacttacacattttatatggaagatctgtggccaatcattagcaaacaaatatttggaaaaaaagataaaccaaaggtttgaccatgaaatgtttggcctgaagcctaaacacagagctctgagtcagcatccaaccttaaatgatgacctgccaaatcgtatcatttctggcttggtgaaagtgaaaggaaatgtgaaggaattcacggagacagctgccatatttgaggatggctccagggaggatgacattgatgctgttatctttgccacaggctatagctttgactttccrtttctggaagattccgtcaaagtggtcaaaaacaagatayccctgtataaaaaggtcttccctcctaacctggaaaggccaactcttgcaatcataggcttgattcagcccttaggagccattatgcccatttcagagctccaaggacgctgggccactcaggtatttaaaggtctaaagacattgccctcacagagtgaaatgatggcagaaatatctaaagctcaagaggaaattgacaaaaggtatgtggagagccaacgccataccattcagggagactacatagataccatggaagagcttgctgatttggtgggggtcaggcccaatctgctgtctctggccttcactgaccccaagctggcattacacttattactgggaccctgcactccaatccactatcgtgtacagggccctggaaagtgggatggggctcgaaaagctatcctcaccacagatgatcgcatcaggaagcctctgatgacaagagtagttgaaagkagtagttctatgacttcaacaatgacaataggcaagtttatgctagctcttgccttctttgctataattatagcttacttctagttgtcctattgtcactgccctgtttttcattgggaagcttatctacagatgccttcagaatctgacgagattgactctcagtttcatattgcccagaaatctactttaatgtctctttcgaaagcattaattcactttcctttttcctacaatgaaacctgttttccatttgtattaactcatctcccttccactcatgatccgtcactcttccttgtggtaatccctagactgggagctcaggtactcttttagtcatctttgtatgtctttagcagagttcttgacatgtggtaggtgcttaataaatgtttgttgtttatcaaattttatggtagggagagtaagtcagcatcrgtataaaatcgcttactccacgtaactcttcttctgatagggtttgattttctattagaagctcaattttagttttttttcatattataactaaatatgtttcctgagagataagagaaataatgttcctacaatagttgtatgtatctaagataagacatatagatgcttaagacattttgtttcacttgctattcactagtgtacttgaaacatggtcatttttagcccttttccttaggaaccatgtctttattttctcaataaagaaattactttcaactttctaggctcacagtcattcagatcatctaccatctgccaatgagatcaacttggttgagaattttgggattttaaattagctgtcctacctttttaaatctcttttaaatccttcccatattaggatccaacaaaactttatcttaggaaatatgataagtagcttccaattgttgtag

SEQ ID NO: 2397 - DNA, 2437 bp, Homo sapiens
cgtagcttcgatggccggacgtgcaggctgcggatccccgtaggcgagcgagcggctaggttcgtgatctggagagacgctcagattattaagttcctgcaacttaactgggaactgatcaagatttcaagctaaagatggtggtgatgaacagcctgagggtcattcttcaagcctctccaggcaaattgctgtggagaaagttccagattccgagattcatgccagcgaggccctgcagcctctatacttgtacttacaaaacccggaaccgagccttgcatccactctgggagagcgtggacctggttcctgggggcgatcgccagtcacccatcaacattcggtggagggacagtgtttatgatcccggcttaaaaccactgaccatctcttatgacccagccacctgcctccacgtctggaataatgggtactctttcctcgtggaatttgaagattctacagataaatcagtgatcaagggaggacccctggaacacaactaccgattgaagcagttccattttcactggggggccatcgatgcctggggttctgagcacaccgtggacagcaaatgcttcccagcagagctgcacttagtgcattggaacgcagtcagatttgaaaactttgaggatgcagcactggaagaaaatggtttggctgtgataggagtatttttaaagctaggcaaacatcataaggagctacagaaattagtggatactttgccgtcaattaagcataaggacgcccttgtggaatttgggtcatttgacccttcctgcctgatgcctacctgcccagattactggacctactcagggtctctgactaccccacccctctccgagtctgtcacctggatcattaagaagcaaccagtagaggttgatcatgatcagcttgagcaatttcggaccctgcttttcacttccgaaggggagaaagagaaaagaatggtggacaacttccgcccccttcagccactgatgaatcgcactgttcgttcatccttccggcatgattatgtgctgaatgtacaagcraaacccaagccggccaccagccaagcaaccccctaaaacattcatatctaggcagtattttgcttttgctttaatatatactagcttactataaattgttaactagactattctaagtgcctgcatttgataatatttacagatgtgcatttcttagcatgagagtgcttcatcagtctttgaggaaggctattcggtaccagcaagagacacaagtttctcttacagatacctgttggtaattgtaatgccttttttttttctttaagagactaggtcttgctctgctgcccaggctagagtgcagtggccaaatgatagctcactgcagccttgaactcctaggctcaagcagtcctcctgccttagcctctagagtagctggggctacaggtgctggccgcctggcccagcttgtaatatctttttatgtctgacatttttgagctatctttttatgtttatccattagtggttctatagcactatacatagggattataatcaaaatttttaacatgtggtaaggcacagacactgaccagaactcaggccttgcagaaacagcctatgggcccmgactggtacttcctggctgaatattggccatggttttagatgtattttattttataacatgaatgtgtattctttcataagggcttatcagtcagtatatttgccccagtgtttagttgttacaaggacatgatatgcttacttactatcagtttatgatgtagaaaatatattttgtaattataagaaaacaagacttttcctatacccagaaatccctttgcatttccgaagatcagatattttgcttaaaggtctgatcatataggaaatatatgcagaacattttaaagaaaattgcccggccttccagaaatatttttcaaaggactagtaatctaatagcctatagtttatattattattttgtattatttgcacgctgttacatagtatataatgataatgttttctacagtgaaagagctatcccgtcttccctttacaactgtctgaactttatttactcattagtcaaggttctttgcaaggcaggtgattaacttaaatatctcagtttatacagtggtttaaaagacttttgttatggtaatagggagagaaacttgtcagataggctaaaatctagataattctacatattctgaggaattcatgctcctgtggctcttgcttataaatatcttggaatgtttctgaatgcctctaagcctatgttcagactctgttgcgtcaatgactggtagtatttctttcattaatatgtttgtcatctggtctgcaagatagggttggatgaatatacttaacactactgaactgtacacttaaagatggttagg

SEQ ID NO: 2398 - DNA, 2185 bp, Homo sapiens
tctgatgccattatcttgagatgtcttagatatgaataaaaagtcattccactcattatgagaactgtctttagaagaaaattatactgaattataccataggaatatctctaggttttgaaaatcatatacccagagatgattccataaataaggaatcaggcaaaaaaccaaaggaattcattggtgagaggagagtgttagggatctcattcccctgcaactactggctgaccccaaccctgcattgcaaaacacttggccccctctgacctcaaaaagcatttggtgcttcctcattaagctctatttattgtctttactattcacccatctgcctcagtctgggccaaatctattgcccaatcttcaattggttgcgacttttttgtctcttcccgattctggcattccagagggtcaataggttccttctccacgtgcttttgagggaaatgccccccccccaaaaaacttttcacaccaccttgaacagactctaaacttaggcactacagttactaagcagcctttggattctttgtttttgaagttagatcttttcagctattagtggaaaatgtgcctcactctactccaggattaccaatagaaatgaaaggacagaaatggcattagtgtttagagaagattatgtatatatggctgtrtgaacactgaaaattatgagggtcaacataaaatcagcattacaggtactaaaacataaatcctgatggctttcaccgttttcttaagagcaaaattgcaaaaagtgatattaacagtcatcctagacgaatatgagcaaatgatttgtttttccttaaaagagcctccaagtgtattgtgatcattttcacactgatcaaagagagcacccttctgtcaacaggtatctgcagttttcaggacctggcagaaattcttctatgttctgcctttaaaggtcaggtacaaaagcagagacagctgccaggcccctctgcccagagctaagtgtctgggaccatgagtgggaaggactgaggcttgagcctccttggtcctccagacagcatggggcgcyacttgccccttctgcagctgcrcgcsgcaaagctgtggcctggccgtggcctcctgccccatgcaacagttggtggacagaccgtacctggcacacggcgccttgtgcactttccaacattttgatgctaaccgtcgctagtcactgagccctgacatttgatctctggccttgaccgcagatttcggaaacttctggcagcccagtgtctactggaaggcccaagccgcttgccagaaagctgcgccccgcccaaaagcactgggttctgcagtccaggcccttcctcagctcccaggtccaggagaactgcaaggtcacctacttccacaggaarcactgggtccgcatccggcccctccgcaccactcctcccagctgggactacacccgcatctgcatccagagagagatggtccccgcccgcatccgcgtcctgagagagatggtccccgaggcctggaggtgctttcccaacaggctgccgctgctgagcaacatcaggcctgatttctcsaaggctcccctggcctacgtgaagcggtggctttggaccgcccgccacccccacagcctgtccgcagcctggtgaccgtgaaaatcgccccgccagagagcagaggaagcccgacgcccaggccatctgccttcaggtctgtgatgagaaacggagtggcctgttccgttgtgcccaggtctaggccgctgagcagagccctcactcccaggcagagttgtctgaatccttcctggcggccgcctgctgccctgacgcctcaggcttgcctgcacctggaaggagcttcgccaggtgggccatgagcctctgagcacacccagcctgctgcccggctccaagagtcaggcccctgccaccacctcctgagcctccagccctcagcaccttcaccctactgaccgcggttctacccccacaccagccaccggccccaccggggcacttcccactgctccagccgaccactcagcgagccccaggcccacctctcctctcccttaaagcccttcccttgcccttgcccattcgctcctgccttctccctggggacaggaggcatgcttctccccagtttccrcaataaaatatttgttgtt

SEQ ID NO: 2399 - DNA, 3369 bp, Homo sapiens
tgtggcctgagaggacggccaggactggccagaaaagagaggtgtggaatgcagtaagaaaagtgacgcggaccagaggggtcttgcctgttccgagagaatggaaggggttagccacggtgggaacggccacggcgggaacggccccgccagtgaggagcgcaggcagcaaggcttagcggaagaggcgtgacccaggcgtaccgcaggggcgtggcccgaacgagctgactttagcccttacgtgaaaggcgtkgcgtagtcgcaagggtgtaaaaaagaaattcgaattcgcgggacrgtcggcctcaggcggaggacgtggctaaacgtgagggggcgtggccaagatggccgcgtgygggatcctcgggtaccgggagcgaacgaggaggttctggctcagttttcctattgtccttgattctacccatccatggtacttctaaaggacagggaaatggaccaccccaaactgatatacattggttctgctcatcacacatggggatctcaacaggccaatctgtgttaccagcaagtctactgatacttaccagggacttgctacagagacctggtgcttgactctggaagaaaatcagcatcagcaatgtcttcagtgcctatggaggatgaatttgcatccactctgggagagcgtggacctggttcctgggggcgatcgmcagtcacccatcaacattcggtggagggacagtgtttatgatcccggcttaaaaccactgaccatctcttatgacccagccacctgcctccacgtctggaataatgggtactctttcctcgtggaatttgaagattctacagataaatcagtggcactatcacaacagagtgacataatggtgggataacatggacacttgtcttcttccttactgtaatgggactatttctactccacataatctgcacagtgctcgacatgagataatcactcactgttccttcagttcaggactggaaatcaatggaaaggaagaacagttaagattattaagttcctgcaacttaactgggaactgatcaagatttcaagctaaagatggtggtgatgaacagcctgagggtcattcttcaagcctctccaggcaaattgctgtggagaaagttccagattccgagattcatgccagcgaggccctgcagcctctatacttgtacttacaaaacccggaaccgagccttgcatccactctgggagagcgtggacctggttcctgggggcgatcgccagtcacccatcaacattcggtggagggacagtgtttatgatcccggcttaaaaccactgaccatctcttatgacccagccacctgcctccacgtctggaataatgggtactctttcctcgtggaatttgaagattctacagataaatcagtgatcaagggaggacccctggaacacaactaccgattgaagcagttccattttcactggggggccatcgatgcctggggttctgagcacaccgtggacagcaaatgcttcccagcagagctgcacttagtgcattggaacgcagtcagatttgaaaactttgaggatgcagcactggaagaaaatggtttggctgtgataggagtatttttaaagctaggcaaacatcataaggagctacagaaattagtggatactttgccgtcaattaagcataaggacgcccttgtggaatttgggtcatttgacccttcctgcctgatgcctacctgcccagattactggacctactcagggtctctgactaccccacccctctccgagtctgtcacctggatcattaagaagcaaccagtagaggttgatcatgatcagcttgagcaatttcggaccctgcttttcacttccgaaggggagaaagagaaaagaatggtggacaacttccgcccccttcagccactgatgaatcgcactgttcgttcatccttccggcatgattatgtgctgaatgtacaagcraaacccaagccggccaccagccaagcaaccccctaaaacattcatatctaggcagtattttgcttttgctttaatatatactagcttactataaattgttaactagactattctaagtgcctgcatttgataatatttacagatgtgcatttcttagcatgagagtgcttcatcagtctttgaggaaggctattcggtaccagcaagagacacaagtttctcttacagatacctgttggtaattgtaatgccttttttttttctttaagagactaggtcttgctctgctgcccaggctagagtgcagtggccaaatgatagctcactgcagccttgaactcctaggctcaagcagtcctcctgccttagcctctagagtagctggggctacaggtgctggccgcctggcccagcttgtaatatctttttatgtctgacatttttgagctatctttttatgtttatccattagtggttctatagcactatacatagggattataatcaaaatttttaacatgtggtaaggcacagacactgaccagaactcaggccttgcagaaacagcctatgggcccmgactggtacttcctggctgaatattggccatggttttagatgtattttattttataacatgaatgtgtattctttcataagggcttatcagtcagtatatttgccccagtgtttagttgttacaaggacatgatatgcttacttactatcagtttatgatgtagaaaatatattttgtaattataagaaaacaagacttttcctatacccagaaatccctttgcatttccgaagatcagatattttgcttaaaggtctgatcatataggaaatatatgcagaacattttaaagaaaattgcccggccttccagaaatatttttcaaaggactagtaatctaatagcctatagtttatattattattttgtattatttgcacgctgttacatagtatataatgataatgttttctacagtgaaagagctatcccgtcttccctttacaactgtctgaactttatttactcattagtcaaggttctttgcaaggcaggtgattaacttaaatatctcagtttatacagtggtttaaaagacttttgttatggtaatagggagagaaacttgtcagataggctaaaatctagataattctacatattctgaggaattcatgctcctgtggctcttgcttataaatatcttggaatgtttctgaatgcctctaagcctatgttcagactctgttgcgtcaatgactggtagtatttctttcattaatatgtttgtcatctggtctgcaagatagggttggatgaatatacttaacactactgaactgtacacttaaagatggttagg

SEQ ID NO: 2400 - DNA, 1932 bp, Homo sapiens
cgtagcttcgatggccggacgtgcaggctgcggatccccgtaggcgagcgagcggctaggttcgtgatctggagagacgctcagattattaagttcctgcaacttaactgggaactgatcaagatttcaagctaaagatggtggtgatgaacagcctgagggtcattcttcaagcctctccaggcaaattgctgtggagaaagttccagattccgagattcatgccagcgaggccctgcagcctctatacttgtacttacaaaacccggaaccgagccttgcatccactctgggagagcgtggacctggttcctgggggcgatcgccagtcacccatcaacattcggtggagggacagtgtttatgatcccggcttaaaaccactgaccatctcttatgacccagccacctgcctccacgtctggaataatgggtactctttcctcgtggaatttgaagattctacagataaatcagtgatcaagggaggacccctggaacacaactaccgattgaagcagttccattttcactggggggccatcgatgcctggggttctgagcacaccgtggacagcaaatgcttcccagcagagctgcacttagtgcattggaacgcagtcagatttgaaaactttgaggatgcagcactggaagaaaatggtttggctgtgataggagtatttttaaagctaggcaaacatcataaggagctacagaaattagtggatactttgccgtcaattaagcataaggacgcccttgtggaatttgggtcatttgacccttcctgcctgatgcctacctgcccagattactggacctactcagggtctctgactaccccacccctctccgagtctgtcacctggatcattaagaagcaaccagtagaggttgatcatgatcagcttgagcaatttcggaccctgcttttcacttccgaaggggagaaagagaaaagaatggtggacaacttccgcccccttcagccactgatgaatcgcactgttcgttcatccttccggcatgattatgtgctgaatgtacaagcraaacccaagccggccaccagccaagcaaccccctaaaacattcatatctaggcagtattttgcttttgctttaatatatactagcttactataaattgttaactagactattctaagtgcctgcatttgataatatttacagatgtgcatttcttagcatgagagtgcttcatcagtctttgaggaaggctattcggtaccagcaagagacacaagtttctcttacagatacctgttggtaattgtaatgccttttttttttctttaagagactaggtcttgctctgctgcccaggctagagtgcagtggccaaatgatagctcactgcagccttgaactcctaggctcaagcagtcctcctgccttagcctctagagtagctggggctacaggtgctggccgcctggcccagcttgtaatatctttttatgtctgacatttttgagctatctttttatgtttatccattagtggttctatagcactatacatagggattataatcaaaatttttaacatgtggtaaggcacagacactgaccagaactcaggccttgcagaaacagcctatgggcccmgactggtacttcctggctgaatattggccatggttttagatgtattttattttataacatgaatgtgtattctttcataagggcttatcagtcagtatatttgccccagtgtttagttgttacaaggacatgatatgcttacttactatcagtttatgatgtagaaaatatattttgtaattataagaaaacaagacttttcctatacccagaaatccctttgcatttccgaagatcagatattttgcttaaaggtctgatcatataggaaatatatgcagaacattttaaagaaaat

SEQ ID NO: 2401 - DNA, 2161 bp, Homo sapiens
tgtggcctgagaggacggccaggactggccagaaaagagaggtgtggaatgcagtaagaaaagtgacgcggaccagaggggtcttgcctgttccgagagaatggaaggggttagccacggtgggaacggccacggcgggaacggccccgccagtgaggagcgcaggcagcaaggcttagcggaagaggcgtgacccaggcgtaccgcaggggcgtggcccgaacgagctgactttagcccttacgtgaaaggcgtkgcgtagtcgcaagggtgtaaaaaagaaattcgaattcgcgggacrgtcggcctcaggcggaggacgtggctaaacgtgagggggcgtggccaagatggccgcgtgygggatcctcgggtaccgggagcgaacgaggaggttctggctcagtgcatccactctgggagagcgtggacctggttcctgggggcgatcgmcagtcacccatcaacattcggtggagggacagtgtttatgatcccggcttaaaaccactgaccatctcttatgacccagccacctgcctccacgtctggaataatgggtactctttcctcgtggaatttgaagattctacagataaatcagctgcacttagtgcattggaacgcagtcaaatttgaaaactttgaggatgcagcactggaagaaaatggtttggctgtgataggagtatttttaaaggaaaattctcagtctcccttgaagaagtgaagcctccttctttatgcactggccactgtctaatacctcccagcaatactcagaggagactacctgctggaacctcactagaattgagagatcaaatggttttggctgttttcccactggagaatataaaaaatacacagttaattttagaaacaaaggctgggcatgattccatcctaagcagcaattcttcaggtagctgcccagaagggcctggagctcctctggaccactgctgatctccagatactccctgagaaccgtcacctcggcgtccaattcctgagtggttttcactactaaataatgactcagtgacccagtctcttggccaggacgctgttatggaatttgggtcgtttggcacttcctgcctggtgcccacctgtctagattactggacccaagtaggtccagtatctccctggtccagccctgtcttgagtccatcacctttatcattaagaagcagccagtagaggttgatgatgatcagatttcggaaacttctggcagcccagtgtctactggaaggcccaagccgcttgccagaaagctgcgccccgcccaaaagcactgggttctgcagtccaggcccttcctcagctcccaggtccaggagaactgcaaggtcacctacttccacaggaarcactgggtccgcatccggcccctccgcaccactcctcccagctgggactacacccgcatctgcatccagagagagatggtccccgcccgcatccgcgtcctgagagagatggtccccgaggcctggaggtgctttcccaacaggctgccgctgctgagcaacatcaggcctgatttctcsaaggctcccctggcctacgtgaagcggtggctttggaccgcccgccacccccacagcctgtccgcagcctggtgaccgtgaaaatcgccccgccagagagcagaggaagcccgacgcccaggccatctgccttcaggtctgtgatgagaaacggagtggcctgttccgttgtgcccaggtctaggccgctgagcagagccctcactcccaggcagagttgtctgaatccttcctggcggccgcctgctgccctgacgcctcaggcttgcctgcacctggaaggagcttcgccaggtgggccatgagcctctgagcacacccagcctgctgcccggctccaagagtcaggcccctgccaccacctcctgagcctccagccctcagcaccttcaccctactgaccgcggttctacccccacaccagccaccggccccaccggggcacttcccactgctccagccgaccactcagcgagccccaggcccacctctcctctcccttaaagcccttcccttgcccttgcccattcgctcctgccttctccctggggacaggaggcatgcttctccccagtttccrcaataaaatatttgttgtt

SEQ ID NO: 2402 - DNA, 1635 bp, Homo sapiens
tgtggcctgagaggacggccaggactggccagaaaagagaggtgtggaatgcagtaagaaaagtgacgcggaccagaggggtcttgcctgttccgagagaatggaaggggttagccacggtgggaacggccacggcgggaacggccccgccagtgaggagcgcaggcagcaaggcttagcggaagaggcgtgacccaggcgtaccgcaggggcgtggcccgaacgagctgactttagcccttacgtgaaaggcgtkgcgtagtcgcaagggtgtaaaaaagaaattcgaattcgcgggacrgtcggcctcaggcggaggacgtggctaaacgtgagggggcgtggccaagatggccgcgtgygggatcctcgggtaccgggagcgaacgaggaggttctggctcagtgcatccactctgggagagcgtggacctggttcctgggggcgatcgmcagtcacccatcaacattcggtggagggacagtgtttatgatcccggcttaaaaccactgaccatctcttatgacccagccacctgcctccacgtctggaataatgggtactctttcctcgtggaatttgaagattctacagataaatcagctgcacttagtgcattggaacgcagtcaaatttgaaaactttgaggatgcagcactggaagaaaatggtttggctgtgataggagtatttttaaagatttcggaaacttctggcagcccagtgtctactggaaggcccaagccgcttgccagaaagctgcgccccgcccaaaagcactgggttctgcagtccaggcccttcctcagctcccaggtccaggagaactgcaaggtcacctacttccacaggaarcactgggtccgcatccggcccctccgcaccactcctcccagctgggactacacccgcatctgcatccagagagagatggtccccgcccgcatccgcgtcctgagagagatggtccccgaggcctggaggtgctttcccaacaggctgccgctgctgagcaacatcaggcctgatttctcsaaggctcccctggcctacgtgaagcggtggctttggaccgcccgccacccccacagcctgtccgcagcctggtgaccgtgaaaatcgccccgccagagagcagaggaagcccgacgcccaggccatctgccttcaggtctgtgatgagaaacggagtggcctgttccgttgtgcccaggtctaggccgctgagcagagccctcactcccaggcagagttgtctgaatccttcctggcggccgcctgctgccctgacgcctcaggcttgcctgcacctggaaggagcttcgccaggtgggccatgagcctctgagcacacccagcctgctgcccggctccaagagtcaggcccctgccaccacctcctgagcctccagccctcagcaccttcaccctactgaccgcggttctacccccacaccagccaccggccccaccggggcacttcccactgctccagccgaccactcagcgagccccaggcccacctctcctctcccttaaagcccttcccttgcccttgcccattcgctcctgccttctccctggggacaggaggcatgcttctccccagtttccrcaataaaatatttgttgtt

SEQ ID NO: 2403 - DNA, 2967 bp, Homo sapiens
ggggcctctaccggcccgatggagcgcgcgggcgctactagccgcgggggccaagcscctggcttcttactgcggcttcatactgagggccsagccgaggcggcgcgggtgcaggagcaggacttacggcagtgggggctgacagggattcacctacgctcttaccagctggagggagtaaactggctygcccagcgcttccattgtcagaatggctgtatcctgggagatgagatgggcctggggaagacctgccagactattgctytcttcatttatttggcaggaagattaaatgatgaagggccatttctgattctttgtcccttgtctgttttgagcaactggaaagaagaaatgcagagatttgctccaggtctttcctgtgtaacatatgcaggcgacaaggaggaaagagcctgccttcagcaagacctgaaacaggagtcacgttttcatgtgctactgactacctatgagatttgcttgaaagatgcatcatttctaaaatcattcccttggagtgttcttgttgtggatgaagctcacaggttgaaaaaccaaagctccctgctgcataagaccttgtcagagttctcagtagtyttcagtctcctgttgaccggaactcccatccagaacagcctccargagctctactccctcctcagttttgtggagcctgatctcttttccaaggaagaggtgggagattttattcaacgctaccaggatattgagaaagaatctgagtcaggcaatgaactgcacaaactcttgcagccatttctgctgaggcgagtgaaagctgaggtagctacagagcttcccaagaagacagaagtagtgatataccatggcatgtcagcattgcagaagaaatactacaaggccattttgatgaaagacctagatgcatttgaaaatgagacggcaaagaaagttaaactacagaacattttgtcccagcttcgaaagtgtgtggatcacccatatttgtttgatggtgtggagccggagccttttgaagttggagaccacctgactgaggctagtgggaagcttcasctgctggataagctactagcattcctgtattctgggggccatcgggttttacttttctcccaaatgacccagatgttggatattctccaagactatatggattacagaggctacagctatgagcgtgtggatggttctgtgagaggagaagagagacacttggccattaagaactttggacagcagcccattttcgtttttctcctgagtactagggcaggtggagttggcatgaacttaacagcagcagatactgtgatttttgttgacagygactttaatcctcagaatgacttgcaagcagctgccagggctcatcgcattggccaaaacaagtctgttaaagttattcggctgattggtcgagacactgtggaagaaatagtctataggaaagcagcctccaaactgcagctcaccaacatgatcatagaaggaggccattttactctgggagcccagaaacccgctgccgatgctgacctccagttgagtgagatactcaaatttggtttggataaactgctggcctctgaggggagcaccatggatgaaatagacctggagtccatactgggagaaacaaaagatggccagtgggtctctgatgccttgcctgcagcagaaggagggagcagagatcaagaggaaggaaaaaatcatatgtacttatttgaaggtaaagattattctaaagagcccagtaaggaagacagaaaatcatttgaacaactggtaaaccttcagaaaacccttttggagaaagctagtcaagagggccgatcactccgaaataaaggcagtgttctcatcccaggccttgtggagggatctaccaaaaggaagcgggttctgagtccagaagagctggaggacagacagaagaaaagacaagaagcagctgccaagagaaggagactcatagaggagaagaagaggcaaaaggaagaggctgaacataagaaaaagatggcctggtgggaatccaacaattaccagtccttctgcctgccctctgaggagagcgagccagaggaccttgagaatggggaagagagctctgctgagctggattaccaagacccagatgctacttccctcaagtacgttagtggtgatgtcacccaccctcaggctggggccgaggatgctctcattgtgcactgcgtagatgactstggccactggggcagaggtggtttatttacagctctggaaaagcgatcygctgagccaagaaaaatatatgagctggctgggaaaatgaaagacctgagtttgggaggtgtccttttatttcctgttgatgataaagaatcaagaaacaaagggcaagatttgttggccttgattgtggctcagcatcgtgatcgttccaatgtcctgtctggcattaagatggcagccctagaagagggcctgaagaagatatttttagcagcaaaaaagaagaaagcaagtgttcatcttccacgtattggacatgccacgaaaggttttaactggtatggtactgagcgacttattcggaaacatctggctgcaagaggcatcccaacttacatatattattttcctagaagcaagtctgctgtccttcattcacagtcttcatcttcctcctcaagacagctggtgccttaagaattggcccagcctcagatcctgtctttagcaaccagctaatatttacccagaggtactgcaatagagtatttcaaaatggaatcaggatctggtgggcctcagaaattgtctcttttctgagtttcartttggttctcctggatgttttgctctgttttgrtacctgtaatatagggaaacacaactttttttgggaaagccctttgaccccagcttgctagttgcataataataaattttctgttcctaatg

SEQ ID NO: 2404 - DNA, 2172 bp, Homo sapiens
ggggcctctaccggcccgatggagcgcgcgggcgctactagccgcgggggccaagcscctggcttcttactgcggcttcatactgagggccsagccgaggcggcgcgggtgcaggagcaggacttacggcagtgggggctgacagggattcacctacgctcttaccagctggagggagtaaactggctygcccagcgcttccattgtcagaatggctgtatcctgggagatgagatgggcctggggaagacctgccagactattgctytcttcatttatttggcaggaagattaaatgatgaagggccatttctgattctttgtcccttgtctgttttgagcaactggaaagaagaaatgcagagatttgctccaggtctttcctgtgtaacatatgcaggcgacaaggaggaaagagcctgccttcagcaagacctgaaacaggagtcacgttttcatgtgctactgactacctatgagatttgcttgaaagatgcatcatttctaaaatcattcccttggagtgttcttgttgtggatgaagctcacaggttgaaaaaccaaagctccctgctgcataagaccttgtcagagttctcagtagtyttcagtctcctgttgaccggaactcccatccagaacagcctccargagctctactccctcctcagttttgtggagcctgatctcttttccaaggaagaggtgggagattttattcaacgctaccaggatattgagaaagaatctgagtcaggcaatgaactgcacaaactcttgcagccatttctgctgaggcgagtgaaagctgaggtagctacagagcttcccaagaagacagaagtagtgatataccatggcatgtcagcattgcagaagaaatactacaaggccattttgatgaaagacctagatgcatttgaaaatgagacggcaaagaaagttaaactacagaacattttgtcccagcttcgaaagtgtgtggatcacccatatttgtttgatggtgtggagccggagccttttgaagttggagaccacctgactgaggctagtgggaagcttcasctgctggataagctactagcattcctgtattctgggctacagctatgagcgtgtggatggttctgtgagaggagaagagagacacttggccattaagaactttggacagcagcccattttcgtttttctcctgagtactagggcaggtggagttggcatgaacttaacagcagcagatactgtgatttttgttgacagygactttaatcctcagaatgacttgcaagcagctgccagggctcatcgcattggccaaaacaagtctgttaaagttattcggctgattggtcgagacactgtggaagaaatagtctataggaaagcagcctccaaactgcagctcaccaacatgatcatagaaggaggccattttactctgggagcccagaaacccgctgccgatgctgacctccagttgagtgagatactcaaatttggtttggataaactgctggcctctgaggggagcaccatggatgaaatagacctggagtccatactgggagaaacaaaagatggccagtgggtctctgatgccttgcctgcagcagaaggagggagcagagatcaagaggaaggaaaaaatcatatgtacttatttgaaggtaaagattattctaaagagcccagtaaggaagacagaaaatcatttgaacaactggtaaaccttcagaaaacccttttggagaaagctagtcaagagggccgatcactccgaaataaaggcagtgttctcatcccaggccttgtggagggatctaccaaaaggaagcgggttctgagtccagaagagctggaggacagacagaagaaaagacaagaagcagctgccaagagaaggagactcatagaggagaagaagaggcaaaaggaagaggctgaacataagaaaaagtatgatggcctggtgggaatccaacaattaccagtccttctgcctgccctctgaggagagcgagccagaggaccttgagaatggggaagagagctctgctgagctggattaccaagacccagatgctacttccctcaagtacgttagtggtgatgtcacccaccctcaggctggggccgaggatgctctcattgtgcactgcgtaggta

SEQ ID NO: 2405 - DNA, 1958 bp, Homo sapiens
ggggcctctaccggcccgatggagcgcgcgggcgctactagccgcgggggccaagcscctggcttcttactgcggcttcatactgagggccsagccgaggcggcgcgggtgcaggagcaggacttacggcagtgggggctgacagggattcacctacgctcttaccagctggagggagtaaactggctygcccagcgcttccattgtcagaatggctgtatcctgggagatgagatgggcctggggaagacctgccagactattgctytcttcatttatttggcaggaagattaaatgatgaagggccatttctgattctttgtcccttgtctgttttgagcaactggaaagaagaaatgcagagatttgctccaggtctttcctgtgtaacatatgcaggcgacaaggaggaaagagcctgccttcagcaagacctgaaacaggagtcacgttttcatgtgctactgactacctatgagatttgcttgaaagatgcatcatttctaaaatcattcccttggagtgttcttgttgtggatgaagctcacaggttgaaaaaccaaagctccctgctgcataagaccttgtcagagttctcagtagtyttcagtctcctgttgaccggaactcccatccagaacagcctccargagctctactccctcctcagttttgtggagcctgatctcttttccaaggaagaggtgggagattttattcaacgctaccaggatattgagaaagaatctgagtcaggcaatgaactgcacaaactcttgcagccatttctgctgaggcgagtgaaagctgaggtagctacagagcttcccaagaagacagaagtagtgatataccatggcatgtcagcattgcagaagaaatactacaaggccattttgatgaaagacctagatgcatttgaaaatgagacggcaaagaaagttaaactacagaacattttgtcccagcttcgaaagtgtgtggatcacccatatttgtttgatggtgtggagccggagccttttgaagttggagaccacctgactgaggctagtgggaagcttcasctgctggataagctactagcattcctgtattctgggggccatcgggttttacttttctcccaaatgacccagatgttggatattctccaagactatatggattacagagactacttgaaaagggttaagatttctgtttttcttcctctctgtaaaggctacagctatgagcgtgtggatggttctgtgagaggagaagagagacacttggccattaagaactttggacagcagcccattttcgtttttctcctgagtactagggcaggtaggctgcaaaggcattgatggaaacagacaaatgagggataatagagtactattacatcccaacggttagtacacttttttccttaattctctgaaaggtgaggttactattgaatgtaaaacaaggtactggacatcaagcatggtgctgttttctatccagcctgtccaaactgtcatctcagcaaagaagtaaggctgaaacctggggttattggaaagtaattctaatctgctttgaccattgacctgggaatgtcctgaaagatttatgtgattttgtggaatgtttcatttacattcagtggaagtagctcttcttcccaaccgtgaatttgggaaataaggtaacagtttgtctactagttgtccttcctctataagtatttctggaatagtgctgaaaagcttaacaaaaatctagttgttaaaaaatgtgattatgttgaaaataccaactttttagaattatttatgacatcatccatatatgatttaaatcgtgaatattacgacatttgtaatgctttaccagttacagagtgctttcatttactgttacataatttgaaatcagctcttggagatgaaatgattctctaagtcattgtggtgtctgg

SEQ ID NO: 2406 - DNA, 1177 bp, Homo sapiens
ggggcctctaccggcccgatggagcgcgcgggcgctactagccgcgggggccaagcscctggcttcttactgcggcttcatactgagggccsagccgaggcggcgcgggtgcaggagcaggacttacggcagtgggggctgacagggattcacctacgctcttaccagctggagggagtaaactggctygcccagcgcttccattgtcagaatggctgtatcctgggagatgagatgggcctggggaagacctgccagactattgctytcttcatttatttggcaggaagattaaatgatgaagggccatttctgattctttgtcccttgtctgttttgagcaactggaaagaagaaatgcagagatttgctccaggtctttcctgtgtaacatatgcaggcgacaaggaggaaagagcctgccttcagcaagacctgaaacaggagtcacgttttcatgtgctactgactacctatgagatttgcttgaaagatgcatcatttctaaaatcattcccttggagtgttcttgttgtggatgaagctcacaggttgaaaaaccaaagctccctgctgcataagaccttgtcagagttctcagtagtyttcagtctcctgttgaccggaactcccatccagaacagcctccargagctctactccctcctcagttttgtggagcctgatctcttttccaaggaagaggtgggagattttattcaacgctaccaggatattgagaaagaatctgagtcaggcaatgaactgcacaaactcttgcagccatttctgctgaggcgagtgaaagctgaggtagctacagagcttcccaagaagacagaagtagtgatataccatggcatgtcagcattgcagaagaaatactacaaggccattttgatgaaagacctagatgcatttgaaaatgagacggcaaagaaagttaaactacagaacattttgtcccagcttcgaaagtgtgtggatcacccatatttgtttgatggtgtggagccggagccttttgaagttggagaccacctgactgaggctagtgggaagcttcasctgctggataagctactagcattcctgtattctgggggccatcgggttttacttttctcccaaatgacccagatgttggatattctccaagactatatggattacagag

SEQ ID NO: 2407 - DNA, 2215 bp, Homo sapiens
acgcacgccggggagcacggcgcccacgtttccaccattagcgaggcctcacacccggcgctccaagttcggggctggaggcgtcccggcttcctccctcccggagcgggaccggccccgcccccgcgccccgggtcgctcccggcggcccctcccacctcctagtcctggcctccccgggcgcagcacactcccagccggccgcagcctgacacgccgcgcggccccccagtctcccgcggctgctcccccaggcatggcacagggcctcgcctcactatggcagcagcacggcacagcacgctcgacttcatgctcggcgccaaagctgatggtgagaccattctaaaaggcctccagtccattttccaggagcaggggatggcggagtcggtgcacacctggcaggaccatggctatttagcaacctacacaaacaagaacggcagctttgccaatttgagaatttacccacatggattggtgttgctggaccttcagagttatgatggtgatgcgcaaggcaaagaagagatcgacagtattttgaacaaagtagaggaaagaatgaaagaattgagtcaggacagtactgggcgggtgaaacgattaccacccatagtgcgaggaggagccatcgacagatactggcccaccgccgacgggcgcctggttgaatatgacatagatgaagtggtatatgacgaagattcaccttatcaaaatataaaaattctacactcgaagcagtttggaaatattctcatccttagtggggatgttaatttggcagagagtgatttggcatatacccgggccatcatgggcagtggcaaagaagattacactggcaaagatgtactcattctgggaggtggagacggaggcatattgtgtgaaatagtcaaactaaaaccaaagatggtcactatggcggacattgaccaaatggtgattgatgggtgtaagaaatacatgcgaaaaacgtgtggcgatgtcttagacaatcttaaaggagactgctatcaggttctaatagaagactgtatcccggtactgaagaggtacgccaaagaagggagagaatttgattatgtgattaatgatttgacagctgttccaatctccacgtctccagaagaagattccacatgggagtttctcagactgattcttgacctctcaatgaaagtgttgaaacaggatgggaaatattttacacaggggaactgtgtcaatctgacagaagcactgtcgctctatgaagaacagctggggcgcctgtattgtcctgtggaattttcmaaggagatcgtmtgtgtcccttcatacttggaattgtgggtattttacactgtttggaagaaagctaaaccctgaagatcagtagcccctaatcacatgtgctgcaaatagccttcctgacctccatatgctgtacatgacatcaaaatgagtcaggcaattgattgtgaattccttaaagttttcctttttttaataattatttttaatttaaaaaagcaaatggaaaatgtatattttgatgagcttagggtgttttttttttgaaagtcagctgaaggatggttagacagcacagcgaagactgctaaatgcactgaccccccccattagaatgtgatttttgttcctttttatttctctgtgggcttttgtttttgtttttgttttggtagatcttcaatttggatatttggaggagtgaacatcgttgttttgctggagggaagatcttgatggtgtttctttccccaaaaattgacttagatattaaaatttggtgcttataagagagagttaaaaaaaaataggattgcttcaattaaaattacaaaagagacattttgtgtgttctgtcgttttatttcagcccagtcccctctttctgacttgtgatctcatagagcaacagtatctcctggtctgtttttagttctgtcactcgatgtcatttatctctttataataggatggccccggggccttttttgaacagtagtaatgacttcatttgccaccgtgctaaatgatacacaacctattacattcaccagtccttcattataccattgacctgaggctagcaagagattttgtctgactgtaaagttgaaagtcaaaagcttatttctggtcccactcttagcagtgtattagatgtggaaataaaagtcattttgggtagctgcta

SEQ ID NO: 2408 - DNA, 2214 bp, Homo sapiens
acgcacgccggggagcacggcgcccacgtttccaccattagcgaggcctcacacccggcgctccaagttcggggctggaggcgtcccggcttcctccctcccggagcgggaccggccccgcccccgcgccccgggtcgctcccggcggcccctcccacctcctagtcctggcctccccgggcgcagcacactcccagccggccgcagcctgacacgccgcgcggccccccagtctcccgcggctgctcccccaggcatggcacagggcctcgcctcactatggcagcagcacggcacagcacgctcgacttcatgctcggcgccaaagctgatggtgagaccattctaaaaggcctccagtccattttccaggagcaggggatggcggagtcggtgcacacctggcaggaccatggctatttagcaacctacacaaacaagaacggcagctttgccaatttgagaatttacccacatggattggtgttgctggaccttcagagttatgatggtgatgcgcaaggcaaagaagagatcgacagtattttgaacaaagtagaggaaagaatgaaagaattgagtcaggacagtactgggcgggtgaaacgattaccacccatagtgcgaggaggagccatcgacagatactggcccaccgccgacgggcgcctggttgaatatgacatagatgaagtggtatatgacgaagattcaccttatcaaaatataaaaattctacactcgaagcagtttggaaatattctcatccttagtggggatgttaatttggcagagagtgatttggcatatacccgggccatcatgggcagtggcaaagaagattacactggcaaagatgtactcattctgggaggtggagacggaggcatattgtgtgaaatagtcaaactaaaaccaaagatggtcactatgcggacattgaccaaatggtgattgatgggtgtaagaaatacatgcgaaaaacgtgtggcgatgtcttagacaatcttaaaggagactgctatcaggttctaatagaagactgtatcccggtactgaagaggtacgccaaagaagggagagaatttgattatgtgattaatgatttgacagctgttccaatctccacgtctccagaagaagattccacatgggagtttctcagactgattcttgacctctcaatgaaagtgttgaaacaggatgggaaatattttacacaggggaactgtgtcaatctgacagaagcactgtcgctctatgaagaacagctggggcgcctgtattgtcctgtggaattttcmaaggagatcgtmtgtgtcccttcatacttggaattgtgggtattttacactgtttggaagaaagctaaaccctgaagatcagtagcccctaatcacatgtgctgcaaatagccttcctgacctccatatgctgtacatgacatcaaaatgagtcaggcaattgattgtgaattccttaaagttttcctttttttaataattatttttaatttaaaaaagcaaatggaaaatgtatattttgatgagcttagggtgttttttttttgaaagtcagctgaaggatggttagacagcacagcgaagactgctaaatgcactgaccccccccattagaatgtgatttttgttcctttttatttctctgtgggcttttgtttttgtttttgttttggtagatcttcaatttggatatttggaggagtgaacatcgttgttttgctggagggaagatcttgatggtgtttctttccccaaaaattgacttagatattaaaatttggtgcttataagagagagttaaaaaaaaataggattgcttcaattaaaattacaaaagagacattttgtgtgttctgtcgttttatttcagcccagtcccctctttctgacttgtgatctcatagagcaacagtatctcctggtctgtttttagttctgtcactcgatgtcatttatctctttataataggatggccccggggccttttttgaacagtagtaatgacttcatttgccaccgtgctaaatgatacacaacctattacattcaccagtccttcattataccattgacctgaggctagcaagagattttgtctgactgtaaagttgaaagtcaaaagcttatttctggtcccactcttagcagtgtattagatgtggaaataaaagtcattttgggtagctgcta

SEQ ID NO: 2409 - DNA, 2215 bp, Homo sapiens
acgcacgccggggagcacggcgcccacgtttccaccattagcgaggcctcacacccggcgctccaagttcggggctggaggcgtcccggcttcctccctcccggagcgggaccggccccgcccccgcgccccgggtcgctcccggcggcccctcccacctcctagtcctggcctccccgggcgcagcacactcccagccggccgcagcctgacacgccgcgcggccccccagtctcccgcggctgctcccccaggcatggcacagggcctcgcctcactatggcagcagcacggcacagcacgctcgacttcatgctcggcgccaaagctgatggtgagaccattctaaaaggcctccagtccattttccaggagcaggggatggcggagtcggtgcacacctggcaggaccatggctatttagcaacctacacaaacaagaacggcagctttgccaatttgagaatttacccacatggattggtgttgctggaccttcagagttatgatggtgatgcgcaaggcaaagaagagatcgacagtattttgaacaaagtagaggaaagaatgaaagaattgagtcaggacagtactgggcgggtgaaacgattaccacccatagtgcgaggaggagccatcgacagatactggcccaccgccgacgggcgcctggttgaatatgacatagatgaagtggtatatgacgaagattcaccttatcaaaatataaaaattctacactcgaagcagtttggaaatattctcatccttagtggggatgttaatttggcagagagtgatttggcatatacccgggccatcatgggcagtggcaaagaagattacactggcaaagatgtactcattctgggaggtggagacggaggcatattgtgtgaaatagtcaaactaaaaccaaagatggtcactatggtagagattgaccaaatggtgattgatgggtgtaagaaatacatgcgaaaaacgtgtggcgatgtcttagacaatcttaaaggagactgctatcaggttctaatagaagactgtatcccggtactgaagaggtacgccaaagaagggagagaatttgattatgtgattaatgatttgacagctgttccaatctccacgtctccagaagaagattccacatgggagtttctcagactgattcttgacctctcaatgaaagtgttgaaacaggatgggaaatattttacacaggggaactgtgtcaatctgacagaagcactgtcgctctatgaagaacagctggggcgcctgtattgtcctgtggaattttcmaaggagatcgtmtgtgtcccttcatacttggaattgtgggtattttacactgtttggaagaaagctaaaccctgaagatcagtagcccctaatcacatgtgctgcaaatagccttcctgacctccatatgctgtacatgacatcaaaatgagtcaggcaattgattgtgaattccttaaagttttcctttttttaataattatttttaatttaaaaaagcaaatggaaaatgtatattttgatgagcttagggtgttttttttttgaaagtcagctgaaggatggttagacagcacagcgaagactgctaaatgcactgaccccccccattagaatgtgatttttgttcctttttatttctctgtgggcttttgtttttgtttttgttttggtagatcttcaatttggatatttggaggagtgaacatcgttgttttgctggagggaagatcttgatggtgtttctttccccaaaaattgacttagatattaaaatttggtgcttataagagagagttaaaaaaaaataggattgcttcaattaaaattacaaaagagacattttgtgtgttctgtcgttttatttcagcccagtcccctctttctgacttgtgatctcatagagcaacagtatctcctggtctgtttttagttctgtcactcgatgtcatttatctctttataataggatggccccggggccttttttgaacagtagtaatgacttcatttgccaccgtgctaaatgatacacaacctattacattcaccagtccttcattataccattgacctgaggctagcaagagattttgtctgactgtaaagttgaaagtcaaaagcttatttctggtcccactcttagcagtgtattagatgtggaaataaaagtcattttgggtagctgcta

SEQ ID NO: 2410 - DNA, 2117 bp, Homo sapiens
gcgtcggcgctgccactggcccgcgacgggaacggggcgaaaaggcggcggcaccatgttctccctcaagccgcccaaacccaccttcaggtcctacctcctgccaccgccccaggagaaattgtcgtaaatgaagtcaattttgtgagaaaatgcattgcaacagacacaagccagtacgatttgtggggaaagctgatatgcagtaacttcaaaatctcctttattacagatgacccaatgccattacagaaattccattacagaaaccttcttcttggtgaacacgatgtccctttaacatgtattgarcaaattgtcacagtaaacgaccacaagaggaagcagaaagtcctaggccccaaccagaaactgaaatttaatccaacagagttaattatttattgtaaagatttcagaattgtcagatttcgctttgatgaatcaggtcccgaaagtgctaaaaaggtatgccttgcaatagctcattattcccagccaacagacctccagctactctttgcatttgaatatgttgggaaaaaataccacaattcagcaaacaaaattaatggaattccctcaggagatggaggaggaggaggaggaggaggtaatggagctggtggtggcagcagccagaaaactccactctttgaaacttactcggattgggacagagaaatcaagaggacaggtgcttccgggtggagagtttgttctattaacgagggttacatgatatccacttgccttccagaatacattgtagtgccaagttctttagcagaccaagatctaaagatcttttcccattcttttgttgggagaaggatgccactctggtgctggagccactctaacggcagtgctcttgtgcgaatggccctcatcaaagacgtgctgcagcagaggaagattgaccagaggatttgtaatgcaataactaaaagtcacccacagagaagtgatgtttacaaatcagatttggataagaccttgcctaatattcaagaagtacaggcagcatttgtaaaactgaagcagctatgcgttaatgagccttttgaagaaactgaagagaaatggttatcttcactggaaaatactcgatggttagaatatgtaagggcattccttaagcattcagcagaacttgtatacatgctagaaagcaaacatctctctgtagtcctacaagaggaggaaggaagagacttgagctgttgtgtagcttctcttgttcaagtgatgctggatccctattttaggacaattactggatttcagagtctgatacagaaggagtgggtcatggcaggatatcagtttctagacagatgcaaccatctaaagagatcagagaaagagtctcctttatttttgctattcttggatgccacctggcagctgttagaacaatatcctgcagcttttgagttctccgaaacctacctggcagtgttgtatgacagcacccggatctcactgtttggcaccttcctgttcaactcccctcaccagcgagtgaagcaaagcacggtcagtaggataaaaagttgtacaaaacaagattattttccttcacgagtttgaagtttctggtcacaattcattgatgtagaggatttatgactaagcagggtctcaagccaaacttgaaaccattctgaaccaaagtgccatttcacccacctcgaaccaacaacagaagctgacaaatgccgtggagaccattgagrgaaacagaaaggggcagctcttgtggaccttcaggaagcctttctaggaagaggattgccctcatagtgagctccggggtcttcagcctcagccgtaaggccctgggctaggcagtgtgacctagggagcgggaaacctgagttctggccctggtctgggaaaagtgctaggcccatgttccactcaggcttcagcctgagagtccaggtygctaacctgtaaaatggatctgtcaaactaacacttatgcctttagtctcattgtatgaggtgaaacattttgtaaactgtgaatcattatgcaaattttcctaaagacatatgaattattctggatttgttggtataaaagacaaaayacactggtcagttaa

SEQ ID NO: 2411 - DNA, 2221 bp, Homo sapiens
ctcctctgcgcttccgtggagcctccaggccgacccccgggaactggaggaccccaggaggctgcgcgcgtctccctgcccacagcagcgcggctgcctgattcccggcgccgcgaaatgcgccttctcgggagcccccactggctcggcgaaaacttactgacgataagatcaattcggaaccgaagattaaaaaactggagccagtccttttgccaggagaaattgtcgtaaatgaagtcaattttgtgagaaaatgcattgcaacagacacaagccagtacgatttgtggggaaagctgatatgcagtaacttcaaaatctcctttattacagatgacccaatgccattacagaaattccattacagaaaccttcttcttggtgaacacgatgtccctttaacatgtattgarcaaattgtcacagtaaacgaccacaagaggaagcagaaagtcctaggccccaaccagaaactgaaatttaatccaacagagttaattatttattgtaaagatttcagaattgtcagatttcgctttgatgaatcaggtcccgaaagtgctaaaaaggtatgccttgcaatagctcattattcccagccaacagacctccagctactctttgcatttgaatatgttgggaaaaaataccacaattcagcaaacaaaattaatggaattccctcaggagatggaggaggaggaggaggaggaggtaatggagctggtggtggcagcagccagaaaactccactctttgaaacttactcggattgggacagagaaatcaagaggacaggtgcttccgggtggagagtttgttctattaacgagggttacatgatatccacttgccttccagaatacattgtagtgccaagttctttagcagaccaagatctaaagatcttttcccattcttttgttgggagaaggatgccactctggtgctggagccactctaacggcagtgctcttgtgcgaatggccctcatcaaagacgtgctgcagcagaggaagattgaccagaggatttgtaatgcaataactaaaagtcacccacagagaagtgatgtttacaaatcagatttggataagaccttgcctaatattcaagaagtacaggcagcatttgtaaaactgaagcagctatgcgttaatgagccttttgaagaaactgaagagaaatggttatcttcactggaaaatactcgatggttagaatatgtaagggcattccttaagcattcagcagaacttgtatacatgctagaaagcaaacatctctctgtagtcctacaagaggaggaaggaagagacttgagctgttgtgtagcttctcttgttcaagtgatgctggatccctattttaggacaattactggatttcagagtctgatacagaaggagtgggtcatggcaggatatcagtttctagacagatgcaaccatctaaagagatcagagaaagagtctcctttatttttgctattcttggatgccacctggcagctgttagaacaatatcctgcagcttttgagttctccgaaacctacctggcagtgttgtatgacagcacccggatctcactgtttggcaccttcctgttcaactcccctcaccagcgagtgaagcaaagcacggtcagtaggataaaaagttgtacaaaacaagattattttccttcacgagtttgaagtttctggtcacaattcattgatgtagaggatttatgactaagcagggtctcaagccaaacttgaaaccattctgaaccaaagtgccatttcacccacctcgaaccaacaacagaagctgacaaatgccgtggagaccattgagrgaaacagaaaggggcagctcttgtggaccttcaggaagcctttctaggaagaggattgccctcatagtgagctccggggtcttcagcctcagccgtaaggccctgggctaggcagtgtgacctagggagcgggaaacctgagttctggccctggtctgggaaaagtgctaggcccatgttccactcaggcttcagcctgagagtccaggtygctaacctgtaaaatggatctgtcaaactaacacttatgcctttagtctcattgtatgaggtgaaacattttgtaaactgtgaatcattatgcaaattttcctaaagacatatgaattattctggatttgttggtataaaagacaaaayacactggtcagttaa

SEQ ID NO: 2412 - DNA, 2503 bp, Homo sapiens
atttccggctcctcccggaagtgccgaagctggctactaagggaacttgggaggatcccacctcagccttcgtgactagtgaggtgcgcaaacgcccgagttttccctggtgcgcgggttccgcctttgcagtgccctccacccttcctggtgtctgacccgcctccttcccaggccttttgttcctgtcccggaaagccggcgtcctgccgcgcgatgcccctgctcggacttcttcccaggagggcctgggcttcgctgctcagccagctcctgcgaccgccctgcgcttcgtgcaccggggcggtccgttgccaaagccaggttgcagaggcagtgttaacatcccaactgaaagcacatcaagagaaaccaaattttattatcaagaccccaaagggtaccagggatcttagtcctcagcatatggttgtgagggagaaaattcttgatttggttatcagctgctttaaacgtcatggagcaaaggggatggacaccccagcatttgagctgaaggaaaccctgactgagaagtatggagaggactctgggctcatgtatgatctgaaggatcaaggtggagagctgttgtccctccgctatgaccttactgttccctttgctcgttatctggccatgaataaggtgaagaagatgaaacgttatcatgttggaaaggtgtggcggcgagagagcccaaccatagtccaaggccgttatagggagttctgccagtgtgattttgacattgctggtcagtttgaccctatgatccccgatgcagagtgtttgaagatcatgtgtgaaatcctaagtggattgcagttgggagactttctcattaaggtaaatgaccggcggattgtggatgggatgtttgctgtctgtggtgttcctgaaagcaagttccgtgccatctgctcctccatagataaactagacaagatggcttggaaagatgtgagacatgagatggtggtgaagaaaggcctggctcctgaggtggctgatcgaattggggactatgtccagtgtcatggtggggtatccctagtagagcaaatgtttcaggatcccagactatcccagaacaagcaggccctggagggcctgggagacctaaagctgctatttgaatacctgactttatttggaattgctgataagatctcctttgacctcagcctggctcggggcctagactactatacaggagtgatctatgaagcagtgctgctgcagaccccaactcaggctggggaggagcccctgaatgtgggcagtgtggctgctggtgggcgctatgatgggctggtgsgcatgtttgaccccaagggccacaaggtgccatgtgtgggactcagcattggggttgagcgaatcttctacattgtggagcagaggatgaagaccaaaggtgagaaggtgcggactacagagactcaagtgtttgtggccacaccacagaagaactttctccaagaacggttgaagcttattgcagagctttgggattctggaatcaaggcagagatgctatacaagaacaaccccaaactattaacccagctgcactattgtgagagcacaggcattccactggtggtcattattggtgagcaagaactgaaagaaggggtcatcaagatccgttcagtggccagcagagaggaggtggccattaaacgggaaaattttgtggctgaaattcagaagcgactgtctgagtcttgatccttgcctgattcccatctgctgctctttgtagaaaaggtttcctctagaactgaattcctctggaattgagtgatggacttcacaacaactagccaggaagggtgacaagtaccttctgcctcctccattcttcctgggtgcagaactgtagaagaccctgaggactcctgggctagtgtgagcagctattctgcatgggtgcagatggctggatgtgaaagagacatgctctagctgcagaggcaaatttgaagtgccacggaacgttgtcaagaggtagtgagattgttgctgtgagcaaggctctgggagagtcacctcaggctcaggattctgaaccattgagatcagaaaccagatacttagccttctactgtagctacggaaccagattctrgtgaatttgtccacaatcagccattggcctgtctggggagtttttggaagacagcaaagaggggcaatggctgctttcagctttgaggacagatgctatcctaagggcatggcagtacccatgttgatttgacatctctctagcccatccattgcttacagtagaagagtggggctgtatgcttgataatcttgaacattgaacttaatagatgacttgacaaggtagagatctgatattttgagattttggagaccatttcctgtgccagaatcactgctctattccataccgtgccatggaggctgttttagaagtggttggataacatgttaaataaaatattaagtgtagtagtttgggtaa

SEQ ID NO: 2413 - DNA, 3654 bp, Homo sapiens
ggcctgggccggaggggcggggtgagaaggctgcgcgcgggtaaaggggccgcctcgagcgcggtccgagcgttcagcggacgcgcgcggcctcgatctctggactcgtcacctgcccctccccctcccgccgccgtcacccaggaaaccggccgcaatcgccggccgacctgaagctggtttcatggcagcctcaaagaaggcagttttggggccattggtgggggcggtggaccagggcaccagttcgacgcgctttttggttttcaattcaaaaacagctgaactacttagtcatcatcaagtagaaataaaacaagagttcccaagagaaggatgggtggaacargaccctaaggaaattctacattctgtctatgagtgtatagagaaaacatgtgagaaacttggacagctcaatattgatatttccaacataaaagctattggtgtcagcaaccagagggaaaccactgtagtctgggacaagataactggagagcctctctacaatgctgtggctgctccagtttctcctggcccttcagttccagttgccgttgttccctctggctcttcagttccagctcctggtacttcctcatccaagacaggccttccacttagcacttacttcagtgcagtgaaacttcgttggctccttgacaatgtgagaaaagttcaaaaggcygttgaagaaaaacgagctctttttgggactattgattcatggcttatttggagtttgacaggaggagtcaatggaggtgtccactgtacagatgtaacaaatgcaagtaggactatgcttttcaacattcattctttggaatgggataaacaactctgcgaattttttggaattccaatggaaattcttccaaatgtccggagttcttctgagatctatggcctaatgaaagctggggccttggaaggtgtgccaatatctgggtgtttaggggaccagtctgctgcattggtgggacaaatgtgcttccagattggacaagccaaaaatacgtatggaacaggatgtttcttactatgtaatacaggccataagtgtgtattttctgatcatggccttctcaccacagtggcttacaaacttggcagagacaaaccagtatattatgctttggaaggttctgtagctatagctggtgctgttattcgctggctaagagacaatcttggaattataaagacctcagaagaaattgaaaaacttgctaaagaagtaggtacttcttatggctgctacttcgtcccagcattttcggggttatatgcaccttattgggagcccagcgcaagagggataatctgtggactcactcagttcaccaataaatgccatattgcttttgctgcattagaagctgtttgtttccaaactcgagagattttggatgccatgaatcgagactgtggaattccactcagtcatttgcaggtagatggaggaatgaccagcaacaaaattcttatgcagctacaagcagacattctgtatataccagtagtgaagccctcaatgcccgaaaccactgcactgggtgcggctatggcggcaggggctgcagaaggagtcggcgtatggagtctcgaacccgaggatttgtctgccgtcacgatggagcggtttgaacctcagattaatgcggaggaaagtgaaattcgttattctacatggaagaaagctgtgatgaagtcaatgggttgggttacaactcaatctccagaaagtggtattccataaaacctaccaactcatggattcccaagatgtgagctttttacataatgaaagaacccagcaattctgtctcttaatgcaatgacactattcatagactttgattttatttataagccacttgctgcatgaccctccaagtagacctgtggcttaaaataaagaaaatgcagcaaaaagaatgctatagaaatatttggtggttttttttttttttaaacatccacagttaaggttgggccagctacctttggggctgaccccctccattgccataacatcctgctccattccctctaagatgtaggaagaattcggatccttaccattggaatcttccatcgaacatactcaaacactwttggaccaggatttgagtctctgcatgacatatacttgattaaaaggttattactaacctgttaaaaatcagcagctctttgcttttaacagacaccctaaaagtcttcttttctacatagttgaagacagcaacatcttcactgaatgtttgaatagaaacctctactaaattattaaaatagacatttagtgttctcacagcttggatatttttctgaaaagttatttgccaaaactgaaatccttcagatgttttccatggtcccactaattataatgactttctgtctggatcttataggaaaggatactttcttttttcttccatctttcctttttatattttttactttgtatgtataacatacatgcctatatattttatacactgagggtagcccatttataaattaagagcacattatattcagaaggttctaacagggctggtcttaagtgaaccactgtgtatataaatatgttggaaaacagctgtatacatttttgggcaacggttatgcataatatttaccaggagaatttttttcttaacaagccaacatttaaaatttatgttttatgtcaataaaagaaaatatactttattgtgacttcaactatatttcttatcccttacatttttatttaattgtcttagcttaaaaaaagaagaaactgtggaatactacagtaaatattgttttcaaacacaagcaataattcaaatagttatttttcttttgaattaattttagacatattttggatcctattgaggggataagaggatgtcaaaaaagttaaatacctaagtagaaaaaaatatagaaataaagccaagaatctctttcagttcaaatgttatcaattgttaataagaaattgctatctgggatgacagaattacctctgcttagtatctcattataactgaaagaaggtttatcattacaaataccttccaatgaaaccaagaatttctcaaaatatttaatgtcacatattataagaagttacctaatcctgcttcttaacatcaatttttaaaaatatcttaaaattactttgttttgtagtaaacagtgaagaaaagattgcctcctaattatttttttcaatgagtgctgaatgggaaaacatttatatcttactataaaaggttctgttttgtttggaatcaatggtagctttattgactgttctgattgtgctgtttctaatttattgaatctgctaggttttattgatgcagccaccacttaagtgacataaatattatagaaaggtactgtgaaatgatcactttgtggcaggggtacttttaaacataaatgtttctacaaaagtaggttgagttcattgtaaataattgtgaaagccactgttcaaataattttaagattacattaatttttctataaattggaagatttataaatgtttgaaattgtacacattgatatttaatgacaaatttacttaaaataaattgaccccttgttcttacttgcatttctcatttacagact

SEQ ID NO: 2414 - DNA, 3571 bp, Homo sapiens
ggcctgggccggaggggcggggtgagaaggctgcgcgcgggtaaaggggccgcctcgagcgcggtccgagcgttcagcggacgcgcgcggcctcgatctctggactcgtcacctgcccctccccctcccgccgccgtcacccaggaaaccggccgcaatcgccggccgacctgaagctggtttcatggcagcctcaaagaaggcagttttggggccattggtgggggcggtggaccagggcaccagttcgacgcgctttttggttttcaattcaaaaacagctgaactacttagtcatcatcaagtagaaataaaacaagagttcccaagagaaggatgggtggaacargaccctaaggaaattctacattctgtctatgagtgtatagagaaaacatgtgagaaacttggacagctcaatattgatatttccaacataaaagctattggtgtcagcaaccagagggaaaccactgtagtctgggacaagataactggagagcctctctacaatgctgtggtccaagacaggccttccacttagcacttacttcagtgcagtgaaacttcgttggctccttgacaatgtgagaaaagttcaaaaggcygttgaagaaaaacgagctctttttgggactattgattcatggcttatttggagtttgacaggaggagtcaatggaggtgtccactgtacagatgtaacaaatgcaagtaggactatgcttttcaacattcattctttggaatgggataaacaactctgcgaattttttggaattccaatggaaattcttccaaatgtccggagttcttctgagatctatggcctaatgaaagctggggccttggaaggtgtgccaatatctgggtgtttaggggaccagtctgctgcattggtgggacaaatgtgcttccagattggacaagccaaaaatacgtatggaacaggatgtttcttactatgtaatacaggccataagtgtgtattttctgatcatggccttctcaccacagtggcttacaaacttggcagagacaaaccagtatattatgctttggaaggttctgtagctatagctggtgctgttattcgctggctaagagacaatcttggaattataaagacctcagaagaaattgaaaaacttgctaaagaagtaggtacttcttatggctgctacttcgtcccagcattttcggggttatatgcaccttattgggagcccagcgcaagagggataatctgtggactcactcagttcaccaataaatgccatattgcttttgctgcattagaagctgtttgtttccaaactcgagagattttggatgccatgaatcgagactgtggaattccactcagtcatttgcaggtagatggaggaatgaccagcaacaaaattcttatgcagctacaagcagacattctgtatataccagtagtgaagccctcaatgcccgaaaccactgcactgggtgcggctatggcggcaggggctgcagaaggagtcggcgtatggagtctcgaacccgaggatttgtctgccgtcacgatggagcggtttgaacctcagattaatgcggaggaaagtgaaattcgttattctacatggaagaaagctgtgatgaagtcaatgggttgggttacaactcaatctccagaaagtggtattccataaaacctaccaactcatggattcccaagatgtgagctttttacataatgaaagaacccagcaattctgtctcttaatgcaatgacactattcatagactttgattttatttataagccacttgctgcatgaccctccaagtagacctgtggcttaaaataaagaaaatgcagcaaaaagaatgctatagaaatatttggtggttttttttttttttaaacatccacagttaaggttgggccagctacctttggggctgaccccctccattgccataacatcctgctccattccctctaagatgtaggaagaattcggatccttaccattggaatcttccatcgaacatactcaaacactwttggaccaggatttgagtctctgcatgacatatacttgattaaaaggttattactaacctgttaaaaatcagcagctctttgcttttaacagacaccctaaaagtcttcttttctacatagttgaagacagcaacatcttcactgaatgtttgaatagaaacctctactaaattattaaaatagacatttagtgttctcacagcttggatatttttctgaaaagttatttgccaaaactgaaatccttcagatgttttccatggtcccactaattataatgactttctgtctggatcttataggaaaggatactttcttttttcttccatctttcctttttatattttttactttgtatgtataacatacatgcctatatattttatacactgagggtagcccatttataaattaagagcacattatattcagaaggttctaacagggctggtcttaagtgaaccactgtgtatataaatatgttggaaaacagctgtatacatttttgggcaacggttatgcataatatttaccaggagaatttttttcttaacaagccaacatttaaaatttatgttttatgtcaataaaagaaaatatactttattgtgacttcaactatatttcttatcccttacatttttatttaattgtcttagcttaaaaaaagaagaaactgtggaatactacagtaaatattgttttcaaacacaagcaataattcaaatagttatttttcttttgaattaattttagacatattttggatcctattgaggggataagaggatgtcaaaaaagttaaatacctaagtagaaaaaaatatagaaataaagccaagaatctctttcagttcaaatgttatcaattgttaataagaaattgctatctgggatgacagaattacctctgcttagtatctcattataactgaaagaaggtttatcattacaaataccttccaatgaaaccaagaatttctcaaaatatttaatgtcacatattataagaagttacctaatcctgcttcttaacatcaatttttaaaaatatcttaaaattactttgttttgtagtaaacagtgaagaaaagattgcctcctaattatttttttcaatgagtgctgaatgggaaaacatttatatcttactataaaaggttctgttttgtttggaatcaatggtagctttattgactgttctgattgtgctgtttctaatttattgaatctgctaggttttattgatgcagccaccacttaagtgacataaatattatagaaaggtactgtgaaatgatcactttgtggcaggggtacttttaaacataaatgtttctacaaaagtaggttgagttcattgtaaataattgtgaaagccactgttcaaataattttaagattacattaatttttctataaattggaagatttataaatgtttgaaattgtacacattgatatttaatgacaaatttacttaaaataaattgaccccttgttcttacttgcatttctcatttacagact

SEQ ID NO: 2415 - DNA, 2777 bp, Homo sapiens
cccggggcgcgtcccggaaccagagacggggcagcgctcgagttcctgygcgggactgccaaggcacgaccacgggccggaaggctgccaggcccagtgggcaagcgaagaaatgaaccaccgcaacgcgggcgcttcggggcggggccgagtgcgaacctgagccccaaatcccgacccaggcaggggcggggcycggagcggggccttggaggcccagcccgcgcggcgacgtctccgcgtggcgtcacggcaccgactgacggccacccaccatggccgcagaccagcgcccgaaggccgacacgctggccctgaggcaacggctcatcagttgggcactgccaccctctcgtggtccaagcagcacatgagcagaaccaggtgctcaacaccaacagccggtacctgcatgacaacatcgtggactatgcgcagaggctgtcagagaccctgccggagcagctctgtgtgttctatttcctgaattctgggtcagaagccaatgacctggccctgaggctggctcgccactacacgggacaccaggacgtggtggtattagatcatgcgtatcacggccacctgagctccctgattgacatcagtccctacaagttccgcaacctggatggccagaaggagtgggtccacgtggcacctctcccagacacctaccggggcccctaccgggaggaccaccccaacccagctatggcctatgccaacgaggtgaaacgtgtggtcagcagtgcacaggagaagggcaggaagattgcagccttcttcgctgagtctctgcccagtgtgggagggcagatcattccccctgctggctacttctcccaagtggcagacccccgtgtcagtcatctcctctgccacaggcacatccgcaaggccggaggggtctttgttgcagatgagatccaggttggctttggccgggtaggcaagcacttctgggccttccagctccagggaaaagacttcgtccctgacatcgtcaccatgggcaagtccattggcaacggccaccctgttgcctgcgtggccgcaacccagcctgtggcgagggcatttgaagccaccggcgttgagtacttcaacacgtttgggggcagcccagtgtcctgcgctgtggggctggccgtcctgaatgtcttggagaaggagcagctccaggatcatgccaccagtgtaggcagcttcctgatgcagctcctcgggcagcaaaaaatcaaacatcccatcgtcggggatgtcaggggtgttgggctcttcattggtgtggatctgatcaaagatgaggccacaaggacaccagcaactgaagaggctgcctacttggtatcaaggctgaaggagaactacgttttgctgagcactgatggccctgggaggaacatcctgaagtttaagcccccaatgtgcttcagcctggacaatgcacggcaggtggtggcaaagctggatgccattctgactgacatggaagagaaggtgagaagttgtgaaacgctgaggctccagccctaagccagccctgctctgcctaagtgtactccagaagaaactcatctcatccaaatacacgctattgagaaggcgagcctgacctccctcttacagataaagtcagctttcagaggctcagggtgggggggcctgcccgaggccataatgctacccaccccctcctcctaaccactggtctgttggaataacccagatgtctgcatcccctcaagtcagtcaatttcctttctgtccmctgggggtggaatggggtagggtgggatactttaaagtgctcctgcttaaataaattagaccagaccagtgtatttctaaagaaaatcctgacatgcacacccattaaaaatagtacattttacagtgtcccagtcatacttttaattggcaaattaaaataatgcaatctgatatattctatcctactaaattaaaaatactgaatataaccaactaaatatacttactcctaagactcactaccagtagtttcacttaaactctgccttagaggctcttcccacccatttcccattatggcacatagagaaaaaggcctctatcactgtccactggagtaataaccactgcttcccctaactgcctcaaagactgtcattttatagaaaatttaagactatcctaatccactctttccaaactcccagccaggatagagacttccaggagttccacctgtcccaccttatctggctgccaactcctgctcagaaacagaacctgccacaccctgccactgcaggccgcamcctcaactcccaactgccaacttgaagcctgaactaccctttccctgaccagagttcaggaggggaagagctacacctccctgcacatgaatccackcatttgaaagcacaactgaccctggatttaagctggccaggaccctgggagatctttggaaggatttttgcctgggtttagggttaacttaaagaggtgcccagaagaccaagtgaggcagttcatgcctgtaatcccaacactttacaaggccaaggcagaggatggcttgagcccaggcaacatggtgagaccaggctttaaaaaaacatatgagccaggcatggtggtacatgcctgtggtcccagctactcgagaggctgagatgggaggatccggtccgcccatgaggtcaaggttgcagtgagccatgattgtgttaccgcaccccagcctggacaacaaagcaagactctgtctcaaagcaaaaaaa

SEQ ID NO: 2416 - DNA, 2825 bp, Homo sapiens
tagccaggcatggtgactggtgtctatagccccacctgctcaggaggctgaggtgggaggaccacttgagcccaggagtgtgaggatgcagtgaatgccatgatcacaccatacactccagcctgggtgacagagtaaggccctgttaaaaaaaaaaaaaaaagtcctccttaaagacatgggctttctagacagsgttcttctgctgaagcggctttccttctgccagaatctcaggaactcctggatctgcctttccagaaccagcttctctctccctgctctgccttcagactgccctctttctacctcwccctctagaactacatctcttctggctgggtttatagcttggggctgggggaggcccagtgggactggctgagtggagccagccgtgtgacggaggcggccctcttccagttgggcactgccaccctctcgtggtccaagcagcacatgagcagaaccaggtgctcaacaccaacagccggtacctgcatgacaacatcgtggactatgcgcagaggctgtcagagaccctgccggagcagctctgtgtgttctatttcctgaattctgggtcagaagccaatgacctggccctgaggctggctcgccactacacgggacaccaggacgtggtggtattagatcatgcgtatcacggccacctgagctccctgattgacatcagtccctacaagttccgcaacctggatggccagaaggagtgggtccacgtggtatgcactgcccaactcaacaacagtgacatgctcagttctctgggttgaggcatcatcaccctggtggccatgtggaggatggactggaaaaggcattcagttagaagacctctgcaggagtccaaggaagaaacaggcaaatctgcaggaggcagattgcagccttcttcgctgagtctctgcccagtgtgggagggcagatcattccccctgctggctacttctcccaagtggcagagcacatccgcaaggccggaggggtctttgttgcagatgagatccaggttggctttggccgggtaggcaagcacttctgggccttccagctccagggaaaagacttcgtccctgacatcgtcaccatgggcaagtccattggcaacggccaccctgttgcctgcgtggccgcaacccagcctgtggcgagggcatttgaagccaccggcgttgagtacttcaacacgtttgggggcagcccagtgtcctgcgctgtggggctggccgtcctgaatgtcttggagaaggagcagctccaggatcatgccaccagtgtaggcagcttcctgatgcagctcctcgggcagcaaaaaatcaaacatcccatcgtcggggatgtcaggggtgttgggctcttcattggtgtggatctgatcaaagatgaggccacaaggacaccagcaactgaagaggctgcctacttggtatcaaggctgaaggagaactacgttttgctgagcactgatggccctgggaggaacatcctgaagtttaagcccccaatgtgcttcagcctggacaatgcacggcaggtggtggcaaagctggatgccattctgactgacatggaagagaaggtgagaagttgtgaaacgctgaggctccagccctaagccagccctgctctgcctaagtgtactccagaagaaactcatctcatccaaatacacgctattgagaaggcgagcctgacctccctcttacagataaagtcagctttcagaggctcagggtgggggggcctgcccgaggccataatgctacccaccccctcctcctaaccactggtctgttggaataacccagatgtctgcatcccctcaagtcagtcaatttcctttctgtccmctgggggtggaatggggtagggtgggatactttaaagtgctcctgcttaaataaattagaccagaccagtgtatttctaaagaaaatcctgacatgcacacccattaaaaatagtacattttacagtgtcccagtcatacttttaattggcaaattaaaataatgcaatctgatatattctatcctactaaattaaaaatactgaatataaccaactaaatatacttactcctaagactcactaccagtagtttcacttaaactctgccttagaggctcttcccacccatttcccattatggcacatagagaaaaaggcctctatcactgtccactggagtaataaccactgcttcccctaactgcctcaaagactgtcattttataagacttccaggagttccacctgtcccaccttatctggctgccaactcctgctcagaaacagaacctgccacaccctgccactgcaggccgcamcctcaactcccaactgccaacttgaagcctgaactaccctttccctgaccagagttcaggaggggaagagctacacctccctgcacatgaatccackcatttgaaagcacaactgaccctggatttaagctggccaggaccctgggagatctttggaaggatttttgcctgggtttagggttaacttaaagaggtgcccagaagaccaagtgaggcagttcatgcctgtaatcccaacactttacaaggccaaggcagaggatggcttgagcccaggcaacatggtgagaccaggctttaaaaaaacatatgagccaggcatggtggtacatgcctgtggtcccagctactcgagaggctgagatgggaggatccggtccgcccatgaggtcaaggttgcagtgagccatgattgtgttaccgcaccccagcctggacaacaaagcaagactctgtctcaaagcaaaaaaa

SEQ ID NO: 2417 - DNA, 2445 bp, Homo sapiens
cgcgtcccggaaccagagacggggcagcgctcgagttcctgygcgggactgccaaggcacgaccacgggccggaaggctgccaggcccagtgggcaagcgaagaaatgaaccaccgcaacgcgggcgcttcggggcggggccgagtgcgaacctgagccccaaatcccgacccaggcaggggcggggcycggagcggggccttggaggcccagcccgcgcggcgacgtctccgcgtggcgtcacggcaccgactgacggccacccaccatggccgcagaccagcgcccgaaggccgacacgctggccctgaggcaacggctcatcagctcttcctgcagactcttttttcccgaggatcctgttaagattgtccgggcccaagggcagtacatgtacgatgaacagggggcagaatacatcgattgcatcagcaatgtggcgcacgtgcgtatcacggccacctgagctccctgattgacatcagtccctacaagttccgcaacctggatggccagaaggagtgggtccacgtggtatgcactgcccaactcaacaacagattgcagccttcttcgctgagtctctgcccagtgtgggagggcagatcattccccctgctggctacttctcccaagtggcagactccagggaaaagacttcgtccctgacatcgtcaccatgggcaagtccattggcaacggccaccctgttgcctgcgtggccgcaacccagcctgtggcgagggcatttgaagccaccggcgttgagtacttcaacacgtttgggggcagcccagtgtcctgcgctgtggggctggccgtcctgaatgtcttggagaaggagcagctccaggatcatgccaccagtgtaggcagcttcctgatgcagctcctcgggcagcaaaaaatcaaacatcccatcgtcggggatgtcaggggtgttgggctcttcattggtgtggatctgatcaaagatgaggccacaaggacaccagcaactgaagaggctgcctacttggtatcaaggctgaaggagaactacgttttgctgagcactgatggccctgggaggaacatcctgaagtttaagcccccaatgtgcttcagcctggacaatgcacggcaggtggtggcaaagctggatgccattctgactgacatggaagagaaggtgagaagttgtgaaacgctgaggctccagccctaagccagccctgctctgcctaagtgtactccagaagaaactcatctcatccaaatacacgctattgagaaggcgagcctgacctccctcttacagataaagtcagctttcagaggctcagggtgggggggcctgcccgaggccataatgctacccaccccctcctcctaaccactggtctgttggaataacccagatgtctgcatcccctcaagtcagtcaatttcctttctgtccmctgggggtggaatggggtagggtgggatactttaaagtgctcctgcttaaataaattagaccagaccagtgtatttctaaagaaaatcctgacatgcacacccattaaaaatagtacattttacagtgtcccagtcatacttttaattggcaaattaaaataatgcaatctgatatattctatcctactaaattaaaaatactgaatataaccaactaaatatacttactcctaagactcactaccagtagtttcacttaaactctgccttagaggctcttcccacccatttcccattatggcacatagagaaaaaggcctctatcactgtccactggagtaataaccactgcttcccctaactgcctcaaagactgtcattttatagaaaatttaagactatcctaatccactctttccaaactcccagccaggatagagacttccaggagttccacctgtcccaccttatctggctgccaactcctgctcagaaacagaacctgccacaccctgccactgcaggccgcamcctcaactcccaactgccaacttgaagcctgaactaccctttccctgaccagagttcaggaggggaagagctacacctccctgcacatgaatccackcatttgaaagcacaactgaccctggatttaagctggccaggaccctgggagatctttggaaggatttttgcctgggtttagggttaacttaaagaggtgcccagaagaccaagtgaggcagttcatgcctgtaatcccaacactttacaaggccaaggcagaggatggcttgagcccaggcaacatggtgagaccaggctttaaaaaaacatatgagccaggcatggtggtacatgcctgtggtcccagctactcgagaggctgagatgggaggatccggtccgcccatgaggtcaaggttgcagtgagccatgattgtgttaccgcaccccagcctggacaacaaagcaagactctgtctcaaagcaaaaaaa

SEQ ID NO: 2418 - DNA, 895 bp, Homo sapiens
gctccttccgcaggcaggagagtcagctagccacccaagaaaacatcatgaaagataccgatatcaagagactactgtatacccatcttttatgcatattttcaattatcctaagtgtcttcattccatcactcttcttggagaactcctcaatattggaaacacacttgacatggttgtgcgtctgttctggttttgtaactgctgtcagtctagtactatatttagtagtgaaaccaaatacatcctctaaaataagttcattatcatacaaggtaaccagatttttgaaatgctgtatctactttcttatgtcttgtttctcctttcatgtaatttttgttctatatggagcaccactaatagagttggcrttggaaacatttttatttgcagttattttgtctacttttactattgggccttacttatgtttgttaggaccaaacctcaaagcatggctaagagttttcagtagaaatggagttacatccatatgggagaatagtctccagatcactgcaatgtctagttttgtaggagcatggcttggagcacgtcctattccttgacagggcaagagcatggcaggtatggcccatctcctgtacgcttggagcgacctttgtccacgtggctggccttgttatttcaccactctggatatactggaatagaaagcaacttacatacaagaacaattaactggagcaaagggagatatttctttgtgcagattctgtaagggctgtgcagaaatgtgtgtggtcaaagccaagcagttccatttacagcactgttttttatgtagttacaacatgatgtgattgtagctttttaaactatgaaacccctgagagattgtaccttctagttgaaataaagtatttataat

SEQ ID NO: 2419 - DNA, 881 bp, Homo sapiens
gctccttccgcaggcaggagagtcagctagccacccaagaaaacatcatgaaagataccgatatcaagagactactgtatacccatcttttatgcatattttcaattatcctaagtgtcttcattccatcactcttcttggagaactcctcaatattggaaacacacttgacatggttgtgcgtctgttctggttttgtaactgctgtcagtctagtactatatttagtagtgaaaccaaatacatcctctaaaataagttcattatcatacaaggtaaccagatttttgaaatgctgtatctactttcttatgtcttgtttctcctttcatgtaatttttgttctatatggagcaccactaatagagttggcrttggaaacatttttatttgcagttattttgtctacttttactattgggccttacttatgtttgttaggaccaaacctcaaagcatggctaagagttttcagtagaaatggagttacatccatatgggagaatagtctccagatcactgcaatgtctagttttgtaggagcatggcttggagcacgtcctattccttgaggtatggcccatctcctgtacgcttggagcgacctttgtccacgtggctggccttgttatttcaccactctggatatactggaatagaaagcaacttacatacaagaacaattaactggagcaaagggagatatttctttgtgcagattctgtaagggctgtgcagaaatgtgtgtggtcaaagccaagcagttccatttacagcactgttttttatgtagttacaacatgatgtgattgtagctttttaaactatgaaacccctgagagattgtaccttctagttgaaataaagtatttataatagaa

SEQ ID NO: 2420 - DNA, 884 bp, Homo sapiens
gcggccgctcccggggcttgggctcgatgggcgtccactgctcgccacgcacagccrcctgcggggcactgaagggttgagccgcgccccagcgcccgccctccctccctccctccctccccggaggcccaccccgctaggggccctgggacaggctcaagtctgaatcccacgcaggatggtgtgactgccactcagagaggttaagtgacgcgcccgaggccacacagccaggacctgggtcggcctgacaccagcccaagctatttcttcatgccaggagtggggcccgaacccctgggcttctggaagatcccgtggtggacactcccagatgcaaattctagtactcaaattctcctctcaaggtgccaagggcagggaaggcagggaggcaggcccgaggtccagcaggaggggtggcccaggagagtagcaggccctgctccgtctggtgggcgccattcacccacgctggccggcagccccccaagggtgcccaggcatttctgcacatgggggtggtggggggagagcttgaagaccacgggattccactggcttttactaaaaatacagactcctgggcccatgcccggaggttccactgcaacaggtcaagtggacctgggagtgtgtgcttttcatcttctatcccataatatctggtggaaaaatatgtcacatcatatacgtcatgaacagaaagagaaactggacatgtgtgatcctacctgactccaaaacggaaacattccattctgaaaagcaaaactagaaggctgatagaagaaaaggcaggaacgtgaaggcaggacccagggccagggaaaggtgttttcacaaagcacagaccatagagcaggtgaacagggaaacctctg

SEQ ID NO: 2421 - DNA, 1636 bp, Homo sapiens
agagtaacaggcaggaagaaagctttctgtactacaccagagggttggggctgtggatttagctactctcacctgaggctactgagcaagttgtcatgcaccaygagacaaagcccaagctgtcccaccaggcagtaagtatggagaggttcaggcacatggcatagctgctatttcgcacaattttcactacaccagtggtgacaaaatagaagaggttcatccatacacagaacctggtgaagagctggaggcagaaagaagtgtctatgtggagacgcaactgaaacaaaggtggcacagcaactgttccaatcccgtgtctttcctcatggcttcccaggagtttgaggttgaagctattgttgacaaaagacaggataaaaatgggaatacacagtatttggttcggtggaaaggttatgacaaacaggatgacacttgggaaccagagcagcacctcatgaactgtgaaaaatgtgtacatgattttaatagacgacagactgaaaaacagaaaaaactgacatggactacaaccagtagaattttttcaaacaatgccagaagaagaacttccagatctacaaaagcaaactattctaagaactctcctaaaacgccagtgactgataaacaccacaggtccaaaaaccgcaagttatttgctgccagcaagaacgttaggagaaaggcagcttcaaytctctccgacacaaagaatatggagataataaattcaactattgagacccttgcacctgacagcccctttgaccacaaaactgtgagtggctttcagaaacttgagaaactggaccctattgcagcagatcagcaggacacggtggtcttcaaggtgacagaagggaaactcctccgggaccctttgtcacrtcctggtgcagaacagactggaatacagaacaagactcagatrcacccactaatgtcgcagatgtctggctcagttactgcttctatggccacaggttcagctacccgaaagggtatagtggtattaatagacccattagcagccaatgggacaacagacatgcatacctcagttccaagagtgaaaggtgggcaaagaaatattactgatgacagcctggtctctcaggtatttttgactggaactttcacccaagaggttatgattcaaattaaggagcttgcctcatacaatgcaattgtactggaagaatgtaaggccctcgttcgctgtaatattaagttggagttggaacaggccaatgagagagagtgtgaggtgctgaggaagatctggagctcagcccaagggatagaatccatgttaaaaatacctctrttgggatataaagcagccttagcttccctcccagaaagacacagaaygatcagagatggtgcccttgactttatagtggcacaaacacttcagagacacacaattataagagacttatcttttagcataaatacttatggcwcaaaatccactgacgatcattctcctaaactgaacacatgactagaattggtggtgagatatcgcttgattttcttttcctttataaatgtctagttcttacccagttaacaaaagaaaactttatcgctctaaagtaaaacttgttacaccacatta

SEQ ID NO: 2422 - DNA, 1367 bp, Homo sapiens
agagtaacaggcaggaagaaagctttctgtactacaccagagggttggggctgtggatttagctactctcacctgaggctactgagcaagttgtcatgcaccaygagacaaagcccaagctgtcccaccaggcagtaagtatggagaggttcaggcacatggcatagctgctatttcgcacaattttcactacaccagtggtgacaaaatagaagaggttcatccatacacagaacctggtgaagagctggaggcagaaagaagtgtctatgtggagacgcaactgaaacaaaggtggcacagcaactgttccaatcccgtgtctttcctcatggcttcccaggagtttgaggttgaagctattgttgacaaaagacaggataaaaatgggaatacacagtatttggttcggtggaaaggttatgacaaacaggatgacacttgggaaccagagcagcacctcatgaactgtgaaaaatgtgtacatgattttaatagacgacagactgaaaaacagaaaaaactgacatggactacaaccagtagaattttttcaaacaatgccagaagaagaacttccagatctacaaaagcaaactattctaagaactctcctaaaacgccagtgactgataaacaccacaggtccaaaaaccgcaagttatttgctgccagcaagaacgttaggagaaaggcagcttcaaytctctccgacacaaagaatatggagataataaattcaactattgagacccttgcacctgacagcccctttgaccacaaaactgtgagtggctttcagaaacttgagaaactggaccctattgcagcagatcagcaggacacggtggtcttcaaggtgacagaagggaaactcctccgggaccctttgtcacrtcctggtgcagaacagactggaatacagaacaagactcagatrcacccactaatgtcgcagatgtctggctcagttactgcttctatggccacaggttcagctacccgaaagggtatagtggtattaatagacccattagcagccaatgggacaacagacatgcatacctcagttccaagagtgaaaggtgggcaaagaaatattactgatgacaggcgccaaaggcctggtctctcaggtatttttgactggaactttcacccaagaggttatgattcaaattaaggagcttgcctcatacaatgcaattgtactggaagaatgtaaggccctcgttcgctgtaatattaagttggagttggaacaggccaatgagagagagtgtgaggtgctgaggaagatctggagctcagcccaagggatagaatccatgttaaagtatgttgaaaataaaattgatgagttttaa

SEQ ID NO: 2423 - DNA, 1789 bp, Homo sapiens
agagtaacaggcaggaagaaagctttctgtactacaccagagggttggggctgtggatttagctactctcacctgaggctactgagcaagttgtcatgcaccaygagacaaagcccaagctgtcccaccaggcagtaagtatggagaggttcaggcacatggcatagctgctatttcgcacaattttcactacaccagtggtgacaaaatagaagaggttcatccatacacagaacctggtgaagagctggaggcagaaagaagtgtctatgtggagacgcaactgaaacaaaggtggcacagcaactgttccaatcccgtgtctttcctcatggcttcccaggagtttgaggttgaagctattgttgacaaaagacaggataaaaatgggaatacacagtatttggttcggtggaaaggttatgacaaacaggatgacacttgggaaccagagcagcacctcatgaactgtgaaaaatgtgtacatgattttaatagacgacagactgaaaaacagaaaaaactgacatggactacaaccagtagaattttttcaaacaatgccagaagaagaacttccagatctacaaaagcaaactattctaagaactctcctaaaacgccagtgactgataaacaccacaggtccaaaaaccgcaagttatttgctgccagcaagaacgttaggagaaaggcagcttcaaytctctccgacacaaagaatatggagataataaattcaactattgagacccttgcacctgacagcccctttgaccacaaaactgtgagtggctttcagaaacttgagaaactggaccctattgcagcagatcagcaggacacggtggtcttcaaggtgacagaagggaaactcctccgggaccctttgtcacrtcctggtgcagaacagactggaatacagaacaagactcagatrcacccactaatgtcgcagatgtctggctcagttactgcttctatggccacaggttcagctacccgaaagggtatagtggtattaatagacccattagcagccaatgggacaacagacatgcatacctcagttccaagagtgaaaggtgggcaaagaaatattactgatgacaggcgccaaaggcctggtctctcaggtatttttgactggaactttcacccaagaggttatgattcaaattaaggagcttgcctcatacaatgcaattgtactggaagaatgtaaggccctcgttcgctgtaatattaagttggagttggaacaggccaatgagagagagtgtgaggtgctgaggaagatctggagctcagcccaagggatagaatccatgttaaaaatacctctrttgggatataaagcagccttagcttccctcccagaaagacacagaaygatcagagatggtgcccttgactttatagtggcacaaacacttcagagacacacaattataagagacttatcttttagcataaatacttatggcwcaaaatccactgacgatcattctcctaaactgaacacatgactagaattggtggtgagatatcgcttgattttcttttcctttataaatgtctagttcttacccagttaacaaaagaaaactttatcgctctaaagtaaaacttgttacaccacattagtgaattatggaatsattttggtggaaatatccaggttctaatgtgtggaatgtgcagatttaggttactttagtgtatgttctagttaataagttaaaattctggacacattattaaaggcagaaacttctttcaaarcaaa

SEQ ID NO: 2424 - DNA, 4862 bp, Homo sapiens
atggccctggggacgacgctcagggcttctctcctgctcctggggctgctgactgaaggcctggcgcagttggcgattcctgcctccgttccccggggcttctgggccctgcctgaaaacctgacggtggtggagggggcctcagtggagctgcgttgtggggtcagcacccctggcagtgcggtgcaatsggccaaagatgggctgctcctgggccccgaccccaggatcccaggcttcccgaggtaccgcctggaaggggaccctgctagaggtgaattccacctgcacatygaggcctgtgacctcagcgatgacgcggagtatgagtgccaggtcggccgctctragatggggcccgagctcgtgtctcccagagtgatcctctccatcctggttcctcccaagctgctcctgctgaccccagaggcaggcaccatggtcacctgggtagctgggcaggagtasgtggtcaactgtgtgtctggggacgcgaagccagcacctgacawcaccawtctcctgagtggayagacaatatctgacatctctgcaaacgtgaacgagggctcccagcagaaactcttcactgtggargccacagccagggtgacaccccggagctcagataataggcagttgctgstctgtgaggcgtctagcccagcactggaggcccccatcaaggcctmattcrccgtgaatgttctgttccctccaggaccccctgtcatcgagtggccaggcctggatgaggggcacgtgcgggcaggacagagcttggagctgcsgtgcgtggcccgagggggtaatcccttagccacactgcagtggctgaagaatggccagccggtgtccacagcgtggggcacagagcacacccaggcggtggcccgcagtgtgctggtgatgaccgtgaggccagaagaccatggagcgcagctcagctgcgaggcccacaacagcgtgtctgcagggacccaggagcacggcatcacactgcaggtcacctttccccctagtgccattattatcttgggatctgcatcccagactgagaacaagaacgtgacactctcctgtgtcagcaagtccmgtygcyygcgggttctgctacgatggtggstgggctggcggcagctgctgcccatggaggagacagtcatggatggacygcatggcggtcacatctccatgtccaacctgacattcctggcgcggcrggaggacaacggtctgaccctcacatktgaggccttcagtgaagccttcaccaaggagaccttcaagaagtcgctcatcctgaacgtaaaatatccygcccagaaactgtggattgagggtcccccagagggccagaagctccgggctgggacccrggtgaggctggtgtrtttggctatcgggggcaacccagagccctccctcatgtggtacaaggactcgcgcaccgtgaccgagtcgcggctgccgcaggagtcgcggcgcgtgcatctcggcagcgtggagaaatctgggagcaccttctcccgagagctggtgctggtcacagggccgtcggacaaccaggccaagttcacgtkcaaggctggacagctcagcgcgtccacgcagctggcggtgcagtttcccccaactaacgtgacgatcctggccaacgcatccgcactgygcccgggagacgccttaaacttgacatgmgtcagcgtcagcagcaatccgccggtcaacttgtcctgggacaaggaaggggagaggctggagggcgtggccgccccaccccggagagccccattcaaaggctccgccgccgccaggagcgtccttcwgcaagtgtcatcccgcgatcatggccagcgcgtgacctkccgcgcccacagcgccgagctccgcgaaaccgtgagctcyttctatcgcctcaacgtacygtaccgtccagagttcctgggggagcaggtgctggtggtgaccgcggtggagcagggcgaggcgttgctgcccgtgtccgtgtccgctaaccccgcccccgaggccttcaactggaccttccgcggctatcgcctcagtccagcgggcggcccccggcatcgcatcctgtccagcggggctctgcatctgtggaatgtgacccgcgcggacgacggcctctatcagctgcactgccagaactstgagggcaccgcggaagcgcggctgcggctggacgtgcactatgytcccacyatcygtgccctccaggaccccactgaggtgaacgtcgggggttctgtggacatagtctgcactgtygatgccaatcccatcctcccgggcatgttcaactgggagagactgggagaagatgaggaggaccagagcctggatgacatggagaagatatccaggggaccaacggggcgcctgysgattcaccatgmcaaactggcccaggctggcgcttaccagtgcattgtggwcaatggggtggcgcctccagcacgacggctgctcygtcttgttktcagatttgccccccaggtggagcaccccactcccctaactaaggtggctgcagctggagacagcaccagttctgccaccctccactgccgtgcccgaggtgtccccaacatcgttttcacttggacaaaaaacggggtccctctggatctccaagatcccaggtacacggagcacacataccaccagggtggtgtccacagcagcctcctgaccattgccaacgtgtctgccgcccaggattacgccctcttcacatgtacagccaccaacgcccttggctcggaccaaaccaacattcaacttgtcagcatcagccgccctgaccctccatcaggattaaaggttgtgagtctgaccccacactccgtggggctggagtggaagcctggctttgatgggggcctgccacagaggttctgcatcaggtatgaggccctggggactccagggttccactatgtggatgtcstaccaccccaggccaccaccttcacgctgactggtctacagccttctacaagatacagggtctggctgctggccagtaatgccttgggggacagtggactggctgacaaagggacccagcttcccatcactaccccaggtctccaccagccttctggagaacctgaagaccagctgcccacagagccaccttcaggcaagaccctcggggctgcccctgctgcctgtgctgttcgctcttggggggcttctgctcctctccartgcctcctgtgtcgggggggtcctctggcagcggagactcaggcgtcttgctgagggcatctcagagaagacagaggcagggtcvgaagaggaccgagtcaggaacgaatatgaggagagccagtggacaggagagcgggacactcagagctccacggtcagcacaacagaggcagagccgtattaccgctccctgagggacttcagccccyagctgcccccgacgcaggaggaggtgtcttattccygaggtttcacaggtgaagatgaggatatggccttccctgggcacttgtatgatgaggtagaaagaacgtaccccccgtctggagcctggggacccctctacgatgaagtgcagatgggaycctgggacctccactggcctgaagacacatatcaggatccaagaggaatctatgaccaggtggccggagacttggacactctggaacccgattctctgcccttcgagctgaggggacatctggtgtaagagccctctcaaccccattgtcctgcacctgcaggaatttacactccactggtctctctcattacagcctgggccgagctggttaggtgagctccataaaacccaaagggacttggtgtcaggagaggacatggagggggctgagtgacagagatggttcagctggtaccagagtagaaacaaggtgcatcctggggttggctttagaaactaaacttctccaaaaggacagggcagattgtaaacgtcgtctcaaaaatgaaatgctgccgggtgcggtgactcacgcctataatcccagcactttgggaggctgaggcgggtggatcacctgaggtcaggagttcgagaccagcctggccaacatggtaaaactccatttctactaaaaatataaaaaattagccaggagtagtggcgcatgcctgtagtcccagctacttgggaggctgatgcatgagaattgcttgaacccaggaggcggaggttgcagtgagctgagatcacgccactgcactccagcctgggcgacagagcgagattctgtctcaaaaaataaaaataaaataaaaataaaaaataaaatgctattctgagggtccctaagtgcttcatgaagtaaagttttcagaagtggggaaagacatatgaaaaactctgttcattttgcattccatgacgtctgaaatagctaataataagtggaatttatgaatccatgttgcatcctacctattattttattatttccgacagttatctaacacaggaggcataaactatgacacatgtaaacataagtatgctccataagcattaaaataaacagacaatcaaaagaagctagaggaaaagaatatgtactgtgtgtgtgctttcgtttatagaaattctaaaataggcaaaactaatctacggtggcagagagcacagcagaggtttcctggggccatgagaggagggttgactgcaaaaaggcatgggagaactttctgaggtgttggaaatattctatataacgattgtggtggtggttgcacgggtgcacagatttgtcaaaactcattgaactttacacttaagatgggtgcatttttattgtacataaatgatatctcaataaaagtgattt

SEQ ID NO: 2425 - DNA, 4858 bp, Homo sapiens
atggccctggggacgacgctcagggcttctctcctgctcctggggctgctgactgaaggcctggcgcagttggcgattcctgcctccgttccccggggcttctgggccctgcctgaaaacctgacggtggtggagggggcctcagtggagctgcgttgtggggtcagcacccctggcagtgcggtgcaatsggccaaagatgggctgctcctgggccccgaccccaggatcccaggcttcccgaggtaccgcctggaaggggaccctgctagaggtgaattccacctgcacatygaggcctgtgacctcagcgatgacgcggagtatgagtgccaggtcggccgctctragatggggcccgagctcgtgtctcccagagtgatcctctccatcctggttcctcccaagctgctcctgctgaccccagaggcaggcaccatggtcacctgggtagctgggcaggagtasgtggtcaactgtgtgtctggggacgcgaagccagcacctgacawcaccawtctcctgagtggayagacaatatctgacatctctgcaaacgtgaacgagggctcccagcagaaactcttcactgtggargccacagccagggtgacaccccggagctcagataataggcagttgctgstctgtgaggcgtctagcccagcactggaggcccccatcaaggcctmattcrccgtgaatgttctgttccctccaggaccccctgtcatcgagtggccaggcctggatgaggggcacgtgcgggcaggacagagcttggagctgcsgtgcgtggcccgagggggtaatcccttagccacactgcagtggctgaagaatggccagccggtgtccacagcgtggggcacagagcacacccaggcggtggcccgcagtgtgctggtgatgaccgtgaggccagaagaccatggagcgcagctcagctgcgaggcccacaacagcgtgtctgcagggacccaggagcacggcatcacactgcaggtcacctttccccctagtgccattattatcttgggatctgcatcccagactgagaacaagaacgtgacactctcctgtgtcagcaagtccmgtygcyygcgggttctgctacgatggtggstgggctggcggcagctgctgcccatggaggagacagtcatggatggacygcatggcggtcacatctccatgtccaacctgacattcctggcgcggcrggaggacaacggtctgaccctcacatktgaggccttcagtgaagccttcaccaaggagaccttcaagaagtcgctcatcctgaacgtaaaatatccygcccagaaactgtggattgagggtcccccagagggccagaagctccgggctgggacccrggtgaggctggtgtrtttggctatcgggggcaacccagagccctccctcatgtggtacaaggactcgcgcaccgtgaccgagtcgcggctgccgcaggagtcgcggcgcgtgcatctcggcagcgtggagaaatctgggagcaccttctcccgagagctggtgctggtcacagggccgtcggacaaccaggccaagttcacgtkcaaggctggacagctcagcgcgtccacgcagctggcggtgcagtttcccccaactaacgtgacgatcctggccaacgcatccgcactgygcccgggagacgccttaaacttgacatgmgtcagcgtcagcagcaatccgccggtcaacttgtcctgggacaaggaaggggagaggctggagggcgtggccgccccaccccggagagccccattcaaaggctccgccgccgccaggagcgtccttcwgcaagtgtcatcccgcgatcatggccagcgcgtgacctkccgcgcccacagcgccgagctccgcgaaaccgtgagctcyttctatcgcctcaacgtacygtaccgtccagagttcctgggggagcaggtgctggtggtgaccgcggtggagcagggcgaggcgttgctgcccgtgtccgtgtccgctaaccccgcccccgaggccttcaactggaccttccgcggctatcgcctcagtccagcgggcggcccccggcatcgcatcctgtccagcggggctctgcatctgtggaatgtgacccgcgcggacgacggcctctatcagctgcactgccagaactstgagggcaccgcggaagcgcggctgcggctggacgtgcactatgytcccacyatcygtgccctccaggaccccactgaggtgaacgtcgggggttctgtggacatagtctgcactgtygatgccaatcccatcctcccgggcatgttcaactgggagagactgggagaagatgaggaggaccagagcctggatgacatggagaagatatccaggggaccaacggggcgcctgysgattcaccatgmcaaactggcccaggctggcgcttaccagtgcattgtggwcaatggggtggcgcctccagcacgacggctgctcygtcttgttktcagatttgccccccaggtggagcaccccactcccctaactaaggtggctgcagctggagacagcaccagttctgccaccctccactgccgtgcccgaggtgtccccaacatcgttttcacttggacaaaaaacggggtccctctggatctccaagatcccaggtacacggagcacacataccaccagggtggtgtccacagcagcctcctgaccattgccaacgtgtctgccgcccaggattacgccctcttcacatgtacagccaccaacgcccttggctcggaccaaaccaacattcaacttgtcagcatcagccgccctgaccctccatcaggattaaaggttgtgagtctgaccccacactccgtggggctggagtggaagcctggctttgatgggggcctgccacagaggttctgcatcaggtatgaggccctggggactccagggttccactatgtggatgtcstaccaccccaggccaccaccttcacgctgactggtctacagccttctacaagatacagggtctggctgctggccagtaatgccttgggggacagtggactggctgacaaagggacccagcttcccatcactaccccaggtctccaccagccttctggagaacctgaagaccagctgcccacagagccaccttcaggaccctcggggctgcccctgctgcctgtgctgttcgctcttggggggcttctgctcctctccartgcctcctgtgtcgggggggtcctctggcagcggagactcaggcgtcttgctgagggcatctcagagaagacagaggcagggtcvgaagaggaccgagtcaggaacgaatatgaggagagccagtggacaggagagcgggacactcagagctccacggtcagcacaacagaggcagagccgtattaccgctccctgagggacttcagccccyagctgcccccgacgcaggaggaggtgtcttattccygaggtttcacaggtgaagatgaggatatggccttccctgggcacttgtatgatgaggtagaaagaacgtaccccccgtctggagcctggggacccctctacgatgaagtgcagatgggaycctgggacctccactggcctgaagacacatatcaggatccaagaggaatctatgaccaggtggccggagacttggacactctggaacccgattctctgcccttcgagctgaggggacatctggtgtaagagccctctcaaccccattgtcctgcacctgcaggaatttacactccactggtctctctcattacagcctgggccgagctggttaggtgagctccataaaacccaaagggacttggtgtcaggagaggacatggagggggctgagtgacagagatggttcagctggtaccagagtagaaacaaggtgcatcctggggttggctttagaaactaaacttctccaaaaggacagggcagattgtaaacgtcgtctcaaaaatgaaatgctgccgggtgcggtgactcacgcctataatcccagcactttgggaggctgaggcgggtggatcacctgaggtcaggagttcgagaccagcctggccaacatggtaaaactccatttctactaaaaatataaaaaattagccaggagtagtggcgcatgcctgtagtcccagctacttgggaggctgatgcatgagaattgcttgaacccaggaggcggaggttgcagtgagctgagatcacgccactgcactccagcctgggcgacagagcgagattctgtctcaaaaaataaaaataaaataaaaataaaaaataaaatgctattctgagggtccctaagtgcttcatgaagtaaagttttcagaagtggggaaagacatatgaaaaactctgttcattttgcattccatgacgtctgaaatagctaataataagtggaatttatgaatccatgttgcatcctacctattattttattatttccgacagttatctaacacaggaggcataaactatgacacatgtaaacataagtatgctccataagcattaaaataaacagacaatcaaaagaagctagaggaaaagaatatgtactgtgtgtgtgctttcgtttatagaaattctaaaataggcaaaactaatctacggtggcagagagcacagcagaggtttcctggggccatgagaggagggttgactgcaaaaaggcatgggagaactttctgaggtgttggaaatattctatataacgattgtggtggtggttgcacgggtgcacagatttgtcaaaactcattgaactttacacttaagatgggtgcatttttattgtacataaatgatatctcaataaaagtgattt

SEQ ID NO: 2426 - DNA, 2571 bp, Homo sapiens
ccctcggggctgcccctgctgcctgtgctgttcgctcttggggggcttctgctcctctccartgcctcctgtgtcgggggggtcctctggcagcggagactcaggcgtcttgctgaggcactcaacttccccccacaccttcatcctggaaggtcvgaagaggaccgagtcaggaacgaatatgaggagagccagtggacaggagagcgggacactcagagctccacggtcagcacaacagaggcagagccgtattaccgctccctgagggacttcagccccyagctgcccccgacgcaggaggaggtgtcttattccygaggtttcacaggtgaagatgaggatatggccttccctgggcacttgtatgatgaggtagaaagaacgtaccccccgtctggagcctggggacccctctacgatgaagtgcagatgggaycctgggacctccactggcctgaagacacatatcaggatccaagaggaatctatgaccaggtggccggagacttggacactctggaacccgattctctgcccttcgagctgaggggacatctggtatggggtttcaaccatgttagccaggctggtctcaaactcctggcctcaagtgatccacccgcctcagcctcccaaagtgctgagattacagagtctcactctgtagtccaggttggagtgcagtggcgttatttcggctcactgcatcctctgcctcctggttcaagagattctcttgcctcagcctcccgcatagctgggattacagcaccttgggaggcagaggtgagcagatcacctcagggcactcaggattccccagtgaccaggatgctccggacctgttacgtgctctgttcccaagctggtccccsctccaggggctggcagtccctgagctttgatggcggggccttccaccttaagggcacaggagagctgacacgggccttgctggttctccggctgtgtgcctggcccccactcgtcactcacrggctgttgctccaggcctggtctcggcgactcctgggctcccggctctcaggcgcatttctccgagcatccgtctatgggcagtttgtggctggtgagacagcagaggaggtgaagggctgcgtgcagcagctgcrgaccctcagcctccgaccactgctggcagtgcccactgaggaggagccggactctgctgccaagaggatgaggcttcaccatgttggccaggctggtcttgaactcctgaccccagcggcatctggctctgttgcccaggctggagtgcagtggagacaatcctctgacaggggaggaggaaaccaggctgctgcctccaggtcttcccttctccaggaggcagcattctccccaccatgcggaaggttgcagcttccagcccaacctgcctccagacacggtgctaggggccgaggaagcatgaaggcaaaatycctgacctcgaggcacttacttgcaagtcaggggcaagagacaataattaaaaccaaagtcagaatcccagcactttggaaggctgagcctgggcaacacagcaagaccccgtctcagcaaaacaaaagtcagtacgtaacaacactttgggaggccgatgtgggcagatcacttgagaacctccaggtctcctgcctcaatgctgagcagaaccagcacctccgggcctccctcagccgcctgcatcgggtggcacaggtaacccctcctgctggaaccagcacctccgggcctccctctgccgcctgcattgggtggcacagccgcctgcatcgggtggcacagtatgcccgggcccagcacgtgcggctcctggtggatgcggagtacacctcactgaaccctgcgctctcgctgctggtggctgccctggctgtgcgctggaacagcccgggtgaaggcgggccctgggtgtggaacacctaccaggcctgtctaaaggacacattcgagcggctggggagggatgcagaggctgcgcacagggccggcctggccttcggagtgaagctggtacgaggtgcatatctggacaaggagagagcggtggcccagctccatgggatggaagaccccactcagcctgactatgaggccaccagtgagctgaacagagcatctcccttcagttacagccgctgcctggaactgatgctgacgcacgtggcccgccatggccccatgtgccacctcatggtggcttcccacaatgaggaatctgttcgccaggcaaccaagcgcatgtgggagctgggcattcctctggatgggactgtctgtttcggacaacttctgggcatgtgtgaccacgtctctctagcactggggcaggccggctatgtagtrtataagtccattccctatggctccttggaggaggtaatcccctacctgatccggagggcccaggagaaccggagcgtgcttcagggtgcccgcagggaacaggagctgctcagccaagaactgtggcrgcggctgctgccaggatgccgaaggataccccactagcacccctgagggggtcatgtggtcaataaaagtccttagstgctgcct

SEQ ID NO: 2427 - DNA, 1677 bp, Homo sapiens
tagagatggggtctcactatgtcgcccagggtagtctcaaactcctcggtcttggcctcccaaagtgttgggattacaaacgtgagaaccgtattttcaaatgtattcaataacactacagygtttccaattttaagaggaagcaattgccacaaaatcactgcccctggtctgggcaaggggcagttggtgaacttgctgcctccagagaaccttccctggtgtggaggcagccagggacccaggatgctccggacctgttacgtgctctgttcccaagctggtccccsctccaggggctggcagtccctgagctttgatggcggggccttccaccttaagggcacaggagagctgacacgggccttgctggttctccggctgtgtgcctggcccccactcgtcactcacrggctgttgctccaggcctggtctcggcgactcctgggctcccggctctcaggcgcatttctccgagcatccgtctatgggcagtttgtggctggtgagacagcagaggaggtgaagggctgcgtgcagcagctgcrgaccctcagcctccgaccactgctggcagtgcccactgaggaggagccggactctgctgccaagagtggtgaggcgtggtatgaggggaacctcggtgmtatgctgcggtgtgtggacctgtcacggggcctcctggagccccccagcctggctgaggccagcctcatgcagctgaaggtgacggcgctgaccagtactcggctctgtaaggagctagcctcrtgggtcagaaggccrggagcctccttggagctgagccccgagaggctggctgaagctatggactctgggcagaacctccaggtctcctgcctcaatgctgagcagaaccagcacctccgggcctccctcagccgcctgcatcgggtggcacagtatgcccgggcccagcacgtgcggctcctggtggatgcggagtacacctcactgaaccctgcgctctcgctgctggtggctgccctggctgtgcgctggaacagcccgggtgaaggcgggccctgggtgtggaacacctaccaggcctgtctaaaggacacattcgagcggctggggagggatgcagaggctgcgcacagggccggcctggccttcggagtgaagctggtacgaggtgcatatctggacaaggagagagcggtggcccagctccatgggatggaagaccccactcagcctgactatgaggccaccagtcagagttacagccgctgcctggaactgatgctgacgcacgtggcccgccatggccccatgtgccacctcatggtggcttcccacaatgaggaatctgttcgccaggcaaccaagcgcatgtgggagctgggcattcctctggatgggactgtctgtttcggacaacttctgggcatgtgtgaccacgtctctctagcactggggcaggccggctatgtagtrtataagtccattccctatggctccttggaggaggtaatcccctacctgatccggagggcccaggagaaccggagcgtgcttcagggtgcccgcagggaacaggagctgctcagccaagaactgtggcrgcggctgctgccaggatgccgaaggataccccactagcacccctgagggggtcatgtggtcaataaaagtccttagstgctgcct

SEQ ID NO: 2428 - DNA, 784 bp, Homo sapiens
tgaactcatataaccctaatgtagacaatgcctcaggtaacaccacagctcaacaaacagacaaaatgacacacacgtctcgctgcctttatttccaggaattagtggcgggcccttggaaaaccactacagactgaagcaatttcacttccactggggagcagtgaaygaggggggctcagagcacacagtggacggccacgtgtaccccgcagagctgcatttagttcactggaattctgtgaaataccaaaattacaaggaagctgtcgtgggagagaatggtttctgtgataggcgtgtttttaaagctcggggcccatcatcagatgctgcagaggctggtggacrtcttgctggaagtaaaacataaggacgcgcrggcggccatgcgccccttcgacccctccgctctgctgcccacctgctgggattactggacctatgtgggctygctcaccaccccgccgctgaccgagtcggtcacctggatcatccagaaggagcccgytgaagtggccccaagccaactctctgcatttcgtactctcctgttttctgcacttggtgaagagaagaagatgayggtgaacaactatcgtccacttcaacccctgatgaactggaaggtctgggcgtccttccaggccactaatgagggcacaagatcctagagacattaggtccacatgaatagcagaactgactttgaaggaaggaagcgttgtttcccaagtttcacaatgtgattgtacgtgacttctgaaattaaaaagagagaatg

SEQ ID NO: 2429 - DNA, 2721 bp, Homo sapiens
cggagcgtggcacgtgggttggtaactgtggcgctgctccctccaccacmacccctgtcctcctcaggccccctccgcctccacccctgccctcctcaggccccctccgcctccacccctgccctcctcaggccccctccgcctccacccctgccctcctcaggccccctccgcctccacccctgccctcctcaggccccctccgcctccacccctgccctcctcaggccccctgcgtccccgcctcgtcctcctcaggccccctccgcctccggctccgtcctcctcwggccccctccgcctccggctccgtcctcctctggccccctccgcccccggccccggccccacggcgggatgcgggacaacaccagccccatcagcgtgattctggtgagctcggggagcaggggcaataagctgctgttcaggtaccccttccagagaagccaggagcacccggcgtcccagacaagtaagccgcgtagcagatacgctgccagcaacacgggcgaccatgctgatgagcaggacggcgattccaggttttcagatgttattctggcaacaattttggcaaccaagtctgaaatgtgtggccaaaaatttgaactgaagattgataatgtgcgatttgttgggcacccaacactgctacagcatgctctggggcagatctccaaaacagatccttccccgaagagggaagcacctactatgattctttttaatgtggtgtttgcactgagggccaacgcagacccgtcagtgataaactgtctgcataacctgtcccgtcgtatcgccaccgtgctgcagcacgaggagcgccgctgccagtacctcacccgggaggccaagctgatcctggcgctccaggatgaggtgtccgccatggctgatggaaatgaaggtcctcagtccccattccatcacatcctgcccaagtgcaagctggccagggacctcaaggaagcttatgacagcctgtgcacgtcgggcgtagttcggcttcacatcaacagctggctggaggtgagcttctgcctgccccacaagatccactatgcggcctccagtctgatccccccagaggccatcgaacggagcctgaaagccatccgcccctaccatgccctgctgctgctcagtgatgagaagtccttgctgggtgagcttcctattgactgctcccctgccctagtgcgggtgatcaagaccacatctgctgtgaagaacctgcagcagctagcccaagatgcggacctggccttgctgcaggttttccagcttgcagctcatctggtgtactggggcaaggccatcatcatctacccgctgtgtgagaacaacgtctacatgctgtctcccaatgccagcgtatgtctgtactccccgctggccgagcagttctcccaccagttcccatctcatgacctgccgtccgttcttgccaagttctccttgccggtctccttgtcagaatttaggaatcccctggcccccgctgtgcaggagacccagctcatccagatggtggtgtggatgctgcagcgccggcttctcatccagctgcacacctatgtctgcctgatggcctcacccagcgaggaggagccccgtccgcgagaggacgacgtccccttcactgcccgggtcggcggtcgcagcctcagcacgcccaacgccctcagctttggctccccaaccagcagcgatgacatgaccctcaccagccccagcatggacaactccagcgcagagctacttcccagcggggactcgccactgaaccagaggatgacggagaacctgctggccagcctgtcggagcatgaacgcgcagccatcctcagtgtacccgcagcccagaaccctgaggacctccgcatgtttgccaggctccttcactacttccgcggccgccaccacctggaggagattatgtacaacgagaacacgcggcgctcccagctgctcatgctgtttgacaagttccgcagcgtgctggtggtgaccacccacgaggaccctgtcattgccgtcttccaggctctgctcccctgagcctggcattgggtggatgcgggctggccgtggcccagtgaagcctgcagagccccgctgtccttgcccctggtggttccgctgtggggctgctgccctctgtgttcctacgcttccctccagtccttgccgcacgcgtaggcatctccacgctggaggggggcctgccaggactcctgtctctgggtgaggccgcatccttcaaggcccatgtgggctgtgcgtttctcagaccctccttctgtccctacacctgctccttggaccccccagtctgtggccaccctgaagaatgtgcagaaacacttgtgtggcctgtccctgtctctctgacagccttcyattttccacagaagccrcaaacaggctcatagccaagctgtgacctggtcctgaccatctgggkcacgaggaggcatggcccactgtgcaggaccccaccctcgggggctttcggctcccacactgatgattctccccagcatccacaccgggcctggcgctacgtactcaggcccccagctctygtgtcctggaggaagagctagctccagacatgggttgatcacctagaggagctctggctaaggcacagttttctagaaataaaacatttattcggtttttaaacaattaaaaaatcttgtctgggcr

SEQ ID NO: 2430 - DNA, 3727 bp, Homo sapiens
ttcccatccgcaccagcaagagggcccctgtgccccaaacgcgaaccgtacggctccagacagcaccgcggaactcggtggcttccagaaggccccgcgcctgcgcattccgctgcctgcgcctgcgcctgcgcctgcgccgttctcccggccgccgccttagcacctcctccggacggtgtcgccgaagtctcgcgagcccggagcgtggcacgtgggccccctccgcctccggctccgtcctcctctggccccctccgcccccggccccggccccacggcgggwtgcgggacaacaccagccccatcagcgtgattctggtgagctcggggagcaggggcaataagctgctgttcaggtaccccttccagagaagccaggagcacccggcgtcccagacaagtaagccgcgtagcagatacgctgccagcaacacgggcgaccatgctgatgagcaggacggcgattccaggttttcagatgttattctggcaacaattttggcaaccaagtctgaaatgtgtggccaaaaatttgaactgaagattgataatgtgcgatttgttgggcacccaacactgctacagcatgctctggggcagatctccaaaacagatccttccccgaagagggaagcacctactatgattctttttaatgtggtgtttgcactgagggccaacgcagacccgtcagtgataaactgtctgcataacctgtcccgtcgtatcgccaccgtgctgcagcacgaggagcgccgctgccagtacctcacccgggaggccaagctgatcctggcgctccaggatgaggtgtccgccatggctgatggaaatgaaggtcctcagtccccattccatcacatcctgcccaagtgcaagctggccagggacctcaaggaagcttatgacagcctgtgcacgtcgggcgtagttcggcttcacatcaacagctggctggaggtgagcttctgcctgccccacaagatccactatgcggcctccagtctgatccccccagaggccatcgaacggagcctgaaagccatccgcccctaccatgccctgctgctgctcagtgatgagaagtccttgctgggtgagcttcctattgactgctcccctgccctagtgcgggtgatcaagaccacatctgctgtgaagaacctgcagcagctagcccaagatgcggacctggccttgctgcaggttttccagcttgcagctcatctggtgtactggggcaaggccatcatcatctacccgctgtgtgagaacaacgtctacatgctgtctcccaatgccagcgtatgtctgtactccccgctggccgagcagttctcccaccagttcccatctcatgacctgccgtccgttcttgccaagttctccttgccggtctccttgtcagaatttaggaatcccctggcccccgctgtgcaggagacccagctcatccagatggtggtgtggatgctgcagcgccggcttctcatccagctgcacacctatgtctgcctgatggcctcacccagcgaggaggagccccgtccgcgagaggacgacgtccccttcactgcccgggtcggcggtcgcagcctcagcacgcccaacgccctcagctttggctccccaaccagcagcgatgacatgaccctcaccagccccagcatggacaactccagcgcagagctacttcccagcggggactcgccactgaaccagaggatgacggagaacctgctggccagcctgtcggagcatgaacgcgcagccatcctcagtgtacccgcagcccagaaccctgaggacctccgcatgtttgccaggctccttcactacttccgcggccgccaccacctggaggagattatgtacaacgagaacacgcggcgctcccagctgctcatgctgtttgacaagttccgcagcgtgctggtggtgaccacccacgaggaccctgtcattgccgtcttccaggctctgctcccctgagcccaggcggagggcggaaggctgctggggtgcgcaggtgggcgctcgcgtctccccaccccagggctccccccgtgctgaggctgagccctcttggccctgaggcctggcattgggtggatgcgggctggccgtggcccagtgaagcctgcagagccccgctgtccttgcccctggtggttccgctgtggggctgctgccctctgtgttcctacgcttccctccagtccttgccgcacgcgtaggcatctccacgctggaggggggcctgccaggactcctgtctctgggtgaggccgcatccttcaaggcccatgtgggctgtgcgtttctcagaccctccttctgtccctacacctgctccttggaccccccagtctgtggccaccctgaagaatgtgcagaaacacttgtgtggcctgtccctgtctctctgacagccttcyatttgtgaagtgccctgtggccccctccccagcacctctgtctgccatgcgcttcttcctcccaggctaccctgagcctttcctggcccagtcctcaccacartccacagaagccrcaaacaggctcatagccaagctgtgacctggtcctgaccatctgggkcacgagggcctgggctggccctgctaggctggagaagccctgtcacctgtgcacatcttgctggtggaggcatggcccactgtgcaggaccccaccctcgggggctttcggctcccacactgatgattctccccagcatccacaccgggcctggcgctacgtactcaggcccccagctctygtgtcctggaggaagagctagctccagacatgggttgatcacctagaggagctctggctaaggcacagttttctagaaataaaacatttattcggtttggaaaggccccttggattcctggctggggacaatgatgacctggaccctggccagaagagccctggccctccagcaaggcagcacctgctctgatgcacctgtgcacccctggcyctcccagccacctgggagyccgaagcttagcctgdaggtggccaagccagtccctactcttgggctgcggccacgtgaggctccgcatcagcagccaggggcgagcactagtggacaaagccagcaaatgcggcgttcctgtgagcagataccctcaaccagccagctgtcaaaagtatttcaagataaaatccaggccaagcaaagcctttaagttcccgtccattctgtgattcccacgctgcttccagctcaccaggtggggtgcctgctgcccaccctgacccacctcagtagggaggagcaggaccctctacatccctgtgggtgcagggcacacgcccctcgttgkctcactgagcccccacagagccgcctgcaaatgagtcaaagcctggccrccctcatcaccacagccccgtgccctggctccttcacacagaacacatccaagtcccacatcctgacaaaaacatgacccctttgatcacttcctgccaaacctccctttcctcaccgactcctccgcygaccctaagtccccctgctgtgcccactgctccatccttggcaacctgaccacgctgctcttagcactgcagtcatcctcttctccaatcagcttctcatcctcatgtgctgcctccgtcaagggcaggcgacactgtgtcctcggccttctttctgcctccactccaaccaaccctttcttttcctttcctttttttt

SEQ ID NO: 2431 - DNA, 3719 bp, Homo sapiens
ttcccatccgcaccagcaagagggcccctgtgccccaaacgcgaaccgtacggctccagacagcaccgcggaactcggtggcttccagaaggccccgcgcctgcgcattccgctgcctgcgcctgcgcctgcgcctgcgccgttctcccggccgccgccttagcacctcctccggacggtgtcgccgaagtctcgcgagcccggagcgtggcacgtgggccccctccgcctccggctccgtcctcctctggccccctccgcccccggccccggccccacggcgggatgcgggacaacaccagccccatcagcgtgattctggtgagctcggggagcaggggcaataagctgctgttcaggtaccccttccagagaagccaggagcacccggcgtcccagacaatcggccttggagctccgtctgcctttgcaagcagggatcaacctcacccttggctgcaggctgctgccttcccctgtggacggcatgtaagccgcgtagcagatacgctgccagcaacacgggcgaccatgctgatgagcaggacggcgattccaggttttcagatgttattctggcaacaattttggcaaccaagtctgaaatgtgtggccaaaaatttgaactgaagattgataatgtgcgatttgttgggcacccaacactgctacagcatgctctggggcagatctccaaaacagatccttccccgaagagggaagcacctactatgattctttttaatgtggtgtttgcactgagggccaacgcagacccgtcagtgataaactgtctgcataacctgtcccgtcgtatcgccaccgaaatgaaggtcctcagtccccattccatcacatcctgcccaagtgcaagctggccagggacctcaaggaagcttatgacagcctgtgcacgtcgggcgtagttcggcttcacatcaacagctggctggaggtgagcttctgcctgccccacaagatccactatgcggcctccagtctgatccccccagaggccatcgaacggagcctgaaagccatccgcccctaccatgccctgctgctgctcagtgatgagaagtccttgctgggtgagcttcctattgactgctcccctgccctagtgcgggtgatcaagaccacatctgctgtgaagaacctgcagcagctagcccaagatgcggacctggccttgctgcaggttttccagcttgcagctcatctggtgtactggggcaaggccatcatcatctacccgctgtgtgagaacaacgtctacwtgctgtctcccaatgccagcgtatgtctgtactccccgctggccgagcagttctcccaccagttcccatctcatgacctgccgtccgttcttgccaagttctccttgccggtctccttgtcagaatttaggaatcccctggcccccgctgtgcaggagacccagctcatccagatggtggtgtggatgctgcagcgccggcttctcatccagctgcacacctatgtctgcctgatggcctcacccagcgaggaggagccccgtccgcgagaggacgacgtccccttcactgcccgggtcggcggtcgcagcctcagcacgcccaacgccctcagctttggctccccaaccagcagcgatgacatgaccctcaccagccccagcatggacaactccagcgcagagctacttcccagcggggactcgccactgaaccagaggatgacggagaacctgctggccagcctgtcggagcatgaacgcgcagccatcctcagtgtacccgcagcccagaaccctgaggacctccgcatgtttgccaggctccttcactacttccgcggccgccaccacctggaggagattatgtacaacgagaacacgcggcgctcccagctgctcatgctgtttgacaagttccgcagcgtgctggtggtgaccacccacgaggaccctgtcattgccgtcttccaggctctgctcccctgagcccaggcggagggcggaaggctgctggggtgcgcaggtgggcgctcgcgtctccccaccccagggctccccccgtgctgaggctgagccctcttggccctgaggcctggcattgggtggatgcgggctggccgtggcccagtgaagcctgcagagccccgctgtccttgcccctggtggttccgctgtggggctgctgccctctgtgttcctacgcttccctccagtccttgccgcacgcgtaggcatctccacgctggaggggggcctgccaggactcctgtctctgggtgaggccgcatccttcaaggcccatgtgggctgtgcgtttctcagaccctccttctgtccctacacctgctccttggaccccccagtctgtggccaccctgaagaatgtgcagaaacacttgtgtggcctgtccctgtctctctgacagccttcyatttgtgaagtgccctgtggccccctccccagcacctctgtctgccatgcgcttcttcctcccaggctaccctgagcctttcctggcccagtcctcaccacartccacagaagccrcaaacaggctcatagccaagctgtgacctggtcctgaccatctgggkcacgagggcctgggctggccctgctaggctggagaagccctgtcacctgtgcacatcttgctggtggaggcatggcccactgtgcaggaccccaccctcgggggctttcggctcccacactgatgattctccccagcatccacaccgggcctggcgctacgtactcaggcccccagctctygtgtcctggaggaagagctagctccagacatgggttgatcacctagaggagctctggctaaggcacagttttctagaaataaaacatttattcggtttggaaaggccccttggattcctggctggggacaatgatgacctggaccctggccagaagagccctggccctccagcaaggcagcacctgctctgatgcacctgtgcacccctggcyctcccagccacctgggagyccgaagcttagcctgdaggtggccaagccagtccctactcttgggctgcggccacgtgaggctccgcatcagcagccaggggcgagcactagtggacaaagccagcaaatgcggcgttcctgtgagcagataccctcaaccagccagctgtcaaaagtatttcaagataaaatccaggccaagcaaagcctttaagttcccgtccattctgtgattcccacgctgcttccagctcaccaggtggggtgcctgctgcccaccctgacccacctcagtagggaggagcaggaccctctacatccctgtgggtgcagggcacacgcccctcgttgkctcactgagcccccacagagccgcctgcaaatgagtcaaagcctggccrccctcatcaccacagccccgtgccctggctccttcacacagaacacatccaagtcccacatcctgacaaaaacatgacccctttgatcacttcctgccaaacctccctttcctcaccgactcctccgcygaccctaagtccccctgctgtgcccactgctccatccttggcaacctgaccacgctgctcttagcactgcagtcatcctcttctccaatcagcttctcatcctcatgtgctgcctccgtcaagggcaggcgacactgtgtcctcggccttctttctgcctccactccaaccaaccctttcttttcctttcctttttttt

SEQ ID NO: 2432 - DNA, 2053 bp, Homo sapiens
ggtgtagcgacccgaggagggaagaggactccaagcgccatggccgctgccgcccgagcccgggtcgcgtacttgctgaggcaactgcaacgcgcagcgtgccagtgcccaactcattctcatacttactcccaagcccctggactttcaccttctgggaaaacaacagattatgcctttgagatggctgtttcaaatattagatatggagcagcagttacaaaggaagtaggaatggacctaaaaaacatgggtgctaaaaatgtgtgcttgatgacagacaagaacctctccaagctccctcctgtgcaagtagctatggattccctagtgaagaatggcatcccctttacggtttatgataatgtgagagtggaaccaacggattcaagtgccaactacctcaggaaccgggagtgaaactactggggttgccatttttgactatgaacacttgaaagtaaaaattggcatcamttcgagagccatcaaacccacactgggactgattgatcctctgcacaccctccacatgcctgcccgagtggtcgccaacagtggctttgatgtgctttgccatgccctggagtcatacaccaccctgccctaccacctgcggagcccctgcccttcaaatcccatcacacggcctgcgtaccagggcagcaacccaatcagtgacatttgggctatccacgcgctgcggatcgtggctaagtatctgaagagggccgtcaacagcactgacaaatgaagaagaagaatgagtctcagggcaccttcctggagtggccctcgccatccagggaccagcgcgttgcctcccccggcgcttttacatcacatgagcagctgacagcgtatttattatgcctttgctgaaacagttgatgagaaatatgtttcccttcagttttcatttagaagacaaggcgtcgtttgaataacttgcctgatttttcttcctaccgagtagcatttctttttttttcaccatatctttccctaaggcagctccttattctgtaggaattgccaatgttgatgtgttattgttaggtatttatatcattcacagggctgtcagaaatcccgatgatcttgaagcaaggtctcatatgcacttggcaagtgcttttgctggcatcggctttggaaatgctggtgttcatctgtgccatggaatgtcttacccaatttcaggtttagtgaagatgtataaagcaaaggattacaatgtggatcacccactggtgccccatggcctttctgtggtgctcacgtccccagcggtgttcactttcacsgcccagatgtttccagagcgacacctggagatggcagaaatactgggagccgacacccgcactgccaggatccaagatgcagggctggtgttggcagacacgctccggaaattcttattcgatctggatgttgatgatggcctagcagctgttggttactccaaagctgatatccccgcactagtgaaaggaacgctgccccaggaaagggtcaccaagcttgcacccygtccccagtcagaagaggatctggctgctctgtttgaagcttcaatgaaactgtattaattgtcattttaactgaaagaattaccgctggccattgtagtgctgagagcaagagctgatctagctagggctttgtcttttcatctttgygcataacttacctgttaccagtataggtgggatatacatttatcttgcaggaaattcccmaaagctcagagtccagttccttccataaaacaggctggacaaatgaccactatgttagacccccaggctcgacttcaggggtcagtgttcctgtcccaaaccccacacagaatactctgcctctgyttcatgtagcaaatgagcaaaaactcagtatctatcaaaagtgtaaattatatttcctatgcctagtaattcacttcatgtctaaaaatttatctgatagaaacactagcaccagtacatacagaagcatggcaaggatgtttctggcagcacttttctaataataaaagatttgaaacaac

SEQ ID NO: 2433 - DNA, 1733 bp, Homo sapiens
atggctgtttcaaatattagatatggagcagcagttacaaaggaagtaggaatggcaagtattcgagatgacctaaaaaacatgggtgctaaaaatgtgtgcttgatgacagacaagaacctctccaagctccctcctgtgcaagtagctatggattccctagtgaagaatggcatcccctttacggtttatgataatgtgagagtggaaccaacggattcaagcttcatggaagctattgagtttgcccaaaagggagcttttgatgcctatgttgctgtcgrtggtggctctaccatggacacctgtaaggctgctaatctgtatgcatccagccctcattctgatttcctagattatgtcagtgcccccattggcaagggaaagcctgtgtctgtgcctcttaagcctctgattgcagtgccaactacctcaggaaccgggagtgaaactactggggttgccatttttgactatgaacacttgaaagtaaaaattggcatcamttcgagagccatcaaacccacactgggactgattgatcctctgcacaccctccacatgcctgcccgagtggtcgccaacagtggctttgatgtgctttgccatgccctggagtcatacaccaccctgccctaccacctgcggagcccctgcccttcaaatcccatcacacggcctgcgtaccagggcagcaacccaatcagtgacatttgggctatccacgcgctgcggatcgtggctaagtatctgaagagggctgtcagaaatcccgatgatcttgaagcaaggtctcatatgcacttggcaagtgcttttgctggcatcggctttggaaatgctggtgttcatctgtgccatggaatgtcttacccaatttcaggtttagtgaagatgtataaagcaaaggattacaatgtggatcacccactggtgccccatggcctttctgtggtgctcacgtccccagcggtgttcactttcacsgcccagatgtttccagagcgacacctggagatggcagaaatactgggagccgacacccgcactgccaggatccaagatgcagggctggtgttggcagacacgctccggaaattcttattcgatctggatgttgatgatggcctagcagctgttggttactccaaagctgatatccccgcactagtgaaaggaacgctgccccaggaaagggtcaccaagcttgcacccygtccccagtcagaagaggatctggctgctctgtttgaagcttcaatgaaactgtattaattgtcattttaactgaaagaattaccgctggccattgtagtgctgagagcaagagctgatctagctagggctttgtcttttcatctttgygcataacttacctgttaccagtataggtgggatatacatttatcttgcaggaaattcccmaaagctcagagtccagttccttccataaaacaggctggacaaatgaccactatgttagacccccaggctcgacttcaggggtcagtgttcctgtcccaaaccccacacagaatactctgcctctgyttcatgtagcaaatgagcaaaaactcagtatctatcaaaagtgtaaattatatttcctatgcctagtaattcacttcatgtctaaaaatttatctgatagaaacactagcaccagtacatacagaagcatggcaaggatgtttctggcagcacttttctaataataaaagatttgaaacaac

SEQ ID NO: 2434 - DNA, 2216 bp, Homo sapiens
gggcggtgtagcgacccgaggagggaagaggactccaagcgccatggccgctgccgcccgagcccgggtcgcgtacttgctgaggcaactgcaacgcgcagccccctggactttcaccttctgggaaaacaacagattatgcctttgagatggctgtttcaaatattagatatggagcagcagttacaaaggaagtaggaatggacctaaaaaacatgggtgctaaaaatgtgtgcttgatgacagacaagaacctctccaagctccctcctgtgcaagtagctatggattccctagtgaagaatggcatcccctttacggtttatgataatgtgagagtggaaccaacggattcaagcttcatggaagctattgagtttgcccaaaagggagcttttgatgcctatgttgctgtcggtggtggctctaccatggacacctgtaaggctgctaatctgtatgcatccagccctcattctgatttcctagattatgtcagtgcccccattggcaagggaaagcctgtgtctgtgcctcttaagcctctgattgcagtgccaactacctcaggaaccgggagtgaaactactggggttgccatttttgactatgaacacttgaaagtaaaaattggcatcacttcgagagccatcaaacccacactgggactgattgatcctctgcacaccctccacatgcctgcccgagtggtcgccaacagtggctttgatgtgctttgccatgccctggagtcatacaccaccctgccctaccacctgcggagcccctgcccttcaaatcccatcacacggcctgcgtaccagggcagcaacccaatcagtgacatttgggctatccacgcgctgcggatcgtggctaagtatctgaagagggccgtcaacagcactgacaaatgaagaagaagaatgagtctcagggcaccttcctggagtggccctcgccatccagggaccagcgcgttgcctcccccggcgcttttacatcacatgagcagctgacagcgtatttattatgcctttgctgaaacagttgatgagaaatatgtttcccttcagttttcatttagaagacaaggcgtcgtttgaataacttgcctgatttttcttcctaccgagtagcatttctttttttttcaccatatctttccctaaggcagctccttattctgtaggaattgccaatgttgatgtgttattgttaggtatttatatcattcacagggctgtcagaaatcccgatgatcttgaagcaaggtctcatatgcacttggcaagtgcttttgctggcatcggctttggaaatgctggtgttcatctgtgccatggaatgtcttacccaatttcaggtttagtgaagatgtataaagcaaaggattacaatgtggatcacccactggtgcccsatggcctttctgtggtgctcacgtccccagcggtgttcactttcacggcccagatgtttccagagcgacacctggagatggcagaaatactgggagccgacacccgcactgccaggatccaagatgcagggctggtgttggcagacacgctccggaaattcttattcgatctggatgttgatgatggcctagcagctgttggttactccaaagctgatatccccgcacyagtgaaaggaacgctgccccaggaaagggtcaccaagcttgcaccctgtccccagtcagaagaggatctggctgctctgtttgaagcttcaatgaaactgtattaattgtcattttaactgaaagaattaccgctggccattgtagtgytgagagcaagagctgatctagctagggctttgtcttttcatctttgcgcataacttaccmgttaccagtataggtgggatatacatttatcttgcaggaaattccccaaagctcagagtccagttccttccataaaacaggctggacaaatgaccactatgttagacccccaggctcgacttcagyggtcagtgttcctgtcccaaaccccacacagaatactctgcctctgtttcatgtagcaaatgagcaaaaactcagtatctatcaaaagtgtaaattatatttcctatgcctagtaattcacttcatgtctaaaaatttatctgatagaaacactagcaccagtacatacagaagcatggcaaggatgtttctggcagcacttttctaataataaaagatttgaaacaac

SEQ ID NO: 2435 - DNA, 2026 bp, Homo sapiens
cgccagccgttcacgcgttcggtcctccttggctgactcaccgccctsgccgccgcaccatggacgcctggtcccgccaagctgccgcactcagtgttgttagagatacaaaaggaattattagactacaaaggagttggcattagtgttcttgaaatgagtcacaggtcatcagattttgccaagattattaacaatacagagaatcttgtgcgggaattgctagctgttccagacaactataaggtgatttttctgcaaggaggtgggtgcggccagttcagtgctgtccccttaaacctcattggcttgaaagcaggaaggtgtgckgactatgtggtgacaggagcttggtcagctaaggccgcagaagaagccaagaagtttgggactataaatatcgttcaccctaaacttgggagttatacaaaaattccagatccaagcacctggaacctcaacccagatgcctcctacgtgtattattgcgcaaatgagacggtgcatggtgtggagtttgactttatacccgatgtcaagggagcagtactggtttgtgacatgtcctcaaacttcctgtccaagccagtggatgtttccaagagtgcccctcggtcctggaatacaaggtgcaggctggaaacagctccttgtacaacacgcctccatgtttcagtggattaaaaacaatggaggtgccgcggccatggagaagcttagctccatcaaatctcaaacaatttatgagattattgataattctcaaggattctacgtttgtccagtggagccccaaaatagaagcaagatgaatattccattccgcattggcaatgccaaaggagatgatgctttagaaaaaagatttcttgataaagctcttgaactcaatatgttgtccttgaaagggcataggtctgtgggaggcatccgggcctctctgtataatgctgtcacaattgaagacgttcagaagctggccgccttcatgaaaaaatttttggagatgcatcagctatgaacacatcctaaccaggatatactctgttcttgaacaacatacaaagtttaaagtaacttggggatggctacaaaaagttaacacagtatttttctcaaatgaacatgtttattgcagattcttcttttttgaaagaacaacagcaaaacatccacaactctgtaaagctggtgggacctaatgtcaccttaattctgacttgaactggaagcattttaagaaatcttgttgcttttctaacaaattcccgcgtattttgcctttgctgctactttttctagttagatttcaaacttgcctgtggacttaataatgcaagttgcgattaattatttctggagtcatgggaacacacagcacagagggtaggggggccctctaggtgctgaatctacacatctgtggggtctcctgggttcagyggctgttgattcaaggtcaacattgaccattggaggagtggtttaagagtgccaggcgaagggcaaactgtagatcgatctttatgctgttattacaggagaagtgacatactttatatatgtttatattagcaaggtctgtttttaataccatatactttatatttctatacatttatatttctaataatacagttatcactgatatatgtagacacttttagaatttattaaatccttgaccttgtgcattatagcattccattagcaagagttgtaccccctccccagtcttcgccttcctctttttaagctgttttatgaaaaagacctagaagttcttgattcatttttaccattctttccataggtagaagagaaagttgattggttggttgtttttcaattatgccattaaactaaacatttctgttaaattaccctatcctttgttctctactgttttctttgtaatgtatgactacgagagtgatactttgctgaaaagtctttcccctattgtttatctattgtcagtattttatgttgaatatgtaaagaacattaaagtcctaaaacatct

SEQ ID NO: 2436 - DNA, 2074 bp, Homo sapiens
ggccggctgcagactctcaccgcagcggccaggaacgccagccgttcacgcgttcggtcctccttggctgactcaccgccctsgccgccgcaccatggacgcccccaggcaggtggtcaactttgggcctggtcccgccaagctgccgcactcagtgttgttagagatacaaaaggaattattagactacaaaggagttggcattagtgttcttgaaatgagtcacaggtcatcagattttgccaagattattaacaatacagagaatcttgtgcgggaattgctagctgttccagacaactataaggtgatttttctgcaaggaggtgggtgcggccagttcagtgctgtccccttaaacctcattggcttgaaagcaggaaggtgtgckgactatgtggtgacaggagcttggtcagctaaggccgcagaagaagccaagaagtttgggactataaatatcgttcaccctaaacttgggagttatacaaaaattccagatccaagcacctggaacctcaacccagatgcctcctacgtgtattattgcgcaaatgagacggtgcatggtgtggagtttgactttatacccgatgtcaagggagcagtactggtttgtgacatgtcctcaaacttcctgtccaagccagtggatgtttccaagtttggtgtgatttttgctggtgcccagaagaatgttggctctgctggggtcaccgtggtgattgtccgtgatgacctgctggggtttgccctccgagagtgcccctcggtcctggaatacaaggtgcaggctggaaacagctccttgtacaacacgcctccatgtttcagcatctacgtcatgggcttggttctggagtggattaaaaacaatggaggtgccgcggccatggagaagcttagctccatcaaatctcaaacaatttatgagattattgataattctcaaggattctacgtgtctgtgggaggcatccgggcctctctgtataatgctgtcacaattgaagacgttcagaagctggccgccttcatgaaaaaatttttggagatgcatcagctatgaacacatcctaaccaggatatactctgttcttgaacaacatacaaagtttaaagtaacttggggatggctacaaaaagttaacacagtatttttctcaaatgaacatgtttattgcagattcttcttttttgaaagaacaacagcaaaacatccacaactctgtaaagctggtgggacctaatgtcaccttaattctgacttgaactggaagcattttaagaaatcttgttgcttttctaacaaattcccgcgtattttgcctttgctgctactttttctagttagatttcaaacttgcctgtggacttaataatgcaagttgcgattaattatttctggagtcatgggaacacacagcacagagggtaggggggccctctaggtgctgaatctacacatctgtggggtctcctgggttcagyggctgttgattcaaggtcaacattgaccattggaggagtggtttaagagtgccaggcgaagggcaaactgtagatcgatctttatgctgttattacaggagaagtgacatactttatatatgtttatattagcaaggtctgtttttaataccatatactttatatttctatacatttatatttctaataatacagttatcactgatatatgtagacacttttagaatttattaaatccttgaccttgtgcattatagcattccattagcaagagttgtaccccctccccagtcttcgccttcctctttttaagctgttttatgaaaaagacctagaagttcttgattcatttttaccattctttccataggtagaagagaaagttgattggttggttgtttttcaattatgccattaaactaaacatttctgttaaattaccctatcctttgttctctactgttttctttgtaatgtatgactacgagagtgatactttgctgaaaagtctttcccctattgtttatctattgtcagtattttatgttgaatatgtaaagaacattaaagtcctaaaacatct

SEQ ID NO: 2437 - DNA, 2161 bp, Homo sapiens
ggccggctgcagactctcaccgcagcggccaggaacgccagccgttcacgcgttcggtcctccttggctgactcaccgccctsgccgccgcaccatggacgcccccaggcaggtggtcaactttgggcctggtcccgccaagctgccgcactcagtgttgttagagatacaaaaggaattattagactacaaaggagttggcattagtgttcttgaaatgagtcacaggtcatcagattttgccaagattattaacaatacagagaatcttgtgcgggaattgctagctgttccagacaactataaggtgatttttctgcaaggaggtgggtgcggccagttcagtgctgtccccttaaacctcattggcttgaaagcaggaaggtgtgckgactatgtggtgacaggagcttggtcagctaaggccgcagaagaagccaagaagtttgggactataaatatcgttcaccctaaacttgggagttatacaaaaattccagatccaagcacctggaacctcaacccagatgcctcctacgtgtattattgcgcaaatgagacggtgcatggtgtggagtttgactttatacccgatgtcaagggagcagtactggtttgtgacatgtcctcaaacttcctgtccaagccagtggatgtttccaagtttggtgtgatttttgctggtgcccagaagaatgttggctctgctggggtcaccgtggtgattgtccgtgatgacctgctggggtttgccctccgagagtgcccctcggtcctggaatacaaggtgcaggctggaaacagctccttgtacaacacgcctccatgtttcagcatctacgtcatgggcttggttctggagtggattaaaaacaatggaggtgccgcggccatggagaagcttagctccatcaaatctcaaacaatttatgagattattgataattctcaaggattctacgtttgtccagtggagccccaaaatagaagcaagatgaatattccattccgcattggcaatgccaaaggagatgatgctttagaaaaaagatttcttgataaagctcttgaactcaatatgttgtccttgaaagggcataggtctgtgggaggcatccgggcctctctgtataatgctgtcacaattgaagacgttcagaagctggccgccttcatgaaaaaatttttggagatgcatcagctatgaacacatcctaaccaggatatactctgttcttgaacaacatacaaagtttaaagtaacttggggatggctacaaaaagttaacacagtatttttctcaaatgaacatgtttattgcagattcttcttttttgaaagaacaacagcaaaacatccacaactctgtaaagctggtgggacctaatgtcaccttaattctgacttgaactggaagcattttaagaaatcttgttgcttttctaacaaattcccgcgtattttgcctttgctgctactttttctagttagatttcaaacttgcctgtggacttaataatgcaagttgcgattaattatttctggagtcatgggaacacacagcacagagggtaggggggccctctaggtgctgaatctacacatctgtggggtctcctgggttcagyggctgttgattcaaggtcaacattgaccattggaggagtggtttaagagtgccaggcgaagggcaaactgtagatcgatctttatgctgttattacaggagaagtgacatactttatatatacatttatatttctaataatacagttatcactgatatatgtagacacttttagaatttattaaatccttgaccttgtgcattatagcattccattagcaagagttgtaccccctccccagtcttcgccttcctctttttaagctgttttatgaaaaagacctagaagttcttgattcatttttaccattctttccataggtagaagagaaagttgattggttggttgtttttcaattatgccattaaactaaacatttctgttaaattaccctatcctttgttctctactgttttctttgtaatgtatgactacgagagtgatactttgctgaaaagtctttcccctattgtttatctattgtcagtattttatgttgaatatgtaaagaacattaaagtcctaaaacatc

SEQ ID NO: 2438 - DNA, 2212 bp, Homo sapiens
ggccggctgcagactctcaccgcagcggccaggaacgccagccgttcacgcgttcggtcctccttggctgactcaccgccctsgccgccgcaccatggacgcccccaggcaggtggtcaactttgggcctggtcccgccaagctgccgcactcagtgttgttagagatacaaaaggaattattagactacaaaggagttggcattagtgttcttgaaatgagtcacaggtcatcagattttgccaagattattaacaatacagagaatcttgtgcgggaattgctagctgttccagacaactataaggtgatttttctgcaaggaggtgggtgcggccagttcagtgctgtccccttaaacctcattggcttgaaagcaggaaggtgtgckgactatgtggtgacaggagcttggtcagctaaggccgcagaagaagccaagaagtttgggactataaatatcgttcaccctaaacttgggagttatacaaaaattccagatccaagcacctggaacctcaacccagatgcctcctacgtgtattattgcgcaaatgagacggtgcatggtgtggagtttgactttatacccgatgtcaagggagcagtactggtttgtgacatgtcctcaaacttcctgtccaagccagtggatgtttccaagtttggtgtgatttttgctggtgcccagaagaatgttggctctgctggggtcaccgtggtgattgtccgtgatgacctgctggggtttgccctccgagagtgcccctcggtcctggaatacaaggtgcaggctggaaacagctccttgtacaacacgcctccatgtttcagcatctacgtcatgggcttggttctggagtggattaaaaacaatggaggtgccgcggccatggagaagcttagctccatcaaatctcaaacaatttatgagattattgataattctcaaggattctacgtttgtccagtggagccccaaaatagaagcaagatgaatattccattccgcattggcaatgccaaaggagatgatgctttagaaaaaagatttcttgataaagctcttgaactcaatatgttgtccttgaaagggcataggtctgtgggaggcatccgggcctctctgtataatgctgtcacaattgaagacgttcagaagctggccgccttcatgaaaaaatttttggagatgcatcagctatgaacacatcctaaccaggatatactctgttcttgaacaacatacaaagtttaaagtaacttggggatggctacaaaaagttaacacagtatttttctcaaatgaacatgtttattgcagattcttcttttttgaaagaacaacagcaaaacatccacaactctgtaaagctggtgggacctaatgtcaccttaattctgacttgaactggaagcattttaagaaatcttgttgcttttctaacaaattcccgcgtattttgcctttgctgctactttttctagttagatttcaaacttgcctgtggacttaataatgcaagttgcgattaattatttctggagtcatgggaacacacagcacagagggtaggggggccctctaggtgctgaatctacacatctgtggggtctcctgggttcagyggctgttgattcaaggtcaacattgaccattggaggagtggtttaagagtgccaggcgaagggcaaactgtagatcgatctttatgctgttattacaggagaagtgacatactttatatatgtttatattagcaaggtctgtttttaataccatatactttatatttctatacatttatatttctaataatacagttatcactgatatatgtagacacttttagaatttattaaatccttgaccttgtgcattatagcattccattagcaagagttgtaccccctccccagtcttcgccttcctctttttaagctgttttatgaaaaagacctagaagttcttgattcatttttaccattctttccataggtagaagagaaagttgattggttggttgtttttcaattatgccattaaactaaacatttctgttaaattaccctatcctttgttctctactgttttctttgtaatgtatgactacgagagtgatactttgctgaaaagtctttcccctattgtttatctattgtcagtattttatgttgaatatgtaaagaacattaaagtcctaaaacatct

SEQ ID NO: 2439 - DNA, 2083 bp, Homo sapiens
ggccggctgcagactctcaccgcagcggccaggaacgccagccgttcacgcgttcggtcctccttggctgactcaccgccctsgccgccgcaccatggacgcccccaggcaggtggtcaactttgggcctggtcccgccaagctgccgcactcagtgttgttagagatacaaaaggaattattagactacaaaggagttggcattagtgttcttgaaatgagtcacaggtcatcagattttgccaagattattaacaatacagagaatcttgtgcgggaattgctagctgttccagacaactataaggtgatttttctgcaaggaggtgggtgcggccagttcagtgctgtccccttaaacctcattggcttgaaagcaggaaggtgtgckgactatgtggtgacaggagcttggtcagctaaggccgcagaagaagccaagaagtttgggactataaatatcgttcaccctaaacttgggagttatacaaaaattccagatccaagcacctggaacctcaacccagatgcctcctacgtgtattattgcgcaaatgagacggtgcatggtgtggagtttgactttatacccgatgtcaagggagcagtactggtttgtgacatgtcctcaaacttcctgtccaagccagtggatgtttccaaggtagatttggtgtgatttttgctggtgcccagaagaatgttggctctgctggggtcaccgtggtgattgtccgtgatgacctgctggggtttgccctccgagagtgcccctcggtcctggaatacaaggtgcaggctggaaacagctccttgtacaacacgcctccatgtttcagcatctacgtcatgggcttggttctggagtggattaaaaacaatggaggtgccgcggccatggagaagcttagctccatcaaatctcaaacaatttatgagattattgataattctcaaggattctacgtgtaagtctgtgggaggcatccgggcctctctgtataatgctgtcacaattgaagacgttcagaagctggccgccttcatgaaaaaatttttggagatgcatcagctatgaacacatcctaaccaggatatactctgttcttgaacaacatacaaagtttaaagtaacttggggatggctacaaaaagttaacacagtatttttctcaaatgaacatgtttattgcagattcttcttttttgaaagaacaacagcaaaacatccacaactctgtaaagctggtgggacctaatgtcaccttaattctgacttgaactggaagcattttaagaaatcttgttgcttttctaacaaattcccgcgtattttgcctttgctgctactttttctagttagatttcaaacttgcctgtggacttaataatgcaagttgcgattaattatttctggagtcatgggaacacacagcacagagggtaggggggccctctaggtgctgaatctacacatctgtggggtctcctgggttcagyggctgttgattcaaggtcaacattgaccattggaggagtggtttaagagtgccaggcgaagggcaaactgtagatcgatctttatgctgttattacaggagaagtgacatactttatatatgtttatattagcaaggtctgtttttaataccatatactttatatttctatacatttatatttctaataatacagttatcactgatatatgtagacacttttagaatttattaaatccttgaccttgtgcattatagcattccattagcaagagttgtaccccctccccagtcttcgccttcctctttttaagctgttttatgaaaaagacctagaagttcttgattcatttttaccattctttccataggtagaagagaaagttgattggttggttgtttttcaattatgccattaaactaaacatttctgttaaattaccctatcctttgttctctactgttttctttgtaatgtatgactacgagagtgatactttgctgaaaagtctttcccctattgtttatctattgtcagtattttatgttgaatatgtaaagaacattaaagtcctaaaacatct

SEQ ID NO: 2440 - DNA, 2023 bp, Homo sapiens
ggccggctgcagactctcaccgcagcggccaggaacgccagccgttcacgcgttcggtcctccttggctgactcaccgccctsgccgccgcaccatggacgcccccaggcaggtggtcaactttgggcctggtcccgccaagctgccgcactcagtgttgttagagatacaaaaggaattattagactacaaaggagttggcattagtgttcttgaaatgagtcacaggtcatcagattttgccaagattattaacaatacagagaatcttgtgcgggaattgctagctgttccagacaactataaggtgatttttctgcaaggaggtgggtgcggccagttcagtgctgtccccttaaacctcattggcttgaaagcaggaaggtgtgckgactatgtggtgacaggagcttggtcagctaaggccgcagaagaagccaagaagtttgggactataaatatcgttcaccctaaacttgggagttatacaaaaattccagatccaagcacctggaacctcaacccagatgcctcctacgtgtattattgcgcaaatgagacggtgcatggtgtggagtttgactttatacccgatgtcaagggagcagtactggtttgtgacatgtcctcaaacttcctgtccaagccagtggatgtttccaagtttggtgtgatttttgctggtgcccagaagaatgttggctctgctggggtcaccgtggtgattgtccgtgatgacctgctggggtttgccctccgagagtgcccctcggtcctggaatacaaggtgcaggctggaaacagctccttgtacaacacgcctccatgtttcagcatctacgtcatgggcttggttctggagtggattaaaaacaatggaggtgccgcggccatggagaagcttagctccatcaaatctcaaacaatttatgagattattgataattctcaaggattctacgtgtctgtgggaggcatccgggcctctctgtataatgctgtcacaattgaagacgttcagaagctggccgccttcatgaaaaaatttttggagatgcatcagctatgaacacatcctaaccaggatatactctgttcttgaacaacatacaaagtttaaagtaacttggggatggctacaaaaagttaacacagtatttttctcaaatgaacatgtttattgcagattcttcttttttgaaagaacaacagcaaaacatccacaactctgtaaagctggtgggacctaatgtcaccttaattctgacttgaactggaagcattttaagaaatcttgttgcttttctaacaaattcccgcgtattttgcctttgctgctactttttctagttagatttcaaacttgcctgtggacttaataatgcaagttgcgattaattatttctggagtcatgggaacacacagcacagagggtaggggggccctctaggtgctgaatctacacatctgtggggtctcctgggttcagyggctgttgattcaaggtcaacattgaccattggaggagtggtttaagagtgccaggcgaagggcaaactgtagatcgatctttatgctgttattacaggagaagtgacatactttatatatacatttatatttctaataatacagttatcactgatatatgtagacacttttagaatttattaaatccttgaccttgtgcattatagcattccattagcaagagttgtaccccctccccagtcttcgccttcctctttttaagctgttttatgaaaaagacctagaagttcttgattcatttttaccattctttccataggtagaagagaaagttgattggttggttgtttttcaattatgccattaaactaaacatttctgttaaattaccctatcctttgttctctactgttttctttgtaatgtatgactacgagagtgatactttgctgaaaagtctttcccctattgtttatctattgtcagtattttatgttgaatatgtaaagaacattaaagtcctaaaacatc

SEQ ID NO: 2441 - DNA, 534 bp, Homo sapiens
tgagtgggcagagctgacccggtgcgggtgggagtcagggcgcccggaaaacccggctctgggtagcagaccccgcccgggctggctcggcgccgggccttcgggcttccactcagtctttgaccctcggtcctcgctcagcggcccggcaggccgcacaactgtaaccgctgcccyggccgccgcccgctccttctcggkccggcgggcacagagcgcagcgcggcggggccggcggcatggctgtgtcctggaggagctggctcgccaacgaaggggttaaacacctctgcctgttcatctggctctccatgaatgtcctgcttttctggaaaaccttcttgctgtataaccaagggccagagtatcactacctccaccagatgttgggggaactgtcttgaaacctatacatttcagatgggcacccagagagtaagacctcacctcgcccctcaagttgcttacaatataatggaaaaaccaacaaataaataattataattcaataaacaagaaaaggtttcttctaat

SEQ ID NO: 2442 - DNA, 2610 bp, Homo sapiens
acacttcactcaaatggctggctgcagctggtgctagttatggtctgggatctcagatgaggctgctaagcygaatgtgttgttactcctttacatcgtctctccacatggcttgaacttctcacagcatgcctgctggattcgaagagatggcattcaagtgcttaaaaatcaagaagaccctcaccaggtgccagcgtctagacattggattttccagcctccagaacttacttctagtctagttggagaaacaacctagaaaatgcaccaacaaatggggcacaataactactctgagagagagtggcacacagtggacgcaaagaagaggttcctgatgcagctgggaagagtctacatgggcctctagcaggagaagatactggtcttgagtttggagactaagtaagcatctccagtgtcgaataggtacctgggtcaactccacacacttctcactcttcactggacctctggtacaagattgagaggattcctattacttacaaacagactagttcatctggctctccatgaatgtcctgcttttctggaaaaccttcttgctgtataaccaagggccagagtatcactacctccaccagatgttggggctaggattgtgtctaagcagagcctcagcatctgttcttaacctcaactgcagccttatccttttacccatgtgccgaacactcttggcttacctccgaggatcacagaaggttccaagcaggagaaccaggagattgttggataaaagcagaacattccatattacctgtggtgttactatctgtattttctcaggcgtgcatgtggctgcccatctggtgaatgccctcaacttctcagtgaattacagtgaagactttgttgaactgaatgcagcaagataccgagatgaggatcctagaaaacttctcttcacaactgttcctggcctgacaggggtctgcatggtggtggtgctattcctcatgatcacagcctctacatatgcaataagagtttctaactatgatatcttctggtatactcataacctcttctttgtcttctacatgctgctgacgttgcatgtttcaggagggctgctgaagtatcaaactaatttagatacccaccctcccggctgcatcagtcttaaccgaaccagctctcagaatatttccttaccagagtatttctcagaacattttcatgaacctttccctgaaggattttcaaaaccggcagagtttacccagcacaaatttgtgaagatttgtatggaagagcccagattccaagctaattttccacagacttggctttggatttctggacctttgtgcctgtactgtgccgaaagactttacaggtatatccggagcaataagccagtcaccatcatttcggtcatragtcatccctcagatgtcatggaaatccgaatggtcaaagaaaattttaaagcaagacctggtcagtatattactctacattgtcccagtgtatctgcattagaaaatcatccatttaccctcacaatgtgtccaactgaaaccaaagcaacatttggggttcatcttaaaatagtaggagactggacagaacgatttcgagatttactactgcctccatctagtcaagactccgaaattctgcccttcattcaatctagaaattatcccaagctgtatattgatggtccttttggaagtccatttgaggaatcactgaactatgaggtcagcctctgcgtggctggaggcattggagtaactccatttgcatcaatactcaacaccctgttggatgactggaaaccatacaagcttagaagactatactttatttgggtatgcagagatatccagtccttccgttggtttgcagatttactctgtatgttgcataacaagttttggcaagagaacagacctgactatgtcaacatccagctgtacctcagtcaaacagatgggatacagaagataattggagaaaaatatcatgcactgaattcaagactgtttataggacgtcctcggtggaaacttttgtttgatgaaatagcaaaatataacagaggaaaaacagttggtgttttctgttgtggacccaattcactatcyaagactcttcataaactgagtaaccagaacaactcatatgggacaagatttgaatacaataaagagtctttcagctgaaaacttttgccatgaagcaggactctaaagaaggaatgagtgcaatttctaagactttgaaactcagcggaatcaatcagctgtgttatgccaaagaatagtaaggttttcttatttatgattatttaaaatggaaatgtgagaatgtggcaagatgaccgtcacattacatgtttaatctggaaaccaaagagaccctgaagaatatttgatgtgatgattcacttttcagttctcaaattaaaagaaaactgttagatgcacactgttgattttcatggtggattcaagaactccctagtgaggagctgaacttgctcaatctaaggctgattgtcgtgttcctctttaaattgtttttggttgaacaaatgcaagattgaacaaaattaaaaattcattgaagctg

SEQ ID NO: 2443 - DNA, 2385 bp, Homo sapiens
tgagtgggcagagctgacccggtgcgggtgggagtcagggcgcccggaaaacccggctctgggtagcagaccccgcccgggctggctcggcgccgggccttcgggcttccactcagtctttgaccctcggtcctcgctcagcggcccggcaggccgcacaactgtaaccgctgcccyggccgccgcccgctccttctcggkccggcgggcacagagcgcagcgcggcggggccggcggcatggctgtgtcctggaggagctggctcgccaacgaaggggttaaacacctctgcctgttcatctggctctccatgaatgtcctgcttttctggaaaaccttcttgctgtataaccaagggccagagtatcactacctccaccagatgttggggctaggattgtgtctaagcagagcctcagcatctgttcttaacctcaactgcagccttatccttttacccatgtgccgaacactcttggcttacctccgaggatcacagaaggttccaagcaggagaaccaggagattgttggataaaagcagaacattccatattacctgtggtgttactatctgtattttctcaggcgtgcatgtggctgcccatctggtgaatgccctcaacttctcagtgaattacagtgaagactttgttgaactgaatgcagcaagataccgagatgaggatcctagaaaacttctcttcacaactgttcctggcctgacaggggtctgcatggtggtggtgctattcctcatgatcacagcctctacatatgcaataagagtttctaactatgatatcttctggtatactcataacctcttctttgtcttctacatgctgctgacgttgcatgtttcaggagggctgctgaagtatcaaactaatttagatacccaccctcccggctgcatcagtcttaaccgaaccagctctcagaatatttccttaccagagtatttctcagaacattttcatgaacctttccctgaaggattttcaaaaccggcagagtttacccagcacaaatttgtgaagatttgtatggaagagcccagattccaagctaattttccacagacttggctttggatttctggacctttgtgcctgtactgtgccgaaagactttacaggtatatccggagcaataagccagtcaccatcatttcggtcatragtcatccctcagatgtcatggaaatccgaatggtcaaagaaaattttaaagcaagacctggtcagtatattactctacattgtcccagtgtatctgcattagaaaatcatccatttaccctcacaatgtgtccaactgaaaccaaagcaacatttggggttcatcttaaaatagtaggagactggacagaacgatttcgagatttactactgcctccatctagtcaagactccgaaattctgcccttcattcaatctagaaattatcccaagctgtatattgatggtccttttggaagtccatttgaggaatcactgaactatgaggtcagcctctgcgtggctggaggcattggagtaactccatttgcatcaatactcaacaccctgttggatgactggaaaccatacaagcttagaagactatactttatttgggtatgcagagatatccagtccttccgttggtttgcagatttactctgtatgttgcataacaagttttggcaagagaacagacctgactatgtcaacatccagctgtacctcagtcaaacagatgggatacagaagataattggagaaaaatatcatgcactgaattcaagactgtttataggacgtcctcggtggaaacttttgtttgatgaaatagcaaaatataacagaggaaaaacagttggtgttttctgttgtggacccaattcactatcyaagactcttcataaactgagtaaccagaacaactcatatgggacaagatttgaatacaataaagagtctttcagctgaaaacttttgccatgaagcaggactctaaagaaggaatgagtgcaatttctaagactttgaaactcagcggaatcaatcagctgtgttatgccaaagaatagtaaggttttcttatttatgattatttaaaatggaaatgtgagaatgtggcaagatgaccgtcacattacatgtttaatctggaaaccaaagagaccctgaagaatatttgatgtgatgattcacttttcagttctcaaattaaaagaaaactgttagatgcacactgttgattttcatggtggattcaagaactccctagtgaggagctgaacttgctcaatctaaggctgattgtcgtgttcctctttaaattgtttttggttgaacaaatgcaagattgaacaaaattaaaaattcattgaagctg

SEQ ID NO: 2444 - DNA, 1354 bp, Homo sapiens
agtctcgcgcgcgggcggaggtgggccggtgcggcgctgtcacgtaggttcagtgggcggaagaggtggcyccggatgctgcggcgcccgctggccgggctggctgcggccgccctgggccgggccccaccggamggcttgctctgctctttacctggggttgctgtcgaggaccctgtgcaagactcggccggtttttctttytccctgatggacagacccaaacatagccgcgcagcatcgtgaagggctggggccttcactcctctgtggctctggaagagcccgatttcctcaggagtccttaggatggctggaagccagaaggaggagattatgccgccacagcagggagtgcctttccaggaaagcggctgctggggcagcatgggagcccagtccagggagcgttctggcagagaccattccggaacatggatctgcgccggcggctcccaggagaccttccatctcggagctcctgtggagaccacgtgcctggcaggcatgtcgggccccaggcctgtggtgctgagcgggccttcgggagctgggaagagcaccctgctgaagaggctgctccaggagcamagcggcatctttggcttcagcgtgtcccataccacgaggaacccgaggcccggcgaggagaacggcaaagattactactttgtaaccagggaggtgatgcagcgtgacatagcagccggcgacttcatcgagcatgccgagttctcggggaacctgtatggcacgagcaaggtggcrgtgcaggcygtgcaggccatgaaccgcatctgtgtgctggacgtggacctgcagggtgtgcggaacatcaaggccaccgatctgcggcccatctacatctctgtgcagccgccttcactgcacgtgctggagcagcggctgcggcagcgcaacactgaaaccgaggagagcctggtgaagcggctggctgctgcccaggccgacatggagagcagcaaggagcccggcctgtttgatgtggtcatcattaacgacagcctggaccaggcctacgcagagctgaaggaggcgctctctgaggaaatcaagaaagctcaaaggaccggcgcctgaggcttgctgtctgttctcggcaccccgggcccatacaggaccagggcagcagcattgagccacccccttggcaggcratacggcagctctgtgcccttggccagcaygtggagtggaggrgatgctgcccctgtggttggaacatcctggggtgacccccgacccagcctcgctgggctgtcccctgtccctatctctcactctggacccagggctgacatcctaataaaataactgttggattagaaactcc

SEQ ID NO: 2445 - DNA, 1047 bp, Homo sapiens
cttctctgagtgacaagcgggacaagtacgccgtgggcggggccggcgggtcgtgatgttagttcgcgctgtgtggaggcgggccggcgtggcgctgtgacgcagcgggagaagacgggctgggagggcgctgtgctgaacgcccctgcggtcgcgacaggccagcgcaggtggaggcggggctagcgaggcactgaggcatgtcgggccccaggcctgtggtgctgagcgggccttcgggagctgggaagagcaccctgctgaagaggctgctccaggagcamagcggcatctttggcttcagcgtgtcccataccacgaggaacccgaggcccggcgaggagaacggcaaagattactactttgtaaccagggaggtgatgcagcgtgacatagcagccggcgacttcatcgagcatgccgagttctcggggaacctgtatggcacgagcaaggtggcrgtgcaggcygtgcaggccatgaaccgcatctgtgtgctggacgtggacctgcagggtgtgcggaacatcaaggccaccgatctgcggcccatctacatctctgtgcagccgccttcactgcacgtgctggagcagcggctgcggcagcgcaacactgaaaccgaggagagcctggtgaagcggctggctgctgcccaggccgacatggagagcagcaaggagcccggcctgtttgatgtggtcatcattaacgacagcctggaccaggcctacgcagagctgaaggaggcgctctctgaggaaatcaagaaagctcaaaggaccggcgcctgaggcttgctgtctgttctcggcaccccgggcccatacaggaccagggcagcagcattgagccacccccttggcaggcratacggcagctctgtgcccttggccagcaygtggagtggaggrgatgctgcccctgtggttggaacatcctggggtgacccccgacccagcctcgctgggctgtcccctgtccctatctctcactctggacccagggctgacatcctaataaaataactgttggattagaaactcc

SEQ ID NO: 2446 - DNA, 1177 bp, Homo sapiens
ctcccacgtctgtggcccacagtggctcttttcatgaggctgctgggcccggtcctgccaccgtgcattgtcctggcagggtgaagggtgcacaggacacctcatgctcactacaggcaccttggggagtgggtggcctctgttccctgtaggcggggcagggcgtgggggtagcaggtttgagatgctgtcgggtgctgggtccaggccaggcctaggctcagctgtgggaggagaacgctgggcccgggagggcctgggtgtccctgaagctcctgtaggcctcagagagccctggcacccctgctgacctggcacctctccccagcaaggtggcrgtgcaggcygtgcaggccatgaaccgcatctgtgtgctggacgtggacctgcagggtgtgcggaacatcaaggccaccgatctgcggcccatctacatctctgtgcagccgccttcactgcacgtgctggagcagcggctgcggcagcgcaacactgaaaccgaggagagcctggtgaagcggctggctgctgcccaggccgacatggagagcagtgagtgtgccgtgggatcaccagggaatgccaggaggggagtcagggttctgaggtctgtggcaccaggkaccctgtgggtccccagacctcctgacacctggagtccctgtgagggtcctcagacctctcaactacctcccaacacctagagtccccgtgagggtccccagaacccacccccagtcaccaagggtctcattgagggtcctcagatttccctctgttacccagagtctccgtgagggcccccagaccccccatcgcccagggtcccatgagatgtccccaaccttctagccccgggggtgtcatgtgcatcctcttacagctgttgcctcttctctgggtctgactgcagcccacaagaagagggcatttaatgttctgctgtgtgtgtagaggatagtgtagcccctaaccagagtcctgatgggtgctggtgtccagacccaagttctggggctccagagagagcaggagtggtgcctgaggactgaggcccagggggcggcccttccctaccctgcacaggcccggctgggctggaaagctgtcycacagccgcagtgaggacagccgcaggccagtgggctgctctgggggtcgtgtgggacctggggtg

SEQ ID NO: 2447 - DNA, 1150 bp, Homo sapiens
agtctcgcgcgcgggcggaggtgggccggtgcggcgctgtcacgtaggttcagtgggcggaagaggtggcyccggatgctgcggcgcccgctggccgggctggctgcggccgccctgggccgggccccaccggamggcttgctctgctctttacctggggttgctgtcgaggaccctgtgcaagactcggccggtttttctttytccctgatggacagacccaaacatagccgcgcagcatcgtgaagggctggggccttcactcctctgtggctctggaagagcccgatttcctcaggaggcatgtcgggccccaggcctgtggtgctgagcgggccttcgggagctgggaagagcaccctgctgaagaggctgctccaggagcamagcggcatctttggcttcagcgtgtcccataccacgaggaacccgaggcccggcgaggagaacggcaaagattactactttgtaaccagggaggtgatgcagcgtgacatagcagccggcgacttcatcgagcatgccgagttctcggggaacctgtatggcacgagcaaggtggcrgtgcaggcygtgcaggccatgaaccgcatctgtgtgctggacgtggacctgcagggtgtgcggaacatcaaggccaccgatctgcggcccatctacatctctgtgcagccgccttcactgcacgtgctggagcagcggctgcggcagcgcaacactgaaaccgaggagagcctggtgaagcggctggctgctgcccaggccgacatggagagcagcaaggagcccggcctgtttgatgtggtcatcattaacgacagcctggaccaggcctacgcagagctgaaggaggcgctctctgaggaaatcaagaaagctcaaaggaccggcgcctgaggcttgctgtctgttctcggcaccccgggcccatacaggaccagggcagcagcattgagccacccccttggcaggcratacggcagctctgtgcccttggccagcaygtggagtggaggrgatgctgcccctgtggttggaacatcctggggtgacccccgacccagcctcgctgggctgtcccctgtccctatctctcactctggacccagggctgacatcctaataaaataactgttggattagaaactcc

SEQ ID NO: 2448 - DNA, 1364 bp, Homo sapiens
gggaaagaaagtgaaaatgaaagcgccctggctgctcctggtgtggtcccatttaaaacgaggttgctgaaggccaggatgcgtgctacccggatgtgtgcccagaaaccctgcagccaagagcagccgcctggaccaccagcctccccttcatccacctggcccagcccagagcccaggcccacgtctggtggtttgtgtcttacgagaggccaggcgggggctgaattctctcggttctcagaaggtcaagccctctgttagcatctcctcgaacagtgggccgggggcaaggtggtgactctgttcagtccttaggatggctggaagccagaaggaggagattatgccgccacagcagggagtgcctttccaggaaagcggctgctggggcagcatgggagcccagtccagggagcgttctggcagagaccattccggaacatggatctgcgccggcggctcccaggagaccttccatctcggagctcctgtggagaccacgtgcctggcaggcatgtcgggccccaggcctgtggtgctgagcgggccttcgggagctgggaagagcaccctgctgaagaggctgctccaggagcamagcggcatctttggcttcagcgtgtcccataccacgaggaacccgaggcccggcgaggagaacggcaaagattactactttgtaaccagggaggtgatgcagcgtgacatagcagccggcgacttcatcgagcatgccgagttctcggggaacctgtatggcacgagcaaggtggcrgtgcaggcygtgcaggccatgaaccgcatctgtgtgctggacgtggacctgcagggtgtgcggaacatcaaggccaccgatctgcggcccatctacatctctgtgcagccgccttcactgcacgtgctggagcagcggctgcggcagcgcaacactgaaaccgaggagagcctggtgaagcggctggctgctgcccaggccgacatggagagcagcaaggagcccggcctgtttgatgtggtcatcattaacgacagcctggaccaggcctacgcagagctgaaggaggcgctctctgaggaaatcaagaaagctcaaaggaccggcgcctgaggcttgctgtctgttctcggcaccccgggcccatacaggaccagggcagcagcattgagccacccccttggcaggcratacggcagctctgtgcccttggccagcaygtggagtggaggrgatgctgcccctgtggttggaacatcctggggtgacccccgacccagcctcgctgggctgtcccctgtccctatctctcactctggacccagggctgacatcctaataaaataactgttggattagaaactcc

SEQ ID NO: 2449 - DNA, 985 bp, Homo sapiens
agtctcgcgcgcgggcggaggtgggccggtgcggcgctgtcacgtaggttcagtgggcggaagaggtggcyccggatgctgcggcgcccgctggccgggctggctgcggccgccctgggccgggccccaccggamggcatgtcgggccccaggcctgtggtgctgagcgggccttcgggagctgggaagagcaccctgctgaagaggctgctccaggagcamagcggcatctttggcttcagcgtgtcccataccacgaggaacccgaggcccggcgaggagaacggcaaagattactactttgtaaccagggaggtgatgcagcgtgacatagcagccggcgacttcatcgagcatgccgagttctcggggaacctgtatggcacgagcaaggtggcrgtgcaggcygtgcaggccatgaaccgcatctgtgtgctggacgtggacctgcagggtgtgcggaacatcaaggccaccgatctgcggcccatctacatctctgtgcagccgccttcactgcacgtgctggagcagcggctgcggcagcgcaacactgaaaccgaggagagcctggtgaagcggctggctgctgcccaggccgacatggagagcagcaaggagcccggcctgtttgatgtggtcatcattaacgacagcctggaccaggcctacgcagagctgaaggaggcgctctctgaggaaatcaagaaagctcaaaggaccggcgcctgaggcttgctgtctgttctcggcaccccgggcccatacaggaccagggcagcagcattgagccacccccttggcaggcratacggcagctctgtgcccttggccagcaygtggagtggaggrgatgctgcccctgtggttggaacatcctggggtgacccccgacccagcctcgctgggctgtcccctgtccctatctctcactctggacccagggctgacatcctaataaaataactgttggattagaaactcc

SEQ ID NO: 2450 - DNA, 2552 bp, Homo sapiens
atcacagataggagtcccaagtcctatgagaagttcctggaataggtgtagattcagtagatctttacaagaccatatctgcagggcaaggtaccagaggacagaggcggggacagggacacttccattccagacctagcagcccagcactcagcaccatgcatgggagcaaatggctggactcctgggtggggtgggggtctcagagcaggctcccagagggcttggaggtgactccaccaggtggggacggcagctcccaggtagggtgtcatcagagtagacagcattgcttgctagggacccctggggaggctgacagggtcagtgggtttcagttggggggctcccctgctgagaacccagtaaagccggccttccattcgtctcccgtgtgcccagagcctggtctgagggccgccctgtgcatgccggcccttccaacgtggcagagctcagggggaagaacacccaggctctcaggagactctcaggccaatgtctccatccctgggtcagccctttcctgccatgaattcaggaaggcagaggcagctcagcagatggggactagaggccgcactgctatccacagcctctcttctcacccccaggcatgtcgggccccaggcctgtggtgctgagcgggccttcgggagctgggaagagcaccctgctgaagaggctgctccaggagcamagcggcatctttggcttcagcgtgtcccgtgagtccagggctctcgtggaggggtgcgtagacctcaaggctgctgagtagtcctagcaccgtgagcaggccaggagcccaaacccaacaggcacacccaccctgcagactgtccgaactcttgcacactcccccccacacagaacctgaggttatcacactcctgctgtcctgcgtgcctgtgtctcccttccctgggtctgttgagtactgataactgggccacagtgtttctttctgggagaaccctcgccttgtaggctcctgcgccttcccagtggtgtgcttcactggctgcctgcatcctggggctcaagtgctgtcgggactgcaagggaaacgctgggtggggcattgggctccgagcagcccccgatgggtgacaggtctctctgctagataccacgaggaacccgaggcccggcgaggagaacggcaaaggtgagtggggtggggccctatggctggagcacccccagtgtgggcagggctgctgggccctgcagctgtgttggctgtgctgccygtctcctgcccccatcaatccctaatctgtgagatgggtccttgcctccaagggccggtgaactcaatcagggtgtcagcgccacagcgtggtgtcgccttccttgggtacagtgtgagaggccggccaaggcctggggctgtcttcctcccaccttggaggcggccacagtgctgctgtccccagccctgtcctggactcggcacttatcagcacttttgagctgtcttctggrgtcctggtaaaaagggctactctgcctgcctgattcaagacaagggacccccttcccaacagcacccccgccccttgccgtgcaacccagtggtctccagtcaccccaccacatcgtcccctctgtaacctgacggtctccagttcccccaccaccttcccccagaacctgttggtctccagtccccatcccatcaccaccaactcccaactccccactggaacccagcagtctcgtatctccatcagtgaggacagtgtgagaaatggtgtctggctcaggcacttggcagcacttgaggggtcctcagatgtctcctgcccagcaaggatctgactaaagcagtcgtgggtgtgggaggggcctgcaggcatgcctgggttgggggcagctggccctgggcaccctggtgcaggtccagtctgccctctggatggcccctcctcttccccagattactactttgtaaccagggaggtgatgcagcgtgacatagcagccggcgacttcatcgagcatgccgagttctcggggaacctgtatggcacgagcaaggtggcrgtgcaggcygtgcaggccatgaaccgcatctgtgtgctggacgtggacctgcagggtgtgcggaacatcaaggccaccgatctgcggcccatctacatctctgtgcagccgccttcactgcacgtgctggagcagcggctgcggcagcgcaacactgaaaccgaggagagcctggtgaagcggctggctgctgcccaggccgacatggagagcagaaatcaagaaagctcaaaggaccggcgcctgaggcttgctgtctgttctcggcaccccgggcccatacaggaccagggcagcagcattgagccacccccttggcaggcratacggcagctctgtgcccttggccagcaygtggagtggaggrgatgctgcccctgtggttggaacatcctggggtgacccccgacccagcctcgctgggctgtcccctgtccctatctctcactctggacccagggctgacatcctaataaaataactgttggattagaaactcc

SEQ ID NO: 2451 - DNA, 3439 bp, Homo sapiens
atttctttaaagmctcgtgcagcacatcattatcgctggatgcccggacatgtaatacacctgacagcatgtgaagtgctcagaatggggcaggatgtcacctggaatcagcactaagtgattcagactttccttacttttaaatgtgctgctcttcatttcaagatgccgttgcagctctgataaatgcaaactgacaaccttcaaggccacgacggagggaaaatcattggtgcttggagcatagaagactgcccttcacaaaggaaatccctgattattgtttgaaatgctgaggacgttgctgcgaaggagacttttttcttatcccaccaaatactactttatggttcttgttttatccctaatcaccttctccgttttaaggattcatcaaaagcctgaatttgtaagtgtcagacacttggagcttgctggggagaatcctagtagtgatattaattgcaccaaagttttacagggtgatgtaaatgaaatccaaaaggtaaagcttgagatcctaacagtgaaatttaaaaagcgccctcggtggacacctgacgactatataaacatgaccagtgactgttcttctttcatcaagagacgcaaatatattgtagaaccccttagtaaagaagaggcggagtttccaatagcatattctatagtggttcatcacaagattgaaatgcttgacaggctgctgagggccatctatatgcctcagaatttctattgcrttcatgtggacacaaaatccgaggattcctatttagctgcagtgatgggcatcgcttcctgttttagtaatgtctttgtggccagccgattggagagtgtggtttatgcatcgtggagccgggttcaggctgacctcaactgcatgaaggatctctatgcaatgagtgcaaactggaagtacttgataaatctttgtggtatggattttcccattaaaaccaacctagaaattgtcaggaagctcaagttgttaatgggagaaaacaacctggaaacggagaggatgccatcccataaagaagaaaggtggaagaagcggtatgaggtcgttaatggaaagctgacaaacacagggactgtcaaaatgcttcctccactcgaaacacctctcttttctggcagtgcctacttcgtggtcagtagggagtatgtggggtatgtactacagaatgaaaaaatccaaaagttgatggagtgggcacaagacacatacagccctgatgagtatctctgggccaccatccaaaggattcctgaagtcccgggctcactccctgccagccataagtatgatctrtctgacatgcaagcagttgccaggtttgtcaagtggcagtactttgagggtgatgtttccaagggtgctccctacccgccctgcgatggagtccatgtgcgctcagtgtgcattttcggagctggtgacttgaactggatgctgcgcaaacaccacttgtttgccaataagtttgacgtggatgttgacctctttgccatccagtgtttggatgagcatttgagacacaaagctttggagacattaaaacactgaccattacgggcaattttatgaacaagaagaaggatacacaaaacgtacccttatctgtttccccttccttgtcagcrtcgggaagatggtatgaagtcctctttggggcagggactctagtagatcttcttgtcagagaagctgcatggtttctgcagagcacagttagctagaaaggtgatagcattaaatgttcatctagagttaatagtgggaggagtaaaggtagccttgaggccagagcaggtagcaaggcattgtggaaagaggggaccagggtggctggggaagaggccgatgcataaagtcagcctgttcmaagtgctcagggacttagcaaaatgagaagatgtgacctgtgccaaaactattttgagaattttaaatgtgaccatttttctggtatgaataaacttacagcaacaaataatcaaagatacaattaatctgatattatatttgttgaaatagaaatttgattgtactataaatgatttttgtaaataatttatattctgctctaatactgtactgtgtagtgtgtctccgtatgtcatctcagggagcttaaaatgggcttgatttaacattgtttttgtgttatttttgcttgaaacaacgcacacattttcaacaaccaaaaaatgacaatttctagtttagttaatttctacaaatcatcttatgttattagcaaggttaagacatcttttttaaaaaaattatagcttctaccaagagaaacactcaatttttctagagatttgcctctatcttcctttcctcagtcttcccagactgctatcaagctgtgtaaaaatttactttcactggaccctaaattattgtctctgctatctgactgccagtaattagtgcagaaaactaagacaggatgatacaggtttgaggggctggggagtgggaggggggagaaaaggaatgtatttaaacaatttccgatgcccatgatgagtttaaaaaccagcattgacaccatccccaaaattaaggctgtcgcttattgaatccacttgtgtccaacctcccaggattgttttatcctaatgtcacctgtatattcatttgaaaggacttggccctgttcttgggtcttcccgttacctgccccctgggtggtaagtttcctcctttctcaaccttccaygaggaggaaagaagtgtgcagtcattccacatggcctgttggaaggcctggggagggaactttgggtttgggacagatttttttttttgtttttggtatcattcacagcatacgatttttactctctccatcttcaccataagacagataatttggggttgctataatgctgtcacacatctcaaagtacattcaaatcttaaaaagaaattctcgtacttttgccatgttgatactgttcagcaaacaagctaccaggaactgtgaggctttgtcatttagcattagactttaaacaagaattaaaatcatgtgctgtatttttaaaatctagccaaattaaatagtacatgagaaattcagagtattagacagttttaaggcattcaactgagaaaactttatttgtcaaagtcagaaaacattttcatcttattgagagatatgtttttaaacttttatcatcatttgtaaatgtggaagttggtggattgctgtgtttttgcatgattagcatgggagtctgttggagcaagaggaacatgcttgttttgaaaactcgagatgatgagggtggtacatgcagtgtgttctctctttattggcttctaaaccagttttgtcctttaatgcatgtcaaatatttctcccatgcttctcttagcagaaaagtttttacctataagacagggcac

SEQ ID NO: 2452 - DNA, 3616 bp, Homo sapiens
ggtggagcaggagcggctgggcatcctcctgagactccggggtcagacgcccactccagcgctttctgcgcagcacaggcaccctcgcctgtcacgcctccctctcctcttcccgtctcccagcgtggatgagggcgcctgcagatcccggctagggcacggaccgcctaggccgagatttctttaaagmctcgtgcagcacatcattatcgctggatgcccggacatgtaatacacctgacagcatgtgaagtgctcagaatggggcaggatgtcacctggaatcagcactaagtgattcagactttccttacttttaaatgtgctgctcttcatttcaagatgccgttgcagctctgataaatgcaaactgacaaccttcaaggccacgacggagggaaaatcattggtgcttggagcatagaagactgcccttcacaaaggaaatccctgattattgtttgaaatgctgaggacgttgctgcgaaggagacttttttcttatcccaccaaatactactttatggttcttgttttatccctaatcaccttctccgttttaaggattcatcaaaagcctgaatttgtaagtgtcagacacttggagcttgctggggagaatcctagtagtgatattaattgcaccaaagttttacagggtgatgtaaatgaaatccaaaaggtaaagcttgagatcctaacagtgaaatttaaaaagcgccctcggtggacacctgacgactatataaacatgaccagtgactgttcttctttcatcaagagacgcaaatatattgtagaaccccttagtaaagaagaggcggagtttccaatagcatattctatagtggttcatcacaagattgaaatgcttgacaggctgctgagggccatctatatgcctcagaatttctattgcrttcatgtggacacaaaatccgaggattcctatttagctgcagtgatgggcatcgcttcctgttttagtaatgtctttgtggccagccgattggagagtgtggtttatgcatcgtggagccgggttcaggctgacctcaactgcatgaaggatctctatgcaatgagtgcaaactggaagtacttgataaatctttgtggtatggattttcccattaaaaccaacctagaaattgtcaggaagctcaagttgttaatgggagaaaacaacctggaaacggagaggatgccatcccataaagaagaaaggtggaagaagcggtatgaggtcgttaatggaaagctgacaaacacagggactgtcaaaatgcttcctccactcgaaacacctctcttttctggcagtgcctacttcgtggtcagtagggagtatgtggggtatgtactacagaatgaaaaaatccaaaagttgatggagtgggcacaagacacatacagccctgatgagtatctctgggccaccatccaaaggattcctgaagtcccgggctcactccctgccagccataagtatgatctrtctgacatgcaagcagttgccaggtttgtcaagtggcagtactttgagggtgatgtttccaagggtgctccctacccgccctgcgatggagtccatgtgcgctcagtgtgcattttcggagctggtgacttgaactggatgctgcgcaaacaccacttgtttgccaataagtttgacgtggatgttgacctctttgccatccagtgtttggatgagcatttgagacacaaagctttggagacattaaaacactgaccattacgggcaattttatgaacaagaagaaggatacacaaaacgtacccttatctgtttccccttccttgtcagcrtcgggaagatggtatgaagtcctctttggggcagggactctagtagatcttcttgtcagagaagctgcatggtttctgcagagcacagttagctagaaaggtgatagcattaaatgttcatctagagttaatagtgggaggagtaaaggtagccttgaggccagagcaggtagcaaggcattgtggaaagaggggaccagggtggctggggaagaggccgatgcataaagtcagcctgttcmaagtgctcagggacttagcaaaatgagaagatgtgacctgtgccaaaactattttgagaattttaaatgtgaccatttttctggtatgaataaacttacagcaacaaataatcaaagatacaattaatctgatattatatttgttgaaatagaaatttgattgtactataaatgatttttgtaaataatttatattctgctctaatactgtactgtgtagtgtgtctccgtatgtcatctcagggagcttaaaatgggcttgatttaacattgtttttgtgttatttttgcttgaaacaacgcacacattttcaacaaccaaaaaatgacaatttctagtttagttaatttctacaaatcatcttatgttattagcaaggttaagacatcttttttaaaaaaattatagcttctaccaagagaaacactcaatttttctagagatttgcctctatcttcctttcctcagtcttcccagactgctatcaagctgtgtaaaaatttactttcactggaccctaaattattgtctctgctatctgactgccagtaattagtgcagaaaactaagacaggatgatacaggtttgaggggctggggagtgggaggggggagaaaaggaatgtatttaaacaatttccgatgcccatgatgagtttaaaaaccagcattgacaccatccccaaaattaaggctgtcgcttattgaatccacttgtgtccaacctcccaggattgttttatcctaatgtcacctgtatattcatttgaaaggacttggccctgttcttgggtcttcccgttacctgccccctgggtggtaagtttcctcctttctcaaccttccaygaggaggaaagaagtgtgcagtcattccacatggcctgttggaaggcctggggagggaactttgggtttgggacagatttttttttttgtttttggtatcattcacagcatacgatttttactctctccatcttcaccataagacagataatttggggttgctataatgctgtcacacatctcaaagtacattcaaatcttaaaaagaaattctcgtacttttgccatgttgatactgttcagcaaacaagctaccaggaactgtgaggctttgtcatttagcattagactttaaacaagaattaaaatcatgtgctgtatttttaaaatctagccaaattaaatagtacatgagaaattcagagtattagacagttttaaggcattcaactgagaaaactttatttgtcaaagtcagaaaacattttcatcttattgagagatatgtttttaaacttttatcatcatttgtaaatgtggaagttggtggattgctgtgtttttgcatgattagcatgggagtctgttggagcaagaggaacatgcttgttttgaaaactcgagatgatgagggtggtacatgcagtgtgttctctctttattggcttctaaaccagttttgtcctttaatgcatgtcaaatatttctcccatgcttctcttagcagaaaagtttttacctataagacagggcac

SEQ ID NO: 2453 - DNA, 977 bp, Homo sapiens
tgtctgtcacctacctgtgctacagcctcctgggcggctcgggctccctgcaattccctctggcgctgcaggagtcgccgggcgccgccgccgagcccccgccgagcccgccgccaccctctctgctgcctacccccgtgcgcctcggcgccccctcgcagccgcccgcgccgccgccgctggacaacgcgagccacggggagccgcccgagcccccagagcagccagccgcccccgggaccgacggctgggggctgccgagcggcggcggaggcgcccrggacgcctggctccggaccccgctggcccccagcgagatgatcacggctcagagcgcgctgccggagagggaagcgcaggagtccagcaccaccgacgaggatctcgcaggccggagagcggccaacgggagcagcgagaggggcggcgccgtcagcacccccgactatggggagaagaagctgccacaggcgctcatcatcggggtcaagaaaggagggacccgcgcgctgctggaggcgatccgcgtgcacccggacgtgcgggcggaactacgaaaaggggttggagtggtacaggtaggaccctgggctccgcgggctggtggagacgcgtgggggagacgcggaggggaagccgcggctttccacgcccttcgagcatccaggcaccgtcccgagaggcccaagcccccgcgagggctctgcaaaccctggcggcgttgctcagggggatcggctgagagggctggactccagcgaaaggaaaatggtcagtgctcagcagcatattttgcatgtggcaactggggagagaatggagaaggatggaatttcattggtgtttaccgaatgcctgccattgtggcaattggtgctacctacaattatagacctgttatttcatttgagcattttgatgatatgctgagatatgtagcagcatttccactttacacgtggctccgagagggtaaa

SEQ ID NO: 2454 - DNA, 613 bp, Homo sapiens
tgtctgtcacctacctgtgctacagcctcctgggcggctcgggctccctgcaattccctctggcgctgcaggagtcgccgggcgccgccgccgagcccccgccgagcccgccgccaccctctctgctgcctacccccgtgcgcctcggcgccccctcgcagccgcccgcgccgccgccgctggacaacgcgagccacggggagccgcccgagcccccagagcagccagccgcccccgggaccgacggctgggggctgccgagcggcggcggaggcgcccrggacgcctggctccggaccccgctggcccccagcgagatgatcacggctcagagcgcgctgccggagagggaagcgcaggagtccagcaccaccgacgaggatctcgcaggccggagagcggccaacgggagcagcgagaggggcggcgccgtcagcacccccgactatggggagaagaagctgccacaggcgctcatcatcggggtcaagaaaggagggacccgcgcgctgctggaggcgatccgcgtgcacccggacgtgcgggcggtgggcgtagagccgcacttcttcgacaggaactacgaaaaggggttggagtggtacaggtagga

SEQ ID NO: 2455 - DNA, 3357 bp, Homo sapiens
ctcagacctgtcagcccgccacactccagccagtcccttccgatcacctccagacaccacgctctcctttcggagcccgcccgccggaagtgacgrcccggaactactcccacaggggggcggggaaggaagatggcggcgyccagcgtcccgtgaggagagaggacacagggatcccggggagcggccccagactcgtaaattatggccgcatctccgcacactctctcctcacgyctcctgacaggttgcgtaggaggctctgtctggtatcttgaaagaagaaytatacaggactcccctcacaagttcttacatcttctcaggaatgtcaataagcagtggattacatttcagcactttagcttcctcaaacgcatgtatgtcwcacagctgaacagaagccacaaccagcaagtaagacccaagccagaaccagtagcatctcctttccttgaaaaaacatcttcaggtcaagccaaagcagaaatatrtgagatgagacctctctcaccgcccagcctatctttgtccagaaagccaaatgaaaaggaattgatagaactagagccagactcagtaattgaagactcaatagatgtagggaaagagacaaaagaggaaaagcggtggaaagagatgaagctgcaagtgtatgatttgccaggaattttggctcractatccaaaatcaaactcacagctctrgttgtaagtaccactgcagctggatttgcattggctccgggcccttttgactggccctgtttcctgcttacttctgttgggacaggccttgcatcctgtgctgccaactccatcaatcagttttttgaggtgccatttgactcaaacatgaataggacaaagaacagaccgctggttcgtggacagatcagcccrttgctagctgtgtcctttgccacttgttgtgctgttccdggagttgccattctgaccttgggggtgaatccacwcacaggagccctggggctcttcaacattttcctgtatacctgctgctacacaccactgaaaaggatcagcattgccaacacatgggtcggagctgtggttggggccatcccgcctgtcatgggctggacagcggccacgggcagcctcgatgctggcgcatttctcctgggaggaatcctctactcctggcagtttcctcatttcaacgccctgagctggggcctccgtgaagactactcccgggrcggctactgcatgatgtcrgtcacccacccgggcctgtgccggcgcgtggcgctgcgccactgcctggccctgctcgtgctgtccgcagcagcccctgtgctggacatcaccacatggaccttccccatcatggcccttcccatcaatgcgtacatctccyacctcggcttccgcttctacgtggacgcagaccgcaggagctcgcggagactgttcttctgcagcctgtggcacctgccgctgctgctgctgctcatgctcacctgcaagcggccgagcggaggcggggacgcagggccccctcccagctgagagcactgggacgcccaccgcccctttccctccgctgccaggcgagcatgttgtggtaattctggaacacaagaagagaaattgctgggtttagaacaagattataaacgaattcggtgctcagtgatcacttgacagttttttttttttttaaatattacccaaaatgctccccaaataagaaatgcatcagctcagtcagtgaatacaaaaaaggaattatttttccctttgagggtctttatacatctctcctccaaccccaccctctattctgtttcttcctcctcacatggrggtacacatacacagcttcctcttytggttccatccttaccaccacaccacacgcacactccacatgcccagcagagtggcacttggtggccagaaagtgtgagcctcatgatctgctgtctgtagttctgtgagctcaggtccctcaaaggcctcggagcacccccttcctggtgactgagccagggcctgcatttttggttttccccaccccacacattctcaaccatagtccttctaacaataccaatagctaggacccggctgctgtgcactgggactggggattccacatgtttgccttgggagtctcaagctggactgccagcccctgtcctcccttcacccmcattgcgtatgagcatttcagaactccaaggagtcacaggcatctttatagttcacgttaacatatagacactgttggaagcagttccttctaaaagggtagccctggacytaataccagccggatacctctggcccccaccccattactgtacctctggagtcactactgtgggtcgccactcctctgctacacagcacggctttttcaaggctgtattgagaagggaagttaggaagaagggtgtgctgggctaaccagcccacagagctcacattcctgtcccttgggtgaaaaatacatgtccatcctgatatctcctgaattmagaaattagcctccacatgtgcaatggctttaagagccagaagcagggttctgggaattttgcaagttatcctgtggccaggtgtggtctcggttaccaaayayggttacctgcagctttttagtcctttgtgctcccacgggtctgcagagtcccatctgcccaaaggtcttgaagcttgacaggatgttttcattactcagtctcycagggcactgctggtccgtagggattcattggtcggggtgggagagttaaacaacatttaaacagagttctctcaaaaatgtctaaagggattgtaggtagataacatccaatcactgtttgcacttatctgaaatcttccctcttggctgcccccaggtatttactgtggagaacattgcataggaatgtctggaaaaagcytctacaacttgttacagccttcacatttgtacaattcattgattctcttttccttccacaataaaatggtatacaagaacaggagtgtgtgtgacgtcattggaagtaatcatcctgtgctgagttcgcacagttcttggtagaaccgacacttgatcacgccttcaagagctggcagagggtgcgtgggaggttggttttgtttcgtaaattgacaaattgtagttgtgtatatttatgaggtaataaagtgatgttatgatttatgaagacaattgaaataatgaaatcaagctgatgaatgtattcattacctcagatacttatttttgtgataagaacatttttaatgtactcagtaattttgaaattagaatacattatttcctgyattcacacagtgtgtgatgtacgtcaaagggaggagacrtactcr

SEQ ID NO: 2456 - DNA, 1645 bp, Homo sapiens
ctcagacctgtcagcccgccacactccagccagtcccttccgatcacctccagacaccacgctctcctttcggagcccgcccgccggaagtgacgrcccggaactactcccacaggggggcggggaaggaagatggcggcgyccagcgtcccgtgaggagagaggacacagggatcccggggagcggccccagactcgtaaattatggccgcatctccgcacactctctcctcacgyctcctgacaggttgcgtaggaggctctgtctggtatcttgaaagaagaaytatacaggactcccctcacaagttcttacatcttctcaggaatgtcaataagcagtggattacatttcagcactttagcttcctcaaacgcatgtatgtcwcacagctgaacagaagccacaaccagcaagtaagacccaagccagaaccagtagcatctcctttccttgaaaaaacatcttcaggtcaagccaaagcagaaatatrtgagatgagacctctctcaccgcccagcctatctttgtccagaaagccaaatgaaaaggaattgatagaactagagccagactcagtaattgaagactcaatagatgtagggaaagagacaaaagaggaaaagcggtggaaagagatgaagctgcaagtgtatgatttgccaggaattttggctcractatccaaaatcaaactcacagctctrgttgtaagtaccactgcagctggatttgcattggctccgggcccttttgactggccctgtttcctgcttacttctgttgggacaggccttgcatcctgtgctgccaactccatcaatcagttttttgaggtgccatttgactcaaacatgaataggacaaagaacagaccgctggttcgtggacagatcagcccrttgctagctgtgtcctttgccacttgttgtgctgttccdggagttgccattctgaccttgggggtgaatccacwcacaggagccctggggctcttcaacattttcctgtatacctgctgctacacaccactgaaaaggatcagcattgccaacacatgggtcggagctgtggttggggccatcccgcctgtcatgggctggacagcggccacgggcagcctcgatgctggcgcatttctcctgggaggaatcctctactcctggcagtttcctcatttcaacgccctgagctggggcctccgtgaagactactcccgggrcggctactgcatgatgtcrgtcacccacccgggcctgtgccggcgcgtggcgctgcgccactgcctggccctgctcgtgctgtccgcagcagcccctgtgctggacatcaccacatggaccttccccatcatggcccttcccatcaatgcgtacatctccyacctcggcttccgcttctacgtggacgcagaccgcaggagctcgcggagactgttcttctgcagcctgtggcacctgccgctgctgctgctgctcatgctcacctgcaagcggccgagcggaggcggggacgcagggccccctcccagctgagagcactgggacgcccttgctgggtttagaacaagattataaacgaattcggtgctcagtgatcacttgacagttttttttttttttaaatattacccaaaatgctccc

SEQ ID NO: 2457 - DNA, 318 bp, Homo sapiens
atgctgagactcatttcaaggaagccaccgtggtccggggttggtagtcatacagcaaggcaggaatggatggaggagatagcctgctgcaaaaccctatcatcagacaccaccgttggggagggagccgcagcacaggccccagggggctctyctatgacacctctgaatgcaagctcagatgcccaggtcgcccagcccgtaggctttcacggacttcacgctatcattggatcaacatttctcactatctgccttctccgccaattaaaattccactttacatccagccaccactttggctttgaagctgccgtc

SEQ ID NO: 2458 - DNA, 1185 bp, Homo sapiens
ccygaaagtactcgaagaagtccggggccacctccaggtcatcctccaccaccacggccgcggggaagcgaaactgccggaagacctggcccagcgcccagcgccccgccgcgccccgccccccggccggcgtccgccaggccccctcctcctggcccgcctcctttccccgccgcttctcagtcaacccaggacccaagttttcccaggaccccaacttcgggagtcggctttccggctccctggcgcaaccctgagggtggacgcccgaccccacccctgccctcggccctccagcgcagctgcccakcctggagccgcgcctgaagtgggcccgcagtctgaggcctggattccacgaggccggtgcaagccaggagccagccccactccctcgcccagctccctccggcctggccctctgcagaagcctgatgcccacccagctgtctcaccatgggaccccaggcggagccgcggcccgccscgggtcgcaatccaggccccaggcccgatccccagcgcyggcccaggccccaccccctcgacccccagcggcccggccctcccctcgcactccttcccccctcccaccatccaccgcagccacttccgcccgtcctccggaagtgggccccggcaacgcrgcsttccacatcccgcccatttttctacccmacgtccccagcccgtcaccaccgccaccacgggagcgagggaggtgggtctgcagggcctgagactgttctacagccactgttcacagggctgaagaacaggtgtgggcagaaccaggttgtgagaaggamgccgggcgcagartagcggccgtacaggagggggaggggcagaagagactggccagcagcggaagcgcgcggcaggtggagccgcgcgggaagaagcacgcatgcgtcgcgggggggttggcccttggggtgctgggcggagcttgggaggggcgaggacgctgaagtaggggcggaacctgtgcggtgcagccytgccctctccctccgcccaaaggtcgcccagcgacggcctgcttgacctggyttctcaaaragggtgaccccccccctccgccccacgctggtcgcgggtcctggcgagaagcctttcggaaagcaccggggcctgtgtgttcccgcttcctcggacgcgagctctgtgtagccgtggtgg

SEQ ID NO: 2459 - DNA, 1014 bp, Homo sapiens
atgggagtcatggccatgctgatgctccccctgctgctgctgggaatcagcggcctcctcttcatttaccaagaggtgtccaggctgtggtcaaagtcagctgtgcagaacaaagtggtggtgatcaccgatgccatctcaggactgggcaaggagtgtgctcgggtgttccacacaggtggggcaaggctggtgctgtgtggaaaraactgggagaggctagagaacctatatgatgccttgatcagcgtggctgaccccagcaagcagacattcaccccaaagctggtcctgttggacctctcagacatcagctgtgtcccagatgtggcaaaagaagtcctggattgctatggctgtgtggacatcctcatcaacaatgccagtgtgaaggtgaaggggcctgcccataagatttctctggagctcgacaaaaagatcatggatgccaattactttggccccatcacattgacgaaagccctgcttcccaacatgatctcccggagaacaggccaaatcgtgttagtgaataatatccaagggaagtttggaatcccgttccgtacgacttacgctgcctccaagcacgcagccctgggcttctttgactgcctccgagccgaagtggaggaatacgatgttgtcatcagcaccgtgagcccractttcatccggtygtaccacgtgtatccagagcaaggaaactgggaagcttccatttggaaattctttttcaggaagctgacctacggcgtgcacccagtrgaggtggcggaggaggtgatgcgcaccgtgcggaggaagaagcaagaggtgttyatggccaaccccatccccaaggccgccgtgtacgtccgcaccttcttcccggagttctttttcgccgtggtggcctgtggggtgaaggagaagctcaatgtcccggaggagggggaacccccaactaagattgaagactttttggaggtggcctcatttgagatggacgagcagcatgttagggatccatag

SEQ ID NO: 2460 - DNA, 1388 bp, Homo sapiens
atgggagtcatggccatgctgatgctccccctgctgctgctgggaatcagcggcctcctcttcatttaccaagaggtgtccaggctgtggtcaaagtcagctgtgcagaacaaagtggtggtgatcaccgatgccatctcaggactgggcaaggagtgtgctcgggtgttccacacaggtggggcaaggctggtgctgtgtggaaaraactgggagaggctagagaacctatatgatgccttgatcagcgtggctgaccccagcaagacattcaccccaaagctggtcctgttggacctctcagacatcagctgtgtcccagatgtggcaaaagaagtcctggattgctatggctgtgtggacatcctcatcaacaatgccagtgtgaaggtgaaggggcctgcccataagatttctctggagctcgacaaaaagatcatggatgccaattactttggccccatcacattgacgaaagccctgcttcccaacatgatctcccggagaacaggccaaatcgtgttagtgaataatatccaagggaagtttggaatcccgttccgtacgacttacgctgcctccaagcacgcagccctgggcttctttgactgcctccgagccgaagtggaggaatacgatgttgtcatcagcaccgtgagcccractttcatccggtygtaccacgtgtatccagagcaaggaaactgggaagcttccatttggaaatgtgagacttcagagggaagctggggcccctgggggcctcgggaacagtccggtgtcactggggggatgaatgaccttcagatggtctttttcaggaagctgacctacggcgtgcacccagtrgaggtggcggaggaggtgatgcgcaccgtgcggaggaagaagcaagaggtgttyatggccaaccccatccccaaggccgccgtgtacgtccgcaccttcttcccggagttctttttcgccgtggtggcctgtggggtgaaggagaagctcaatgtcccggaggaggggacaaggctggtggtcccgtcctgctaccgtggaggcaggatgtcgggtcagaactcaggggctcaccgaagcagcaggcaaggcaggcctggagcctgcaagggaactgtcttatatgcgatgaaactctaaagaaaaacaagggagggattaacagaaaccgggaaaacggttacctctatgatggacgggagcggggaggtgaccgaggagagccactggctctgggtcttgttaagtggcattttctggaggaaatggaaaatgaagggcagggtrgtctgtgccgacatcctcactggcctctcctcggtcagaactcctgctgccatgcttctgcgacaccccagaatgacatgctcaactctcct

SEQ ID NO: 2461 - DNA, 2201 bp, Homo sapiens
ccagcgccaagttcggggtttggggttggagcggctggtcacgtggctggcccgcggcggtgcgcggggcgttgggtcagcgggtctgggactggtggcaccggcggcggcgtaggacggaggcgtcgctagggtcttgttctcttggccaggctggagtgctgtgggaaaatctgggctcactgcagcctcaacctccgggactcaagtgatcatcctgcctcagccacccagagtagctgagaatacaggcgtgcgccaccaggctcgggcagcttcgaaccagtgcaatgacgatgccagtcaacggggcccacaaggatgctgacctgtggtcctcacatgacaagatgctggcacaacccctcaaagacagtgatgttgaggtttacaacatcattaagaaggagagtaaccggcagagggttggattggagctgattgcctcggagaatttcgccagccgagcagttttggaggccctaggctcttgcttaaataacaaatactctgaggggtacccgggccagagatactatggcgggactgagtttattgatgaactggagaccctctgtcagaagcgagccctgcaggcctataagctggacccacagtgctggggggtcaacgtccagccctactcaggctcccctgcaaactttgctgtgtacactgccctggtggaaccccatgggcgcatcatgggcctggaccttccggatgggggccacctgacccatgggttcatgacagacaagaagaaaatctctgccacgtccatcttctttgaatctatgccctacaaggtgaacccagatactggctacatcaactatgaccagctggaggagaacgcacgcctcttccacccgaagctgatcatcgcaggaaccagctgctactcccgaaacctggaatatgcccggctacggaagattgcagatgagaacggggcgtatctcatggcggacatggctcacatcagcgggctggtggcggctggcgtggtgccctccccatttgaacactgccatgtggtgaccaccaccactcacaagaccctgcgaggctgccgagctggcatgatcttctacaggaaaggagtgaaaagtgtggatcccaagactggcaaagagattctgtacaacctggagtctcttatcaattctgctgtgttccctggcctgcagggaggtccccacaaccacgccattgctggggttgctgtggcactgaagcaagctatgactctggaatttaaagtttatcaacaccaggtggtggccaactgcagggctctgtctgaggccctgacggagctgggctacaaaatagtcacaggtggttctgacaaccatttgatccttgtggatctccgttccaaaggcacagatggtggaagggctgagaaggtgctagaagcctgttctattgcctgcaacaagaacacctgtccaggtgacagaagcgctctgcggcccagtggactgcggctggggaccccagcactgacgtcccgtggacttttggaaaaagacttccaaaaagtagcccactttattcacagagggatagagctgaccctgcagatccagagcgacactggtgtcagagccaccctgaaagagttcaaggagagactggcaggggataagtaccaggcggccgtgcaggctctccgggaggaggttgagagcttcgcctctytcttccctctgcctggcctgcctgacttctaaaggagcgggcccactctggacccacctggcgccacagaggaagctgsctgccggaggacccccacytgagagatggatgagctgctccaaaggggaactgttgacactcgggccctttgagggggtttcttttggacttttttcatgttttcttcacaaatcaaaatttgtttaagtctcattgttagtaattctgggacaggttattaaaggatttaaatttgaacctggctttctcacagctggacataattctaggcaaagctgttagaaagattgtagcgttttactctccctgggctttcctccgccttgctgcaacagagaggaaatgcccatgtccacagcttgtacacactgccccctcwctatcttgttatccagtggcatgccaaaggagaactgaattagcttctgaggcttctgctgtaaatcagaagtgtatgttagtcaagagta

SEQ ID NO: 2462 - DNA, 1961 bp, Homo sapiens
ccagcgccaagttcggggtttggggttggagcggctggtcacgtggctggcccgcggcggtgcgcggggcgttgggtcagcgggtctgggactggtggcaccggcggcggcgtaggacggaggcgtcgctagggtcttgttctcttggccaggctggagtgctgtgggaaaatctgggctcactgcagcctcaacctccgggactcaagtgatcatcctgcctcagccacccagagtagctgagaatacaggcgtgcgccaccaggctcgggcagcttcgaaccagtgcaatgacgatgccagtcaacggggcccacaaggatgctgacctgtggtcctcacatgacaagatgctggcacaacccctcaaagacagtgatgttgaggtttacaacatcattaagaaggagagtaaccggcagagggttggattggagctgattgcctcggagaatttcgccagccgagcagttttggaggccctaggctcttgcttaaataacaaatactctgaggggtacccgggccagagatactatggcgggactgagtttattgatgaactggagaccctctgtcagaagcgagccctgcaggcctataagctggacccacagtgctggggggtcaacgtccagccctactcaggctcccctgcaaactttgctgtgtacactgccctggtggaaccccatgggcgcatcatgggcctggaccttccggatgggggccacctgacccatgggttcatgacagacaagaagaaaatctctgccacgtccatcttctttgaatctatgccctacaaggtgaacccagatactggctacatcaactatgaccagctggaggagaacgcacgcctcttccacccgaagctgatcatcgcaggaaccagctgctactcccgaaacctggaatatgcccggctacggaagattgcagatgagaacggggcgtatctcatggcggacatggctcacatcagcgggctggtggcggctggcgtggtgccctccccatttgaacactgccatgtggtgaccaccaccactcacaagaccctgcgaggctgccgagctggcatgatcttctacaggaaaggtggttctgacaaccatttgatccttgtggatctccgttccaaaggcacagatggtggaagggctgagaaggtgctagaagcctgttctattgcctgcaacaagaacacctgtccaggtgacagaagcgctctgcggcccagtggactgcggctggggaccccagcactgacgtcccgtggacttttggaaaaagacttccaaaaagtagcccactttattcacagagggatagagctgaccctgcagatccagagcgacactggtgtcagagccaccctgaaagagttcaaggagagactggcaggggataagtaccaggcggccgtgcaggctctccgggaggaggttgagagcttcgcctctytcttccctctgcctggcctgcctgacttctaaaggagcgggcccactctggacccacctggcgccacagaggaagctgsctgccggaggacccccacytgagagatggatgagctgctccaaaggggaactgttgacactcgggccctttgagggggtttcttttggacttttttcatgttttcttcacaaatcaaaatttgtttaagtctcattgttagtaattctgggacaggttattaaaggatttaaatttgaacctggctttctcacagctggacataattctaggcaaagctgttagaaagattgtagcgttttactctccctgggctttcctccgccttgctgcaacagagaggaaatgcccatgtccacagcttgtacacactgccccctcwctatcttgttatccagtggcatgccaaaggagaactgaattagcttctgaggcttctgctgtaaatcagaagtgtatgttagtcaagagta

SEQ ID NO: 2463 - DNA, 4421 bp, Homo sapiens
ccagcgccaagttcggggtttggggttggagcggctggtcacgtggctggcccgcggcggtgcgcggggcgttgggtcagcgggtctgggactggtggcaccggcggcggcgtaggacggaggcgtcgctagggtcttgttctcttggccaggctggagtgctgtgggaaaatctgggctcactgcagcctcaacctccgggactcaagtgatcatcctgcctcagccacccagagtagctgagaatacaggcgtgcgccaccaggctcgggcagcttcgaaccagtgcaatgacgatgccagtcaacggggcccacaaggatgctgacctgtggtcctcacatgacaagatgctggcacaacccctcaaagacagtgatgttgaggtttacaacatcattaagaaggagagtaaccggcagagggttggattggagctgattgcctcggagaatttcgccagccgagcagttttggaggccctaggctcttgcttaaataacaaatactctgaggggtacccgggccagagatactatggcgggactgagtttattgatgaactggagaccctctgtcagaagcgagccctgcaggcctataagctggacccacagtgctggggggtcaacgtccagccctactcaggctcccctgcaaactttgctgtgtacactgccctggtggaaccccatgggcgcatcatgggcctggaccttccggatgggggccacctgacccatgggttcatgacagacaagaagaaaatctctgccacgtccatcttctttgaatctatgccctacaaggtgaacccagatactggctacatcaactatgaccagctggaggagaacgcacgcctcttccacccgaagctgatcatcgcaggaaccagctgctactcccgaaacctggaatatgcccggctacggaagattgcagatgagaacggggcgtatctcatggcggacatggctcacatcagcgggctggtggcggctggcgtggtgccctccccatttgaacactgccatgtggtgaccaccaccactcacaagaccctgcgaggctgccgagctggcatgatcttctacaggaaaggagtgaaaagtgtggatcccaagactggcaaagagattctgtacaacctggagtctcttatcaattctgctgtgttccctggcctgcagggaggtccccacaaccacgccattgctggggttgctgtggcactgaagcaagctatgactctggaatttaaagtttatcaacaccaggtggtggccaactgcagggctctgtctgaggccctgacggagctgggctacaaaatagtcacaggtggttctgacaaccatttgatccttgtggatctccgttccaaaggcacagatggtggaagggctgagaaggtgctagaagcctgttctattgcctgcaacaagaacacctgtccaggtgacagaagcgctctgcggcccagtggactgcggctggggaccccagcactgacgtcccgtggacttttggaaaaagacttccaaaaagtagcccactttattcacagagggatagagctgaccctgcagatccagagcgacactggtgtcagagccaccctgaaagagttcaaggagagactggcaggggataagtaccaggcggccgtgcaggctctccgggaggaggttgagagcttcgcctctytcttccctctgcctggcctgcctgacttctaaaggagcgggcccactctggacccacctggcgccacagaggaagctgsctgccggaggacccccacytgagagatggatgagctgctccaaaggggaactgttgacactcgggccctttgagggggtttcttttggacttttttcatgttttcttcacaaatcaaaatttgtttaagtctcattgttagtaattctgggacaggttattaaaggatttaaatttgaacctggctttctcacagctggacataattctaggaaaataaratactatgtcgccacttggtcataatcatttagatggtggtgtagggcaaagctgttagaaagattgtagcgttttactctccctgggctttcctccgccttgctgcaacagagaggaaatgcccatgtccacagcttgtacacactgccccctcwctatcttgttatccagtggcatgccaaaggagaactgaattagcttctgaggcttctgctgtaaatcagaagtgtatgttagtcaagagtaaacaagatgcacccagtatggtgggagggttttgctgtcagtagctyaaagtatggtgtagaaatggcctcctccctccatcctgggaagtcccagtcccatcctggtgtgagaatcaaccaggctttcctgctccacctgagataaccaactccctcccgtaatcaggaagccaaatgtcaccttcccaaagaaattttattttcacgtagctgaagtgcaaaacatagatgaccatttttaataagcacaatcaaatttttaaccacagaatgtctacaagaattatagctttaaaaaatacaaccaatttttatatttcaaaaatatttgaactcaaataaattaatttcttaaaaagtacacttctcatactatgtgtttggcattgactctggttaactcttgtgcagcaacacctacgagatgctatcacacacgcgccagctgcactcctgcaccagccgctgcaacgactgcacctcacgtggtggcggggactcacattcacaagacgggacgggaacatgcagtaataaaatagctttttaaaaaataacacatataaattcatcacataggattatgcttttcactgcaaccttgaaggtggcatttatctcaatctgtgactccagctatttagtggcagacaatcccggtgaggcagcctgtggtcccaccttgtaggtggcagcccctgcaatctggggtctagcctgtcggcgtttgctttattgtgggtggagcagctgctgcagaatctgtgagttgactcaccagtccctacagttctgctaccaaagtggtcttcaatttaggggcctgacccctccccagctggagacaagctgccatctccagggctcgctgtaaacagcctccactcytgggctgaataagcactcccaagaagctgggcccctaccaacagattaatcggctgcagagtgctcatcccctccccacacccccatccacccctgcctcctcctcctttccactgctttaaccaaaccttaatgaggtaaggccaggctaggtcagggctcaaaggaaaatgggctcaggaaaacttagtttgcccagccttgtcagctgagattggttttgctttccagccagaagtagaaacttgatgctttttcctttttgcagtgttaaaaaccvtatctccagttttattatgttccatcacagttttggggcaaagccagaaagctgacttgtttgcttcaaaacacaaaccaaggcactgtcttctgtgcttttcagggaggtgggaaggtaaaggagactgcccactataggggctcagttcccccaaaggccttgcacaccttctgataaaccccctggctgaggcaatcctactggctgtgcagacaaagatgtgacagcagcactagatgctgacccaacaagcagtgctgggcctgggcggtggggcatgttcagcactgcgggcagcagtcagcacatgcaagacattcagtgagcagagggctgccctcggcctccaactgcagccgccctggcgcgtgaaatgaaattggtgggccttcctaggattgtaaaatgggacttgtcatttgtgtgaggttgaaatctactatactttgaatatggcaactgttttcaaccactgaagcaaagaaggtaaaggccagatggggaatgaaaggtaaggtactgtggtctatttccaaatttgggagcaatgtgtgtaacttcaactgttggagtaaatgagttatggaaaagccacaatttctaaaatcccaaggttctaccaaaggagtgaggttcctggggaaacaggcatgaggcagcagctcaggctgatgtgtcctgtgcgatataaaaagctgtggcctgatctctaaagtggggcttttgaaaatcaccagtccacaactacctgcctggctagtttaacctagactgcttcagaagcaagggagggggataatggactggagaaaaagctgacacaaaactcaagacaaccagtttcagtacctgggccctcaaagcaatagtgaggactgagaaagtagcaaggggcactgatgtcatctattttctgggaagtgttatttttaatggtttcattaaaaacttactaaccttctactggaagaatacctcaaatgaaaaatttt

SEQ ID NO: 2464 - DNA, 2084 bp, Homo sapiens
ccagcgccaagttcggggtttggggttggagcggctggtcacgtggctggcccgcggcggtgcgcggggcgttgggtcagcgggtctgggactggtggcaccggcggcggcgtaggacggaggcgtcgctagggtcttgttctcttggccaggctggagtgctgtgggaaaatctgggctcactgcagcctcaacctccgggactcaagtgatcatcctgcctcagccacccagagtagctgagaatacaggcgtgcgccaccaggctcgggcagcttcgaaccagtgcaatgacgatgccagtcaacggggcccacaaggatgctgacctgtggtcctcacatgacaagatgctggcacaacccctcaaagacagtgatgttgaggtttacaacatcattaagaaggagagtaaccggcagagggttggattggagctgattgcctcggagaatttcgccagccgagcagttttggaggccctaggctcttgcttaaataacaaatactctgaggggtacccgggccagagatactatggcgggactgagtttattgatgaactggagaccctctgtcagaagcgagccctgcaggcctataagctggacccacagtgctggggggtcaacgtccagccctactcaggctcccctgcaaactttgctgtgtacactgccctggtggaaccccatgggcgcatcatgggcctggaccttccggatgggggccacctgacccatgggttcatgacagacaagaagaaaatctctgccacgtccatcttctttgaatctatgccctacaaggtgaacccagatactggctacatcaactatgaccagctggaggagaacgcacgcctcttccacccgaagctgatcatcgcaggaaccagctgctactcccgaaacctggaatatgcccggctacggaagattgcagatgagaacggggcgtatctcatggcggacatggctcacatcagcgggctggtggcggctggcgtggtgccctccccatttgaacactgccatgtggtgaccaccaccactcacaagaccctgcgaggctgccgagctggcatgatcttctacaggaaaggggttgctgtggcactgaagcaagctatgactctggaatttaaagtttatcaacaccaggtggtggccaactgcagggctctgtctgaggccctgacggagctgggctacaaaatagtcacaggtggttctgacaaccatttgatccttgtggatctccgttccaaaggcacagatggtggaagggctgagaaggtgctagaagcctgttctattgcctgcaacaagaacacctgtccaggtgacagaagcgctctgcggcccagtggactgcggctggggaccccagcactgacgtcccgtggacttttggaaaaagacttccaaaaagtagcccactttattcacagagggatagagctgaccctgcagatccagagcgacactggtgtcagagccaccctgaaagagttcaaggagagactggcaggggataagtaccaggcggccgtgcaggctctccgggaggaggttgagagcttcgcctctytcttccctctgcctggcctgcctgacttctaaaggagcgggcccactctggacccacctggcgccacagaggaagctgsctgccggaggacccccacytgagagatggatgagctgctccaaaggggaactgttgacactcgggccctttgagggggtttcttttggacttttttcatgttttcttcacaaatcaaaatttgtttaagtctcattgttagtaattctgggacaggttattaaaggatttaaatttgaacctggctttctcacagctggacataattctaggcaaagctgttagaaagattgtagcgttttactctccctgggctttcctccgccttgctgcaacagagaggaaatgcccatgtccacagcttgtacacactgccccctcwctatcttgttatccagtggcatgccaaaggagaactgaattagcttctgaggcttctgctgtaaatcagaagtgtatgttagtcaagagta

SEQ ID NO: 2465 - DNA, 2229 bp, Homo sapiens
ccagcgccaagttcggggtttggggttggagcggctggtcacgtggctggcccgcggcggtgcgcggggcgttgggtcagcgggtctgggactggtggcaccggcggcggcgtaggacggaggcgtcgctagggtcttgttctcttggccaggctggagtgctgtgggaaaatctgggctcactgcagcctcaacctccgggactcaagtgatcatcctgcctcagccacccagagtagctgagaatacaggcgtgcgccaccaggctcgggcagcttcgaaccagtgcaatgacgatgccagtcaacggggcccacaaggatgctgacctgtggtcctcacatgacaagatgctggcacaacccctcaaagacagtgatgttgaggtttacaacatcattaagaaggagagtaaccggcagagggttggattggagctgattgcctcggagaatttcgccagccgagcagttttggaggccctaggctcttgcttaaataacaaatactctgaggggtacccgggccagagatactatggcgggactgagtttattgatgaactggagaccctctgtcagaagcgagccctgcaggcctataagctggacccacagtgctggggggtcaacgtccagccctactcaggctcccctgcaaactttgctgtgtacactgccctggtggaaccccatgggcgcatcatgggcctggaccttccggatgggggccacctgacccatgggttcatgacagacaagaagaaaatctctgccacgtccatcttctttgaatctatgccctacaaggtgaacccagatactggctacatcaactatgaccagctggaggagaacgcacgcctcttccacccgaagctgatcatcgcaggaaccagctgctactcccgaaacctggaatatgcccggctacggaagattgcagatgagaacggggcgtatctcatggcggacatggctcacatcagcgggctggtggcggctggcgtggtgccctccccatttgaacactgccatgtggtgaccaccaccactcacaagaccctgcgaggctgccgagctggcatgatcttctacaggaaaggagtgaaaagtgtggatcccaagactggcaaagagattctgtacaacctggagtctcttatcaattctgctgtgttccctggcctgcagggaggtccccacaaccacgccattgctggggttgctgtggcactgaagcaagctatgactctggaatttaaagtttatcaacaccaggtggtggccaactgcagggctctgtctgaggccctgacggagctgggctacaaaatagtcacaggtggttctgacaaccatttgatccttgtggatctccgttccaaaggcacagatggtggaagggctgagaaggtgctagaagcctgttctattgcctgcaacaagaacacctgtccaggtgacagaagcgctctgcggcccagtggactgcggctggggaccccagcactgacgtcccgtggacttttggaaaaagacttccaaaaacgacactggtgtcagagccaccctgaaagagttcaaggagagactggcaggggataagtaccaggcggccgtgcaggctctccgggaggaggttgagagcttcgcctctytcttccctctgcctggcctgcctgacttctaaaggagcgggcccactctggacccacctggcgccacagaggaagctgsctgccggaggacccccacytgagagatggatgagctgctccaaaggggaactgttgacactcgggccctttgagggggtttcttttggacttttttcatgttttcttcacaaatcaaaatttgtttaagtctcattgttagtaattctgggacaggttattaaaggatttaaatttgaacctggctttctcacagctggacataattctaggaaaataarctgttagaaagattgtagcgttttactctccctgggctttcctccgccttgctgcaacagagaggaaatgcccatgtccacagcttgtacacactgccccctcwctatcttgttatccagtggcatgccaaaggagaactgaattagcttctgaggcttctgctgtaaatcagaagtgtatgttagtcaagagtaaacaagatgcacccagtatggtgggagggttttgctgtcagtagctyaaagtatggtgtagaaatggcctcctcc

SEQ ID NO: 2466 - DNA, 4344 bp, Homo sapiens
tccgggggcggggccaagcccaagcctggcgcgcagagtgcaccttcctgagctcgagcggtccagcgccaagttcggggtttggggttggagcggctggtcacgtggctggcccgcggcggtgcgcggggcgttgggtcagcgggtctgggactggtggcaccggcggcggcgtaggacggaggcgtcgctaggcagcttcgaaccagtgcaatgacgatgccagtcaacggggcccacaaggatgctgacctgtggtcctcacatgacaagatgctggcacaacccctcaaagacagtgatgttgaggtttacaacatcattaagaaggagagtaaccggcagagggttggattggagctgattgcctcggagaatttcgccagccgagcagttttggaggccctaggctcttgcttaaataacaaatactctgaggggtacccgggccagagatactatggcgggactgagtttattgatgaactggagaccctctgtcagaagcgagccctgcaggcctataagctggacccacagtgctggggggtcaacgtccagccctactcaggctcccctgcaaactttgctgtgtacactgccctggtggaaccccatgggcgcatcatgggcctggaccttccggatgggggccacctgacccatgggttcatgacagacaagaagaaaatctctgccacgtccatcttctttgaatctatgccctacaaggtgaacccagatactggctacatcaactatgaccagctggaggagaacgcacgcctcttccacccgaagctgatcatcgcaggaaccagctgctactcccgaaacctggaatatgcccggctacggaagattgcagatgagaacggggcgtatctcatggcggacatggctcacatcagcgggctggtggcggctggcgtggtgccctccccatttgaacactgccatgtggtgaccaccaccactcacaagaccctgcgaggctgccgagctggcatgatcttctacaggaaaggagtgaaaagtgtggatcccaagactggcaaagagattctgtacaacctggagtctcttatcaattctgctgtgttccctggcctgcagggaggtccccacaaccacgccattgctggggttgctgtggcactgaagcaagctatgactctggaatttaaagtttatcaacaccaggtggtggccaactgcagggctctgtctgaggccctgacggagctgggctacaaaatagtcacaggtggttctgacaaccatttgatccttgtggatctccgttccaaaggcacagatggtggaagggctgagaaggtgctagaagcctgttctattgcctgcaacaagaacacctgtccaggtgacagaagcgctctgcggcccagtggactgcggctggggaccccagcactgacgtcccgtggacttttggaaaaagacttccaaaaagtagcccactttattcacagagggatagagctgaccctgcagatccagagcgacactggtgtcagagccaccctgaaagagttcaaggagagactggcaggggataagtaccaggcggccgtgcaggctctccgggaggaggttgagagcttcgcctctytcttccctctgcctggcctgcctgacttctaaaggagcgggcccactctggacccacctggcgccacagaggaagctgsctgccggaggacccccacytgagagatggatgagctgctccaaaggggaactgttgacactcgggccctttgagggggtttcttttggacttttttcatgttttcttcacaaatcaaaatttgtttaagtctcattgttagtaattctgggacaggttattaaaggatttaaatttgaacctggctttctcacagctggacataattctaggaaaataaratactatgtcgccacttggtcataatcatttagatggtggtgtagggcaaagctgttagaaagattgtagcgttttactctccctgggctttcctccgccttgctgcaacagagaggaaatgcccatgtccacagcttgtacacactgccccctcwctatcttgttatccagtggcatgccaaaggagaactgaattagcttctgaggcttctgctgtaaatcagaagtgtatgttagtcaagagtaaacaagatgcacccagtatggtgggagggttttgctgtcagtagctyaaagtatggtgtagaaatggcctcctccctccatcctgggaagtcccagtcccatcctggtgtgagaatcaaccaggctttcctgctccacctgagataaccaactccctcccgtaatcaggaagccaaatgtcaccttcccaaagaaattttattttcacgtagctgaagtgcaaaacatagatgaccatttttaataagcacaatcaaatttttaaccacagaatgtctacaagaattatagctttaaaaaatacaaccaatttttatatttcaaaaatatttgaactcaaataaattaatttcttaaaaagtacacttctcatactatgtgtttggcattgactctggttaactcttgtgcagcaacacctacgagatgctatcacacacgcgccagctgcactcctgcaccagccgctgcaacgactgcacctcacgtggtggcggggactcacattcacaagacgggacgggaacatgcagtaataaaatagctttttaaaaaataacacatataaattcatcacataggattatgcttttcactgcaaccttgaaggtggcatttatctcaatctgtgactccagctatttagtggcagacaatcccggtgaggcagcctgtggtcccaccttgtaggtggcagcccctgcaatctggggtctagcctgtcggcgtttgctttattgtgggtggagcagctgctgcagaatctgtgagttgactcaccagtccctacagttctgctaccaaagtggtcttcaatttaggggcctgacccctccccagctggagacaagctgccatctccagggctcgctgtaaacagcctccactcytgggctgaataagcactcccaagaagctgggcccctaccaacagattaatcggctgcagagtgctcatcccctccccacacccccatccacccctgcctcctcctcctttccactgctttaaccaaaccttaatgaggtaaggccaggctaggtcagggctcaaaggaaaatgggctcaggaaaacttagtttgcccagccttgtcagctgagattggttttgctttccagccagaagtagaaacttgatgctttttcctttttgcagtgttaaaaaccvtatctccagttttattatgttccatcacagttttggggcaaagccagaaagctgacttgtttgcttcaaaacacaaaccaaggcactgtcttctgtgcttttcagggaggtgggaaggtaaaggagactgcccactataggggctcagttcccccaaaggccttgcacaccttctgataaaccccctggctgaggcaatcctactggctgtgcagacaaagatgtgacagcagcactagatgctgacccaacaagcagtgctgggcctgggcggtggggcatgttcagcactgcgggcagcagtcagcacatgcaagacattcagtgagcagagggctgccctcggcctccaactgcagccgccctggcgcgtgaaatgaaattggtgggccttcctaggattgtaaaatgggacttgtcatttgtgtgaggttgaaatctactatactttgaatatggcaactgttttcaaccactgaagcaaagaaggtaaaggccagatggggaatgaaaggtaaggtactgtggtctatttccaaatttgggagcaatgtgtgtaacttcaactgttggagtaaatgagttatggaaaagccacaatttctaaaatcccaaggttctaccaaaggagtgaggttcctggggaaacaggcatgaggcagcagctcaggctgatgtgtcctgtgcgatataaaaagctgtggcctgatctctaaagtggggcttttgaaaatcaccagtccacaactacctgcctggctagtttaacctagactgcttcagaagcaagggagggggataatggactggagaaaaagctgacacaaaactcaagacaaccagtttcagtacctgggccctcaaagcaatagtgaggactgagaaagtagcaaggggcactgatgtcatctattttctgggaagtgttatttttaatggtttcattaaaaacttactaaccttctactggaagaatacctcaaatgaaaaatttt

SEQ ID NO: 2467 - DNA, 2450 bp, Homo sapiens
cgacacygagcagcgacgcgcacttttgggacgcgcttgtgacccgccttccggaaggaagcggctaactatggcgaccgccacggagcagtgggttctggtggagatggtacaggcgctttacgaggctcctgcttaccatcttattttggaagggattctgatcctctggataatcagacttcttttctctaagacttacaaattacaagaacgatctgatcttacagtcaaggaaaaagaagaactgattgaagagtggcaaccagaacctcttgttcctcctgtcccaaaagaccatcctgctctcaactacaacatcgtttcaggccctccaagccacaaaactgtggtgaatggaaaagaatgtataaacttcgcctcatttaattttcttggattgttggataaccctagggttaaggcagcagctttagcatctctaaagaagtatggcgtggggacttgtggacccagaggattttatggcacatttgatgttcatttggatttggaagacckcctggcaaaatttatgaagacagaagaagccattatatactcatatggatttgccaccatagccagtgctattcctgcttactctaaaagaggggacattgtttttgtagatagagctgcctgctttgctattcagaaaggattacaggcatcccgtagtgacattaagttatttaagcataatgacatggctgacctcgagcgactactaaaagaacaagagatcgaagatcaaaagaatcctcgcaaggctcgtgtaactcggcgtttcattgtagtagaaggattgtatatgaatactggaactatttgtcctcttccagaattggttaagttaaaatacaaatacaaagcaagaatcttcctggaggaaagcctttcatttggagtcctaggagagcatggccgaggagtcactgaacactatggaatcaatattgatgatattgatcttatcagtgccaacatggagaatgcacttgcttctattggaggtttctgctgtggcaggtcttttgtaattgaccatcagcgactttccggccagggatactgcttttcagcttcgttacctcccctgttagctgctgcagcaattgaggccctcaacatcatggaagagaatccaggtatttttgcagtgttgaaggaaaagtgcggacaaattcataaagctttacaaggcatttctggattaaaagtggtgggggagtccctttctccagcctttcacctacaactggaagagagcactgggtctcgcgagcaagatgtcagactgcttcaggaaattgtagatcaatgcatgaacagaagtattgcattaactcaggcgcgctacttggagaaagaagagaagtgtctccctcctcccagcattcgggttgtggtcacggtggaacaaacagaggaagaactggagagagctgcgtccaccatcaaggaggtagcccaggccgtcctgctctaggcagagtcccgggaccatggcctcctgccacacaacacgcagagaggactcaagactcccgctggccatggagtggcytgaaagagagcaagaacatgtggrtctttgataggattgttaccaaatggtgtcagtatggaccaattgtgtgaccatgagaaggatgcttattttttttaaaaagaaaacacatctaaaagcccaggaactgatttttttaagaggaaaactaatgacagtgtataactgatgtttaaattgtgcatttagtactatttaaatgttttcttatactagtattttatattcttttgttgtcgtttaaaactggagcttcagtgtctcttccctccctctaatagtaatggttcagtaagcactccttaactccttagtatttcatagaaaaatgactgcaacattaaagctaagaggaacacttcarcatatgtggtacaaatttatattgaagatctaaataaaccacgtattttccagtcttcgttgtgtgaagctaaatggtggctaaaaggaacactttttgtgtgattattataaactttgcattgtatttgaatcttagaacttttgtacacactaaatattgatgtcacaccatttctaatctgagcatccttagccagagaatattcattatacttcctaagtgagcaataatttaaatcagaagctattttattttaatgtaattaacctttctttacatttcttatgtgttcacctctaatctgttttaggaagagagttggttattatgttgatcccataatataaatcatatcctttatattttagaatatctcaaaggtgggtttgcctagggacgtgtaactacaggcttttactaagccaaggaaaaagagaatttttcttttcatcttacaaattccagatatctacaaaagatgtgaaagcactaaaaataccatttttaagc

SEQ ID NO: 2468 - DNA, 2808 bp, Homo sapiens
cgacacygagcagcgacgcgcacttttgggacgcgcttgtgacccgccttccggaaggaagcggctaactatggcgaccgccacggagcagtgggttctggtggagatggtacaggcgctttacgaggctcctgcttaccatcttattttggaagggattctgatcctctggataatcagacttcttttctctaagacttacaaattacaagaacgatctgatcttacagtcaaggaaaaagaagaactgattgaagagtggcaaccagaacctcttgttcctcctgtcccaaaagaccatcctgctctcaactacaacatcgtttcaggccctccaagccacaaaactgtggtgaatggaaaagaatgtataaacttcgcctcatttaattttcttggattgttggataaccctagggttaaggcagcagctttagcatctctaaagaagtatggcgtggggacttgtggacccagaggattttatggcacatttgatgttcatttggatttggaagacckcctggcaaaatttatgaagacagaagaagccattatatactcatatggatttgccaccatagccagtgctattcctgcttactctaaaagaggggacattgtttttgtagatagagctgcctgctttgctattcagaaaggattacaggcatcccgtagtgacattaagttatttaagcataatgacatggctgacctcgagcgactactaaaagaacaagagatcgaagatcaaaagaatcctcgcaaggctcgtgtaactcggcgtttcattgtagtagaaggattgtatatgaatactggaactatttgtcctcttccagaattggttaagttaaaatacaaatacaaagcaagaatcttcctggaggaaagcctttcatttggagtcctaggagagcatggccgaggagtcactgaacactatggaatcaatattgatgatattgatcttatcagtgccaacatggagaatgcacttgcttctattggaggtttctgctgtggcaggtcttttgtaattgaccatcagcgactttccggccagggatactgcttttcagcttcgttacctcccctgttagctgctgcagcaattgaggccctcaacatcatggaagagaatccaggtatttttgcagtgttgaaggaaaagtgcggacaaattcataaagctttacaaggcatttctggattaaaagtggtgggggagtccctttctccagcctttcacctacaactggaagagagcactgggtctcgcgagcaagatgtcagactgcttcaggaaattgtagatcaatgcatgaacagaagtattgcattaactcaggcgcgctacttggagaaagaagagaagtgtctccctcctcccagcattcgggttgtggtcacggtggaacaaacagaggaagaactggagagagctgcgtccaccatcaaggaggtagcccaggccgtcctgctctaggcagagtcccgggaccatggcctcctgccacacaacacgcagagaggactcaagactcccgctggccatggagtggcytgaaagagagcaagaacatgtggrtctttgataggattgttaccaaatggtgtcagtatggaccaattgtgtgaccatgagaaggatgcttattttttttaaaaagaaaacacatctaaaagcccaggaactgatttttttaagaggaaaactaatgacagtgtataactgatgtttaaattgtgcatttagtactatttaaatgttttcttatactagtattttatattcttttgttgtcgtttaaaactggagcttcagtgtctcttccctccctctaatagtaatggttcagtaagcactccttaactccttagtatttcatagaaaaatgactgcaacattaaagctaagaggaacacttcarcatatgtggtacaaatttatattgaagatctaaataaaccacgtattttccagtcttcgttgtgtgaagctaaatggtggctaaaaggaacactttttgtgtgattattataaactttgcattgtatttgaatcttagaacttttgtacacactaaatattgatgtcacaccatttctaatctgagcatccttagccagagaatattcattatacttcctaagtgagcaataatttaaatcagaagctattttattttaatgtaattaacctttctttacatttcttatgtgttcacctctaatctgttttaggaagagagttggttattatgttgatcccataatataaatcatatcctttatattttagaatatctcaaatgtattccttttttgtatggtgggtttgcctagggacgtgtaactacaggcttttactaagccaaggaaaaagagaatttttcttttcatcttacaaattccagatatctacaaaagatgtgaaagcactaaaaataccatttttaagcagtactttacctgttttttctttagcaaaccaggttatgtggtgtaaaggtttgttatacgtgccacaatatagcatataaatattatgccatcattccttctcttgttaaaggtagaagaataaaattgtgatttttataacctgtgcttattactcaaatggtcttcaacatctttttaaacaacacatactttttgaatgttcagtttctattttgcttgaggtattttgtacatatgtgccttgtgattgctgctgctttaaaggataaagtactctttgggggatgagtctggtttgttttgttttattttttaatgaaataaacctatattcct

SEQ ID NO: 2469 - DNA, 2457 bp, Homo sapiens
catccccgaccagccctgggatggctccacccgcgctggctccaaaatagcgagggggcggggcccgggccgtgggagcgcctgaggggcaggagtccagtgttttagccttcgaaggaccatggtgcttccacgtcatcgtgttgtggcgctcccggctatggcagtaccgtagttttcctctcttctgcctgcggtgaccattgggctgtagggtgccccgaggcctccctggccccctcacgccggcagaatggcctcagcccgaggggccaagcagtcttcgccccgggtggggaccacccgctacacagagacgtccacggtccgcgtggagacctcgtcccaccgcgtggagacgtcgtcccggcgggtggagacctcccagcgccgcagcgaggggccctccctctccccctcggggaagcggctccctcgcatcctcgaggcgtcctcccggcacgtggaatcctcctcgcagcgcacggaaacgacctcccgccacgtcagagcctcgtccctgagggtggagacgtctctgcactgcgcggagagcccgaccccgcgggccaagccggccgcccgccagaacgaaaaaacggcccgatgagatgctgyttcccaaaggccaccaaggggccagggccctcagccaggacagaaaggcctccagttgccagccagccagccagctgccaggtggaccaatcattttcggtttcatggaaacaaaccataaatcaatcccaaattcccatcactgctctagctctctcccagatccccaaatccggatgtctgtctcagggaacgtcaaagcaacatgcccggatgaggagacagaactcaaggtggaagtaccggagtacctggggccgctgmtgtttgtgaaactgcgywaacgtcacttccttcaggttctgcagctggatctccgtgtagggccccggagccggggacgaggtcaggttcccttgttaccgctgggtggaggkcracggcgtcctgagcctgcctgaaggcaccagccgtactgtgggcgacgaccctcgaggcctgttccagaaacaccaggaagaggagctggaagagagaaggaagttgtaccggtggggaaactkgaaggatgggttaattctgaatgtggctggggcaaaactatgtgacctccctgtggatgagcaatttctggaagacaagagtgttgactttaagaatgatctgaatgacttcaaccagattttctgctgtggccagagcaagctggctgagcgcgtgcgggactcctggarggaagatgccttatttgggtaccagtttcttaatggcgccaaccccrtggtgctgaggcgctctgctcaccttcctgctcgcctagtgttycctccaggcatggaggaactgcaggcccagctggagaaggagctggagggaggcacattgttcgaagctgacttctccctgctggatgggatcaaggccaacgtcagtctctgtagccagcagcacctggctgcccctctggtcatgctgaaactgcagcctgatgggaaactcttgcccatggtcatccagctccagctgcccagcacaggatccccaccacctccccttttcctgcccacggatcccccagtggtctggcttctggcccaatgctgggtgcgcagctctgacttmcagctccgtgagctgcagtctcatcttctgaggggacacttgatggctcaggtcattgttgtggccaccatgaggtgcctgccgtcgatacatcctatcttcaagctatgcgtggagcgaatgaacaaggttgggcttgtctggacctgggcacggtcactgaatgttcttggcctctgtgtgacatcagagacacacctcagcggatgtgactcagtgagcaccattcagactccccagggccactcccatgagctggccagcctccacgaaggccaagtcagcaccagggtttcgggaagaccacggatggtgtgggagcagttgagatgctaccgctttgcccgacctgagccctgggcctcggggctgagccaggggcctggaagcagagacaaacccctgcaagcctcagagtcctcagcagccaaagggggcgtcagctgcagagaagacccaccacgtcacactgtggggcagggatggcacaggaccagccactccagcagaggaactgtttgtggaacccagcagggaaagaaattcgactttgagagcagcagctttggcagcttaraaatcatctggaggcttcccgtgcacacattaaacctcaagctccaggagtcccactatggcctgaggagcatcccgctctctggcaaggttctgctcctgctggaacaccagattagagcaggggtgccaggggcccctcaatatgctggcagctccctccagcctcagtcaggttccaggaagagaccagggcaagcc

SEQ ID NO: 2470 - DNA, 1953 bp, Homo sapiens
ggcggctccgcccatccccgaccagccctgggatggctccacccgcgctggctccaaaatagcgagggggcggggcccgggccgtgggagcgcctgaggggcaggagtccagtgttttagccttcgaaggaccatggtgcttccacgtcatcgtgttgtggcgctcccggctatggcagtaccgtagttttcctctcttctgcctgcggtgaccattgggctgtagggtgccccgaggcctccctggccccctcacgccggcagaatggcctcagcccgaggggccaagcagtcttcgccccgggtggggaccacccgctacacagagacgtccacggtccgcgtggagacctcgtcccaccgcgtggagacgtcgtcccggcgggtggagacctcccagcgccgcagcgaggggccctccctctccccctcggggaagcggctccctcgcatcctcgaggcgtcctcccggcacgtggaatcctcctcgcagcgcacggaaacgacctcccgccacgtcagagcctcgtccctgagggtggagacgtctctgcactgcgcggagagcccgaccccgcgggccaagccggccgcccgccagaacgaaaaaacggcccgatgagatgctgyttcccaaaggccaccaaggggccagggccctcagccaggacagaaaggcctccagttgccagccagccagccagctgccaggtggaccaatcattttcggtttcatggaaacaaaccataaatcaatgtaagaaacagccaagccgcagtttctgaacacagccaacgtttactgaccgtcctgcgtcttggaccagcctacttttgwcccagtgaactattttcacttgaagccagcacagaaggttttcaggcccaggatgctgtctaaatcgggttgatggacaaagagaggctgtttgagcctctgagccaggccctgtgtgtggtgtagagttcctagatgacaagacagagtccatgtcctcaaggaatgtgcggttatacgaaggatgcaggcacagaaacacacaagcccagggatggaagggtggagaaacgccaccctcttgacgaagaagagggctctgggcagcctgtggctggagaagttacctcggatcctttagccagagcaaatccgccccctagtagcagcacgatgccccagggcactttctcctgggttaccttccaatccagcaggggagggggataaaatggagttttcctttctgggaagaaaaagaaacacacacacacacacacacacacacacacacacacacacacacacaccagagcagcattagaagacaaaagaaatctaatcaagggggaataaagctaataaggacaatgaggtaccatctcctacttataaattagctaaagtttacaataatatatacattgctggtgaggatatgatcaaactattacacacactgccaatagcatcgtaaattggtatgacctttttgaaaagcaatttggccatacattttaagggccattaagactttgtattctatcaccccagcaatattactcctagaagtttatcctaaagaaaaaataccctcaaaggaaaagctatatgcaagaaaacattaatttatgaaaataaaaaattcaaaacagccaaaatgttctataacaggagaatgattacaacccctcaacgcaatataatgccattattagagaaaatatatttgaagactgtagcaatagtgggaaatgtttatagtgtaatatcaatcaaaagtggtagaagaaacaacaaacaaataggattcaaactgtgtgtgttgattataatgtaatatacaggcatattagcaaagactgggaggaagagagaaaacaaaaaattgtgctgaatggaaatcagtgttatggaaaatttgaaacattttctgttcctgttgtaatataaat

SEQ ID NO: 2471 - DNA, 1812 bp, Homo sapiens
catccccgaccagccctgggatggctccacccgcgctggctccaaaatagcgagggggcggggcccgggccgtgggagcgcctgaggggcaggagtccagtgttttagccttcgaaggaccatggtgcttccacgtcatcgtgttgtggcgctcccggctatggcagtaccgtagttttcctctcttctgcctgcggtgaccattgggctgtagggtgccccgaggcctccctggccccctcacgccggcagaatggcctcagcccgaggggccaagcagtcttcgccccgggtggggaccacccgctacacagagacgtccacggtccgcgtggagacctcgtcccaccgcgtggagacgtcgtcccggcgggtggagacctcccagcgccgcagcgaggggccctccctctccccctcggggaagcggctccctcgcatcctcgaggcgtcctcccggcacgtggaatcctcctcgcagcgcacggaaacgacctcccgccacgtcagagcctcgtccctgagggtggagacgtctctgcactgcgcggagagcccgaccccgcgggccaagccggccgcccgccagaacgaaaaaacggcccgatgagatgctgyttcccaaaggccaccaaggggccagggccctcagccaggacagaaaggcctccagttgccagccagccagccagctgccaggtggaccaatcattttcggtttcatggaaacaaaccataaatcaatgtaagaaacagccaagccgcagtttctgaacacagccaacgtttactgaccgtcctgcgtcttggaccagcctacttttgwcccagtgaactattttcacttgaagccagcacagaaggttttcaggcccaggatgctgtctaaatcgggttgatggacaaagagaggctgtttgagcctctgagccaggtgagtttgggatccacagccctcagaaaaccttcaccccttaggaacagagaccaaactgaaataatgacctgtggaatgaytccatgcctgmtaaaaactcgagggrcaaggaacagactcataaattattaattggcctttgtttatgtttcaaagtaaatggtcgttttctttatgctaagtctttgtacctggcacccccatccatacacttttttaaggtaggttagatgtggttaaaaatgacagtaaacccaccagcaagcaaaaataatcttaraaagtgagaggaggtcactgaaacctggcctgaggtttgaagaagatggagaagagttatatttattgagaaccggctctgtgccaggcactagatgttcctccacttacgatggggttacctcccgttraaactattgtaagttgaaaatatggtaatttgaaaatgcacttaatacccctaacctactaaacatcatggcttagcctagcctaccttaaacatgctcagaacacctaaagttgagcaaaatcatctaacagaaagcctgttttataataaaatgttgaatatctcatgtaatttattgcatactgtactaaaagtgaaaaagaatggttstawgagtacttaaagtactatttctactgaatgtcacttttgtaccattgtaaagtcgaaaaatcataagtcaaaccatcttaagttgggaactgtctgtattctgggaacttgggctatagcagtaaaaaaggcaaagtcccagctctagtggagcttacactctggtgaaaaggcagacaagcaatgatgaaacaagacaattttctattgtgattagcactatgaaggaaatacatgggtaatgtgatag

SEQ ID NO: 2472 - DNA, 1839 bp, Homo sapiens
ggggcgctcccggccgggatgagctcaccgcagtcgcgccggggctgagcgccgagcggggcggcggcggggcgggcggcggctcctcggcggctccgcggcgcccgggccgcgcgccgccatgctgggcctggacgcgtgcgagctgggggcgcagctgctggagctgctccggctggcgctgtgcgcccgagtcctcctggctgacaaggagggtgggccgccggcagtggacgaggtgttggatgaggctgtgcccgagtaccgggcgccggggaggaagagcctcttggagatccggcagctggacccggacgacaggagcctggccaagtacaagcgggtgctgctggggcccctgccaccggccgtggacccaagcctgcccaatgtgcaggtgaccaggctgacactcctgtcggaacaggctccggggcccgtcgtcatggatctcacaggggacctggctgttctgaaggaccaggtgtttgtcctgaaggaaggtgttgattacagagtgaagatctccttcaaggtccacagggagattgtcagcggcctcaagtgtctgcaccacacctaccgccggggcctgcgcgtggacaagaccgtctacatggtgggcagctatggcccgagcgcccaggagtatgagtttgtgactccggtggaggaagcgccgaggggtgcgctggtgcggggcccctatctggtggtgtccctcttcaccgacgatgacaggacgcaccacctgtcctgggagtggggtctctgcatctgccaggactggaaggactgaacccccagtccgtgtctcccctacctccctcagttgttgcacagggacccccaagcatccccagcaccccccgtgagtgaccagaccctcccctgctgcccctgctgcccctgctgcccctgctctgtcccgggaccccctgggcctggcgctgtcccctgagctgtcccattaaacayggccctgtctcggtgccctgkgtgtcgtctcttwctgcctcccctcccctgggggccgggggcggccgcatgggccttgtctttgctgggactgggcctgtgtgccacgtggcagctgctgcttggcttctggcccccttatctgccccygccccacgcgccctggcagcaccatgagccgccagcttctgcctgtactgctgctgctgctgctcagggcttcgtgcccatggggtcaggaacagggagcgaggagcccctcggaggagcctccagaggaggaaatccccaaggaggatgggatcttggtgctgagccgccacaccctgggcctggccctgcgggagcaccctgccctgctggtggaattctgtgagtgctggggccagtggggctggggaccggcgggggaccggcagagcccacctgggggccccaccctttgccggcaaatgcagggcatgtgcccaagaggggcctccccgcaggcacttgcccccactgtgcccaggagctctctaggaggggcctgggggtctggttggggcaggcaggagcagtgtggtagtactgggggtacccacaggacttgagaacacctgtgcctccctgctcggccagcggccacggtgccagagtcaccaccttgccggccactcctccagctgccaggggcatcccacagactctgcagaggctcgggcagtatccaggctttgggggcccatggaggtccctgacgtgtgtgccctgtggtcttttcgcaacccttgacacacataggaactgttcttgcctaggaggccttcacaggcagccacatgggcccgggagccccagccatacaaggcacgaaaggga

SEQ ID NO: 2473 - DNA, 1675 bp, Homo sapiens
  misc_feature (1)...(1675): n = A,T,C or G
atgagccgccagcttctgcctgtactgctgctgctgctgctcagggcttcgtgcccatggggtcaggaacagggagcgaggagcccctcggaggagcctccagaggaggaaatccccaaggaggatgggatcttggtgctgagccgccacaccctgggcctggccctgcgggagcaccctgccctgctggtggaattctatgccccgtggtgtgggcactgccaggccctggcccccgagtacagcaaggcagctgccgtgctcgcggccgagtcaatggtggtcacgctggccaaggtggatgggcccgcgcagcgcgagctggctgaggagtttggtgtgacggagtaccctacgctcaagttcttccgcaatgggaaccgcacgcacccsgaggagtacacaggaccacrggacgctgagggcattgccgagtggctgcgacggcgggtggggcccagtgccatgcggctggaggaygaggcggccgcccaggcgctgatcggtggccgggacctagtggtcattggcttcttccaggacctgcaggacraggacgtggccaccttcttggccttggcccaggacgccctggacatgacctttggcctcacagaccggccgcggctctttcagcagtttggcctcaccaaggacactgtggttctcttcaagaagtttgatgaggggcgggcagacttccccgtggacgaggagcttggcctggacctgggggatctgtcgcgcttcctggtcacacacagcatgcgcctggtcacggagttcaacagccagacgtctgccaagatcttcgcggccaggatcctcaaccacctgctgctgtttgtcaaccagaygctggctgcgcaccgggagctcctagcgggctttggggaggcagctccccgcttccgggggcaggtgctgttcgtggtggtggacgtggcggccgacaatgagcacgtgctgcagtactttggactcaaggctgaggcagcccccactctgcgcttggtcaaccttgaaaccactaagaagtatgcgcctgtggatgggggccctgtcaccgcagcgtccatcactgctttctgccatgcagtcctcaacggccaagtcaagccctatctcctgagccaggagataccccctgattgggatcagcngccagttaagaccctcgtgggcaagaattttgagcaggtggcttttgacgaaaccaagaatgtgtttgtcaagttctatgccccgtggtgcacccactgcaaggagatggcccctgcctgggaggcattggctgagaagtaccaagaccacgaggacatcatcattgctgagctggatgccacrgccaacgagctggatgccttcgctgtgcacggcttccctactctcaagtacttcccagcagggccaggtcggaaggtgattgaatacaaaagcaccagggacctggagactttctccaagttcctggacaacgggggcgtgctgcccacggaggagyccccggaggagccagcagccccgttcccggagccaccggccaactccactatggggtccaaggaggaactgtagctgcccccgtgtcacccccgccatcactgctggacaggagccacccccttgggtaccagagggagctgtgcattgtgaataaagagtgagcttggtt

SEQ ID NO: 2474 - DNA, 1374 bp, Homo sapiens
attggagggggctcagaccagggcttctagacctccttttggtccgtgaatttatttttgagacagagtcttgctctattgctcaggctggagtgcagcggtgcagtcacagctcactgcagcctcaatctcctgggctcacgcgatcctcctgcctcagcctcccgagtgggccttcctccgtgggaaagcgttaaaacgatagttaacggttgcgtcggtgtaaagacgaatgcaattcgagaaggattcattattattttgttttttcttctgatttttaacagaaattggcgttgaacatttccccccgtcccctccagaggaggacggctggggcggagctcagcgctgaccctgggtctggaagcgacaggccttgaaactccacagcagcacaggccccgtctcctggctcggacagaaccctgctaccttccctcttcaatcttcaggcccctttttgtccgtgtttccagggctcacctggagggccctcctggacccgggagcggaccctggtggcggtgaagcccgatggcgtscaacggcggctcgttggggacgtgatccagcgctttgagaggcggggcttcacgctggtggggatgaagatgctgcaggcaccagagagcgtccttgccgagcactaccaggacctgcggaggaagcccttctaccctgccctcatccgctacatgagctctgggcctgtggtggccatggtctgggaagggtacaatgtcgtccgcgcctcragggccatgattggacacaccgactcggctgaggctgccccaggaaccataaggggtgacttcagcgtccacatcagcaggaatgtcatccacgccagcgactccgtggagggggcccagcgggagatccagctgtggttccagagcagtgagctggtgagctgggcagaygggggccagcacagcagcatccacccagcctgaggctcaagctgcccttaccaccccatcccccacgcaggaccaactacctccgtcagcaagaacccaagcccacatccaaacctgcctgtcccaaaccacttacttccctgttcacctctgccccaccccagccyagaggagtttgagccaccaacttcagtgcctttctgtaccccaagccagcacaagattggaccaatcctttttgcaccaaagtgccggacaacctttgtggtgggggggggtcttcacattatcataacctctcctctaaaggggaggcattaaaattcactgtgcccagcacatgggtggtacactaattatgacttcccccagctctgaggtagaaatgacgcctttatgcaagttgtaaggagttgaacagtaaagaggaagttttgcacaccca

SEQ ID NO: 2475 - DNA, 1261 bp, Homo sapiens
tcaggccccaagtccccggccccgccgctgcccggcccccccagctgccacctcacaggacgatccatgtcccagggctccctccatcggctctgaaaagtgagccgccgcctgcaatgcccgcaccagccgcagcagagccccaggctacacaaggcgccctgcaaactgggttttgggggaacaaaccaaccagggggtcttcctcccgtgggcttcagccgcctgctggggttaacttttcctcctggcctggcggagcccctttggctctgtccagattctgtgggacatacagggtctgggctcctctggaaaccagggacccgatgccggagggtagcttggctctggagcagcctgggactrtaggaaggagggccctcctggacccgggagcggaccctggtggcggtgaagcccgatggcgtscaacggcggctcgttggggacgtgatccagcgctttgagaggcggggcttcacgctggtggggatgaagatgctgcaggcaccagagagcgtccttgccgagcactaccaggacctgcggaggaagcccttctaccctgccctcatccgctacatgagctctgggcctgtggtggccatggtctgggaagggtacaatgtcgtccgcgcctcragggccatgattggacacaccgactcggctgaggctgccccaggaaccataaggggtgacttcagcgtccacatcagcaggaatgtcatccacgccagcgactccgtggagggggcccagcgggagatccagctgtggttccagagcagtgagctggtgagctgggcagaygggggccagcacagcagcatccacccagcctgaggctcaagctgcccttaccaccccatcccccacgcaggaccaactacctccgtcagcaagaacccaagcccacatccaaacctgcctgtcccaaaccacttacttccctgttcacctctgccccaccccagccyagaggagtttgagccaccaacttcagtgcctttctgtaccccaagccagcacaagattggaccaatcctttttgcaccaaagtgccggacaacctttgtggtgggggggggtcttcacattatcataacctctcctctaaaggggaggcattaaaattcactgtgcccagcacatgggtggtacactaattatgacttcccccagctctgaggtagaaatgacgcctttatgcaagttgtaaggagttgaacagtaaagaggaagttttgcacaccca

SEQ ID NO: 2476 - DNA, 1196 bp, Homo sapiens
attggagggggctcagaccagggcttctagacctccttttggtccgtgaatttatttttgagacagagtcttgctctattgctcaggctggagtgcagcggtgcagtcacagctcactgcagcctcaatctcctgggctcacgcgatcctcctgcctcagcctcccgagtgggccttcctccgtgggaaagcgttaaaacgatagttaacggttgcgtcggtgtaaagacgaatgcaattcgagaaggattcattattattttgttttttcttctgatttttaacagaaattggcgttgaacatttcccccgagggccctcctggacccgggagcggaccctggtggcggtgaagcccgatggcgtscaacggcggctcgttggggacgtgatccagcgctttgagaggcggggcttcacgctggtggggatgaagatgctgcaggcaccagagagcgtccttgccgagcactaccaggacctgcggaggaagcccttctaccctgccctcatccgctacatgagctctgggcctgtggtggccatggtctgggaagggtacaatgtcgtccgcgcctcragggccatgattggacacaccgactcggctgaggctgccccaggaaccataaggggtgacttcagcgtccacatcagcaggaatgtcatccacgccagcgactccgtggagggggcccagcgggagatccagctgtggttccagagcagtgagctggtgagctgggcagaygggggccagcacagcagcatccacccagcctgaggctcaagctgcccttaccaccccatcccccacgcaggaccaactacctccgtcagcaagaacccaagcccacatccaaacctgcctgtcccaaaccacttacttccctgttcacctctgccccaccccagccyagaggagtttgagccaccaacttcagtgcctttctgtaccccaagccagcacaagattggaccaatcctttttgcaccaaagtgccggacaacctttgtggtgggggggggtcttcacattatcataacctctcctctaaaggggaggcattaaaattcactgtgcccagcacatgggtggtacactaattatgacttcccccagctctgaggtagaaatgacgcctttatgcaagttgtaaggagttgaacagtaaagaggaagttttgcacaccca

SEQ ID NO: 2477 - DNA, 1000 bp, Homo sapiens
acagcggcccgcgggccgggcgtcatgggcggcctcttctggcgctccgcgctgcgggggctgcgctgcggcccgcgggccccgggcccgagcctgctagtgcgccacggctcgggagggccctcctggacccgggagcggaccctggtggcggtgaagcccgatggcgtscaacggcggctcgttggggacgtgatccagcgctttgagaggcggggcttcacgctggtggggatgaagatgctgcaggcaccagagagcgtccttgccgagcactaccaggacctgcggaggaagcccttctaccctgccctcatccgctacatgagctctgggcctgtggtggccatggtctgggaagggtacaatgtcgtccgcgcctcragggccatgattggacacaccgactcggctgaggctgccccaggaaccataaggggtgacttcagcgtccacatcagcaggaatgtcatccacgccagcgactccgtggagggggcccagcgggagatccagctgtggttccagagcagtgagctggtgagctgggcagaygggggccagcacagcagcatccacccagcctgaggctcaagctgcccttaccaccccatcccccacgcaggaccaactacctccgtcagcaagaacccaagcccacatccaaacctgcctgtcccaaaccacttacttccctgttcacctctgccccaccccagccyagaggagtttgagccaccaacttcagtgcctttctgtaccccaagccagcacaagattggaccaatcctttttgcaccaaagtgccggacaacctttgtggtgggggggggtcttcacattatcataacctctcctctaaaggggaggcattaaaattcactgtgcccagcacatgggtggtacactaattatgacttcccccagctctgaggtagaaatgacgcctttatgcaagttgtaaggagttgaacagtaaagaggaagttttgcacaccca

SEQ ID NO: 2478 - DNA, 5896 bp, Homo sapiens
atgctgggagatgcagtccctttttctaaagactggggcggccgtgaggtcatcggtggtcgccgggagccgccagcacgtggcggcgaggaaggggyggtgtgctcctgttgtctgcacctgagagggggcaggagctctcggcgcttgcgcctcccgccgcggtgccctcccgacatgccggaggaggcggscttcccgccggccaagagattccggccaggctctggacctccgagccgcgctgggtccttccctcccgggaggcaagtggtgatgctgctgactgcgggcagcggcggcagaggaggaggaggaggccggaggcagcagccgcccctggcccagccctcggccagtccctaccctgaagctgtggagctgcagcgccggagtctgcccatcttccaagcgcgggggcaactgttggcccagctccgaaacctggacaacgcggtcctcatcggggaaactggctctgggaagacaactcagatccctcagtacctgtatgaaggagggatcagccgccagggcatcattgctgtgacccagcctcgtcgagtagctgccatctctcttgctactagagtctcagatgagaagagaactgaacttgggaagctggttggctatacagtgcgctttgatgatgtcacctcagaagacaccaggatcaagtttctgacagatggcatgcttctgcgtgaagcaatttcagactctttgcttcggaaatacagctgtgtcattttggatgaagctcacgaacggactatccacacagatgtgctctttggagtggtgaaagctgcacagaagaggagaaaggaactcgggaaacttcctctgaaagtgattgtgatgtcagctacgatggatgtggacctgttctctcagtatttcaatggcgccccsgtcctctacctagagggtcggcagcatccgatccaggtgttttacaccaaacagcctcagaatgattacctgcacgccgcrcttgtctccgtcttccagatccaccaggaagccccttcttcacaggacatcctggtgttcctcactgggcaggaggagatcgaagccatgagcaagacgtgccgagacattgcaaagcacctcccagacggctgccctgcgatgctggtccttcctctgtacgcctccctgccctatgcacagcagctccgagtcttccaaggggccccaaagggctatcgcaaagtgatcatttcaaccaacatcgctgaaacctccataaccattacaggaataaaatatgtagttgacacgggcatggttaaagcaaagaagtataaccctgacagtggtcttgaggtgttagcagtgcagcgggtatcgaagacgcaggcttggcagcgcacagggagggctggcagagaggacagtggcatctgctaccggctctacacggaggacgagtttgagaagtttgataagatgaccgtgccagagatccagaggtgtaacctggccagtgtgatgcttcagcttctagcaatgaaagtcccaaatgtgctcacctttgacttcatgtcraagccatctccagatcacattcaggcggccattgcccaactggacctgttaggtgctcttgaasataaggatgaccagcttaccctgactccaatgggaagaaagatggcagcatttcctttagaacccaaatttgccaaaaccatcctcatgtcccccaaattccactgtacagaggagatcctgaccattgtctccctgctgtctgtggacagcgtcctccacaaccctccttcccggcgagaggaagtgcaaggggtccgcaagaagttcatatccagcgagggggatcacatgaccctgctcaatatctatcggaccttcaaaaacctaggcggaaataaggattggtgcaaagagaattttgtcaacagcaagaatatgacgctggtagcagaagtcagagcacagctgagggacatctgcttaaagatgtcaatgccaatcgcatcatcccgaggagacgtggagagtgtccgccgctgcctggctcacagcctcttcatgagcaccgccgagcttcagccagatggcacctatgccaccacggacacccaccagccagtggccatccacccgtcgtctgtcctcttccactgcaagccggcctgcgtcgtgtacactgagctgctctacaccaacaagtgctacatgcgggacctctgcgtcatagatgcacagtggctgtaygaggctgcccctgagtactttaggaggaagctgagaaccgccagaaactgagccrccccaggatgccgccagaatcactggtccctgggagcttggactacagttgtccttacagcaggcttccaggttggcgcttagagaagccttggaatcagctgaaggtgcctgacttccaggagcgtgaaagcatctttgctcaactcctgggactgaaccatatagacatggacatatcatttgtacctggaaacctcaaaattatgcttttggttcttactgggtgactttgacttaatttaacacctgagcctcagttttctcatctgccaaatgggagtaataataataatccttataaaattgggttcataaagtttagagaaaaggaatggaaagtacccagaactatgcctggagcacgcacgacacacgtacagtgagttgggagccgttaggctgaatgttactgcttgccatatgatgtgaagtacrgcaatatcccaagttcttgtgactgagggagattttctggaagggccacaggaggttgcggagcttggatgttgcccttagttcttgtttaatgtctctctgaatgcagttttaaaatagaaaacaaaactgacttctgtagaagtttccagagggaggtgctgttatctcgtacctcctgggatggcgatccctactgaacgcttgtgtctcagggtggaccactctgtgtctgtctccaagcagagaccagtaaaggagcctcctggtcctcagtgcgtgaccctgtcagtgctttcaggagacatgtaagcttcctgggtgaaggttgatttgtaccttctgaatcctgtcacgtgtagacatgggaaactgacctatcagtgttttgtgtgtgtaggtgactcccacatacacagttgccatttttctctctaactgggcaccagtgaacatgcgggcatgaggagtgactgtgtaccatttcagctgtttcttttcgggcagtcccctggtcagagggggtgggggtgggggaggggagaggggtacctagaacccagagaacattggcttatgccagataccacaccacatctgggcttacattcttgtatcttttttggtgtgtgggcggggggggtggggggcagttcagtgaagtctagaagacctgctggacaaattctaaaagagctagagctgtaacacttattcttgcatcttattaattttctatgatattttttccttcttcgtagggacttgggacaatctggctttgctgctttctaactgctaggcacctctctctaaccctcattgtcagagggaattggaggatatccacagtctgttcctgttctgatattctgagcagagaaaaggcactaacggttcctcttagctatttaattatcagaagcaagtaatctttccccagataatattttgccctagaagaagccgtgatttagctcttttattgtgcttacttggtccaaatacatctgtggggtgttttgtcatttcttaatgaatgaatcatagttataaccaggggccaagctgcccaagaggctcttcagagatcatggatgctctctttctggaagctgtggcctgatggagcagccccattccagggtcccatctgtccggagttgtgtatgtcaagtccggctcagtctttatttccaacactagccgtggtcctgtgcagtcaagctctcagctagtgtttagggctgtctgtcagaaatggttatacgtgggcaaaagaagatctgacagctcctatataccttatcttactgaattcttaaactttgaaccagttcttccacttactgacttgttaccactgctgactttctgaaaagttttccagtttttkttttttgttttttgttttccagtaggggattagaatgtttagtcctacttagtaagaaaaatattgtatttttaatcattcatagtgctggtaaaaaaaaaaaaaaaaaaaaaaaaattggggggtggccgggcgcagtggctcacacctgtaatcccagcactttgggaggccaaggcgggcggatcacctcatgcctgtaatcccagcattgggatgggaggctgaggtgggtggattgcttgagaagttcaagaccagcctggccaacatggcaaaaccccgtctctactaaaaatagaaaacttagctgggcatggtggcacacgcctgtaatcccagctaccggggaggctgaggcacaagaattgcttgaacttgggaggcagagtttgtagtgagccaagatcacgccactgcattccagcctggccgacagtgtgagacggtctcagaaaaaaaaagaaagaaagaaagaaaaagaaaaaacttggggtaatttatgtccagcttaagtacctgaacagtttccggaaatgtatattttttttctgagaggcaaaggatgtaaacagcttctaagtagctttaatgtttctgtacagaaataagtttatccctgtaacattgtggtagagttttaatacagtatttagttttttattgggctttttwaaaaagttaacttttaacatagctgctcagggattaaatcagattggaaaacccattctgactccacatactgctacaaagaaatacatcgttgtttatattgagctgcaggagatagtayactttaaacttaagaaagttaaatgtttcacaataacattgcaatataatcttcagctaytctctttccattggtaaaatctctgatggtgtgataactctttgccaacctacgaaacccatatctggaagaatcaccagctcccgtgagcagcttcatgtaaatagatgcactccaagcagattgcatgcctcaggtgtttgtcttctagtaatcatggagtgtgcaacacccagagtaacactacaaggggcaggactgcaaacagcaggtcctggctaaaaacccttaatgctgcattgctgccagttgtaaagagatgcctgaatggaggcaagttctgccctgtgggtgaaactgatgatgtactgtactgtcatatataaatccactaaatccagctaccaggaactgcctggaactgtggccatgcatttttttttttctttaaagaccagtgtgatagtaggccatgcatctgagatacgatattccttggtaactagagggagaaaaaaaaatcaagtaggttcaggcttatgttgtattttgagagtctggttttatttgaacagaaataactctacagaaagctcttgtaaataatgctcaaatttgcacccgacgatcaaatccattaaaaatgaatcttgtatatgatgtgtgtggcttgtttcttgcatctcttttccattattcatagaaaattatttagaaaatattaagtgttagtcttaccatgagttagtaagacataccttcttagtagcttatatgtcctgtatatcctgggaaggtaggattgttgatttttaataaatctgaaccctgtctttgggttatattaatttactggagaaactcacagaactcagggaaacacatttaccggtttcatacaaaagatatgaccaaggatacagataaggagatgagcagggtggggaatggggaagaagctc

SEQ ID NO: 2479 - DNA, 5295 bp, Homo sapiens
gggattacagacgtgagccaccgtgcccggtgaaactccatctcaaaaaaaaaaaaagaaggaaaggaaaggaaacagacctgtgtgctctagcagggtgttttcctctgcctgttctgctcagagccttggaagaaagtaaactgtgatgggggtggcacaggcctcaatcatctgcttttggggctcgagagggacacggaaaggccttcccactatttgtttctggtcctcctcttcgttctcttatgcaggtgattgtgatgtcagctacgatggatgtggacctgttctctcagtatttcaatggcgccccsgtcctctacctagagggtcggcagcatccgatccaggtgttttacaccaaacagcctcagaatgattacctgcacgccgcrcttgtctccgtcttccagatccaccaggaagccccttcttcacaggacatcctggtgttcctcactgggcaggaggagatcgaagccatgagcaagacgtgccgagacattgcaaagcacctcccagacggctgccctgcgatgctggtccttcctctgtacgcctccctgccctatgcacagcagctccgagtcttccaaggggccccaaagggctatcgcaaagtgatcatttcaaccaacatcgctgaaacctccataaccattacaggaataaaatatgtagttgacacgggcatggttaaagcaaagaagtataaccctgacagtggtcttgaggtgttagcagtgcagcgggtatcgaagacgcaggcttggcagcgcacagggagggctggcagagaggacagtggcatctgctaccggctctacacggaggacgagtttgagaagtttgataagatgaccgtgccagagatccagaggtgtaacctggccagtgtgatgcttcagcttctagcaatgaaagtcccaaatgtgctcacctttgacttcatgtcraagccatctccagatcacattcaggcggccattgcccaactggacctgttaggtgctcttgaasataaggatgaccagcttaccctgactccaatgggaagaaagatggcagcatttcctttagaacccaaatttgccaaaaccatcctcatgtcccccaaattccactgtacagaggagatcctgaccattgtctccctgctgtctgtggacagcgtcctccacaaccctccttcccggcgagaggaagtgcaaggggtccgcaagaagttcatatccagcgagggggatcacatgaccctgctcaatatctatcggaccttcaaaaacctaggcggaaataaggattggtgcaaagagaattttgtcaacagcaagaatatgacgctggtagcagaagtcagagcacagctgagggacatctgcttaaagatgtcaatgccaatcgcatcatcccgaggagacgtggagagtgtccgccgctgcctggctcacagcctcttcatgagcaccgccgagcttcagccagatggcacctatgccaccacggacacccaccagccagtggccatccacccgtcgtctgtcctcttccactgcaagccggcctgcgtcgtgtacactgagctgctctacaccaacaagtgctacatgcgggacctctgcgtcatagatgcacagtggctgtaygaggctgcccctgagtactttaggaggaagctgagaaccgccagaaactgagccrccccaggatgccgccagaatcactggtccctgggagcttggactacagttgtccttacagcaggcttccaggttggcgcttagagaagccttggaatcagctgaaggtgcctgacttccaggagcgtgaaagcatctttgctcaactcctgggactgaaccatatagacatggacatatcatttgtacctggaaacctcaaaattatgcttttggttcttactgggtgactttgacttaatttaacacctgagcctcagttttctcatctgccaaatgggagtaataataataatccttataaaattgggttcataaagtttagagaaaaggaatggaaagtacccagaactatgcctggagcacgcacgacacacgtacagtgagttgggagccgttaggctgaatgttactgcttgccatatgatgtgaagtacrgcaatatcccaagttcttgtgactgagggagattttctggaagggccacaggaggttgcggagcttggatgttgcccttagttcttgtttaatgtctctctgaatgcagttttaaaatagaaaacaaaactgacttctgtagaagtttccagagggaggtgctgttatctcgtacctcctgggatggcgatccctactgaacgcttgtgtctcagggtggaccactctgtgtctgtctccaagcagagaccagtaaaggagcctcctggtcctcagtgcgtgaccctgtcagtgctttcaggagacatgtaagcttcctgggtgaaggttgatttgtaccttctgaatcctgtcacgtgtagacatgggaaactgacctatcagtgttttgtgtgtgtaggtgactcccacatacacagttgccatttttctctctaactgggcaccagtgaacatgcgggcatgaggagtgactgtgtaccatttcagctgtttcttttcgggcagtcccctggtcagagggggtgggggtgggggaggggagaggggtacctagaacccagagaacattggcttatgccagataccacaccacatctgggcttacattcttgtatcttttttggtgtgtgggcggggggggtggggggcagttcagtgaagtctagaagacctgctggacaaattctaaaagagctagagctgtaacacttattcttgcatcttattaattttctatgatattttttccttcttcgtagggacttgggacaatctggctttgctgctttctaactgctaggcacctctctctaaccctcattgtcagagggaattggaggatatccacagtctgttcctgttctgatattctgagcagagaaaaggcactaacggttcctcttagctatttaattatcagaagcaagtaatctttccccagataatattttgccctagaagaagccgtgatttagctcttttattgtgcttacttggtccaaatacatctgtggggtgttttgtcatttcttaatgaatgaatcatagttataaccaggggccaagctgcccaagaggctcttcagagatcatggatgctctctttctggaagctgtggcctgatggagcagccccattccagggtcccatctgtccggagttgtgtatgtcaagtccggctcagtctttatttccaacactagccgtggtcctgtgcagtcaagctctcagctagtgtttagggctgtctgtcagaaatggttatacgtgggcaaaagaagatctgacagctcctatataccttatcttactgaattcttaaactttgaaccagttcttccacttactgacttgttaccactgctgactttctgaaaagttttccagtttttkttttttgttttttgttttccagtaggggattagaatgtttagtcctacttagtaagaaaaatattgtatttttaatcattcatagtgctggtaaaaaaaaaaaaaaaaaaaaaaaaattggggggtggccgggcgcagtggctcacacctgtaatcccagcactttgggaggccaaggcgggcggatcacctcatgcctgtaatcccagcattgggatgggaggctgaggtgggtggattgcttgagaagttcaagaccagcctggccaacatggcaaaaccccgtctctactaaaaatagaaaacttagctgggcatggtggcacacgcctgtaatcccagctaccggggaggctgaggcacaagaattgcttgaacttgggaggcagagtttgtagtgagccaagatcacgccactgcattccagcctggccgacagtgtgagacggtctcagaaaaaaaaagaaagaaagaaagaaaaagaaaaaacttggggtaatttatgtccagcttaagtacctgaacagtttccggaaatgtatattttttttctgagaggcaaaggatgtaaacagcttctaagtagctttaatgtttctgtacagaaataagtttatccctgtaacattgtggtagagttttaatacagtatttagttttttattgggctttttwaaaaagttaacttttaacatagctgctcagggattaaatcagattggaaaacccattctgactccacatactgctacaaagaaatacatcgttgtttatattgagctgcaggagatagtayactttaaacttaagaaagttaaatgtttcacaataacattgcaatataatcttcagctaytctctttccattggtaaaatctctgatggtgtgataactctttgccaacctacgaaacccatatctggaagaatcaccagctcccgtgagcagcttcatgtaaatagatgcactccaagcagattgcatgcctcaggtgtttgtcttctagtaatcatggagtgtgcaacacccagagtaacactacaaggggcaggactgcaaacagcaggtcctggctaaaaacccttaatgctgcattgctgccagttgtaaagagatgcctgaatggaggcaagttctgccctgtgggtgaaactgatgatgtactgtactgtcatatataaatccactaaatccagctaccaggaactgcctggaactgtggccatgcatttttttttttctttaaagaccagtgtgatagtaggccatgcatctgagatacgatattccttggtaactagagggagaaaaaaaaatcaagtaggttcaggcttatgttgtattttgagagtctggttttatttgaacagaaataactctacagaaagctcttgtaaataatgctcaaatttgcacccgacgatcaaatccattaaaaatgaatcttgtatatgatgtgtgtggcttgtttcttgcatctcttttccattattcatagaaaattatttagaaaatattaagtgttagtcttaccatgagttagtaagacataccttcttagtagcttatatgtcctgtatatcctgggaaggtaggattgttgatttttaataaatctgaaccctgtctttgggttatattaatttactggagaaactcacagaactcagggaaacacatttaccggtttcatacaaaagatatgaccaaggatacagataaggagatgagcagggtggggaatggggaagaagctc

SEQ ID NO: 2480 - DNA, 1985 bp, Homo sapiens
acgctgactggaggctggcggacaggcgacagcgacctgcggcagtctctgcaggaccagaggagcgagagcagcaagaaccacacccagcagcaatgtcagcggaagtggaaacctcagagggggtagacgagtcagaaaaaaagaactctggggccctagaaaaggagaaccaaatgagaatggctgacctctcrgagctcctgaaggaagggaccaaggaagcacacgaccgggcagaaaacacccagtttgtcaaggacttcttgaaaggcaacattaagaaggagctgtttaagctggccaccacggcactttacttcacatactcagccctcgaggaggaaatggagcgcaacaaggaccatccagcctttgcccctttgtacttccccatggagctrcaccggaaggaggcgctgaccaaggacatggagtatttctttggtgaaaactgggaggagcaggtgcagtgccccaaggctgcccagaagtacgtggagcggatccactacatagggcagaacgagccggagctactggtggcccatgcatacacccgctacatgggggatctctcggggggccaggtgctgaagaaggtggcccagcgagcactgaaactccccagcacaggggaagggacccarttctacctgtttgagaatgtggacaatgcccagcagttcaagcagctctaccgggccaggatgaacgccctggacctgaacatgaagaccaaagagaggatcgtggaggaggccaacaaggcttttgagtataacatgcagatattcaatgaactggaccaggccggctccacactggccagagagaccttggaggatgggttccctgtacacgatgggaaaggagayatgcgtaaatgccctttctacgctgctgaacaagacaaaggtgccctggagggcagcagctgtcccttccgaacagctatggctgtgctgaggaagcccagcctccagttcatcctggccgctggtgtggccctagctgctggactcttggcctggtactacatgtgaagcacccatcatgccacaccggtaccctcctcccgactgaccactggcctacccctttctccagccctgactaaactaccacctcaggtgactttttaaaaaatgctgggtttaagaaaggcaaccaataaaagccagatgctagagcctctgcctgacagcatcctctctatgggccatattccgcactgggcacaggccgtcaccctgggagcagtcggcacagtgcagcaagcctggcccccgacccagctctactccaggcttccacacttctgggccctaggctgcttccggtagtccctgtttttgcagtacatgggtgactatctcccctgttggaggtgagtggcctgtaagtccaagctgtgcgagggggccttgctggatgctgctgtacaacttctgggcctctcttggaccctgggagtgagggtgggtgtgggtggaagcctcagaggccttgggagctcatccctctcacccagaatccctctaaccccttgggtgcggtttgctcagccccagcttatctcctcctccrcgctgtgtaaatgctccagcactcaataaagtgggctttgcaagctacctccttccctgcctcctggcaccgggtgggtcaagccacctccccataggagagtccctcagaagcaagggcatgttatgtctgtgtggggagtggacatcgtccatcatggctcccagcagccacctcctgctctgggtctactctccagcacctctagtctccaaagcaaagtcactctaaccgtcttgcaaagatctttaaagtgtatccagcactgctattttttagctcagaaataccttagaggtttcctacttaaaaggtttttttaaaawatatatatatatttaaaaataagggttttaaaaaagcacatatttgtatttaaacaattcattctctaa

SEQ ID NO: 2481 - DNA, 1426 bp, Homo sapiens
ccgccccaggcacgtgcacagtgagtttgtgtaaatccagttagaccaaaatgagcgaggtggagagcctcttaaccggatgctacgggtgatgactgggaggaggagaaaaattacctctttatcttgcatgaacatcttaattttcaggaccagaggagcgagagcagcaagaaccacacccagcagcaatgtcagcggaagtggaaacctcagagggggtagacgagtcagaaaaaaagaactctggggccctagaaaaggagaaccaaatgagaatggctgacctctcrgagctcctgaaggaagggaccaaggaagcacacgaccgggcagaaaacacccagtttgtcaaggacttcttgaaaggcaacattaagaaggagctgtttaagctggccaccacggcactttacttcacatactcagccctcgaggaggaaatggagcgcaacaaggaccatccagcctttgcccctttgtacttccccatggagctrcaccggaaggaggcgctgaccaaggacatggagtatttctttggtgaaaactgggaggagcaggtgcagtgccccaaggctgcccagaagtacgtggagcggatccactacatagggcagaacgagccggagctactggtggcccatgcatacacccgctacatgggggatctctcggggggccaggtgctgaagaaggtggcccagcgagcactgaaactccccagcacaggggaagggacccarttctacctgtttgagaatgtggacaatgcccagcagttcaagcagctctaccgggccaggatgaacgccctggacctgaacatgaagaccaaagagaggatcgtggaggaggccaacaaggcttttgagtataacatgcagatattcaatgaactggaccaggccggctccacactggccagagagaccttggaggatgggttccctgtacacgatgggaaaggagayatgcgtaaatgccctttctacgctgctgaacaagacaaaggtgccctggagggcagcagctgtcccttccgaacagctatggctgtgctgaggaagcccagcctccagttcatcctggccgctggtgtggccctagctgctggactcttggcctggtactacatgtgaagcacccatcatgccacaccggtaccctcctcccgactgaccactggcctacccctttctccagccctgactaaactaccacctcaggccgtcaccctgggagcagtcggcacagtgcagcaagcctggcccccgacccagctctactccaggcttccacacttctgggccctaggctgcttccggtagtccctgtttttgcagtacatgggtgactatctcccctgttggaggtgagtggcctgtaagtccaagctgtgcgagggggccttgctggatgctgc

SEQ ID NO: 2482 - DNA, 1931 bp, Homo sapiens
gaccagaggagcgagagcagcaagaaccacacccagcagcaatgtcagcggaagtggaaacctcagagggggtagacgagtcagaaaaaaagaactctggggccctagaaaaggagaaccaaatgagaatggctgacctctcrgagctcctgaaggaagggaccaaggaagcacacgaccgggcagaaaacacccagtttgtcaaggacttcttgaaaggcaacattaagaaggagctgtttaagctggccaccacggcactttacttcacatactcagccctcgaggaggaaatggagcgcaacaaggaccatccagcctttgcccctttgtacttccccatggagctrcaccggaaggaggcgctgaccaaggacatggagtatttctttggtgaaaactgggaggagcaggtgcagtgccccaaggctgcccagaagtacgtggagcggatccactacatagggcagaacgagccggagctactggtggcccatgcatacacccgctacatgggggatctctcggggggccaggtgctgaagaaggtggcccagcgagcactgaaactccccagcacaggggaagggacccarttctacctgtttgagaatgtggacaatgcccagcagttcaagcagctctaccgggccaggatgaacgccctggacctgaacatgaagaccaaagagaggatcgtggaggaggccaacaaggcttttgagtataacatgcagatattcaatgaactggaccaggccggctccacactggccagagagaccttggaggatgggttccctgtacacgatgggaaaggagayatgcgtaaatgccctttctacgctgctgaacaagacaaaggtgccctggagggcagcagctgtcccttccgaacagctatggctgtgctgaggaagcccagcctccagttcatcctggccgctggtgtggccctagctgctggactcttggcctggtactacatgtgaagcacccatcatgccacaccggtaccctcctcccgactgaccactggcctacccctttctccagccctgactaaactaccacctcaggtgactttttaaaaaatgctgggtttaagaaaggcaaccaataaaagccagatgctagagcctctgcctgacagcatcctctctatgggccatattccgcactgggcacaggccgtcaccctgggagcagtcggcacagtgcagcaagcctggcccccgacccagctctactccaggcttccacacttctgggccctaggctgcttccggtagtccctgtttttgcagtacatgggtgactatctcccctgttggaggtgagtggcctgtaagtccaagctgtgcgagggggccttgctggatgctgctgtacaacttctgggcctctcttggaccctgggagtgagggtgggtgtgggtggaagcctcagaggccttgggagctcatccctctcacccagaatccctctaaccccttgggtgcggtttgctcagccccagcttatctcctcctccrcgctgtgtaaatgctccagcactcaataaagtgggctttgcaagctacctccttccctgcctcctggcaccgggtgggtcaagccacctccccataggagagtccctcagaagcaagggcatgttatgtctgtgtggggagtggacatcgtccatcatggctcccagcagccacctcctgctctgggtctactctccagcacctctagtctccaaagcaaagtcactctaaccgtcttgcaaagatctttaaagtgtatccagcactgctattttttagctcagaaataccttagaggtttcctacttaaaaggtttttttaaaawatatatatatatttaaaaataagggttttaaaaaagcacatatttgtatttaaacaattcattctctaa

SEQ ID NO: 2483 - DNA, 2081 bp, Homo sapiens
ccgccccaggcacgtgcacagtgagtttgtgtaaatccagttagaccaaaatgagcgaggtggagagcctcttaaccggatgctacgggtgatgactgggaggaggagaaaaattacctctttatcttgcatgaacatcttaattttcaggaccagaggagcgagagcagcaagaaccacacccagcagcaatgtcagcggaagtggaaacctcagagggggtagacgagtcagaaaaaaagaactctggggccctagaaaaggagaaccaaatgagaatggctgacctctcrgagctcctgaaggaagggaccaaggaagcacacgaccgggcagaaaacacccagtttgtcaaggacttcttgaaaggcaacattaagaaggagctgtttaagctggccaccacggcactttacttcacatactcagccctcgaggaggaaatggagcgcaacaaggaccatccagcctttgcccctttgtacttccccatggagctrcaccggaaggaggcgctgaccaaggacatggagtatttctttggtgaaaactgggaggagcaggtgcagtgccccaaggctgcccagaagtacgtggagcggatccactacatagggcagaacgagccggagctactggtggcccatgcatacacccgctacatgggggatctctcggggggccaggtgctgaagaaggtggcccagcgagcactgaaactccccagcacaggggaagggacccarttctacctgtttgagaatgtggacaatgcccagcagttcaagcagctctaccgggccaggatgaacgccctggacctgaacatgaagaccaaagagaggatcgtggaggaggccaacaaggcttttgagtataacatgcagatattcaatgaactggaccaggccggctccacactggccagagagaccttggaggatgggttccctgtacacgatgggaaaggagayatgcgtaaatgccctttctacgctgctgaacaagacaaaggtgccctggagggcagcagctgtcccttccgaacagctatggctgtgctgaggaagcccagcctccagttcatcctggccgctggtgtggccctagctgctggactcttggcctggtactacatgtgaagcacccatcatgccacaccggtaccctcctcccgactgaccactggcctacccctttctccagccctgactaaactaccacctcaggtgactttttaaaaaatgctgggtttaagaaaggcaaccaataaaagccagatgctagagcctctgcctgacagcatcctctctatgggccatattccgcactgggcacaggccgtcaccctgggagcagtcggcacagtgcagcaagcctggcccccgacccagctctactccaggcttccacacttctgggccctaggctgcttccggtagtccctgtttttgcagtacatgggtgactatctcccctgttggaggtgagtggcctgtaagtccaagctgtgcgagggggccttgctggatgctgctgtacaacttctgggcctctcttggaccctgggagtgagggtgggtgtgggtggaagcctcagaggccttgggagctcatccctctcacccagaatccctctaaccccttgggtgcggtttgctcagccccagcttatctcctcctccrcgctgtgtaaatgctccagcactcaataaagtgggctttgcaagctacctccttccctgcctcctggcaccgggtgggtcaagccacctccccataggagagtccctcagaagcaagggcatgttatgtctgtgtggggagtggacatcgtccatcatggctcccagcagccacctcctgctctgggtctactctccagcacctctagtctccaaagcaaagtcactctaaccgtcttgcaaagatctttaaagtgtatccagcactgctattttttagctcagaaataccttagaggtttcctacttaaaaggtttttttaaaawatatatatatatttaaaaataagggttttaaaaaagcacatatttgtatttaaacaattcattctctaa

SEQ ID NO: 2484 - DNA, 2115 bp, Homo sapiens
cagcgcgaggaagcgcggtcacgtgactgctgcgggccagccaagatggcggcctcatgcttggtcctgctggcgctgtgtctgctgctgccgctgctgctgctgggaggatggaagcgctggcgccgggggcgggcggcccggcatgtagtagcggtggtgctgggcgacgtgggccgcagcccccgtatgcagtaccacgcgctgtcgttggccatgcacggcttctcggtgaccctcctggggttctgcaactccaaaccccatgatgagctcttgcagaacaacagaattcagattgtggggttgacagaacttcagagtcttgcagttgggccccgagttttccagtacggagtcaaagttgtacttcaggctatgtacttgctgtggaagttgatgtggagggagccaggtgcctatatctttctccagaaccccccaggtctgcctagcattgctgtctgctggttcgtgggctgcctttgtggaagcaagctcgtcattgactggcacaactatggctactccatcatgggtctggtgcatggccccaaccatcccctcgttctgctggccaagtggtacgagaagttctttgggcgcctgtcccacctgaacctgtgtgttaccaatgctatgcgagaagacctggcggataactggcacatcagggctgtgaccgtctacgacaagcccgcatctttctttmaagasacacctctggacctgcagcaccggctcttcatgaagctgggcagcatrcactctccgttcagggcccgctcagaacctgaggacccagtcacggagcggtcggccttcacggagcgggatgctgggagcgggctggtgacgcgtctccgtgagcggccagccctgctsgtcagcagcacgagctggacagaggacgaagacttctccatcctgctggcagctttagaaaagtttgaacaactgactcttgatggacacaaccttccttctctcgtctgtgtgataacaggcaaagggcctctgagggagtattayagccgcctcatccaccagaagcayttccagcacatccaggtctgcaccccctggctggaggccgaggactaccccctgcttctagggtcggcggacctgggtgtctgtctgcacacgtcctccagtggcctggacctgcccatgaaggtggtggacatgttygggtgctgtttgcctgtgtgtgctgtgaacttcaagtgtttacatgagctggtgaaacatgaagaaaatggcctggtctttgaggactcagaggaactggcagctcagctgcagatgcttttctcaaactttcctgatcctgcgggcaagctaaaccagttccggaagaacctgcgggartcgcagcagctccgatgggatkagagctgggtgcagactgtgctccctttggttatggacacataactcctgggccagaggctataaaaccccaggacccctgctgtccttcccgcagcttcttcttrgagtctcagggcaaaycctttygagcagcacctcccagtggccagaagctgaaatgacagcagtrgtrcyrcctggtraawgaattggttctgtgacccgggaagctktggttggccttgatttcttctctggaggcttggaaacgcttcctctcttcttctgttcttcacgccccatgcccctgctagcgtattactgttctgtgacttccctgtgacctctgcagaactcctcatcctgcgtttggtctccaggtgtcccctttctgccgtgttcctaacattttgattcctgtcttgaaaaaagcacctgctgcaccgtaagcccagggatgtggcagctgcagtgggcttggctttgtgaggaactgagtgtgtccacgttgggggaacatcatacttgatacacacgtttttatttgcacaaagaaaatgctrtttttggagccagaattttcatgtctgatttatggtgattttcttaagaaccagaactgctggcagaaagggggcacccacacgcttagatagccgatgtcttattagagggcagtttgtggttcctgatttggaaattaacattctccaaacattccagtccaatgaaagtttt

SEQ ID NO: 2485 - DNA, 2019 bp, Homo sapiens
atggcggcctcatgcttggtcctgctggcgctgtgtctgctgctgccgctgctgctgctgggaggatggaagcgctggcgccgggggcgggcggcccggcatgtagtagcggtggtgctgggcgacgtgggccgcagcccccgtatgcagtaccacgcgctgtcgttggccatgcacggcttctcggtgaccctcctggggttctgcattgggccccgagttttccagtacggagtcaaagttgtacttcaggctatgtacttgctgtggaagttgatgtggagggagccaggtgcctatatctttctccagaaccccccaggtctgcctagcattgctgtctgctggttcgtgggctgcctttgtggaagcaagctcgtcattgactggcacaactatggctactccatcatgggtctggtgcatggccccaaccatcccctcgttctgctggccaagtggtacgagaagttctttgggcgcctgtcccacctgaacctgtgtgttaccaatgctatgcgagaagacctggcggataactggcacatcagggctgtgaccgtctacgacaagcccgcatctttctttmaagasacacctctggacctgcagcaccggctcttcatgaagctgggcagcatrcactctccgttcagggcccgctcagaacctgaggacccagtcacggagcggtcggccttcacggagcgggatgctgggagcgggctggtgacgcgtctccgtgagcggccagccctgctsgtcagcagcacgagctggacaggtctgcaggacccctggggcacytgggaggacgaagacttctccatcctgctggcagctttagaaaagtttgaacaactgactcttgatggacacaaccttccttctctcgtctgtgtgataacaggcaaagggcctctgagggagtattayagccgcctcatccaccagaagcayttccagcacatccaggtctgcaccccctggctggaggccgaggactaccccctgcttctagggtcggcggacctgggtgtctgtctgcacacgtcctccagtggcctggacctgcccatgaaggtggtggacatgttygggtgctgtttgcctgtgtgtgctgtgaacttcaagtgtttacatgagctggtgaaacatgaagaaaatggcctggtctttgaggactcagaggaactggcagctcagctgcagatgcttttctcaaactttcctgatcctgcgggcaagctaaaccagttccggaagaacctgcgggartcgcagcagctccgatgggatkagagctgggtgcagactgtgctccctttggttatggacacataactcctgggccagaggctataaaaccccaggacccctgctgtccttcccgcagcttcttcttrgagtctcagggcaaaycctttygagcagcacctcccagtggccagaagctgaaatgacagcagtrgtrcyrcctggtraawgaattggttctgtgacccgggaagctktggttggccttgatttcttctctggaggcttggaaacgcttcctctcttcttctgttcttcacgccccatgcccctgctagcgtattactgttctgtgacttccctgtgacctctgcagaactcctcatcctgcgtttggtctccaggtgtcccctttctgccgtgttcctaacattttgattcctgtcttgaaaaaagcacctgctgcaccgtaagcccagggatgtggcagctgcagtgggcttggctttgtgaggaactgagtgtgtccacgttgggggaacatcatacttgatacacacgtttttatttgcacaaagaaaatgctrtttttggagccagaattttcatgtctgatttatggtgattttcttaagaaccagaactgctggcagaaagggggcacccacacgcttagatagccgatgtcttattagagggcagtttgtggttcctgatttggaaattaacattctccaaacattccagtccaatgaaagtttt

SEQ ID NO: 2486 - DNA, 4005 bp, Homo sapiens
tcggctccgccgccgcgaaggacagcctttccgcgcgggactccggggcgccacgggggccatgtaagcagctatcttccagagggccacactgggcatggacacccttttccctgcctggaggagcacaggtgatagtgtaattttccagtcacgaaactgctaaggccatctcaggggcgtgtgcgccaggataggcaggcggcgtccgaggaccacatagccatgccttttggtctgaagctccgccggacacggcgctacaacgtcctgagcaagaactgctttgtcacacggattcgcctgctggacagcaatgttatcgagtgcacgctgtcggtggaaagcacagggcaagaatgcctggaggctgtggcccagaggctggagctgcgagagacgcactactttggcctttggtttctcagcaagagccagcaagcacgatgggtggagctggagaaacctctgaagaaacatctggacaaattcgctaatgagcctttgcttttctttggagtcatgttctatgtgccaaatgtgtcatggcttcagcaagaggccacaagatatcagtattacctgcaagtcaaaaaagatgtgcttgaagggcgattacgatgtacrttggaccaggtgattcggctagccggcctagctgtgcaagctgattttggagactataatcagtttgattctcaagatttcctcagagagtatgtgctatttcctatggatttggccctggaagaggctgttctggaggagctgacccagaaggtagcccaagaacacaaagcccacagtggaatcctgccagcagaagctgaactgatgtacatcaatgaagttgaacgtttggatggatttggacaggaaatcttccctgtaaaggacaatcatggaaactgtgtacaccttggcattttctttatggggattttcgtgaggaacagaattggaagacaagcggtaatatacaggtggaatgacatggggaatatcactcataacaagtcgaccattctagtggagctcatcaacaaagaagagactgccctctttcacacrgatgatatcgaaaatgccaagtatatttctcggttgtttgccacacgacacaagttttacaaacaaaacaaaatctgcactgaacagtcaaattctccaccccccatcagacgccagcccacctggagccgatcctctctgcccaggcagcagccgtacatcctgcctcccgttcacgtccagtgtggtgagcactactcggaaacgcacacctcgcaagacagcatttttcatgggaatgaagaagccttgtattgcaactctcacaacagcctggacttaaattatttaaatggcactgtcaccaatggcagcgtgtgtagcgttcacagcgtcaactccctcaactgctckcaaagtttcatccaggcctcccctgtatcctccaacctcagtatccctgggagtgacatcatgcgggccgactacatcccgagccaccggcacagcgcgatcatcgtgccctcgtacaggccaacccccgattatgagacagtcatgcgccagatgaagagggggatcctgcatacagacagccagagccagtctctgagaaacctcaacattatcaacacccatgcctacaaccagccagaggatctggtgtacagccaaccggagatgcgggagaggcacccctacactgtcccttatgggccacagggggtctacagcaacaaacttgtcagtccatctgaccagaggaacccaaagaataatgtggtaccaagcaagccgggggcaagcgccatctcgcacacggtgagcaccccagagctggccaacatgcagctgcagggcagccataactacagcacggcccacatgcttaagaactatctcttcaggccaccgcccccctacccacggccacgacctgccaccagcaccccagacctggccagccaccgccacaagtacgtcagcggcagcagcccggacctggtgacccggaaggtgcagctctcggtgaagaccttccaagaggacagctctccggtggttcatcagtctctccaggaggtgagcgagcccctcacggccaccaagcaccacggcactgtgaacaagcgccacagcctggaggtgatgaacagcatggtgcggggcatggaggccatgacgctcaagtcgctccacctccccatggctcgccgcaacacgctccgggagcagggaccgcccgaggaggggtcaggcagccacgaggtcccccagctccctcagtatcaccacaagaagaccttctctgatgccactatgctaatccacagcagcgagagtgaggaggaggaggaggaggctccagaatcggtgccccagatccccatgctccgggagaagatggagtacagtgcccagctgcaggcggccctggcccgcatccccaacaagcccccgcctgagtaccccggtccaaggaagagtgtgagcaatggggctctgaggcaggaccaagccagccttcctcccgccatggccagagccagggtgctgaggcatgggccagccaaggccatcagcatgtctcggactgacccgccggctgtcaacggggcctctctcggcccatccatctcggaacccgacctgactagtgtgaaggagcgggtcaaaaaagagcctgtgaaggagagacctgtgtctgaaatgttttccctggaagacagcattatagagagagagatgatgatcaggaatctagagaagcagaagatggcaggcctggaggcacagaagaggccgctgatgttggcagcattgaatgggctctcggtggctcgagtctcagggcgggaagagaatcgagttgatgccacccgggttcccatggacgagaggttcagaaccctgaagaagaaactagaagagggaatggtgttcacagaatatgagcaaattccaaagaaaaaggcgaatggcattttcagcacagcagctctgccagaaaacgccgagcgcagccgaatccgtgaagttgtcccctatgaggagaatcgagtagagctgataccaaccaaagaaaataacacaggatacattaatgcctcccacatcaaggtggtggttggcggggcagaatggcactacatagccacccaggggcccctgccacacacgtgccacgacttctggcagatggtgtgggagcagggagtgaatgtgattgccatggtcactgcagaggaggagggtggacgaaccaaaagccaccgatactggcccaaactaggttcaaagcacagctcagccacctatggcaagttcaaggtcaccacgaagtttcgaacggattctgtttgctatgcaaccacgggcttgaaggtcaagcaccttttgtctgggcaagaaaggacggtgtggcatttacaatatactgactggccagatcacggctgtccagargatgtccaaggatttttatcctacttggaggagatccagtcggtccgtcgccataccaacagcatgctggaaggcaccaagaaccggcacccgcccatcgtggtccactgtagtgctggggtgggaaggaccggcgtgctcattctttctgagctgatgatctactgcttggaacataacgaaaaggtggaagtgcccatgatgctgaggctcctcagggagcagaggatgttcatgatccagactatcgctcagtacaagtttgtctaccaagtcctcatccagttcctccaaaactccagactcatttaatcaccccaatccagctcctggaggarggacccagctccatcgcgctggaggagagtcacctccagacaacatctgctccccccacaggggtgcaggtggctggcagcaaacaggctctctgaagacagtagccaagattattcacacataccatgtattattttatatgagataatttatttttttcccctttggaataacttttgtgaattatta

SEQ ID NO: 2487 - DNA, 2084 bp, Homo sapiens
gctggagtgcagtggcgcaatctcggctcactgcaacctccgcctcccagattcaagtgattctcctgcctcagcctcccgagtagctggrattataggcacccaccaccacacccagctaatttttgtatttttagtagagacaggatttcaccatgttggccaggctggtcttgaactcctggtctcaagtgatctgccctcctcagcctcccaaagygctgggattacaggcgtgagccaccgcgcctggccaactctctcacattttaaaacactactttctgctacaaaagtggcgtgtacaatgggaaatgtcacaaataaataccccaggaagacactcaaaagcccctgtgatgcccccccagccctggtcctggggtgtcggcctygggtctccctcctggtgcggcatccttthaccactgcagttaactgggaggaaacgatccccatgcattgctctaaatcccgctggatctggttttgggggtgctgggctgctgcccaggagactggaaggggaggaaggtgtgtggcccctgagggcttccaaagcactctgtgctgtgaggatcccaccccgtgcgctcccagaaagtggccggtgtttttctgctccagcagggagcccaggtgaggttctctaggtaggtggaaaggtaggtggagcaggcttcaagagcagaacccagcagagcgccccggcttcctcccatcgccctcctactccctctcctcccctctcctcccctcccctcccatccttttgkaagcaaggaggggagaggcttccaccgaagttgggcccagctcaggtgtcctgagtggtgggaatctgtgcagggcccaggcgcatttcctgcccsggagcaggaatgctttacagatgttggagctgcctcaaggcatggccaggaggggccggagaagcagaaccagctgcataggggatgctgggctggtgcctgcacatggaacagtcattgattaaaatgtcacttgtaaggtgcctaaatcttcgggtcctcctccttggagagtcccaggtaagctgcgttccctgggctgattccaggctgggccaggcggggctgggctgcagacctctggggactgcctacccaaccccacaccaccaggctccctgctcctcctgaaggccttggccttcagtaaaatgcaaaaagttaaatgctctgggttttctctgataatagaagcaatgcctgtccattgtagaatgttgggaaaatagagaagagcaagagcaacaacaggcacggaactccacccctgccggtcagcctgcctgtgcgtgggagttaaaacaaaacgcttctgcaaacatttggttttttttgtttttccaaaattaagctccgattgtgcatatcacttgataatcgaaattattttttgaaaaataattttaatagctatgcagtactccatcctgtcaacatatggaatgaaatgatgatttctaaattcttactcttgtcacctgggctgcagttggaggcctggtgggggtccgtgcggcgactggctgggccgtccctgtccctcctcccagatgacagaggtgcctggtgtttggcaaactcacttagaaggagcaagaagcaactgggatggctcagaagcccatggtggaatagtctgttgtaaacgaagagacaagaggaggccgaggactggtttccccttctccttcccgctcccagccctcccctctttcccatcgagtctctggtctctgccttcaggcccatggatgggcaaagcatctttcgagagcttgcctgccaaccctcagagtcacatacacgaaggtctcctggagctcagaaggtcagrcacaaagtcactccttgaccctatttattgaaatatccgtttttttgagcacttttcccgtgtagactcaacagggtctccctctgttgcccaggctggagtgcagtggtgcgatcatggctcactgcagmcttgaactcctgagctcaagcaatcctgctgcctcagttctccgagtagctgggaccacatgtgtaagtcactaagcctggctaatt

SEQ ID NO: 2488 - DNA, 4776 bp, Homo sapiens
gtctttaggaggcacgcggacctccagtggccggctccggaggcttggtgactccagtggcccagccttgaaaagatcttttgaggtcgaggaggtcgagacacccaactccaccccaccccggagggtccagactcccctactccgagccactgtggccagctccacccagaaattccaggacctgggygtgaagaactcagaaccctcggcccgccatgtggactccctaagccaacgctcccccaaggcgtccctgcggagggtggagctctcgggccccaaggcggccgagccggtgtcccggcgcactgagctgtccattgacatctcgtccaagcaggtggagaacgccggggccatcggcccgtcccggttcgggctcaagagggccgaggtgttgggccacaagacgccagaacyggcccctcggaggacggagatcaccatcgtcaaaccccaggagtcagcccaccggaggatggagccccctgcctccaaggtccccgaggtgcccactgcccctgccaccgacgcagcccccaagagggtggagatccagatgcccaagcctgctgaggcgcccaccgcccccagcccagcccagaccttggagaattcagagcctgcccctgtgtctcagctgcagagcaggctggagcccaagccccagccccctgtggctgaggctacaccccggagccaggaggccactgaggcggctcccagctgcgttggcgacatggccgacacccccagagatgccgggctcaagcaggcgcctgcatcacggaacgagaaggccccggtggacttcggctacgtggggattgactccatcctggagcagatgcgccggaaggccatgaagcagggcttcgagttcaacatcatggtggtcgggcagagcggcttgggtaaatccaccttaatcaacaccctcttcaaatccaaaatcagccggaagtcggtgcagcccacctcagaggagcgcatccccaagaccatcgagatcaagtccatcacgcacgatattgaggagaaaggcgtccggatgaagctgacagtgattgacacaccagggttcggggaccacatcaacaacgagaactgctggcagcccatcatgaagttcatcaatgaccagtacgagaaatacctgcaggaggaggtcaacatcaaccgcaagaagcgcatcccggacacccgcgtccactgctgcctctacttcatccccgccaccggccactccctcaggcccctggacatcgagtttatgaaacgcctgagcaaggtggtcaacatcgtccctgtcatcgccaaggcggacacactcaccctggaggagagggtccacttcaaacagcggatcaccgcagacctgctgtccaacggcatcgacgtgtacccccagaaggaatttgatgaggactcggaggaccggctggtgaacgagaagttccgggagatgatcccatttgctgtggtgggcagtgaccacgagtaccaggtcaacggcaagaggatccttgggaggaagaccaagtggggtaccatcgaagttgaaaacaccacacactgtgagtttgcctacctgcgggaccttctcatcaggacgcacatgcagaacatcaaggacatcaccagcagcatccacttcgaggcgtaccgtgtgaagcgcctcaacgagggcagcagcgccatggccaacggcrtggaggagaaggagccagaagccccggagatgtagacgccrccctgcccacccccgggatcctgcccccaagtcatttccgtcccccccccaggccctcccaccaccccattttattttatatgattttctccatttgtcatcgttccccaccccttcgacatgctgccaggaaacaagggaaggggcctccctccgagtgagtcagtgatgaggccgcggcctccccgaggttgtggggaggctgcactggagccacaggcaggggtgagagcacccactgaattgacatgaccctctgtccccaggcctggctccccgagggctcagaagagcagcttcggtgtgcagatcatccgtcygtgtggggttctcagtgccggaggccttggggtgggggccaggcctcgcacktgcagaggagcccagtgggctgcacgctcccctccatccccatcggccctgtcccctggagtgtgtcagagcccaggggagaatgcagcccaccaggagcacctggaccccctgcccgccacatggtgtggccatcactcagcccctacccctgccctgctcctaagggtagaaaactccagggtcccctgccaccgactgcccagccactccaagccccctggcagctgcccctcctggagcagaaagtgcctttatctcagccatccgcagactgctyggccagatgcggggacaggctggaatgagggaggcgtcttcatctccctgccatccccctctcacgccacccccgcccccacygggctgcaggtgctgctgatgcgstgggatctgattgaggatraaaagraaggagagatgacccctaccccctcatcccccagttttgaaaaggtctaagcaagtgagtctggtggaggagctgagggagggagcyatggaaggtgccagaaggaaggttggcgggggcacgtgtgggccgtggcttgggctggtcagrgtggcgtgagctgccyggcgcctgccctgcccaagtgaccagggaagtgtgtgtgtgtccatgtgtatgcgtgtccgtctgtctgtctagtgtctrggtttggcccaagactgggctgtagttacattaatgcccagccagccacccctgccactcacccytcctggcccaggccttgctgactctctgagctggggaggtgggaggccaggcgagcctgactctgttgatctacccccaccgcgcctggccaactctctcacattttaaaacactactttctgctacaaaagtggcgtgtacaatgggaaatgtcacaaataaataccccaggaagacactcaaaagcccctgtgatgcccccccagccctggtcctggggtgtcggcctygggtctccctcctggtgcggcatccttthaccactgcagttaactgggaggaaacgatccccatgcattgctctaaatcccgctggatctggttttgggggtgctgggctgctgcccaggagactggaaggggaggaaggtgtgtggcccctgagggcttccaaagcactctgtgctgtgaggatcccaccccgtgcgctcccagaaagtggccggtgtttttctgctccagcagggagcccaggtgaggttctctaggtaggtggaaaggtaggtggagcaggcttcaagagcagaacccagcagagcgccccggcttcctcccatcgccctcctactccctctcctcccctctcctcccctcccctcccatccttttgkaagcaaggaggggagaggcttccaccgaagttgggcccagctcaggtgtcctgagtggtgggaatctgtgcagggcccaggcgcatttcctgcccsggagcaggaatgctttacagatgttggagctgcctcaaggcatggccaggaggggccggagaagcagaaccagctgcataggggatgctgggctggtgcctgcacatggaacagtcattgattaaaatgtcacttgtaaggtgcctaaatcttcgggtcctcctccttggagagtcccaggtaagctgcgttccctgggctgattccaggctgggccaggcggggctgggctgcagacctctggggactgcctacccaaccccacaccaccaggctccctgctcctcctgaaggccttggccttcagtaaaatgcaaaaagttaaatgctctgggttttctctgataatagaagcaatgcctgtccattgtagaatgttgggaaaatagagaagagcaagagcaacaacaggcacggaactccacccctgccggtcagcctgcctgtgcgtgggagttaaaacaaaacgcttctgcaaacatttggttttttttgtttttccaaaattaagctccgattgtgcatatcacttgataatcgaaattattttttgaaaaataattttaatagctatgcagtactccatcctgtcaacatatggaatgaaatgatgatttctaaattcttactcttgtcacctgggctgcagttggaggcctggtgggggtccgtgcggcgactggctgggccgtccctgtccctcctcccagatgacagaggtgcctggtgtttggcaaactcacttagaaggagcaagaagcaactgggatggctcagaagcccatggtggaatagtctgttgtaaacgaagagacaagaggaggccgaggactggtttccccttctccttcccgctcccagccctcccctctttcccatcgagtctctggtctctgccttcaggcccatggatgggcaaagcatctttcgagagcttgcctgccaaccctcagagtcacatacacgaaggtctcctggagctcagaaggtcagrcacaaagtcactccttgaccctatttattgaaatatccgtttttttgagcacttttcccgtgtagactcaacagggtctccctctgttgcccaggctggagtgcagtggtgcgatcatggctcactgcagmcttgaactcctgagctcaagcaatcctgctgcctcagttctccgagtagctgggaccacatgtgtaagtcactaagcctggctaattaaaaa

SEQ ID NO: 2489 - DNA, 5508 bp, Homo sapiens
tgacttctcagggttcctcctgggcaggtgctccggaaccttttctcagcacgctggcctggggcacggccgttcctcctgcccagccacgttggggtacagggtgaagaagggctggggccagcccaggacagaggaaggcgaggcaggcacgcaggaactgggctttttaaacccttaagcccaaggaaatcgtagcatcgcgggacagggaaaatgaaagactttggaagtcgtcaggaatttgactctgtgagttggtttccaagagtctaagttaagcatctccaagtggatattaaaaaggagcagcaagcctcggggcggcgggggctggaggaggtggagagaggaggctgccggaagccgcactcgggacctctgcagccaccgaccagaccgggcggccgggactctgggactctcgcaggcagacccggtggtctgccggactcctcggggcccacttcgggccctctctcctgcctcctatttttggatttctctcctttgctccctttttcctcccgttttgaagagacaatgctacttcagtttggagcacaaacatatgatcagcacatggaaatgtggtaattcggatgcattcgtgattgcaacagattgaagaaattagaccagacaaagagtgtttttagaggaggaggaggaggaggaggaggctgagagagggagggcgacgggggtgagaaaggggaggccgcctctgagcgggacgccgggactcccgccgctgctaaatatatccgtaggaatggagagggaccggatctcagccttgaaaagatcttttgaggtcgaggaggtcgagacacccaactccaccccaccccggagggtccagactcccctactccgagccactgtggccagctccacccagaaattccaggacctgggygtgaagaactcagaaccctcggcccgccatgtggactccctaagccaacgctcccccaaggcgtccctgcggagggtggagctctcgggccccaaggcggccgagccggtgtcccggcgcactgagctgtccattgacatctcgtccaagcaggtggagaacgccggggccatcggcccgtcccggttcgggctcaagagggccgaggtgttgggccacaagacgccagaacyggcccctcggaggacggagatcaccatcgtcaaaccccaggagtcagcccaccggaggatggagccccctgcctccaaggtccccgaggtgcccactgcccctgccaccgacgcagcccccaagagggtggagatccagatgcccaagcctgctgaggcgcccaccgcccccagcccagcccagaccttggagaattcagagcctgcccctgtgtctcagctgcagagcaggctggagcccaagccccagccccctgtggctgaggctacaccccggagccaggaggccactgaggcggctcccagctgcgttggcgacatggccgacacccccagagatgccgggctcaagcaggcgcctgcatcacggaacgagaaggccccggtggacttcggctacgtggggattgactccatcctggagcagatgcgccggaaggccatgaagcagggcttcgagttcaacatcatggtggtcgggcagagcggcttgggtaaatccaccttaatcaacaccctcttcaaatccaaaatcagccggaagtcggtgcagcccacctcagaggagcgcatccccaagaccatcgagatcaagtccatcacgcacgatattgaggagaaaggcgtccggatgaagctgacagtgattgacacaccagggttcggggaccacatcaacaacgagaactgctggcagcccatcatgaagttcatcaatgaccagtacgagaaatacctgcaggaggaggtcaacatcaaccgcaagaagcgcatcccggacacccgcgtccactgctgcctctacttcatccccgccaccggccactccctcaggcccctggacatcgagtttatgaaacgcctgagcaaggtggtcaacatcgtccctgtcatcgccaaggcggacacactcaccctggaggagagggtccacttcaaacagcggatcaccgcagacctgctgtccaacggcatcgacgtgtacccccagaaggaatttgatgaggactcggaggaccggctggtgaacgagaagttccgggagatgatcccatttgctgtggtgggcagtgaccacgagtaccaggtcaacggcaagaggatccttgggaggaagaccaagtggggtaccatcgaagttgaaaacaccacacactgtgagtttgcctacctgcgggaccttctcatcaggacgcacatgcagaacatcaaggacatcaccagcagcatccacttcgaggcgtaccgtgtgaagcgcctcaacgagggcagcagcgccatggccaacggcrtggaggagaaggagccagaagccccggagatgtagacgccrccctgcccacccccgggatcctgcccccaagtcatttccgtcccccccccaggccctcccaccaccccattttattttatatgattttctccatttgtcatcgttccccaccccttcgacatgctgccaggaaacaagggaaggggcctccctccgagtgagtcagtgatgaggccgcggcctccccgaggttgtggggaggctgcactggagccacaggcaggggtgagagcacccactgaattgacatgaccctctgtccccaggcctggctccccgagggctcagaagagcagcttcggtgtgcagatcatccgtcygtgtggggttctcagtgccggaggccttggggtgggggccaggcctcgcacktgcagaggagcccagtgggctgcacgctcccctccatccccatcggccctgtcccctggagtgtgtcagagcccaggggagaatgcagcccaccaggagcacctggaccccctgcccgccacatggtgtggccatcactcagcccctacccctgccctgctcctaagggtagaaaactccagggtcccctgccaccgactgcccagccactccaagccccctggcagctgcccctcctggagcagaaagtgcctttatctcagccatccgcagactgctyggccagatgcggggacaggctggaatgagggaggcgtcttcatctccctgccatccccctctcacgccacccccgcccccacygggctgcaggtgctgctgatgcgstgggatctgattgaggatraaaagraaggagagatgacccctaccccctcatcccccagttttgaaaaggtctaagcaagtgagtctggtggaggagctgagggagggagcyatggaaggtgccagaaggaaggttggcgggggcacgtgtgggccgtggcttgggctggtcagrgtggcgtgagctgccyggcgcctgccctgcccaagtgaccagggaagtgtgtgtgtgtccatgtgtatgcgtgtccgtctgtctgtctagtgtctrggtttggcccaagactgggctgtagttacattaatgcccagccagccacccctgccactcacccytcctggcccaggccttgctgactctctgagctggggaggtgggaggccaggcgagcctgactctgttgatctacccccaccgcgcctggccaactctctcacattttaaaacactactttctgctacaaaagtggcgtgtacaatgggaaatgtcacaaataaataccccaggaagacactcaaaagcccctgtgatgcccccccagccctggtcctggggtgtcggcctygggtctccctcctggtgcggcatccttthaccactgcagttaactgggaggaaacgatccccatgcattgctctaaatcccgctggatctggttttgggggtgctgggctgctgcccaggagactggaaggggaggaaggtgtgtggcccctgagggcttccaaagcactctgtgctgtgaggatcccaccccgtgcgctcccagaaagtggccggtgtttttctgctccagcagggagcccaggtgaggttctctaggtaggtggaaaggtaggtggagcaggcttcaagagcagaacccagcagagcgccccggcttcctcccatcgccctcctactccctctcctcccctctcctcccctcccctcccatccttttgkaagcaaggaggggagaggcttccaccgaagttgggcccagctcaggtgtcctgagtggtgggaatctgtgcagggcccaggcgcatttcctgcccsggagcaggaatgctttacagatgttggagctgcctcaaggcatggccaggaggggccggagaagcagaaccagctgcataggggatgctgggctggtgcctgcacatggaacagtcattgattaaaatgtcacttgtaaggtgcctaaatcttcgggtcctcctccttggagagtcccaggtaagctgcgttccctgggctgattccaggctgggccaggcggggctgggctgcagacctctggggactgcctacccaaccccacaccaccaggctccctgctcctcctgaaggccttggccttcagtaaaatgcaaaaagttaaatgctctgggttttctctgataatagaagcaatgcctgtccattgtagaatgttgggaaaatagagaagagcaagagcaacaacaggcacggaactccacccctgccggtcagcctgcctgtgcgtgggagttaaaacaaaacgcttctgcaaacatttggttttttttgtttttccaaaattaagctccgattgtgcatatcacttgataatcgaaattattttttgaaaaataattttaatagctatgcagtactccatcctgtcaacatatggaatgaaatgatgatttctaaattcttactcttgtcacctgggctgcagttggaggcctggtgggggtccgtgcggcgactggctgggccgtccctgtccctcctcccagatgacagaggtgcctggtgtttggcaaactcacttagaaggagcaagaagcaactgggatggctcagaagcccatggtggaatagtctgttgtaaacgaagagacaagaggaggccgaggactggtttccccttctccttcccgctcccagccctcccctctttcccatcgagtctctggtctctgccttcaggcccatggatgggcaaagcatctttcgagagcttgcctgccaaccctcagagtcacatacacgaaggtctcctggagctcagaaggtcagrcacaaagtcactccttgaccctatttattgaaatatccgtttttttgagcacttttcccgtgtagactcaacagggtctccctctgttgcccaggctggagtgcagtggtgcgatcatggctcactgcagmcttgaactcctgagctcaagcaatcctgctgcctcagttctccgagtagctgggaccacatgtgtaagtcactaagcctggctaattaaaaa

SEQ ID NO: 2490 - DNA, 5115 bp, Homo sapiens
tgcccaggactgtcccccagcggccactcgggccccagccccccaggcctggccttgacaggcgggcggagcagccagtgcgagacagggaggccggtgcgggtgcgggaacctgatccgcccgggaggcgggggcggggcgggggcgcagcgcgcggggaggggccggcgcccgcccttcctcccccattcattcagctgagccagggggcctaggggctcctccggcggctagctctgcactgcaggagcgcgggcgcggcgccccagccagcgcgcagggcccgggccccgccgggggcgcttcctcgccgctgccctccgcgcgacccgctgcccaccagccatcatgtcggaccccgcggtcaacgcgcagctggatgggatcatttcggacttcgaagccttgaaaagatcttttgaggtcgaggaggtcgagacacccaactccaccccaccccggagggtccagactcccctactccgagccactgtggccagctccacccagaaattccaggacctgggygtgaagaactcagaaccctcggcccgccatgtggactccctaagccaacgctcccccaaggcgtccctgcggagggtggagctctcgggccccaaggcggccgagccggtgtcccggcgcactgagctgtccattgacatctcgtccaagcaggtggagaacgccggggccatcggcccgtcccggttcgggctcaagagggccgaggtgttgggccacaagacgccagaacyggcccctcggaggacggagatcaccatcgtcaaaccccaggagtcagcccaccggaggatggagccccctgcctccaaggtccccgaggtgcccactgcccctgccaccgacgcagcccccaagagggtggagatccagatgcccaagcctgctgaggcgcccaccgcccccagcccagcccagaccttggagaattcagagcctgcccctgtgtctcagctgcagagcaggctggagcccaagccccagccccctgtggctgaggctacaccccggagccaggaggccactgaggcggctcccagctgcgttggcgacatggccgacacccccagagatgccgggctcaagcaggcgcctgcatcacggaacgagaaggccccggtggacttcggctacgtggggattgactccatcctggagcagatgcgccggaaggccatgaagcagggcttcgagttcaacatcatggtggtcgggcagagcggcttgggtaaatccaccttaatcaacaccctcttcaaatccaaaatcagccggaagtcggtgcagcccacctcagaggagcgcatccccaagaccatcgagatcaagtccatcacgcacgatattgaggagaaaggcgtccggatgaagctgacagtgattgacacaccagggttcggggaccacatcaacaacgagaactgctggcagcccatcatgaagttcatcaatgaccagtacgagaaatacctgcaggaggaggtcaacatcaaccgcaagaagcgcatcccggacacccgcgtccactgctgcctctacttcatccccgccaccggccactccctcaggcccctggacatcgagtttatgaaacgcctgagcaaggtggtcaacatcgtccctgtcatcgccaaggcggacacactcaccctggaggagagggtccacttcaaacagcggatcaccgcagacctgctgtccaacggcatcgacgtgtacccccagaaggaatttgatgaggactcggaggaccggctggtgaacgagaagttccgggagatgatcccatttgctgtggtgggcagtgaccacgagtaccaggtcaacggcaagaggatccttgggaggaagaccaagtggggtaccatcgaagttgaaaacaccacacactgtgagtttgcctacctgcgggaccttctcatcaggacgcacatgcagaacatcaaggacatcaccagcagcatccacttcgaggcgtaccgtgtgaagcgcctcaacgagggcagcagcgccatggccaacggcrtggaggagaaggagccagaagccccggagatgtagacgccrccctgcccacccccgggatcctgcccccaagtcatttccgtcccccccccaggccctcccaccaccccattttattttatatgattttctccatttgtcatcgttccccaccccttcgacatgctgccaggaaacaagggaaggggcctccctccgagtgagtcagtgatgaggccgcggcctccccgaggttgtggggaggctgcactggagccacaggcaggggtgagagcacccactgaattgacatgaccctctgtccccaggcctggctccccgagggctcagaagagcagcttcggtgtgcagatcatccgtcygtgtggggttctcagtgccggaggccttggggtgggggccaggcctcgcacktgcagaggagcccagtgggctgcacgctcccctccatccccatcggccctgtcccctggagtgtgtcagagcccaggggagaatgcagcccaccaggagcacctggaccccctgcccgccacatggtgtggccatcactcagcccctacccctgccctgctcctaagggtagaaaactccagggtcccctgccaccgactgcccagccactccaagccccctggcagctgcccctcctggagcagaaagtgcctttatctcagccatccgcagactgctyggccagatgcggggacaggctggaatgagggaggcgtcttcatctccctgccatccccctctcacgccacccccgcccccacygggctgcaggtgctgctgatgcgstgggatctgattgaggatraaaagraaggagagatgacccctaccccctcatcccccagttttgaaaaggtctaagcaagtgagtctggtggaggagctgagggagggagcyatggaaggtgccagaaggaaggttggcgggggcacgtgtgggccgtggcttgggctggtcagrgtggcgtgagctgccyggcgcctgccctgcccaagtgaccagggaagtgtgtgtgtgtccatgtgtatgcgtgtccgtctgtctgtctagtgtctrggtttggcccaagactgggctgtagttacattaatgcccagccagccacccctgccactcacccytcctggcccaggccttgctgactctctgagctggggaggtgggaggccaggcgagcctgactctgttgatctacccccaccgcgcctggccaactctctcacattttaaaacactactttctgctacaaaagtggcgtgtacaatgggaaatgtcacaaataaataccccaggaagacactcaaaagcccctgtgatgcccccccagccctggtcctggggtgtcggcctygggtctccctcctggtgcggcatccttthaccactgcagttaactgggaggaaacgatccccatgcattgctctaaatcccgctggatctggttttgggggtgctgggctgctgcccaggagactggaaggggaggaaggtgtgtggcccctgagggcttccaaagcactctgtgctgtgaggatcccaccccgtgcgctcccagaaagtggccggtgtttttctgctccagcagggagcccaggtgaggttctctaggtaggtggaaaggtaggtggagcaggcttcaagagcagaacccagcagagcgccccggcttcctcccatcgccctcctactccctctcctcccctctcctcccctcccctcccatccttttgkaagcaaggaggggagaggcttccaccgaagttgggcccagctcaggtgtcctgagtggtgggaatctgtgcagggcccaggcgcatttcctgcccsggagcaggaatgctttacagatgttggagctgcctcaaggcatggccaggaggggccggagaagcagaaccagctgcataggggatgctgggctggtgcctgcacatggaacagtcattgattaaaatgtcacttgtaaggtgcctaaatcttcgggtcctcctccttggagagtcccaggtaagctgcgttccctgggctgattccaggctgggccaggcggggctgggctgcagacctctggggactgcctacccaaccccacaccaccaggctccctgctcctcctgaaggccttggccttcagtaaaatgcaaaaagttaaatgctctgggttttctctgataatagaagcaatgcctgtccattgtagaatgttgggaaaatagagaagagcaagagcaacaacaggcacggaactccacccctgccggtcagcctgcctgtgcgtgggagttaaaacaaaacgcttctgcaaacatttggttttttttgtttttccaaaattaagctccgattgtgcatatcacttgataatcgaaattattttttgaaaaataattttaatagctatgcagtactccatcctgtcaacatatggaatgaaatgatgatttctaaattcttactcttgtcacctgggctgcagttggaggcctggtgggggtccgtgcggcgactggctgggccgtccctgtccctcctcccagatgacagaggtgcctggtgtttggcaaactcacttagaaggagcaagaagcaactgggatggctcagaagcccatggtggaatagtctgttgtaaacgaagagacaagaggaggccgaggactggtttccccttctccttcccgctcccagccctcccctctttcccatcgagtctctggtctctgccttcaggcccatggatgggcaaagcatctttcgagagcttgcctgccaaccctcagagtcacatacacgaaggtctcctggagctcagaaggtcagrcacaaagtcactccttgaccctatttattgaaatatccgtttttttgagcacttttcccgtgtagactcaacagggtctccctctgttgcccaggctggagtgcagtggtgcgatcatggctcactgcagmcttgaactcctgagctcaagcaatcctgctgcctcagttctccgagtagctgggaccacatgtgtaagtcactaagcctggctaattaaaaa

SEQ ID NO: 2491 - DNA, 4417 bp, Homo sapiens
tgacttctcagggttcctcctgggcaggtgctccggaaccttttctcagcacgctggcctggggcacggccgttcctcctgcccagccacgttggggtacagggtgaagaagggctggggccagcccaggacagaggaaggcgaggcaggcacgcaggaactgggctttttaaacccttaagcccaaggaaatcgtagcatcgcgggacagggaaaatgaaagactttggaagtcgtcaggaatttgactctgtgagttggtttccaagagtctaagttaagcatctccaagtggatattaaaaaggagcagcaagcctcggggcggcgggggctggaggaggtggagagaggaggctgccggaagccgcactcgggacctctgcagccaccgaccagaccgggcggccgggactctgggactctcgcaggcagacccggtggtctgccggactcctcggggcccacttcgggccctctctcctgcctcctatttttggatttctctcctttgctccctttttcctcccgttttgaagagacaatgctacttcagtttggagcacaaacatatgatcagcacatggaaatgtggtaattcggatgcattcgtgattgcaacagattgaagaaattagaccagacaaagagtgtttttagaggaggaggaggaggaggaggaggctgagagagggagggcgacgggggtgagaaaggggaggccgcctctgagcgggacgccgggactcccgccgctgctaaatatatccgtaggaatggagagggaccggatctcagccttgaaaagatcttttgaggtcgaggaggtcgagacacccaactccaccccaccccggagggtccagactcccctactccgagccactgtggccagctccacccagaaattccaggacctgggygtgaagaactcagaaccctcggcccgccatgtggactccctaagccaacgctcccccaaggcgtccctgcggagggtggagctctcgggccccaaggcggccgagccggtgtcccggcgcactgagctgtccattgacatctcgtccaagcaggtggagaacgccggggccatcggcccgtcccggttcgggctcaagagggccgaggtgttgggccacaagacgccagaacyggcccctcggaggacggagatcaccatcgtcaaaccccaggagtcagcccaccggaggatggagccccctgcctccaaggtccccgaggtgcccactgcccctgccaccgacgcagcccccaagagggtggagatccagatgcccaagcctgctgaggcgcccaccgcccccagcccagcccagaccttggagaattcagagcctgcccctgtgtctcagctgcagagcaggctggagcccaagccccagccccctgtggctgaggctacaccccggagccaggaggccactgaggcggctcccagctgcgttggcgacatggccgacacccccagagatgccgggctcaagcaggcgcctgcatcacggaacgagaaggccccggtggacttcggctacgtggggattgactccatcctggagcagatgcgccggaaggccatgaagcagggcttcgagttcaacatcatggtggtcgggcagagcggcttgggtaaatccaccttaatcaacaccctcttcaaatccaaaatcagccggaagtcggtgcagcccacctcagaggagcgcatccccaagaccatcgagatcaagtccatcacgcacgatattgaggagaaaggcgtccggatgaagctgacagtgattgacacaccagggttcggggaccacatcaacaacgagaactgctggcagcccatcatgaagttcatcaatgaccagtacgagaaatacctgcaggaggaggtcaacatcaaccgcaagaagcgcatcccggacacccgcgtccactgctgcctctacttcatccccgccaccggccactccctcaggcccctggacatcgagtttatgaaacgcctgagcaaggtggtcaacatcgtccctgtcatcgccaaggcggacacactcaccctggaggagagggtccacttcaaacagcggatcaccgcagacctgctgtccaacggcatcgacgtgtacccccagaaggaatttgatgaggactcggaggaccggctggtgaacgagaagttccgggagatgatcccatttgctgtggtgggcagtgaccacgagtaccaggtcaacggcaagaggatccttgggaggaagaccaagtggggtaccatcgaagttgaaaacaccacacactgtgagtttgcctacctgcgggaccttctcatcaggacgcacatgcagaacatcaaggacatcaccagcagcatccacttcgaggcgtaccgtgtgaagcgcctcaacgagggcagcagcgccatggccaacggcrtggaggagaaggagccagaagccccggagatgtagacgccrccctgcccacccccgggatcctgcccccaagtcatttccgtcccccccccaggccctcccaccaccccattttattttatatgattttctccatttgtcatcgttccccaccccttcgacatgctgccaggaaacaagggaaggggcctccctccgagtgagtcagtgatgaggccgcggcctccccgaggttgtggggaggctgcactggagccacaggcaggggtgagagcacccactgaattgacatgaccctctgtccccaggcctggctccccgagggctcagaagagcagcttcggtgtgcagatcatccgtcygtgtggggttctcagtgccggaggccttggggtgggggccaggcctcgcacktgcagaggagcccagtgggctgcacgctcccctccatccccatcggccctgtcccctggagtgtgtcagagcccaggggagaatgcagcccaccaggagcacctggaccccctgcccgccacatggtgtggccatcactcagcccctacccctgccctgctcctaagggtagaaaactccagggtcccctgccaccgactgcccagccactccaagccccctggcagctgcccctcctggagcagaaagtgcctttatctcagccatccgcagactgctyggccagatgcggggacaggctggaatgagggaggcgtcttcatctccctgccatccccctctcacgccacccccgcccccacygggctgcaggtgctgctgatgcgstgggatctgattgaggatraaaagraaggagagatgacccctaccccctcatcccccagttttgaaaaggtctaagcaagtgagtctggtggaggagctgagggagggagcyatggaaggtgccagaaggaaggttggcgggggcacgtgtgggccgtggcttgggctggtcagrgtggcgtgagctgccyggcgcctgccctgcccaagtgaccagggaagtgtgtgtgtgtccatgtgtatgcgtgtccgtctgtctgtctagtgtctrggtttggcccaagactgggctgtagttacattaatgcccagccagccacccctgccactcacccytcctggcccaggccttgctgactctctgagctggggaggtgggaggccaggcgagcctgactctgttgatctacccgtgcctgggcccctcccctcagagcccatggtaacgaacccctagaaaggagagaacgggcgtcaggggtgcacagtccacagctgaagagcaaggtttcgtggcagcacggcccggcccctcaccctctgtccccacgaggggacccatgggggctgtctttgcagggcacagatgaccaaagtcccttcctgcttcctgttacctgtcttgctcctggggagaaagaggggcctgatgagactccactcaggtgcacacatcaccaggtgcatctgcaggcaccgggctggctgcttgcagccaggagaaggtcagcgagaaggagtgtatgagtgtgagtgtgtgtgcatggaagttggggcactgggcgtctgactccctccccacccaagagaggaaggacccctcaccacccccactggygagacagtttactttgccracttgccatgtttttgccaaaaccaagattttgaaggaaatgagtggccagcgccagggcccaggccatgtggcctgcccagcctcaatgtcacttggyggcggggtggggtgggggtgggcagcagcatcccagccttgagatgcttcactttccttctctgtaaccagactttgaaaaattgttcgtttcatcaggctctgttcctcaatggccttttgctacgtgcctcccgagaaatttgtctttttgtataaatgacaaagtgttgaaaatgtatttcctgaaataaatgtttcaaatgcagaaaccc

SEQ ID NO: 2492 - DNA, 4683 bp, Homo sapiens
gtctttaggaggcacgcggacctccagtggccggctccggaggcttggtgactccagtggcccagccttgaaaagatcttttgaggtcgaggaggtcgagacacccaactccaccccaccccggagggtccagactcccctactccgagccactgtggccagctccacccagaaattccaggacctgggygtgaagaactcagaaccctcggcccgccatgtggactccctaagccaacgctcccccaaggcgtccctgcggagggtggagctctcgggccccaaggcggccgagccggtgtcccggcgcactgagctgtccattgacatctcgtccaagcaggtggagaacgccggggccatcggcccgtcccggttcgggctcaagagggccgaggtgttgggccacaagacgccagaacyggcccctcggaggacggagatcaccatcgtcaaaccccaggagtcagcccaccggaggatggagccccctgcctccaaggtccccgaggtgcccactgcccctgccaccgacgcagcccccaagagggtggagatccagatgcccaagcctgctgaggcgcccaccgcccccagcccagcccagaccttggagaattcagagcctgcccctgtgtctcagctgcagagcaggctggagcccaagccccagccccctgtggctgaggctacaccccggagccaggagggtgagcggctcccagctgcgttggcgacatggccgacacccccagagatgccgggctcaagcaggcgcctgcatcacggaacgagaaggccccggtggacttcggctacgtggggattgactccatcctggagcagatgcgccggaaggccatgaagcagggcttcgagttcaacatcatggtggtcggtgaggcagagcggcttgggtaaatccaccttaatcaacaccctcttcaaatccaaaatcagccggaagtcggtgcagcccacctcagaggagcgcatccccaagaccatcgagatcaagtccatcacgcacgatattgaggagaaaggcgtccggatgaagctgacagtgattgacacaccagggttcggggaccacatcaacaacgagaactgctggcagcccatcatgaagttcatcaatgaccagtacgagaaatacctgcaggaggaggctggacatcgagtttatgaaacgcctgagcaaggtggtcaacatcgtccctgtcatcgccaaggcggacacactcaccctggaggagagggtccacttcaaacagcggatcaccgcagacctgctgtccaacggcatcgacgtgtacccccagaaggaatttgatgaggactcggaggaccggctggtgaacgagaagttccgggagatgatcccatttgctgtggtgggcagtgaccacgagtaccaggtcaacggcaagaggatccttgggaggaagaccaagtggggtaccatcgaagttgaaaacaccacacactgtgagtttgcctacctgcgggaccttctcatcaggacgcacatgcagaacatcaaggacatcaccagcagcatccacttcgaggcgtaccgtgtgaagcgcctcaacgagggcagcagcgccatggccaacggcrtggaggagaaggagccagaagccccggagatgtagacgccrccctgcccacccccgggatcctgcccccaagtcatttccgtcccccccccaggccctcccaccaccccattttattttatatgattttctccatttgtcatcgttccccaccccttcgacatgctgccaggaaacaagggaaggggcctccctccgagtgagtcagtgatgaggccgcggcctccccgaggttgtggggaggctgcactggagccacaggcaggggtgagagcacccactgaattgacatgaccctctgtccccaggcctggctccccgagggctcagaagagcagcttcggtgtgcagatcatccgtcygtgtggggttctcagtgccggaggccttggggtgggggccaggcctcgcacktgcagaggagcccagtgggctgcacgctcccctccatccccatcggccctgtcccctggagtgtgtcagagcccaggggagaatgcagcccaccaggagcacctggaccccctgcccgccacatggtgtggccatcactcagcccctacccctgccctgctcctaagggtagaaaactccagggtcccctgccaccgactgcccagccactccaagccccctggcagctgcccctcctggagcagaaagtgcctttatctcagccatccgcagactgctyggccagatgcggggacaggctggaatgagggaggcgtcttcatctccctgccatccccctctcacgccacccccgcccccacygggctgcaggtgctgctgatgcgstgggatctgattgaggatraaaagraaggagagatgacccctaccccctcatcccccagttttgaaaaggtctaagcaagtgagtctggtggaggagctgagggagggagcyatggaaggtgccagaaggaaggttggcgggggcacgtgtgggccgtggcttgggctggtcagrgtggcgtgagctgccyggcgcctgccctgcccaagtgaccagggaagtgtgtgtgtgtccatgtgtatgcgtgtccgtctgtctgtctagtgtctrggtttggcccaagactgggctgtagttacattaatgcccagccagccacccctgccactcacccytcctggcccaggccttgctgactctctgagctggggaggtgggaggccaggcgagcctgactctgttgatctacccgccaccgcgcctggccaactctctcacattttaaaacactactttctgctacaaaagtggcgtgtacaatgggaaatgtcacaaataaataccccaggaagacactcaaaagcccctgtgatgcccccccagccctggtcctggggtgtcggcctygggtctccctcctggtgcggcatccttthaccactgcagttaactgggaggaaacgatccccatgcattgctctaaatcccgctggatctggttttgggggtgctgggctgctgcccaggagactggaaggggaggaaggtgtgtggcccctgagggcttccaaagcactctgtgctgtgaggatcccaccccgtgcgctcccagaaagtggccggtgtttttctgctccagcagggagcccaggtgaggttctctaggtaggtggaaaggtaggtggagcaggcttcaagagcagaacccagcagagcgccccggcttcctcccatcgccctcctactccctctcctcccctctcctcccctcccctcccatccttttgkaagcaaggaggggagaggcttccaccgaagttgggcccagctcaggtgtcctgagtggtgggaatctgtgcagggcccaggcgcatttcctgcccsggagcaggaatgctttacagatgttggagctgcctcaaggcatggccaggaggggccggagaagcagaaccagctgcataggggatgctgggctggtgcctgcacatggaacagtcattgattaaaatgtcacttgtaaggtgcctaaatcttcgggtcctcctccttggagagtcccaggtaagctgcgttccctgggctgattccaggctgggccaggcggggctgggctgcagacctctggggactgcctacccaaccccacaccaccaggctccctgctcctcctgaaggccttggccttcagtaaaatgcaaaaagttaaatgctctgggttttctctgataatagaagcaatgcctgtccattgtagaatgttgggaaaatagagaagagcaagagcaacaacaggcacggaactccacccctgccggtcagcctgcctgtgcgtgggagttaaaacaaaacgcttctgcaaacatttggttttttttgtttttccaaaattaagctccgattgtgcatatcacttgataatcgaaattattttttgaaaaataattttaatagctatgcagtactccatcctgtcaacatatggaatgaaatgatgatttctaaattcttactcttgtcacctgggctgcagttggaggcctggtgggggtccgtgcggcgactggctgggccgtccctgtccctcctcccagatgacagaggtgcctggtgtttggcaaactcacttagaaggagcaagaagcaactgggatggctcagaagcccatggtggaatagtctgttgtaaacgaagagacaagaggaggccgaggactggtttccccttctccttcccgctcccagccctcccctctttcccatcgagtctctggtctctgccttcaggcccatggatgggcaaagcatctttcgagagcttgcctgccaaccctcagagtcacatacacgaaggtctcctggagctcagaaggtcagrcacaaagtcactccttgaccctatttattgaaatatccgtttttttgagcacttttcccgtgtagactcaacagggtctccctctgttgcccaggctggagtgcagtggtgcgatcatggctcactgcagmcttgaactcctgagctcaagcaatcctgctgcctcagttctccgagtagctgggaccacatgtgtaagtcactaagcctggctaatt

SEQ ID NO: 2493 - DNA, 2346 bp, Homo sapiens
tgacttctcagggttcctcctgggcaggtgctccggaaccttttctcagcacgctggcctggggcacggccgttcctcctgcccagccacgttggggtacagggtgaagaagggctggggccagcccaggacagaggaaggcgaggcaggcacgcaggaactgggctttttaaacccttaagcccaaggaaatcgtagcatcgcgggacagggaaaatgaaagactttggaagtcgtcaggaatttgactctgtgagttggtttccaagagtctaagttaagcatctccaagtggatattaaaaaggagcagcaagcctcggggcggcgggggctggaggaggtggagagaggaggctgccggaagccgcactcgggacctctgcagccaccgaccagaccgggcggccgggactctgggactctcgcaggcagacccggtggtctgccggactcctcggggcccacttcgggccctctctcctgcctcctatttttggatttctctcctttgctccctttttcctcccgttttgaagagacaatgctacttcagtttggagcacaaacatatgatcagcacatggaaatgtggtaattcggatgcattcgtgattgcaacagattgaagaaattagaccagacaaagagtgtttttagaggaggaggaggaggaggaggaggctgagagagggagggcgacgggggtgagaaaggggaggccgcctctgagcgggacgccgggactcccgccgctgctaaatatatccgtaggaatggagagggaccggatctcagccttgaaaagatcttttgaggtcgaggaggtcgagacacccaactccaccccaccccggagggtccagactcccctactccgagccactgtggccagctccacccagaaattccaggacctgggygtgaagaactcagaaccctcggcccgccatgtggactccctaagccaacgctcccccaaggcgtccctgcggagggtggagctctcgggccccaaggcggccgagccggtgtcccggcgcactgagctgtccattgacatctcgtccaagcaggtggagaacgccggggccatcggcccgtcccggttcgggctcaagagggccgaggtgttgggccacaagacgccagaacyggcccctcggaggacggagatcaccatcgtcaaaccccaggagtcagcccaccggaggatggagccccctgcctccaaggtccccgaggtgcccactgcccctgccaccgacgcagcccccaagagggtggagatccagatgcccaagcctgctgaggcgcccaccgcccccagcccagcccagaccttggagaattcagagcctgcccctgtgtctcagctgcagagcaggctggagcccaagccccagccccctgtggctgaggctacaccccggagccaggaggccactgaggcggctcccagctgcgttggcgacatggccgacacccccagagatgccgggctcaagcaggcgcctgcatcacggaacgagaaggccccggtggacttcggctacgtggggattgactccatcctggagcagatgcgccggaaggccatgaagcagggcttcgagttcaacatcatggtggtcgggcagagcggcttgggtaaatccaccttaatcaacaccctcttcaaatccaaaatcagccggaagtcggtgcagcccacctcagaggagcgcatccccaagaccatcgagatcaagtccatcacgcacgatattgaggagaaaggcgtccggatgaagctgacagtgattgacacaccagggttcggggaccacatcaacaacgagaactgctggcagcccatcatgaagttcatcaatgaccagtacgagaaatacctgcaggaggaggtcaacatcaaccgcaagaagcgcatcccggacacccgcgtccactgctgcctctacttcatccccgccaccggccactccctcaggcccctggacatcgagtttatgaaacgcctgagcaaggtggtcaacatcgtccctgtcatcgccaaggcggacacactcaccctggaggagagggtccacttcaaacagcggatcaccgcagacctgctgtccaacggcatcgacgtgtacccccagaaggaatttgatgaggactcggaggaccggctggtgaacgagaagttccgggagatgatcccatttgctgtggtgggcagtgaccacgagtaccaggtcaacggcaagaggatccttgggaggaagaccaagtggggtaccatcgaagttgaaaacaccacacactgtgagtttgcctacctgcgggaccttctcatcag

SEQ ID NO: 2494 - DNA, 2343 bp, Homo sapiens
ccggatcggaccctgcgaatggttttggctatatcttcatgtaggacctactccctatcccgtcggccgcgkctgggcktcatcaccaggcctcctcacagattcctgtcccttctgtgtcctggactccggatacctcaactctcagtactttgtgctcagcccaggcccagagccatggctatctcctcttcctcctgcgaactgcccctggtggctgtgtgccaggtaacatcgacgccagacaagcaacagaactttaaaacatgtgctgagctggttcgagaggctgccagactgggtgcctgcctggctttcctgcctgaggcatttgacttcattgcacgggaccctgcagagacgctacacctgtctgaaccactgggtgggaaacttttggaagaatacacccagcttgccagggaatgtggactctggctgtccttgggtggtttccatgagcgtggccaagactgggagcagactcagaaaatctacaattgtcacgtgctgctgaacagcaaaggggcagtagtggccacttacaggaagacacatctgtgtgacgtagagattccagggcaggggcctatgtgtgaaagcaactctaccatgcctgggcccagtcttgagtcacctgtcagcacaccagcaggcaagattggtctagctgtctgctatgacatgcggttccctgaactctctctggcattggctcaagctggagcagagatacttacctatccttcagcttttggatccattacaggcccagcccactgggaggtgttgctgcgggcccgtgctatcgaaacccagtgctatgtagtggcagcagcacagtgtggacgccaccatgagaagagagcaagttatggccacagcatggtggtagacccctggggaacagtggtggcccgctgctctgaggggccaggcctctgccttgcccgaatagacctcarctatctgcgacagttgcgccgacacctgcctgtgttccagcaccgcaggcctgasctctatggcaatctgggtcacccactgtcttaagacttgacttctgtgagtttagacctgcccctcccacccccaccctgccactatgagctagtgctcatgtgacttggaggcaggatccaggcacagctcccctcacttggagaaccttgactctcttgatggaacacagatgggctgcttgggaaagaaactttcacctgagcttcacctgaggtcagactgcagtttcagaaaggtggaattttatatagtcattgtttatttcatggaaactgaagttctgctgagggctgagcagcactggcattgaaaaatataataatcataaagtctgtgtctggacatcgcctttgggaactagaaggggagttggtattgtaccagctggactaagctccagttctagacctcctggctcattcaacatgcctccctacctaaataaaagtgcaacactcagtgcatgtcccagccccattctcccaagcatgggagtgggcgtaggagtggaggagggggaaggaaaaaggaattacttcacttacacctatgatgccctttgcccaagccagaagaaagcaaaggggaaaagggctgcagggtacattatttattttcacttgaacatggaaagaaagtgtcacactcccccttcccctttatagggggagtgtattttaatcagcaacctcttctccatccaccctgtgtatgtgtgtacacatataccaccacagttgggaggcatgactaggctgacccagtcttatctgttcctcctttgaagagggtttgacaaatgggaaaaaggaaggagccacatcaggcagaggtttcaagccatggaatggaggaaaggcggcagagaggagcagcaccagaggccaggagagagtggaaagggccacagcttgtttttaaaaaattctataatttggaagagggtggcgattaattttcaaaatacacttcagagtcccactttccacatagctcccttactcacagccctttggttttttagacaaaatttaagagctctcataaagccagaagtattgataactccttagtgcatccaaaaaaaagtgttcacatcaatcccttacaaagactatgtgctgtagactttgcttcttcctatacatttgtcttacggctcagtggtaaggtagctgtagagacacattacggggtaaatggaaaagggaaataaaggggaagcccaggcacatgggtgcagggaggggtggggaataccacttccactttcttttgtctttttctttaaaaaaaaaaaaaaaaaggcaggggtgtgat

SEQ ID NO: 2495 - DNA, 2404 bp, Homo sapiens
cgctgcggcgcttctggctccagaccgccctccggatcggaccctgcgaatggttttggctatatcttcatgtaggacctactccctatcccgtcggccgcggtgaatcccacctgcggtgctttaacttgtgctgggcktcatcaccaggcctcctcacagattcctgtcccttctgtgtcctggactccggatacctcaactctcagtactttgtgctcagcccaggcccagagccktggctatctcctcttcctcctgcgaactgcccctggtggctgtgtgccaggtaacatcgacgccagacaagcaacagaactttaaaacatgtgctgagctggttcgagaggctgccagactgggtgcctgcctggctttcctgcctgaggcatttgacttcattgcacgggaccctgcagagacgctacacctgtctgaaccactgggtgggaaacttttggaagaatacacccagcttgccagggaatgtggactctggctgtccttgggtggtttccatgagcgtggccaagactgggagcagactcagaaaatctacaattgtcacgtgctgctgaacagcaaaggggcagtagtggccacttacaggaagacacatctgtgtgacgtagagattccagggcaggggcctatgtgtgaaagcaactctaccatgcctgggcccagtcttgagtcacctgtcagcacaccagcaggcaagattggtctagctgtctgctatgacatgcggttccctgaactctctctggcattggctcaagctggagcagagatacttacctatccttcagcttttggatccattacaggcccagcccactgggaggtgttgctgcgggcccgtgctatcgaaacccagtgctatgtagtggcagcagcacagtgtggacgccaccatgagaagagagcaagttatggccacagcatggtggtagacccctggggaacagtggtggcccgctgctctgaggggccaggcctctgccttgcccgaatagacctcarctatctgcgacagttgcgccgacacctgcctgtgttccagcaccgcaggcctgasctctatggcaatctgggtcacccactgtcttaagacttgacttctgtgagtttagacctgcccctcccacccccaccctgccactatgagctagtgctcatgtgacttggaggcaggatccaggcacagctcccctcacttggagaaccttgactctcttgatggaacacagatgggctgcttgggaaagaaactttcacctgagcttcacctgaggtcagactgcagtttcagaaaggtggaattttatatagtcattgtttatttcatggaaactgaagttctgctgagggctgagcagcactggcattgaaaaatataataatcataaagtctgtgtctggacatcgcctttgggaactagaaggggagttggtattgtaccagctggactaagctccagttctagacctcctggctcattcaacatgcctccctacctaaataaaagtgcaacactcagtgcatgtcccagccccattctcccaagcatgggagtgggcgtaggagtggaggagggggaaggaaaaaggaattacttcacttacacctatgatgccctttgcccaagccagaagaaagcaaaggggaaaagggctgcagggtacattatttattttcacttgaacatggaaagaaagtgtcacactcccccttcccctttatagggggagtgtattttaatcagcaacctcttctccatccaccctgtgtatgtgtgtacacatataccaccacagttgggaggcatgactaggctgacccagtcttatctgttcctcctttgaagagggtttgacaaatgggaaaaaggaaggagccacatcaggcagaggtttcaagccatggaatggaggaaaggcggcagagaggagcagcaccagaggccaggagagagtggaaagggccacagcttgtttttaaaaaattctataatttggaagagggtggcgattaattttcaaaatacacttcagagtcccactttccacatagctcccttactcacagccctttggttttttagacaaaatttaagagctctcataaagccagaagtattgataactccttagtgcatccaaaaaaaagtgttcacatcaatcccttacaaagactatgtgctgtagactttgcttcttcctatacatttgtcttacggctcagtggtaaggtagctgtagagacacattacggggtaaatggaaaagggaaataaaggggaagcccaggcacatgggtgcagggaggggtggggaataccacttccactttcttttgtctttttctttaaaaaaaaaaaaaaaaaggcaggggtgtgat

SEQ ID NO: 2496 - DNA, 2359 bp, Homo sapiens
cgagttaccgcccactcgctgcggcgcttctggctccagaccgccctccggatcggaccctgcgaatggttttggctatatcttcatkctgggcktcatcaccaggcctcctcacagattcctgtcccttctgtgtcctggactccggatacctcaactctcagtactttgtgctcagcccaggcccagagccatggctatctcctcttcctcctgcgaactgcccctggtggctgtgtgccaggtaacatcgacgccagacaagcaacagaactttaaaacatgtgctgagctggttcgagaggctgccagactgggtgcctgcctggctttcctgcctgaggcatttgacttcattgcacgggaccctgcagagacgctacacctgtctgaaccactgggtgggaaacttttggaagaatacacccagcttgccagggaatgtggactctggctgtccttgggtggtttccatgagcgtggccaagactgggagcagactcagaaaatctacaattgtcacgtgctgctgaacagcaaaggggcagtagtggccacttacaggaagacacatctgtgtgacgtagagattccagggcaggggcctatgtgtgaaagcaactctaccatgcctgggcccagtcttgagtcacctgtcagcacaccagcaggcaagattggtctagctgtctgctatgacatgcggttccctgaactctctctggcattggctcaagctggagcagagatacttacctatccttcagcttttggatccattacaggcccagcccactgggaggtgttgctgcgggcccgtgctatcgaaacccagtgctatgtagtggcagcagcacagtgtggacgccaccatgagaagagagcaagttatggccacagcatggtggtagacccctggggaacagtggtggcccgctgctctgaggggccaggcctctgccttgcccgaatagacctcarctatctgcgacagttgcgccgacacctgcctgtgttccagcaccgcaggcctgasctctatggcaatctgggtcacccactgtcttaagacttgacttctgtgagtttagacctgcccctcccacccccaccctgccactatgagctagtgctcatgtgacttggaggcaggatccaggcacagctcccctcacttggagaaccttgactctcttgatggaacacagatgggctgcttgggaaagaaactttcacctgagcttcacctgaggtcagactgcagtttcagaaaggtggaattttatatagtcattgtttatttcatggaaactgaagttctgctgagggctgagcagcactggcattgaaaaatataataatcataaagtctgtgtctggacatcgcctttgggaactagaaggggagttggtattgtaccagctggactaagctccagttctagacctcctggctcattcaacatgcctccctacctaaataaaagtgcaacactcagtgcatgtcccagccccattctcccaagcatgggagtgggcgtaggagtggaggagggggaaggaaaaaggaattacttcacttacacctatgatgccctttgcccaagccagaagaaagcaaaggggaaaagggctgcagggtacattatttattttcacttgaacatggaaagaaagtgtcacactcccccttcccctttatagggggagtgtattttaatcagcaacctcttctccatccaccctgtgtatgtgtgtacacatataccaccacagttgggaggcatgactaggctgacccagtcttatctgttcctcctttgaagagggtttgacaaatgggaaaaaggaaggagccacatcaggcagaggtttcaagccatggaatggaggaaaggcggcagagaggagcagcaccagaggccaggagagagtggaaagggccacagcttgtttttaaaaaattctataatttggaagagggtggcgattaattttcaaaatacacttcagagtcccactttccacatagctcccttactcacagccctttggttttttagacaaaatttaagagctctcataaagccagaagtattgataactccttagtgcatccaaaaaaaagtgttcacatcaatcccttacaaagactatgtgctgtagactttgcttcttcctatacatttgtcttacggctcagtggtaaggtagctgtagagacacattacggggtaaatggaaaagggaaataaaggggaagcccaggcacatgggtgcagggaggggtggggaataccacttccactttcttttgtctttttctttaaaaaaaaaaaaaaaaaggcaggggtgtgat

SEQ ID NO: 2497 - DNA, 2938 bp, Homo sapiens
tctggctccagaccgccctccggatcggaccctgcgaatggttttggctatatcttcatgtaggacctactccctatcccgtcggccgcggtgaatcccacctgcggtgctttaacttgtgtaacagagatgctgcctctgggagaggcggggagggacgggccaactggagcgggcggcgggagggtggagggcggggcgcggcttggggcctgggttcctttgccccttgcccaccagggaggggtgggagacgagagagggtgaactttcccctgcgagattctggtgaaaggggaaatatgcttcgagtcagtaaagctgcgcaagtgcacagtcaaggagagagtcttgggaaaaccaaggatagttcccggagatgacttttggactgcggaaacgtttgtcagaggaaagaggcttcagtttaatgtgagatcattggaagttgaactattcaggcggcgagcagagcccctttctccatcttcccactgtatggtcttgtcccttagcctataatttcttataaagagcgttttgaagactaggtttttactggcagggccctgattcaggctcacagtataaagagagaagtcagagaatcctagaaatttattgcttgaagaaggggttggtgtcctcatatctcaccttcctcakgctgggcktcatcaccaggcctcctcacagattcctgtcccttctgtgtcctggactccggatacctcaactctcagtactttgtgctcagcccaggcccagagccatggctatctcctcttcctcctgcgaactgcccctggtggctgtgtgccaggtaacatcgacgccagacaagcaacagaactttaaaacatgtgctgagctggttcgagaggctgccagactgggtgcctgcctggctttcctgcctgaggcatttgacttcattgcacgggaccctgcagagacgctacacctgtctgaaccactgggtgggaaacttttggaagaatacacccagcttgccagggaatgtggactctggctgtccttgggtggtttccatgagcgtggccaagactgggagcagactcagaaaatctacaattgtcacgtgctgctgaacagcaaaggggcagtagtggccacttacaggaagacacatctgtgtgacgtagagattccagggcaggggcctatgtgtgaaagcaactctaccatgcctgggcccagtcttgagtcacctgtcagcacaccagcaggcaagattggtctagctgtctgctatgacatgcggttccctgaactctctctggcattggctcaagctggagcagagatacttacctatccttcagcttttggatccattacaggcccagcccactgggaggtgttgctgcgggcccgtgctatcgaaacccagtgctatgtagtggcagcagcacagtgtggacgccaccatgagaagagagcaagttatggccacagcatggtggtagacccctggggaacagtggtggcccgctgctctgaggggccaggcctctgccttgcccgaatagacctcarctatctgcgacagttgcgccgacacctgcctgtgttccagcaccgcaggcctgasctctatggcaatctgggtcacccactgtcttaagacttgacttctgtgagtttagacctgcccctcccacccccaccctgccactatgagctagtgctcatgtgacttggaggcaggatccaggcacagctcccctcacttggagaaccttgactctcttgatggaacacagatgggctgcttgggaaagaaactttcacctgagcttcacctgaggtcagactgcagtttcagaaaggtggaattttatatagtcattgtttatttcatggaaactgaagttctgctgagggctgagcagcactggcattgaaaaatataataatcataaagtctgtgtctggacatcgcctttgggaactagaaggggagttggtattgtaccagctggactaagctccagttctagacctcctggctcattcaacatgcctccctacctaaataaaagtgcaacactcagtgcatgtcccagccccattctcccaagcatgggagtgggcgtaggagtggaggagggggaaggaaaaaggaattacttcacttacacctatgatgccctttgcccaagccagaagaaagcaaaggggaaaagggctgcagggtacattatttattttcacttgaacatggaaagaaagtgtcacactcccccttcccctttatagggggagtgtattttaatcagcaacctcttctccatccaccctgtgtatgtgtgtacacatataccaccacagttgggaggcatgactaggctgacccagtcttatctgttcctcctttgaagagggtttgacaaatgggaaaaaggaaggagccacatcaggcagaggtttcaagccatggaatggaggaaaggcggcagagaggagcagcaccagaggccaggagagagtggaaagggccacagcttgtttttaaaaaattctataatttggaagagggtggcgattaattttcaaaatacacttcagagtcccactttccacatagctcccttactcacagccctttggttttttagacaaaatttaagagctctcataaagccagaagtattgataactccttagtgcatccaaaaaaaagtgttcacatcaatcccttacaaagactatgtgctgtagactttgcttcttcctatacatttgtcttacggctcagtggtaaggtagctgtagagacacattacggggtaaatggaaaagggaaataaaggggaagcccaggcacatgggtgcagggaggggtggggaataccacttccactttcttttgtctttttctttaaaaaaaaaaaaaaaaaggcaggggtgtgat

SEQ ID NO: 2498 - DNA, 7397 bp, Homo sapiens
ttcctcttcctccccgggctaggcggtgaaccctctctggagccctgcagagtgggactgaggggctgggctctgtttgcattccccctgctccctccacactctgatgagagcttgttttcctccccagacctttggggggcctgtcttgcttgttctgaacccccaccggtccttgcctcttttttcacctgaggtccaggcaagctaccaccccaggaaggccctcagcaccactccacacatctttgccatygtggcatcagcctatgacctggctcagaatactgggcaggacccatgcatcctcctgtgtgggcacagtggctcagggaagacggaagccgccaaaaagatcatgcagttcctaagcagcctggagcaggatcagacggggaaccgrgagtgtcagktggaggatrtgctgcctatactcagcagctttggccatgccaagaccatcctcaatgccaatgccagccgcttcggccaggtcttctgcctytacctacagcaaggggtcatcgtgggagcctctgtgtctcattatctacttgagacctccagggtggtgtttcaggcccaggctgagcggagcttccatgttttttacragctgctggcagggctggactccatagagcgggagcggctctccctgcagggaccggagacttactactacctcaaccagggccaggcctgcaggctgcaaggcaaggaggatgcccaggactttgaggggctgctgaaggcactgcaggggctcggcttgtgcccagaggagttgaatgccgtctgggctgtgctggccgccatcctgcagctgggcaacatctgcttctcctcctcagagcgagagtcccaggaggtggctgctgtgtctagctgggctgagatccacacagcagcccgactgctgcgggtaccaccagagtgcctggagggggctgtcaccaggagggtcacggagacgccctatggccaggtctcgcgatccctgccygtggaaagtgcckttgatgccagggacgccctggccaaggcactgtattcccgcctcttccaccggcttctgaggagaaccaatgcacggctggcaccaccaggggagggaggcagcattggcaccgtcactgtcgtggatgcctacggctttgaggccctgcgggtgaatggcctggagcaactgtgcaacaacctcgccagcgagcgcctacagctcttctccagccagatgctgctggcccaggaggaggaggagtgtcggcgggagttgctgtcctgggtgcctgtccctcagcctccgagggagtcctgcctagacctcctggtagatcagccccacagcctcctgagtatcctggacgcccagacatggctgtcccaggccacggaccacaccttcctccagaagagccactatcaccatggtgaccaccccagctatgccaagccccggctgcccctgcccgtgttcaccgtgcgacattatgcagggactgtcacctaccaggttcacaagtttttaaacagaaaccgggatcagctggaccctgctgtggtggagatgcttggccagagccagctccaggtgcccatctgcccttccaggcccccacccgctccatactctgtcccccaattctagccccagtccaggggagggcgaggcagacccacgctggcctctcgcttccagcaggccctggaggacctcatagcccggctgggcaggagccatgtctatttcatccagtgcctcacccctaaccctggaaagcttccaggcctctttgacgtgggacatgtgacagagcaactgcaccaggcagccatactggaggccgtgggcacccgcagtgccaacttccccgtgcgtgtgccctttgaggccttcctggccagcttccaggccctggggtcagaagggcaggaagacctctctgaccgggagaagtgtggtgccgtcctgagccaggtgctgggggccgaatcacctctctatcaccttggagccaccaaggtcctgctgcaggagcagggctggcagcggctggaggagctccgggaccagcagcgctcccaggccctggtcgacctgcaccgcagcttccacacctgcatctcccgccagcgcgtcctgccccggatgcaggctcgcatgcgtgggttccaggccaggaagcggtacctccggcggcgggcagctytgggacagctgaacaccatcctgctgstggcccagcccctgctccagaggcggcagagactgcagcttgggcgttggcagggctggcatagcagcgaaagggccttggagagagtgccaagcatggagctggggcgcttggagatcccggctgagctggccgtcatgctgaagacggcggaaagccatcgggacgccctggctgggagcatcaccgagtgcctgccgcctgaggttcctgcccggcccagcctgactctcccacagaactttatccagcagcaggcgctaatcctggcccagcagatgacagcccaggccatgtccctgtccctggagcagcagaygcagcagcggcagcagcaggctcgggcctccgaggctgcgtcccaggcctcaccctcagccgtcacctccaagcccaggaagccycccacacccccggagaagccacagcgtgacctgggatcagagggtggctgcctgagggtgaggaggagacctccgaggaggctgaagacaggccctatcagcccaagagcttccagcagaaacggaactatttccagaggatggggcagccacagatcacagtgaggacgatgaagcccccggccaaggtccacatcccccagggggaagcgcaggaggaggaggaggaggaggaggaggaggaggagcaggaggagcaagaagtggaaacaagagcagtgccgtcccctcctcctccccccatcgtgaagaagccattgaagcaaggtggggccaaagctccaaaagaggctgaggctgagccagccaaggagacagcggccaagggccatggccaagggccagcccaaggcagggggactgtggtgcgcagctcagactccaagcccaagcggccacaacccagcagggaaattggcaacatcatccgcatgtaccagagccgcccgggccccgtgcctgtgcccgtgcagccatccaggcctcccaaagctttcctgaggaaaatcgaccccaaggacgaggctctggccaagctgggtatcaacggtgcccactcgtccccgccgatgctgtcccccagcccaggaaagggccccccgccagctgtggctcctcgacccaaggccccgctacagcttgggccctctagctccatcaaggaaaagcaggggccccttctggacctgtttggccagaagctgcctattgcccacacacccccacctccaccagcgccaccactgcctctgcccgaggacccagggaccctttcagcagagcgtcgttgcttgacacagcccgtggaggaccagggggtctccacmcagctactygcgccctctggcagcgtgtgcttctcctacaccggcacrccctggaagttgttcctaygcaaggaggtgttctacccacgggagaacttcagccatccctactacctgaggctcctctgtgagcagatcctacgggacaccttctccgagtcctgtatccggatttcccagaatgagcggcrgaaaatgaaagacctgctgggaggcttggaggtggacctggattctctcaccaccaccgaagacagcgtcaagaagcgcatcgtggtggccgctcgggacaactgggccaattacttctcccgcttctttcctgtctcgggcgagagtggcagcgacgtgcagctgttagccgtgtcccaccgtgggctgcgactgctcaaggtgacccaaggcccyggcctccgccccraccagctgaagattctctgctcatacagcttygcggaggtgctgggtgtggartgccggggcggctccaccctggagctgtcactgaagagcgagcagctggtgctgcacacagcccgggcaagggccmtcgaggcgctggttgagctattcctgaaygascttaagaaggactccggctatgtcatcgccctgcgcagctacatcactgacaactgcagcctcctcagcttccaccgtggggacctcatcaagctgctgccggtggccaccctggagccaggctggcagtttggctctgccgggggccgttccrgactctttcctgccgacatagtgcagccggctgccgctcccgacttttccttctccaaggagcagaggagtggctggcacaagggtcagctgtccaacggggaaccagggctggctcggtgggacagggcctcagaggtgaggaagatgggagagggacaagcagaggcaaggcctgcctgagactgaggaaggaaaggggtttgaccactcccgaggctgccatgcggtgggaccaccctgctgtccgtctcctgtggctgcccctctgcccsctcctgatggmtcgccttgtctctccagcaagactgtgcactccttgcaggcaggggctgggctggrtgctgctcttgtgtcccacgtggtacttagttcaaggctgccccagcagatgcttaataaacagctcttcactttcctggcttctggtcttgctcctttggtgtctggctggggagggatggggctggggcaggacccctgggacagggcactggacactcaggtggcaccaggtttcttgtgmtcccagcgccctgcccacccttggagccaggcacacagtgacgactcggaggcyaccagcctgtcctctgtggcctatgcctttctgcccgactcccacagctacaccatgcaggaattcgcccggcgttacttccggaggtcccaggccttgctgrkccagactgatggaggtgccgcargaaaggacacggacagcctggtgcagtacaccaaggctcccatccaggagtcgctcctcagcctcagtgatgatgtgagcaagctggctgtagccagcttcctggccctgatgcggtttatgggtgaccagtccaagccccggggcaaggatgagatggatctgctctatgaactgctgaagctgtgccagcaggagaagctgagggatgagatttactgccaggttatcaagcaggtcacrggacacccccggccggaacactgcactcgaggctggagcttcctcagccttctcacaggcttcttccccccgtcgaccaggctgatgccctacctgaccaagtttctgcaggattcaggccccagccaagagctggcccggagcagccaggagcacctccagcgcacagtcaaatatggggggcgccggcggatgcccccaccgggtgaaatgaaggctttcctgaaaggacaagcgattcgcctgcttcttattcacctgccggggggtgtggattataggacraatatccagactttcacagtagcagcagaagtgcaggaggagctgtgccggcaaatgggtatcacggagcctcaggaagtgcaggaattcgccctcttcctcatcaaagagaagagccagctggtgcggcccctgcagcccgccgaatacctcaacagcgtggtagtggaccaggacgtgagcctgcacagccggcggctccactgggagaccccactgcacttcgataactccacctacatcagcacccactacagccaggtgctgtgggactaccttcaggggaagctgccagtcagcgccaaggcagacgcgcagctcgccaggctggccgccctgcagcacctcagcaaggccaacaggaataccccctcagggcaggacctgctagcttacgtgccaaagcagctgcaacggcaggtgaacacggcctccatcaagaacctgatgggtcaggagctgagacggctggaaggacacagcccccaggaagcacagatcagcttcattgaggccatgagccagctgcccctcttcggctacaccgtctatggggtgctgcgagtgagcatgcaggccctgtccggacccactctcctggggctcaaccgccagcatctcatcctcatggaccccagctcccagagcctgtactgccgcattgccctgaagagcctgcagcggctccacctgctaagccctctggaggagaaggggccccctggcctggaagtcaactatggctcagctgacaayccccagaccatctggtttgagctgccacaggcccaggagctgctatacaccactgtcttcctgatagacagcagtgcctcttgcactgagtggcccagcatcaactgagaggagtgcaggccggggagagaagaggatgaggcctcccccggcccaagtctcacccacatggtctgccttggatgctatcagatcactgttytagaacctgcctcagcacagcccagccggcccacatgcaggccatgaggcaggggctgctatcacgtcaccagcaggcaaaraaaacagccagaccctctccaggacggcctggggccaaagcgggctgcaggaactcggctggggcacctgaggttgcccagtctgagggagatgcccacccgaccccaggctccgcccaggccccacattagcacaagcccaggcatgggagaaacagctgctgaggaaataaaactccctggagaaaagggctgkgtgcacgcctgcatgccccacaacaacacaactttattcctctcccaaacatctgtcaggcctggccttcctgagcaggagctgagcaggaacagggcctggctgcctctcctctgccacagctctgacctgggcaaggctggaagctggcatcgtaatggatgggggagtgggtggaggatctgagggtcccctgggtaggttccgataccttggacaggtgggcctcatcctgacttaraactcggggaggggccactcttccttccccttcttccagcagcagctccaccaccctccaccttctgtcctcgacatgtgtcccagaaaacccagccatgaggaccgctctgagaagggtctataggctttgcaagyagaaagaaaggtgggctgacctctgacctggattcagggggtgtctggggtcatccccaaagccaagtatggttggaaaggagaaggactgagaaaagacgatggccctggcatcagcaggtgaggcccaggatgacccatgctagaatctgggggaggacgcgggccctgcccagccagcagttggtcatctctgggggccacacaggccatgccagtcagcttcgctctcgcaccgggcccggccatggaagaagtgcctgatgaggttctgggcctcttc

SEQ ID NO: 2499 - DNA, 7379 bp, Homo sapiens
ttccaagccacaggatggccgtgacaagaggcccaaaggctcgcaggagtgctgcagcagagggcaggggtgtgggcagctagagggacctgtggctgggcagggctgaggtagcccgtgtgctgtgccggatcctttagacttgaccctgttggctacacagcatcagccytgggtattactcatccctgcgccctggccagaatgaaggaagcctctggggtggggggagggcacagccccatgtgcccacctcactgccacatgcccccaggccctgcgggtgaatggcctggagcaactgtgcaacaacctcgccagcgagcgcctacagctcttctccagccagatgctgctggcccaggaggaggaggagtgtcggcgggagttgctgtcctgggtgcctgtccctcagcctccgagggagtcctgcctagacctcctggtagatcagccccacagcctcctgagtatcctggacgcccagacatggctgtcccaggctggagtgcaatggtgcggtctcggctcactgcaacctccacctcccaggccacggaccacaccttcctccagaagagccactatcaccatggtgaccaccccagctatgccaagccccggctgcccctgcccgtgttcaccgtgcgacattatgcagggactgtcacctaccaggttcacaagtttttaaacagaaaccgggatcagctggaccctgctgtggtggagatgcttggccagagccagctccagctggtgggcagcctgttccaggaggcagagccccagtccaggggagggcgaggcagacccacgctggcctctcgcttccagcaggccctggaggacctcatagcccggctgggcaggagccatgtctatttcatccagtgcctcacccctaaccctggaaagcttccaggcctctttgacgtgggacatgtgacagagcaactgcaccaggcagccatactggaggccgtgggcacccgcagtgccaacttccccgtgcgtgtgccctttgaggccttcctggccagcttccaggccctggggtcagaagggcaggaagacctctctgaccgggagaagtgtggtgccgtcctgagccaggtgctgggggccgaatcacctctctatcaccttggagccaccaaggtcctgctgcaggagcagggctggcagcggctggaggagctccgggaccagcagcgctcccaggccctggtcgacctgcaccgcagcttccacacctgcatctcccgccagcgcgtcctgccccggatgcaggctcgcatgcgtgggttccaggccaggaagcggtacctccggcggcgggcagctytgggacagctgaacaccatcctgctgstggcccagcccctgctccagaggcggcagagactgcagcttgggcgttggcagggctggcatagcagcgaaagggccttggagagagtgccaagcatggagctggggcgcttggagatcccggctgagctggccgtcatgctgaagacggcggaaagccatcgggacgccctggctgggagcatcaccgagtgcctgccgcctgaggttcctgcccggcccagcctgactctcccagcagacattgacctgttccctttctccagcttcgtcgccatcggctttcaggaaccgtccctgcccaggccagggcagccaytggcgaagcccctaacccagctggatggagacaaccctcagcgtgccctggacatcaacaaagtgatgctgcggctcctgggggacggatccctggagtcctggcagaggcagatcatgggcrcatacctggtgcggcaggggcagtgcyggccagggctgcggaatgagctctttagccagctggtggcccagctatggcagaacccagatgaacagcagagccagcgtggctgggccctcatggctgttttgctcagcgcctttcccccactgcctgtcctacagaagccactgctcaagttcgtgtctgaccaggcccccaggggcatggcagcgctgtgccagcacaagctgctgggggccttggagcagtcgcagctggcctcgggggccactcgggcccaccccccgacccagctggagtggctggccggatggcggcggggccgcatggcgctggatgtgttcaccttcagcgaggagtgctactcggccgaggtggagtcttggaccaccggggagcagctggctgggtggatcctgcagagcagaggcctggaggcgcctccccggggctggtctgtgtcactgcactccagggacgcatggcaggacttggctggctgcgactttgtgctggacctgatcagccagactgaggacctgggggacccagctcgcccccgcagctaccccatcactcctcttggctcagccgaggccattccccttgcccctggcattcaggccccctcactgcccccaggaccccctccaggtccagccccaacgctgcccagcagggaccacacaggggaggtccagaggtcagggagcctggacggcttcctggaccagatcttccagccagtgatatcctccggcctcagcgatctggaacaaagctgggctctgagcagccgcatgaagggagggggcgccattgggcccacacagcagggctaccccatggtgtacccaggaatgattcagatgcctgcataccagccaggcatggtccctgcacccatgcccatgatgccagcaatgggcacagtccctgccatgccagccatggtggtgccgccgcagccaccgcttcccagcctggatgcagggcagctggccgtccagcagcagaactttatccagcagcaggcgctaatcctggcccagcagatgacagcccaggccatgtccctgtccctggagcagcagaygcagcagcggcagcagcaggctcgggcctccgaggctgcgtcccaggcctcaccctcagccgtcacctccaagcccaggaagccycccacacccccggagaagccacagcgtgacctgggatcagagggtggctgcctgagggagacctccgaggaggctgaagacaggccctatcagcccaagagcttccagcagaaacggaactatttccagaggatggggcagccacagatcacagtgaggacgatgaagcccccggccaaggtccacatcccccagggggaagcgcaggaggaggaggaggaggaggaggaggaggaggagcaggaggagcaagaagtggaaacaagagcagtgccgtcccctcctcctccccccatcgtgaagaagccattgaagcaaggtggggccaaagctccaaaagaggctgaggctgagccagccaaggagacagcggccaagggccatggccaagggccagcccaaggcagggggactgtggtgcgcagctcagactccaagcccaagcggccacaacccagcagggaaattggcaacatcatccgcatgtaccagagccgcccgggccccgtgcctgtgcccgtgcagccatccaggcctcccaaagctttcctgaggaaaatcgaccccaaggacgaggctctggccaagctgggtatcaacggtgcccactcgtccccgccgatgctgtcccccagcccaggaaagggccccccgccagctgtggctcctcgacccaaggccccgctacagcttgggccctctagctccatcaaggaaaagcaggggccccttctggacctgtttggccagaagctgcctattgcccacacacccccacctccaccagcgccaccactgcctctgcccgaggacccagggaccctttcagcagagcgtcgttgcttgacacagcccgtggaggaccagggggtctccacmcagctactygcgccctctggcagcgtgtgcttctcctacaccggcacrccctggaagttgttcctaygcaaggaggtgttctacccacgggagaacttcagccatccctactacctgaggctcctctgtgagcagatcctacgggacaccttctccgagtcctgtatccggatttcccagaatgagcggcrgaaaatgaaagacctgctgggaggcttggaggtggacctggattctctcaccaccaccgaagacagcgtcaagaagcgcatcgtggtggccgctcgggacaactgggccaattacttctcccgcttctttcctgtctcgggcgagagtggcagcgacgtgcagctgttagccgtgtcccaccgtgggctgcgactgctcaaggtgacccaaggcccyggcctccgccccraccagctgaagattctctgctcatacagcttygcggaggtgctgggtgtggartgccggggcggctccaccctggagctgtcactgaagagcgagcagctggtgctgcacacagcccgggcaagggccmtcgaggcgctggttgagctattcctgaaygascttaagaaggactccggctatgtcatcgccctgcgcagctacatcactgacaactgcagcctcctcagcttccaccgtggggacctcatcaagctgctgccggtggccaccctggagccaggctggcagtttggctctgccgggggccgttccrgactctttcctgccgacatagtgcagccggctgccgctcccgacttttccttctccaaggagcagaggagtggctggcacaagggtcagctgtccaacggggaaccagggctggctcggtgggacagggcctcagaggtgaggaagatgggagagggacaagcagaggcaaggcctgcctgagactgaggaaggaaaggggtttgaccactcccgaggctgccatgcggtgggaccaccctgctgtccgtctcctgtggctgcccctctgcccsctcctgatggmtcgccttgtctctccagcaagactgtgcactccttgcaggcaggggctgggctggrtgctgctcttgtgtcccacgtggtacttagttcaaggctgccccagcagatgcttaataaacagctcttcactttcctggcttctggtcttgctcctttggtgtctggctggggagggatggggctggggcaggacccctgggacagggcactggacactcaggtggcaccaggtttcttgtgmtcccagcgccctgcccacccttggagccaggcacacagtgacgactcggaggcyaccagcctgtcctctgtggcctatgcctttctgcccgactcccacagctacaccatgcaggaattcgcccggcgttacttccggaggtcccaggccttgctgrkccagactgatggaggtgccgcargaaaggacacggacagcctggtgcagtacaccaaggctcccatccaggagtcgctcctcagcctcagtgatgatgtgagcaagctggctgtagccagcttcctggccctgatgcggtttatgggtgaccagtccaagccccggggcaaggatgagatggatctgctctatgaactgctgaagctgtgccagcaggagaagctgagggatgagatttactgccaggttatcaagcaggtcacrggacacccccggccggaacactgcactcgaggctggagcttcctcagccttctcacaggcttcttccccccgtcgaccaggctgatgccctacctgaccaagtttctgcaggattcaggccccagccaagagctggcccggagcagccaggagcacctccagcgcacagtcaaatatggggggcgccggcggatgcccccaccgggtgaaatgaaggctttcctgaaaggacaagcgattcgcctgcttcttattcacctgccggggggtgtggattataggacraatatccagactttcacagtagcagcagaagtgcaggaggagctgtgccggcaaatgggtatcacggagcctcaggaagtgcaggaattcgccctcttcctcatcaaagagaagagccagctggtgcggcccctgcagcccgccgaatacctcaacagcgtggtagtggaccaggacgtgagcctgcacagccggcggctccactgggagaccccactgcacttcgataactccacctacatcagcacccactacagccaggtgctgtgggactaccttcaggggaagctgccagtcagcgccaaggcagacgcgcagctcgccaggctggccgccctgcagcacctcagcaaggccaacaggaataccccctcagggcaggacctgctagcttacgtgccaaagcagctgcaacggcaggtgaacacggcctccatcaagaacctgatgggtcaggagctgagacggctggaaggacacagcccccaggaagcacagatcagcttcattgaggccatgagccagctgcccctcttcggctacaccgtctatggggtgctgcgagtgagcatgcaggccctgtccggacccactctcctggggctcaaccgccagcatctcatcctcatggaccccagctcccagagcctgtactgccgcattgccctgaagagcctgcagcggctccacctgctaagccctctggaggagaaggggccccctggcctggaagtcaactatggctcagctgacaayccccagaccatctggtttgagctgccacaggcccaggagctgctatacaccactgtcttcctgatagacagcagtgcctcttgcactgagtggcccagcatcaactgagaggagtgcaggccggggagagaagaggatgaggcctcccccggcccaagtctcacccacatggtctgccttggatgctatcagatcactgttytagaacctgcctcagcacagcccagccggcccacatgcaggccatgaggcaggggctgctatcacgtcaccagcaggcaaaraaaacagccagaccctctccaggacggcctggggccaaagcgggctgcaggaactcggctggggcacctgaggttgcccagtctgagggagatgcccacccgaccccaggctccgcccaggccccacattagcacaagcccaggcatgggagaaacagctgctgaggaaataaaactccctggagaaaagggctgkgtgcacgcctgcatgccccacaacaacacaactttattcctctcccaaacatctgtcaggcctggccttcctgagcaggagctgagcaggaacagggcctggctgcctctcctctgccacagctctgacctgggcaaggctggaagctggcatcgtaatggatgggggagtgggtgatcctgacttaraactcggggaggggccactcttccttccccttcttccagcagcagctccaccaccctccaccttctgtcctcgacatgtgtcccagaaaacccagccatgaggaccg

SEQ ID NO: 2500 - DNA, 7031 bp, Homo sapiens
ttcctcttcctccccgggctaggcggtgaaccctctctggagccctgcagagtgggactgaggggctgggctctgtttgcattccccctgctccctccacactctgatgagagcttgttttcctccccagacctttggggggcctgtcttgcttgttctgaacccccaccggtccttgcctcttttttcacctgaggtccaggcaagctaccaccccaggaaggccctcagcaccactccacacatctttgccatygtggcatcagcctatgacctggctcagaatactgggcaggacccatgcatcctcctgtgtgggcacagtggctcagggaagacggaagccgccaaaaagatcatgcagttcctaagcagcctggagcaggatcagacggggaaccgrgagtgtcagktggaggatrtgctgcctatactcagcagctttggccatgccaagaccatcctcaatgccaatgccagccgcttcggccaggtcttctgcctytacctacagcaaggggtcatcgtgggagcctctgtgtctcattatctacttgagacctccagggtggtgtttcaggcccaggctgagcggagcttccatgttttttacragctgctggcagggctggactccatagagcgggagcggctctccctgcagggaccggagacttactactacctcaaccagggccaggcctgcaggctgcaaggcaaggaggatgcccaggactttgaggggctgctgaaggcactgcaggggctcggcttgtgcccagaggagttgaatgccgtctgggctgtgctggccgccatcctgcagctgggcaacatctgcttctcctcctcagagcgagagtcccaggaggtggctgctgtgtctagctgggctgagatccacacagcagcccgactgctgcgggtaccaccagagtgcctggagggggctgtcaccaggagggtcacggagacgccctatggccaggtctcgcgatccctgccygtggaaagtgcckttgatgccagggacgccctggccaaggcactgtattcccgcctcttccaccggcttctgaggagaaccaatgcacggctggcaccaccaggggagggaggcagcattggcaccgtcactgtcgtggatgcctacggctttgaggccctgcgggtgaatggcctggagcaactgtgcaacaacctcgccagcgagcgcctacagctcttctccagccagatgctgctggcccaggaggaggaggagtgtcggcgggagttgctgtcctgggtgcctgtccctcagcctccgagggagtcctgcctagacctcctggtagatcagccccacagcctcctgagtatcctggacgcccagacatggctgtcccaggccacggaccacaccttcctccagaagagccactatcaccatggtgaccaccccagctatgccaagccccggctgcccctgcccgtgttcaccgtgcgacattatgcagggactgtcacctaccaggttcacaagtttttaaacagaaaccgggatcagctggaccctgctgtggtggagatgcttggccagagccagctccaggtgcccatctgcccttccaggcccccacccgctccatactctgtcccccaattctagccccagtccaggggagggcgaggcagacccacgctggcctctcgcttccagcaggccctggaggacctcatagcccggctgggcaggagccatgtctatttcatccagtgcctcacccctaaccctggaaagcttccaggcctctttgacgtgggacatgtgacagagcaactgcaccaggcagccatactggaggccgtgggcacccgcagtgccaacttccccgtgcgtgtgccctttgaggccttcctggccagcttccaggccctggggtcagaagggcaggaagacctctctgaccgggagaagtgtggtgccgtcctgagccaggtgctgggggccgaatcacctctctatcaccttggagccaccaaggtcctgctgcaggagcagggctggcagcggctggaggagctccgggaccagcagcgctcccaggccctggtcgacctgcaccgcagcttccacacctgcatctcccgccagcgcgtcctgccccggatgcaggctcgcatgcgtgggttccaggccaggaagcggtacctccggcggcgggcagctytgggacagctgaacaccatcctgctgstggcccagcccctgctccagaggcggcagagactgcagcttgggcgttggcagggctggcatagcagcgaaagggccttggagagagtgccaagcatggagctggggcgcttggagatcccggctgagctggccgtcatgctgaagacggcggaaagccatcgggacgccctggctgggagcatcaccgagtgcctgccgcctgaggttcctgcccggcccagcctgactctcccacagaactttatccagcagcaggcgctaatcctggcccagcagatgacagcccaggccatgtccctgtccctggagcagcagaygcagcagcggcagcagcaggctcgggcctccgaggctgcgtcccaggcctcaccctcagccgtcacctccaagcccaggaagccycccacacccccggagaagccacagcgtgacctgggatcagagggtggctgcctgagggtgaggaggagacctccgaggaggctgaagacaggccctatcagcccaagagcttccagcagaaacggaactatttccagaggatggggcagccacagatcacagtgaggacgatgaagcccccggccaaggtccacatcccccagggggaagcgcaggaggaggaggaggaggaggaggaggaggaggagcaggaggagcaagaagtggaaacaagagcagtgccgtcccctcctcctccccccatcgtgaagaagccattgaagcaaggtggggccaaagctccaaaagaggctgaggctgagccagccaaggagacagcggccaagggccatggccaagggccagcccaaggcagggggactgtggtgcgcagctcagactccaagcccaagcggccacaacccagcagggaaattggcaacatcatccgcatgtaccagagccgcccgggccccgtgcctgtgcccgtgcagccatccaggcctcccaaagctttcctgaggaaaatcgaccccaaggacgaggctctggccaagctgggtatcaacggtgcccactcgtccccgccgatgctgtcccccagcccaggaaagggccccccgccagctgtggctcctcgacccaaggccccgctacagcttgggccctctagctccatcaaggaaaagcaggggccccttctggacctgtttggccagaagctgcctattgcccacacacccccacctccaccagcgccaccactgcctctgcccgaggacccagggaccctttcagcagagcgtcgttgcttgacacagcccgtggaggaccagggggtctccacmcagctactygcgccctctggcagcgtgtgcttctcctacaccggcacrccctggaagttgttcctaygcaaggaggtgttctacccacgggagaacttcagccatccctactacctgaggctcctctgtgagcagatcctacgggacaccttctccgagtcctgtatccggatttcccagaatgagcggcrgaaaatgaaagacctgctgggaggcttggaggtggacctggattctctcaccaccaccgaagacagcgtcaagaagcgcatcgtggtggccgctcgggacaactgggccaattacttctcccgcttctttcctgtctcgggcgagagtggcagcgacgtgcagctgttagccgtgtcccaccgtgggctgcgactgctcaaggtgacccaaggcccyggcctccgccccraccagctgaagattctctgctcatacagcttygcggaggtgctgggtgtggartgccggggcggctccaccctggagctgtcactgaagagcgagcagctggtgctgcacacagcccgggcaagggccmtcgaggcgctggttgagctattcctgaaygascttaagaaggactccggctatgtcatcgccctgcgcagctacatcactgacaactgcagcctcctcagcttccaccgtggggacctcatcaagctgctgccggtggccaccctggagccaggctggcagtttggctctgccgggggccgttccrgactctttcctgccgacatagtgcagccggctgccgctcccgacttttccttctccaaggagcagaggagtggctggcacaagggtcagctgtccaacggggaaccagggctggctcggtgggacagggcctcagaggtgaggaagatgggagagggacaagcagaggcaaggcctgcctgagactgaggaaggaaaggggtttgaccactcccgaggctgccatgcggtgggaccaccctgctgtccgtctcctgtggctgcccctctgcccsctcctgatggmtcgccttgtctctccagcaagactgtgcactccttgcaggcaggggctgggctggrtgctgctcttgtgtcccacgtggtacttagttcaaggctgccccagcagatgcttaataaacagctcttcactttcctggcttctggtcttgctcctttggtgtctggctggggagggatggggctggggcaggacccctgggacagggcactggacactcaggtggcaccaggtttcttgtgmtcccagcgccctgcccacccttggagccaggcacacagtgacgactcggaggcyaccagcctgtcctctgtggcctatgcctttctgcccgactcccacagctacaccatgcaggaattcgcccggcgttacttccggaggtcccaggccttgctgrkccagactgatggaggtgccgcargaaaggacacggacagcctggtgcagtacaccaaggctcccatccaggagtcgctcctcagcctcagtgatgatgtgagcaagctggctgtagccagcttcctggccctgatgcggtttatgggtgaccagtccaagccccggggcaaggatgagatggatctgctctatgaactgctgaagctgtgccagcaggagaagctgagggatgagatttactgccaggttatcaagcaggtcacrggacacccccggccggaacactgcactcgaggctggagcttcctcagccttctcacaggcttcttccccccgtcgaccaggctgatgccctacctgaccaagtttctgcaggattcaggccccagccaagagctggcccggagcagccaggagcacctccagcgcacagtcaaatatggggggcgccggcggatgcccccaccgggtgaaatgaaggctttcctgaaaggacaagcgattcgcctgcttcttattcacctgccggggggtgtggattataggacraatatccagactttcacagtagcagcagaagtgcaggaggagctgtgccggcaaatgggtatcacggagcctcaggaagtgcaggaattcgccctcttcctcatcaaagagaagagccagctggtgcggcccctgcagcccgccgaatacctcaacagcgtggtagtggaccaggacgtgagcctgcacagccggcggctccactgggagaccccactgcacttcgataactccacctacatcagcacccactacagccaggtgctgtgggactaccttcaggggaagctgccagtcagcgccaaggcagacgcgcagctcgccaggctggccgccctgcagcacctcagcaaggccaacaggaataccccctcagggcaggacctgctagcttacgtgccaaagcagctgcaacggcaggtgaacacggcctccatcaagaacctgatgggtcaggagctgagacggctggaaggacacagcccccaggaagcacagatcagcttcattgaggccatgagccagctgcccctcttcggctacaccgtctatggggtgctgcgagtgagcatgcaggccctgtccggacccactctcctggggctcaaccgccagcatctcatcctcatggaccccagctcccagagcctgtactgccgcattgccctgaagagcctgcagcggctccacctgctaagccctctggaggagaaggggccccctggcctggaagtcaactatggctcagctgacaayccccagaccatctggtttgagctgccacaggcccaggagctgctatacaccactgtcttcctgatagacagcagtgcctcttgcactgagtggcccagcatcaactgagaggagtgcaggccggggagagaagaggatgaggcctcccccggcccaagtctcacccacatggtctgccttggatgctatcagatcactgttytagaacctgcctcagcacagcccagccggcccacatgcaggccatgaggcaggggctgctatcacgtcaccagcaggcaaaraaaacagccagaccctctccaggacggcctggggccaaagcgggctgcaggaactcggctggggcacctgaggttgcccagtctgagggagatgcccacccgaccccaggctccgcccaggccccacattagcacaagcccaggcatgggagaaacagctgctgaggaaataaaactccctggagaaaagggctgkgtgcacgcctgcatgccccacaacaacacaactttattcctctcccaaacatctgtcaggcctggccttcctgagcaggagctgagcaggaacagggcctggctgcctctcctctgccacagctctgacctgggcaaggctggaagctggcatcgtaatggatgggggagtgggtgatcctgacttaraactcggggaggggccactcttccttccccttcttccagcagcagctccaccaccctccaccttctgtcctcgacatgtgtcccagaaaacccagccatgaggaccg

SEQ ID NO: 2501 - DNA, 7387 bp, Homo sapiens
ttccaagccacaggatggccgtgacaagaggcccaaaggctcgcaggagtgctgcagcagagggcaggggtgtgggcagctagagggacctgtggctgggcagggctgaggtagcccgtgtgctgtgccggatcctttagacttgaccctgttggctacacagcatcagccytgggtattactcatccctgcgccctggccagaatgaaggaagcctctggggtggggggagggcacagccccatgtgcccacctcactgccacatgcccccaggccctgcgggtgaatggcctggagcaactgtgcaacaacctcgccagcgagcgcctacagctcttctccagccagatgctgctggcccaggaggaggaggagtgtcggcgggagttgctgtcctgggtgcctgtccctcagcctccgagggagtcctgcctagacctcctggtagatcagccccacagcctcctgagtatcctggacgcccagacatggctgtcccaggctggagtgcaatggtgcggtctcggctcactgcaacctccacctcccaggccacggaccacaccttcctccagaagagccactatcaccatggtgaccaccccagctatgccaagccccggctgcccctgcccgtgttcaccgtgcgacattatgcagggactgtcacctaccaggttcacaagtttttaaacagaaaccgggatcagctggaccctgctgtggtggagatgcttggccagagccagctccagctggtgggcagcctgttccaggaggcagagccccagtccaggggagggcgaggcagacccacgctggcctctcgcttccagcaggccctggaggacctcatagcccggctgggcaggagccatgtctatttcatccagtgcctcacccctaaccctggaaagcttccaggcctctttgacgtgggacatgtgacagagcaactgcaccaggcagccatactggaggccgtgggcacccgcagtgccaacttccccgtgcgtgtgccctttgaggccttcctggccagcttccaggccctggggtcagaagggcaggaagacctctctgaccgggagaagtgtggtgccgtcctgagccaggtgctgggggccgaatcacctctctatcaccttggagccaccaaggtcctgctgcaggagcagggctggcagcggctggaggagctccgggaccagcagcgctcccaggccctggtcgacctgcaccgcagcttccacacctgcatctcccgccagcgcgtcctgccccggatgcaggctcgcatgcgtgggttccaggccaggaagcggtacctccggcggcgggcagctytgggacagctgaacaccatcctgctgstggcccagcccctgctccagaggcggcagagactgcagcttgggcgttggcagggctggcatagcagcgaaagggccttggagagagtgccaagcatggagctggggcgcttggagatcccggctgagctggccgtcatgctgaagacggcggaaagccatcgggacgccctggctgggagcatcaccgagtgcctgccgcctgaggttcctgcccggcccagcctgactctcccagcagacattgacctgttccctttctccagcttcgtcgccatcggctttcaggaaccgtccctgcccaggccagggcagccaytggcgaagcccctaacccagctggatggagacaaccctcagcgtgccctggacatcaacaaagtgatgctgcggctcctgggggacggatccctggagtcctggcagaggcagatcatgggcrcatacctggtgcggcaggggcagtgcyggccagggctgcggaatgagctctttagccagctggtggcccagctatggcagaacccagatgaacagcagagccagcgtggctgggccctcatggctgttttgctcagcgcctttcccccactgcctgtcctacagaagccactgctcaagttcgtgtctgaccaggcccccaggggcatggcagcgctgtgccagcacaagctgctgggggccttggagcagtcgcagctggcctcgggggccactcgggcccaccccccgacccagctggagtggctggccggatggcggcggggccgcatggcgctggatgtgttcaccttcagcgaggagtgctactcggccgaggtggagtcttggaccaccggggagcagctggctgggtggatcctgcagagcagaggcctggaggcgcctccccggggctggtctgtgtcactgcactccagggacgcatggcaggacttggctggctgcgactttgtgctggacctgatcagccagactgaggacctgggggacccagctcgcccccgcagctaccccatcactcctcttggctcagccgaggccattccccttgcccctggcattcaggccccctcactgcccccaggaccccctccaggtccagccccaacgctgcccagcagggaccacacaggggaggtccagaggtcagggagcctggacggcttcctggaccagatcttccagccagtgatatcctccggcctcagcgatctggaacaaagctgggctctgagcagccgcatgaagggagggggcgccattgggcccacacagcagggctaccccatggtgtacccaggaatgattcagatgcctgcataccagccaggcatggtccctgcacccatgcccatgatgccagcaatgggcacagtccctgccatgccagccatggtggtgccgccgcagccaccgcttcccagcctggatgcagggcagctggccgtccagcagcagaactttatccagcagcaggcgctaatcctggcccagcagatgacagcccaggccatgtccctgtccctggagcagcagaygcagcagcggcagcagcaggctcgggcctccgaggctgcgtcccaggcctcaccctcagccgtcacctccaagcccaggaagccycccacacccccggagaagccacagcgtgacctgggatcagagggtggctgcctgagggtgaggaggagacctccgaggaggctgaagacaggccctatcagcccaagagcttccagcagaaacggaactatttccagaggatggggcagccacagatcacagtgaggacgatgaagcccccggccaaggtccacatcccccagggggaagcgcaggaggaggaggaggaggaggaggaggaggaggagcaggaggagcaagaagtggaaacaagagcagtgccgtcccctcctcctccccccatcgtgaagaagccattgaagcaaggtggggccaaagctccaaaagaggctgaggctgagccagccaaggagacagcggccaagggccatggccaagggccagcccaaggcagggggactgtggtgcgcagctcagactccaagcccaagcggccacaacccagcagggaaattggcaacatcatccgcatgtaccagagccgcccgggccccgtgcctgtgcccgtgcagccatccaggcctcccaaagctttcctgaggaaaatcgaccccaaggacgaggctctggccaagctgggtatcaacggtgcccactcgtccccgccgatgctgtcccccagcccaggaaagggccccccgccagctgtggctcctcgacccaaggccccgctacagcttgggccctctagctccatcaaggaaaagcaggggccccttctggacctgtttggccagaagctgcctattgcccacacacccccacctccaccagcgccaccactgcctctgcccgaggacccagggaccctttcagcagagcgtcgttgcttgacacagcccgtggaggaccagggggtctccacmcagctactygcgccctctggcagcgtgtgcttctcctacaccggcacrccctggaagttgttcctaygcaaggaggtgttctacccacgggagaacttcagccatccctactacctgaggctcctctgtgagcagatcctacgggacaccttctccgagtcctgtatccggatttcccagaatgagcggcrgaaaatgaaagacctgctgggaggcttggaggtggacctggattctctcaccaccaccgaagacagcgtcaagaagcgcatcgtggtggccgctcgggacaactgggccaattacttctcccgcttctttcctgtctcgggcgagagtggcagcgacgtgcagctgttagccgtgtcccaccgtgggctgcgactgctcaaggtgacccaaggcccyggcctccgccccraccagctgaagattctctgctcatacagcttygcggaggtgctgggtgtggartgccggggcggctccaccctggagctgtcactgaagagcgagcagctggtgctgcacacagcccgggcaagggccmtcgaggcgctggttgagctattcctgaaygascttaagaaggactccggctatgtcatcgccctgcgcagctacatcactgacaactgcagcctcctcagcttccaccgtggggacctcatcaagctgctgccggtggccaccctggagccaggctggcagtttggctctgccgggggccgttccrgactctttcctgccgacatagtgcagccggctgccgctcccgacttttccttctccaaggagcagaggagtggctggcacaagggtcagctgtccaacggggaaccagggctggctcggtgggacagggcctcagaggtgaggaagatgggagagggacaagcagaggcaaggcctgcctgagactgaggaaggaaaggggtttgaccactcccgaggctgccatgcggtgggaccaccctgctgtccgtctcctgtggctgcccctctgcccsctcctgatggmtcgccttgtctctccagcaagactgtgcactccttgcaggcaggggctgggctggrtgctgctcttgtgtcccacgtggtacttagttcaaggctgccccagcagatgcttaataaacagctcttcactttcctggcttctggtcttgctcctttggtgtctggctggggagggatggggctggggcaggacccctgggacagggcactggacactcaggtggcaccaggtttcttgtgmtcccagcgccctgcccacccttggagccaggcacacagtgacgactcggaggcyaccagcctgtcctctgtggcctatgcctttctgcccgactcccacagctacaccatgcaggaattcgcccggcgttacttccggaggtcccaggccttgctgrkccagactgatggaggtgccgcargaaaggacacggacagcctggtgcagtacaccaaggctcccatccaggagtcgctcctcagcctcagtgatgatgtgagcaagctggctgtagccagcttcctggccctgatgcggtttatgggtgaccagtccaagccccggggcaaggatgagatggatctgctctatgaactgctgaagctgtgccagcaggagaagctgagggatgagatttactgccaggttatcaagcaggtcacrggacacccccggccggaacactgcactcgaggctggagcttcctcagccttctcacaggcttcttccccccgtcgaccaggctgatgccctacctgaccaagtttctgcaggattcaggccccagccaagagctggcccggagcagccaggagcacctccagcgcacagtcaaatatggggggcgccggcggatgcccccaccgggtgaaatgaaggctttcctgaaaggacaagcgattcgcctgcttcttattcacctgccggggggtgtggattataggacraatatccagactttcacagtagcagcagaagtgcaggaggagctgtgccggcaaatgggtatcacggagcctcaggaagtgcaggaattcgccctcttcctcatcaaagagaagagccagctggtgcggcccctgcagcccgccgaatacctcaacagcgtggtagtggaccaggacgtgagcctgcacagccggcggctccactgggagaccccactgcacttcgataactccacctacatcagcacccactacagccaggtgctgtgggactaccttcaggggaagctgccagtcagcgccaaggcagacgcgcagctcgccaggctggccgccctgcagcacctcagcaaggccaacaggaataccccctcagggcaggacctgctagcttacgtgccaaagcagctgcaacggcaggtgaacacggcctccatcaagaacctgatgggtcaggagctgagacggctggaaggacacagcccccaggaagcacagatcagcttcattgaggccatgagccagctgcccctcttcggctacaccgtctatggggtgctgcgagtgagcatgcaggccctgtccggacccactctcctggggctcaaccgccagcatctcatcctcatggaccccagctcccagagcctgtactgccgcattgccctgaagagcctgcagcggctccacctgctaagccctctggaggagaaggggccccctggcctggaagtcaactatggctcagctgacaayccccagaccatctggtttgagctgccacaggcccaggagctgctatacaccactgtcttcctgatagacagcagtgcctcttgcactgagtggcccagcatcaactgagaggagtgcaggccggggagagaagaggatgaggcctcccccggcccaagtctcacccacatggtctgccttggatgctatcagatcactgttytagaacctgcctcagcacagcccagccggcccacatgcaggccatgaggcaggggctgctatcacgtcaccagcaggcaaaraaaacagccagaccctctccaggacggcctggggccaaagcgggctgcaggaactcggctggggcacctgaggttgcccagtctgagggagatgcccacccgaccccaggctccgcccaggccccacattagcacaagcccaggcatgggagaaacagctgctgaggaaataaaactccctggagaaaagggctgkgtgcacgcctgcatgccccacaacaacacaactttattcctctcccaaacatctgtcaggcctggccttcctgagcaggagctgagcaggaacagggcctggctgcctctcctctgccacagctctgacctgggcaaggctggaagctggcatcgtaatggatgggggagtgggtgatcctgacttaraactcggggaggggccactcttccttccccttcttccagcagcagctccaccaccctccaccttctgtcctcgacatgtgtcccagaaaacccagccatgaggaccg

SEQ ID NO: 2502 - DNA, 3163 bp, Homo sapiens
gctggcagtttggctctgccgggggccgttccrgactctttcctgccgacatagtgcagccggctgccgctcccgacttttccttctccaaggagcagaggagtggctggcacaagggtcagctgtccaacggggaaccagggctggctcggtgggacagggcctcagaggtgaggaagatgggagagggacaagcagaggcaaggcctgcctgagactgaggaaggaaaggggtttgaccactcccgaggctgccatgcggtgggaccaccctgctgtccgtctcctgtggctgcccctctgcccsctcctgatggmtcgccttgtctctccagcaagactgtgcactccttgcaggcaggggctgggctggrtgctgctcttgtgtcccacgtggtacttagttcaaggctgccccagcagatgcttaataaacagctcttcactttcctggcttctggtcttgctcctttggtgtctggctggggagggatggggctggggcaggacccctgggacagggcactggacactcaggtggcaccaggtttcttgtgmtcccagcgccctgcccacccttggagccaggcacacagtgacgactcggaggcyaccagcctgtcctctgtggcctatgcctttctgcccgactcccacagctacaccatgcaggaattcgcccggcgttacttccggaggtcccaggccttgctgrkccagactgatggaggtgccgcargaaaggacacggacagcctggtgcagtacaccaaggctcccatccaggagtcgctcctcagcctcagtgatgatgtgagcaagctggctgtagccagcttcctggccctgatgcggtttatgggtgaccagtccaagccccggggcaaggatgagatggatctgctctatgaactgctgaagctgtgccagcaggagaagctgagggatgagatttactgccaggttatcaagcaggtcacrggacacccccggccggaacactgcactcgaggctggagcttcctcagccttctcacaggcttcttccccccgtcgaccaggctgatgccctacctgaccaagtttctgcaggattcaggccccagccaagagctggcccggagcagccaggagcacctccagcgcacagtcaaatatggggggcgccggcggatgcccccaccgggtgaaatgaaggctttcctgaaaggacaagcgattcgcctgcttcttattcacctgccggggggtgtggattataggacraatatccagactttcacagtagcagcagaagtgcaggaggagctgtgccggcaaatgggtatcacggagcctcaggaagtgcaggaattcgccctcttcctcatcaaagagaagagccagctggtgcggcccctgcagcccgccgaatacctcaacagcgtggtagtggaccaggacgtgagcctgcacagccggcggctccactgggagaccccactgcacttcgataactccacctacatcagcacccactacagccaggtgctgtgggactaccttcaggggaagctgccagtcagcgccaaggcagacgcgcagctcgccaggctggccgccctgcagcacctcagcaaggccaacaggaataccccctcagggcaggacctgctagcttacgtgccaaagcagctgcaacggcaggtgaacacggcctccatcaagaacctgatgggtcaggagctgagacggctggaaggacacagcccccaggaagcacagatcagcttcattgaggccatgagccagctgcccctcttcggctacaccgtctatggggtgctgcgagtgagcatgcaggccctgtccggacccactctcctggggctcaaccgccagcatctcatcctcatggaccccagctcccagagcctgtactgccgcattgccctgaagagcctgcagcggctccacctgctaagccctctggaggagaaggggccccctggcctggaagtcaactatggctcagctgacaayccccagaccatctggtttgagctgccacaggcccaggagctgctatacaccactgtcttcctgatagacagcagtgcctcttgcactgagtggcccagcatcaactgagaggagtgcaggccggggagagaagaggatgaggcctcccccggcccaagtctcacccacatggtctgccttggatgctatcagatcactgttytagaacctgcctcagcacagcccagccggcccacatgcaggccatgaggcaggggctgctatcacgtcaccagcaggcaaaraaaacagccagaccctctccaggacggcctggggccaaagcgggctgcaggaactcggctggggcacctgaggttgcccagtctgagggagatgcccacccgaccccaggctccgcccaggccccacattagcacaagcccaggcatgggagaaacagctgctgaggaaataaaactccctggagaaaagggctgkgtgcacgcctgcatgccccacaacaacacaactttattcctctcccaaacatctgtcaggcctggccttcctgagcaggagctgagcaggaacagggcctggctgcctctcctctgccacagctctgacctgggcaaggctggaagctggcatcgtaatggatgggggagtgggtggaggatctgagggtcccctgggtaggttccgataccttggacaggtgggcctcatcctgacttaraactcggggaggggccactcttccttccccttcttccagcagcagctccaccaccctccaccttctgtcctcgacatgtgtcccagaaaacccagccatgaggaccgctctgagaagggtctataggctttgcaagyagaaagaaaggtgggctgacctctgacctggattcagggggtgtctggggtcatccccaaagccaagtatggttggaaaggagaaggactgagaaaagacgatggccctggcatcagcaggtgaggcccaggatgacccatgctagaatctgggggaggacgcgggccctgcccagccagcagttggtcatctctgggggccacacaggccatgccagtcagcttcgctctcgcaccgggcccggccatggaagaagtgcctgatgaggttctgggcctcttc

SEQ ID NO: 2503 - DNA, 742 bp, Homo sapiens
cacctcccgccacagctgggtgggcagtcagtgtggcctctgtccaggtggtgggggcatccggggaccaggtgggggcgcacgcaggagcggtgcgtttcaggctgcaggtgccgtctgcccgtctcacttccggcctctccactgtgctggacaccctctctgagcagctttgctggaaagagcggagagcctgctgcaaaccaggcaccttgtaggcaggcaaggaggcagagtcctcaccagcccttscagagccaggccagttagagagggcrgccctgcagagtcctatgtccaaacgcagaaggcrcagaagcagagcagggggagggccggccagggcctctgccaggttagaagtcaccatcgcgctcccccaggggctgtgccgcctgctgcctggcagcctccaggaaggccagctccttggcwtccttcttctggtttcgcgcctcatactccaacctgttggtgatgatccgctggacgatgaggtctgtggtgaggttgctgccactgtcaatctgacggaagatgccccttctcttgggctcctggtatgggtcggagccatccctgtmagggataatttctgtcttgccgtgacacaccaggtccaccttgaagtgacttaggagctctgctgtgaccgcgtacggggctccaatcaccacttctgacacgtaccggcaggccagcacgctcagagtccgttcatgcagattcatgatggggtagt

SEQ ID NO: 2504 - DNA, 1474 bp, Homo sapiens
gacttttattacgttgccatggatttcggaggtcatgggctctcgtcccattacagcccaggtgtcccatattacctccagacttttgtgagtgagatccgaagagttgtggcaggtggcgtcgtgggcggaatgtttttctgtaccttccccgagatggtggataaacttatcttgctggacacgccgctctttctcctggaatcagatgaaatggagaacttgctgacctacaagcggagagccatagagcacgtgctgcaggtagaggcctcccaggagccctcgcacgtgttcagcctgaagcagctgctgcagaggttactgaagagcaatagccacttgagtgaggagtgcggggagcttctcctgcaaagaggaaccacgaaggtggccacaggtctggttctgaacagagaccagaggctcgcctgggcagagaacagcattgacttcrtcagcagggagctgtgtgcgcattccatcaggaagctgcaggcccatgtcctgttgatcaaagcagtccacggatattttgattcaagacagaattactctgasaaggagtccctgtcgttcatgatagacacgatgaaatccaccctcaaagagcrgttccagtttgtggaagtcccaggcaatcactgtgtccacatgagcgaaccccagcacgtsgccagtatcatcagctccttcttacagygcacacacaygctcccagcccagctgtagctctgggcctggaactatgaagacctagtgctcccagactcaacaytgggactctgagttcctgagccccacaacaaggccagggatggtggggacaggcctcactagtcttgaggcccagcctaggatggtagtcaggggaaggagcgagattccaacttcaacatctgtgacctcaagrgggagacagagtctgggttcsagggctgctktctcctggctaataataaatmtccagccagctggaggaaggaagggcrggctgggcccacctagcctttccctgctgcccaactggatggaaaataaaaggttyttktwttctcactgcttttgaggcttttttgttgccagcaagggcttttgcattgagggaaaaggaagcacagaacggattcatccagggtcctcaagggtgtggaggcaagaggtgggaaggacaagtcctcctctmggcacgcctgggtctccaggactgctgaagcacaagacccgaggrgtggcctggtccttcmctcctggcctgtgtggactctgatggggctgttggacgcgrtggccttcaacctggggcccgttggccagagctcggcctctcagagaccgctgcaggccctgyctcacctcatgtkcctcctggccctgcacctccagccatycactgmggctctcacrgctcagtasggtcggaatttgcgctgggcccgcagcagctcgatcctctgcttgtcctcctcaaact

SEQ ID NO: 2505 - DNA, 1721 bp, Homo sapiens
gaagcaggggcaagaggagaaggagggcaaccgagtaggagggcctataacagcccaggtctgatctcagagctgaagctggctgtgccctggggccacatcgcagccaaagcctggggctccctgcagggccctccagttctctgcctgcacggctggctggacaatgccarctccttcgacagactcatccctcttctcccgcaagacttttattacgttgccatggatttcggaggtcatgggctctcgtcccattacagcccaggtgtcccatattacctccagacttttgtgagtgagatccgaagagttgtggcagccttgaaatggaatcgattctccattctgggccacagcttcggtggcgtcgtgggcggaatgtttttctgtaccttccccgagatggtggataaacttatcttgctggacacgccgctctttctcctggaatcagatgaaatggagaacttgctgacctacaagcggagagccatagagcacgtgctgcaggtagaggcctcccaggagccctcgcacgtgttcagcctgaagcagctgctgcagaggcagagaacagcattgacttcrtcagcagggagctgtgtgcgcattccatcaggaagctgcaggcccatgtcctgttgatcaaagcagtccacggatattttgattcaagacagaattactctgasaaggagtccctgtcgttcatgatagacacgatgaaatccaccctcaaagaggtacctcttctgatacaatcacagcaaccctggcctyggccccgccctgtccctgccatgcaacttcacaactcagctrgcctagacccctgggaggcctccaagtccctaggcrgttccagtttgtggaagtcccaggcaatcactgtgtccacatgagcgaaccccagcacgtsgccagtatcatcagctccttcttacagygcacacacaygctcccagcccagctgtagctctgggcctggaactatgaagacctagtgctcccagactcaacaytgggactctgagttcctgagccccacaacaaggccagggatggtggggacaggcctcactagtcttgaggcccagcctaggatggtagtcaggggaaggagcgagattccaacttcaacatctgtgacctcaagrgggagacagagtctgggttcsagggctgctktctcctggctaataataaatmtccagccagctggaggaaggaagggcrggctgggcccacctagcctttccctgctgcccaactggatggaaaataaaaggttyttktwttctcactgcttttgaggcttttttgttgccagcaagggcttttgcattgagggaaaaggaagcacagaacggattcatccagggtcctcaagggtgtggaggcaagaggtgggaaggacaagtcctcctctmggcacgcctgggtctccaggactgctgaagcacaagacccgaggrgtggcctggtccttcmctcctggcctgtgtggactctgatggggctgttggacgcgrtggccttcaacctggggcccgttggccagagctcggcctctcagagaccgctgcaggccctgyctcacctcatgtkcctcctggccctgcacctccagccatycactgmggctctcacrgctcagtasggtcggaatttgcgctgggcccgcagcagctcgatcctctgcttgtcctcctcaaact

SEQ ID NO: 2506 - DNA, 1853 bp, Homo sapiens
cggggccttctgagtgggggcggggactgctggagttgcggggcctgcctggggtagggcggggcaggacagcttggagatagggcccggaattgcgggcgtcactctgctcctgcgacctagccaggcgtgagggagtgacagcagcgcattcgcgggacgagagcgatgagtragaacgccgcaccaggtctgatctcagagctgaagctggctgtgccctggggccacatcgcagccaaagcctggggctccctgcagggccctccagttctctgcctgcacggctggctggacaatgccarctccttcgacagactcatccctcttctcccgcaagacttttattacgttgccatggatttcggaggtcatgggctctcgtcccattacagcccaggtgtcccatattacctccagacttttgtgagtgagatccgaagagttgtggcagccttgaaatggaatcgattctccattctgggccacagcttcggtggcgtcgtgggcggaatgtttttctgtaccttccccgagatggtggataaacttatcttgctggacacgccgctctttctcctggaatcagatgaaatggagaacttgctgacctacaagcggagagccatagagcacgtgctgcaggtagaggcctcccaggagccctcgcacgtgttcagcctgaagcagctgctgcagaggcagagaacagcattgacttcrtcagcagggagctgtgtgcgcattccatcaggaagctgcaggcccatgtcctgttgatcaaagcagtccacggatattttgattcaagacagaattactctgasaaggagtccctgtcgttcatgatagacacgatgaaatccaccctcaaagaggtacctcttctgatacaatcacagcaaccctggcctyggccccgccctgtccctgccatgcaacttcacaactcagctrgcctagacccctgggaggcctccaagtccctaggcrgttccagtttgtggaagtcccaggcaatcactgtgtccacatgagcgaaccccagcacgtsgccagtatcatcagctccttcttacagygcacacacaygctcccagcccagctgtagctctgggcctggaactatgaagacctagtgctcccagactcaacaytgggactctgagttcctgagccccacaacaaggccagggatggtggggacaggcctcactagtcttgaggcccagcctaggatggtagtcaggggaaggagcgagattccaacttcaacatctgtgacctcaagrgggagacagagtctgggttcsagggctgctktctcctggctaataataaatmtccagccagctggaggaaggaagggcrggctgggcccacctagcctttccctgctgcccaactggatggaaaataaaaggttyttktwttctcactgcttttgaggcttttttgttgccagcaagggcttttgcattgagggaaaaggaagcacagaacggattcatccagggtcctcaagggtgtggaggcaagaggtgggaaggacaagtcctcctctmggcacgcctgggtctccaggactgctgaagcacaagacccgaggrgtggcctggtccttcmctcctggcctgtgtggactctgatggggctgttggacgcgrtggccttcaacctggggcccgttggccagagctcggcctctcagagaccgctgcaggccctgyctcacctcatgtkcctcctggccctgcacctccagccatycactgmggctctcacrgctcagtasggtcggaatttgcgctgggcccgcagcagctcgatcctctgcttgtcctcctcaaact

SEQ ID NO: 2507 - DNA, 1296 bp, Homo sapiens
cggggccttctgagtgggggcggggactgctggagttgcggggcctgcctggggtagggcggggcaggacagcttggagatagggcccggaattgcgggcgtcactctgctcctgcgacctagccaggcgtgagggagtgacagcagcgcattcgcgggacgagagcgatgagtragaacgccgcaccaggtctgatctcagagctgaagctggctgtgccctggggccacatcgcagccaaagcctggggctccctgcagggccctccagttctctgcctgcacggctggctggacaatgccarctccttcgacagactcatccctcttctcccgcaagacttttattacgttgccatggatttcggaggtcatgggctctcgtcccattacagcccaggtgtcccatattacctccagacttttgtgagtgagatccgaagagttgtggcagccttgaaatggaatcgattctccattctgggccacagcttcggtgagtacagtggccaggagctgaccgggcccggagtagggctgggagggaaggataggagctgctgccccacccctttcccctgcacttatgagatctgcaaagagagatgagagggtcagtcagaggttgaccactgtaccctctgacctcaggcaactgccgcaagggacacagggatgagggaaatgtggtcttttgagtggtcaggtctgatgaaggggacatcatggcccagatgctgagcccccagccacccatatggtgccccccccccaactggtgggaagaagctttagggtatgcagctggggagggagtgagggaatgtcacccacagctcttttgtcccccaggtggcgtcgtgggcggaatggtgagtagatggctttgtctggccaactggggctcccttgggtggagtggggaggggagcacaaaggaggaaggagaaggtacctgggacagaaagtgcctcctcctgtcacagtgatagtccttataccaggaagttggtgtaaacggtggagactcctggtagagttcatgtttccacgcccccatacccggtcccaccgcaccctggagtccagccatcaccaaggtctggagctcagtgctgggtgcagacttaggggtggtgggggaaggcacaccatagatagaagattctcctctggcctcttggtcagcaccctccccccagcctaaaagatgtttcggggaactccagggtccccagggaaaggcgggagtgtcctttccttcttcmycctattcattctccccttttggcatcc

SEQ ID NO: 2508 - DNA, 1665 bp, Homo sapiens
gtctgatctcagagctgaagctggctgtgccctggggccacatcgcagccaaagcctggggctccctgcagggccctccagttctctgcctgcacggctggctggacaatgccarctccttcgacagactcatccctcttctcccgcaagacttttattacgttgccatggatttcggaggtcatgggctctcgtcccattacagcccaggtgtcccatattacctccagacttttgtgagtgagatccgaagagttgtggcagccttgaaatggaatcgattctccattctgggccacagcttcggtggcgtcgtgggcggaatgtttttctgtaccttccccgagatggtggataaacttatcttgctggacacgccgctctttctcctggaatcagatgaaatggagaacttgctgacctacaagcggagagccatagagcacgtgctgcaggtagaggcctcccaggagccctcgcacgtgttcagcctgaagcagctgctgcagaggttactgaagagcaatagccacttgagtgaggagtgcggggagcttctcctgcaaagaggaaccacgaaggtggccacaggtctggttctgaacagagaccagaggctcgcctgggcagagaacagcattgacttcrtcagcagggagctgtgtgcgcattccatcaggaagctgcaggcccatgtcctgttgatcaaagcagtccacggatattttgattcaagacagaattactctgasaaggagtccctgtcgttcatgatagacacgatgaaatccaccctcaaagagcrgttccagtttgtggaagtcccaggcaatcactgtgtccacatgagcgaaccccagcacgtsgccagtatcatcagctccttcttacagygcacacacaygctcccagcccagctgtagctctgggcctggaactatgaagacctagtgctcccagactcaacaytgggactctgagttcctgagccccacaacaaggccagggatggtggggacaggcctcactagtcttgaggcccagcctaggatggtagtcaggggaaggagcgagattccaacttcaacatctgtgacctcaagrgggagacagagtctgggttcsagggctgctktctcctggctaataataaatmtccagccagctggaggaaggaagggcrggctgggcccacctagcctttccctgctgcccaactggatggaaaataaaaggttyttktwttctcactgcttttgaggcttttttgttgccagcaagggcttttgcattgagggaaaaggaagcacagaacggattcatccagggtcctcaagggtgtggaggcaagaggtgggaaggacaagtcctcctctmggcacgcctgggtctccaggactgctgaagcacaagacccgaggrgtggcctggtccttcmctcctggcctgtgtggactctgatggggctgttggacgcgrtggccttcaacctggggcccgttggccagagctcggcctctcagagaccgctgcaggccctgyctcacctcatgtkcctcctggccctgcacctccagccatycactgmggctctcacrgctcagtasggtcggaatttgcgctgggcccgcagcagctcgatcctctgcttgtcctcctcaaact

SEQ ID NO: 2509 - DNA, 1723 bp, Homo sapiens
gaagcaggggcaagaggagaaggagggcaaccgagtaggagggcctataacagcccaggtctgatctcagagctgaagctggctgtgccctggggccacatcgcagccaaagcctggggctccctgcagggccctccagttctctgcctgcacggctggctggacaatgccarctccttcgacagactcatccctcttctcccgcaagacttttattacgttgccatggatttcggaggtcatgggctctcgtcccattacagcccaggtgtcccatattacctccagacttttgtgagtgagatccgaagagttgtggcagccttgaaatggaatcgattctccattctgggccacagcttcggtggcgtcgtgggcggaatgtttttctgtaccttccccgagatggtggataaacttatcttgctggacacgccgctctttctcctggaatcagatgaaatggagaacttgctgacctacaagcggagagccatagagcacgtgctgcaggtagaggcctcccaggagccctcgcacgtgttcagcctgaagcagctgctgcagaggttactgaagagcaatagccacttgagtgaggagtgcggggagcttctcctgcaaagaggaaccacgaaggtggccacaggtctggttctgaacagagaccagaggctcgcctgggcagagaacagcattgacttcrtcagcagggagctgtgtgcgcattccatcaggaagctgcaggcccatgtcctgttgatcaaagcagtccacggatattttgattcaagacagaattactctgasaaggagtccctgtcgttcatgatagacacgatgaaatccaccctcaaagagcrgttccagtttgtggaagtcccaggcaatcactgtgtccacatgagcgaaccccagcacgtsgccagtatcatcagctccttcttacagygcacacacaygctcccagcccagctgtagctctgggcctggaactatgaagacctagtgctcccagactcaacaytgggactctgagttcctgagccccacaacaaggccagggatggtggggacaggcctcactagtcttgaggcccagcctaggatggtagtcaggggaaggagcgagattccaacttcaacatctgtgacctcaagrgggagacagagtctgggttcsagggctgctktctcctggctaataataaatmtccagccagctggaggaaggaagggcrggctgggcccacctagcctttccctgctgcccaactggatggaaaataaaaggttyttktwttctcactgcttttgaggcttttttgttgccagcaagggcttttgcattgagggaaaaggaagcacagaacggattcatccagggtcctcaagggtgtggaggcaagaggtgggaaggacaagtcctcctctmggcacgcctgggtctccaggactgctgaagcacaagacccgaggrgtggcctggtccttcmctcctggcctgtgtggactctgatggggctgttggacgcgrtggccttcaacctggggcccgttggccagagctcggcctctcagagaccgctgcaggccctgyctcacctcatgtkcctcctggccctgcacctccagccatycactgmggctctcacrgctcagtasggtcggaatttgcgctgggcccgcagcagctcgatcctctgcttgtcctcctcaaact

SEQ ID NO: 2510 - DNA, 1097 bp, Homo sapiens
cacagccctgcgcctgcgcgtgggcctgggccgcccgtcgtacctgatggtaggaggcagtagttccccgcttcccttccgcgggagggagagttagctagccatccaagaaaacaccatgaaagataacgatatcaagagactactgtatacccatcttttatgcatattttcaattatcctaagtgtcttcattccatcactcttcttggagaacttctcratattggaaacacacttgacatggttgtgcatctgttctggttttgtaactgctgtcaatctagtactatatttagtagtgaaaccaaatacatcctctaaaagaagttcattatcacacaaggtaactggatttttgaaatgctgtatctactttcttatgtcttgtttctcctttcatgtaatttttgttctgtatggagcaccactgatagagttggcrttggaaacatttttatttgcagttattttgtctacttttactactgtgccttgcttatgtttgttaggaccaaacctcaaagcatggctaagagtgttcagtagaaatggagttacatccatatgggagaatagtctccagatcactacaatttctagctttgtaggagcatggcttggagcacttcctattccactggattgggaaagaccatggcagaagcagatagcaaggtaatttttgcagcagcggcctgtgttatcaagaaagctcacaaacatcagatttttcrtcttgtatcacaataagataaagctgatatgctaggtaaagcactgtgaggtatggcccatctcctgtacgcttggagcgacctttggctacgtggctggccttgttatttcaccactctggatatactggaatagaaagcaacttacatacmagaacaattaacyggagcaaagggagatatttctttgtgcagattctgtaagggctgggcagaaatgkgtatggtcaaagccaagcagttccatttacagctctgttttttacgtagttacaacatgatgtgattgtagctttttaaactatgaaacccctgagagattgtaccttctagttgaaataaagtatttataatagattg

SEQ ID NO: 2511 - DNA, 1205 bp, Homo sapiens
cacagccctgcgcctgcgcgtgggcctgggccgcccgtcgtacctgatggtaggaggcagtagttccccgcttcccttccgcgggagggagagttagctagccatccaagaaaacaccatgaaagataacgatatcaagagactactgtatacccatcttttatgcatattttcaattatcctaagtgtcttcattccatcactcttcttggagaacttctcratattggaaacacacttgacatggttgtgcatctgttctggttttgtaactgctgtcaatctagtactatatttagtagtgaaaccaaatacatcctctaaaagaagttcattatcacacaaggtaactggatttttgaaatgctgtatctactttcttatgtcttgtttctcctttcatgtaatttttgttctgtatggagcaccactgatagagttggcrttggaaacatttttatttgcagttattttgtctacttttactactgtgccttgcttatgtttgttaggaccaaacctcaaagcatggctaagagtgttcagtagaaatggagttacatccatatgggagaatagtctccagatcactacaatttctagctttgtaggagcatggcttggagcacttcctattccactggattgggaaagaccatggcaggtatggcccatctcctgtacgcttggagcgacctttggctacgtggctggccttgttatttcaccactctggatatactggaatagaaagcaacttacatacmagaacaattaacyggagcaaagggagatatttctttgtgcagattctgtaagggctgggcagaaatgkgtatggtcaaagccaagcagttccatttacagctctgttttttacgtagttacaacatgatgtgattgtagctttttaaactatgaaacccctgagagattgtaccttctagttgaaataaagtatttataatagattgtggcttcagatgctgcttactgcttcttaaacctttaaggaacattcttaatacactttatagaattctgaggacaggttttgttttctttcaagttttgaactgcttcattacctataaaaggtctgggtatagctgtagcatttcatttgctttctgagagaaatggacagtttccttggccactgaagatgtttctcacgtaattaaacaacagtttatacatcttga

SEQ ID NO: 2512 - DNA, 1075 bp, Homo sapiens
cacagccctgcgcctgcgcgtgggcctgggccgcccgtcgtacctgatggtaggaggcagtagttccccgcttcccttccgcgggagggagagttagctagccatccaagaaaacaccatgaaagataacgatatcaagagactactgtatacccatcttttatgcatattttcaattatcctaagtgtcttcattccatcactcttcttggagaacttctcratattggaaacacacttgacatggttgtgcatctgttctggttttgtaactgctgtcaatctagtactatatttagtagtgaaaccaaatacatcctctaaaagaagttcattatcacacaaggtaactggatttttgaaatgctgtatctactttcttatgtcttgtttctcctttcatgtaatttttgttctgtatggagcaccactgatagagttggcrttggaaacatttttatttgcagttattttgtctacttttactactgtgccttgcttatgtttgttaggaccaaacctcaaagcatggctaagagtgttcagtagaaatggagttacatccatatgggagaatagtctccagatcactacaatttctagctttgtaggagcatggcttggagcacttcctattccactggattgggaaagaccatggcagatgacagtagaaagaaaacgtagcacttatagatctctccatgtaccctgcagggggcttggtactgtgaaatgagtaacttaatcctgacaaccgtagtgcaaggtatggcccatctcctgtacgcttggagcgacctttggctacgtggctggccttgttatttcaccactctggatatactggaatagaaagcaacttacatacmagaacaattaacyggagcaaagggagatatttctttgtgcagattctgtaagggctgggcagaaatgkgtatggtcaaagccaagcagttccatttacagctctgttttttacgtagttacaacatgatgtgattgtagctttttaaactatgaaacccctgagagattgtaccttctagttgaaataaagtatttataatag

SEQ ID NO: 2513 - DNA, 1298 bp, Homo sapiens
ccgaagcagccctgagccttggcgccccgacccgccggcgctcgccgtcagctcagcgccactcttccggcgtgccctgatggacagaccccctttcggatccgagttttcgcctctgtcccccagttttcccttgtcttcaactcccatgctctttgatcctgcctctcagctggttcctcgctgcccacgcttgcgccggcgtaggctcgggcagaatcccgagggacccgggttggggtggggctgccggtgaaggtgcggcgatgcccgcgaaggctcctctgggtgccgctcggaagagccttctctccgctgcgctagccatccaagaaaacaccatgaaagataacgatatcaagagactactgtatacccatcttttatgcatattttcaattatcctaagtgtcttcattccatcactcttcttggagaacttctcratattggaaacacacttgacatggttgtgcatctgttctggttttgtaactgctgtcaatctagtactatatttagtagtgaaaccaaatacatcctctaaaagaagttcattatcacacaaggtaactggatttttgaaatgctgtatctactttcttatgtcttgtttctcctttcatgtaatttttgttctgtatggagcaccactgatagagttggcrttggaaacatttttatttgcagttattttgtctacttttactactgtgccttgcttatgtttgttaggaccaaacctcaaagcatggctaagagtgttcagtagaaatggagttacatccatatgggagaatagtctccagatcactacaatttctagctttgtaggagcatggcttggagcacttcctattccactggattgggaaagaccatggcagatgacagtagaaagaaaacgtagcacttatagatctctccatgtaccctgcagggggcttggtactgtgaaatgagtaacttaatcctgacaaccgtagtgcaaggtatggcccatctcctgtacgcttggagcgacctttggctacgtggctggccttgttatttcaccactctggatatactggaatagaaagcaacttacatacmagaacaattaacyggagcaaagggagatatttctttgtgcagattctgtaagggctgggcagaaatgkgtatggtcaaagccaagcagttccatttacagctctgttttttacgtagttacaacatgatgtgattgtagctttttaaactatgaaacccctgagagattgtaccttctagttgaaataaagtatttataatag

SEQ ID NO: 2514 - DNA, 930 bp, Homo sapiens
tgggccgcccgtcgtacctgatggtaggaggcagtagttccccgcttcccttccgcgggagggagagttaggtaactggatttttgaaatgctgtatctactttcttatgtcttgtttctcctttcatgtaatttttgttctgtatggagcaccactgatagagttggcrttggaaacatttttatttgcagttattttgtctacttttactactgtgccttgcttatgtttgttaggaccaaacctcaaagcatggctaagagtgttcagtagaaatggagttacatccatatgggagaatagtctccagatcactacaatttctagctttgtaggagcatggcttggagcacttcctattccactggattgggaaagaccatggcaggtatggcccatctcctgtacgcttggagcgacctttggctacgtggctggccttgttatttcaccactctggatatactggaatagaaagcaacttacatacmagaacaattaacyggagcaaagggagatatttctttgtgcagattctgtaagggctgggcagaaatgkgtatggtcaaagccaagcagttccatttacagctctgttttttacgtagttacaacatgatgtgattgtagctttttaaactatgaaacccctgagagattgtaccttctagttgaaataaagtatttataatagattgtggcttcagatgctgcttactgcttcttaaacctttaaggaacattcttaatacactttatagaattctgaggacaggttttgttttctttcaagttttgaactgcttcattacctataaaaggtctgggtatagctgtagcatttcatttgctttctgagagaaatggacagtttccttggccactgaagatgtttctcacgtaattaaacaacagtttatacatcttga

SEQ ID NO: 2515 - DNA, 1428 bp, Homo sapiens
ccgaagcagccctgagccttggcgccccgacccgccggcgctcgccgtcagctcagcgccactcttccggcgtgccctgatggacagaccccctttcggatccgagttttcgcctctgtcccccagttttcccttgtcttcaactcccatgctctttgatcctgcctctcagctggttcctcgctgcccacgcttgcgccggcgtaggctcgggcagaatcccgagggacccgggttggggtggggctgccggtgaaggtgcggcgatgcccgcgaaggctcctctgggtgccgctcggaagagccttctctccgctgcgctagccatccaagaaaacaccatgaaagataacgatatcaagagactactgtatacccatcttttatgcatattttcaattatcctaagtgtcttcattccatcactcttcttggagaacttctcratattggaaacacacttgacatggttgtgcatctgttctggttttgtaactgctgtcaatctagtactatatttagtagtgaaaccaaatacatcctctaaaagaagttcattatcacacaaggtaactggatttttgaaatgctgtatctactttcttatgtcttgtttctcctttcatgtaatttttgttctgtatggagcaccactgatagagttggcrttggaaacatttttatttgcagttattttgtctacttttactactgtgccttgcttatgtttgttaggaccaaacctcaaagcatggctaagagtgttcagtagaaatggagttacatccatatgggagaatagtctccagatcactacaatttctagctttgtaggagcatggcttggagcacttcctattccactggattgggaaagaccatggcaggtatggcccatctcctgtacgcttggagcgacctttggctacgtggctggccttgttatttcaccactctggatatactggaatagaaagcaacttacatacmagaacaattaacyggagcaaagggagatatttctttgtgcagattctgtaagggctgggcagaaatgkgtatggtcaaagccaagcagttccatttacagctctgttttttacgtagttacaacatgatgtgattgtagctttttaaactatgaaacccctgagagattgtaccttctagttgaaataaagtatttataatagattgtggcttcagatgctgcttactgcttcttaaacctttaaggaacattcttaatacactttatagaattctgaggacaggttttgttttctttcaagttttgaactgcttcattacctataaaaggtctgggtatagctgtagcatttcatttgctttctgagagaaatggacagtttccttggccactgaagatgtttctcacgtaattaaacaacagtttatacatcttga

SEQ ID NO: 2516 - DNA, 838 bp, Homo sapiens
cctcttccctcctggcgtccccggctgccctcgctcccaggccccgcagtctcatttgccgcttccgacgcgtgaccccggcgcgctagcgtccgggaccggtgacaggcgcggggtgcgccaagcagtcccatgtgtcccctccctctcgcagccgccgcagtcgctgcgccccgagcccctctccggctcctcaacagagggctcgccgccgccatgtctaccgcccagtcactcaaatccgtggactacgaggtgttcggaagagtgcaggaagatgaagctaggaaaataggagtggttggctgggtgaagaataccagcaaaggcaccgtgacaggccaagtgcaggggccagaagacaaagtcaattccatgaagtcctggctgagcaaggttggaagccctagttctcgcattgaccgcacaaacttttctaatgaaaaaaccatctctaagcttgaatactctaattttagtattagatactaatagaagagaaaaattgtaacacactgaacaatagatactgtatgttcttaagactatgtatactagaataatagtagcaragtagggtgaaaaggaactttctgttctgaaagctaagcgactgtacgtgctactaawaatgtctgacactgaaataattttactcaactatgtttycaacaagcaaaaatatagtattctaagattaaaatgtcattacaaartatttagtgtgaacatttaatttaaacttgtctcatggaatctttaatttcaatgaacattacagcatatatatgttatttggcgagacatcaaataaagttaaccatttaaaaattatttt

SEQ ID NO: 2517 - DNA, 1059 bp, Homo sapiens
ttgtacaccacaaatatacccaacttttatttgtcaattacactttaataaagctgggggaagccactctttttttgggcacagcatccggcttttatttactaactttgagaacagagtaccttgatcaattaaatggtagggagcgctgtggagacagcatcctccccagtccgggaagagaggcctaggatgcctggggcccagcggcctcttccctcctggcgtccccggctgccctcgctcccaggccccgcagtctcatttgccgcttccgacgcgtgaccccggcgcgctagcgtccgggaccggtgacaggcgcggggtgcgccaagcagtcccatgtgtcccctccctctcgcagccgccgcagtcgctgcgccccgagcccctctccggctcctcaacagagggctcgccgccgccatgtctaccgcccagtcactcaaatccgtggactacgaggtgttcggaagagtgcaggttttttcctgaaacagtatacagaagatgaagctaggaaaataggagtggttggctgggtgaagaataccagcaaaggcaccgtgacaggccaagtgcaggggccagaagacaaagtcaattccatgaagtcctggctgagcaaggttggaagccctagttctcgcattgaccgcacaaacttttctaatgaaaaaaccatctctaagcttgaatactctaattttagtattagatactaatagaagagaaaaattgtaacacactgaacaatagatactgtatgttcttaagactatgtatactagaataatagtagcaragtagggtgaaaaggaactttctgttctgaaagctaagcgactgtacgtgctactaawaatgtctgacactgaaataattttactcaactatgtttycaacaagcaaaaatatagtattctaagattaaaatgtcattacaaartatttagtgtgaacatttaatttaaacttgtctcatggaatctttaatttcaatgaacattacagcatatatatgttatttggcgagacatcaaataaagttaaccattt

SEQ ID NO: 2518 - DNA, 2676 bp, Homo sapiens
cccacccgcctgccgtcctggggcgccgccgccccgccgccggcagtggaccgctgtgcgcgaaccctgaaccctacggtcccgacccgcgggcgaggccgggtacctgggctgggatccggagcaagcgggcgagggcagcgccctaagcaggcccggagcgatggcagccttgatgaccccgggaaccggggccccacccgcgcctggtgacttctccggggaagggagccagggacttcccgacccttcgccagagcccaagcagctcccggagctgatccgcatgaagcgagacggaggccgcctgagcgaagcggacatsaggggcttcgtggccgctgtggtgaatgggagcgcgcagggygcacagatcggggccatgctgatggccatccgacttcggggcatggatctggaggagacctcggtgctgacccaggccctggctcagtcgggacagcagctggagtggccagaggcctggcgccagcagcttgtggacaagcattccacagggggtgtgggtgacaaggtcagcctggtcctcgcacctgccctggcggcatgtggctgcaaggtgccaatgatcagcrgacgtggtctggggcacacaggargcaccttggataagctggagtctattcctggattcaatgtcatccagagcccagagcagakgcaagtgctgctggaccaggcgggctgctgtatcgtgggtcagagtgagcagctggttcctgcggacggaatcctatatgcagccagagatgtgacagccaccgtggacagcctgccactcatcacagcctccattctcagtaagaractcgtggaggggctgtccgctctggtggtggacgttaagttcggaggggccgccgtcttccccaaccaggagcaggcccgggagctggcaaagacgctggttggcgtgggagccagcctagggcttcgggtcgcggcagcgctgaccgccatggacaagcccctgggtcgctgcgtgggccacgccctggaggtggagrmggcgctgctctgcatggacggcgcaggcccgccagacttaagggacctggtcaccacgctcgggggcgccctgctctggctcagcggacacgcggggactcaggcycagggcgctgcccgggtggccgcggcgctggacgacggctcggcccttggccgcttcgagcggatgctggcggcgcagggcgtggatcccggtctggcccgagccctgtgctcgggaagtcccgcagaacgccggcagctgctgcctcgcgcccgggagcaggaggagctgctggcgcccgcagatggcaccgtggagctggtccgggcgctgccgctggcgctggtgctgcacgagctcggggccgggcgcagccgcgctggggagccgctccgcctgggggtgggcgcagagctgctggtcgacgtgggwcagaggctgcgccgtgggaccccctggctccgcgtgcaccgggacggccccgcgctcagcggcccgcagagccgcgccctgcaggaggcgctcgtactctccgaccgcrcgccattygccgccccctygcccttcgcagagctcgttctgccgccgcagcaataaagctcctttgccgcgaaaccttgtcagtgcttgggcgggagcggarggatccagggctgcggaggcgggggccgtctcgatgaacacgtgacccccggcgggctccgccttccgcgcacgcgctgagagcctgtcagcagcscagggagctggaggtcggcgcttcctctcgtgcttggtccactgacgcgcggccccgccgcgaggagcatcagatccatgctgctgctgactcggagccccacagcttggcacaggctctctcagctcaagcctcsggtcctccctgggaccctgggaggccaggccctgcatctgaggtcctggcttttgtcaaggcagggccctgcagagacaggtgggcagggccagcccyagggccctgggcttcgaacccggctgctgatcacaggcctgttcggggctggactcggtggggcctggctggccctgagggctgagaaggagaggctgcagcagcaaaagygaacagaagccctgcgccaggcagctgtgggccagggcgacttccacctgctggatcayagaggccgggctcgctgcaaggctgacttccggggccagtgggtgctgatgtactttggcttcactcactgccctgacatctgcccagacragctggagaagctggtgcaggtggtgcggcagctggaagcagagcctggtttgcctccagtgcagcctgtcttcatcactgtggaccccgagygggacgacgttgaagccatggcccgctacgtccaggacttccacccaagactgttgggtctgaccggctcyaccaaacaggttgcccaggctagtcacagttaccgcgtgtactacaatgcmggccccaaggatgaggaccaggactacatcgtggaccactycattgccatctacctgctcaaccctgacggcctcttcacggattactacggccggagcagatcggctgagcagatctcagacagtgtgcggcggcacatggcggctttccgcagtgtcctgtcttgagccactgcagtctgggccccatcattaaacgggctgcgtttaat

SEQ ID NO: 2519 - DNA, 5139 bp, Homo sapiens
attttgtttgcctagaattgtatttgattgtaatcaaatcatgtgtcacatctttttttcaatttgtgtgattattttgtggcccaatacatgattttttttgcgaatatttcatggacttaaatagataagtcctctctctrcacataattaaatggagtgtgtgctttgcattattcagttcctttattcccatccttgcttttgtctgcagatttgtcctattccagaatgggtatactgaaacttgggtaagggtgaggccagcgttctgggtggcccaggctactatcccacccgtgccacagaatccacacagaggcccagcggcggcactgggtggtggggaagggggaggcggrcccaggttgggggggcaggcagtcagtgcggttgccaggaagcgggaaagggccacaatggggtctgggaggtgggcggggcggagcggggatgtccagccacgtcgctttgttttcccacgctaggagctaccacaacaggtgctgcgagccgtaagcgccccccacccgcgctatgggctcggacgcctgggtgggcctttggcggccacaccggccccgcggccccatcgcggcgcactacggaggccccgggcccaaatacaagctgccgcccaacaccggctacgccctgcatgacccgtcgcggccgcgcgcccccgccttcaccttcggcgcgcgcttccccacgcagcagacgacgtgcggccccgggccaggccacctggtgcccgctcgcatgaccgtgcgcggcaccgacggcgcccccgcctactccatctacggccgcccacgccgctcagcgcccttcctcactccgggacctggtcaggacccccgggcccctggccaccccaacgccgaactgcctccagggaggcccacctgggaacccccgacctgaaccccgagtccccctcggataccctaacaccgcatattcggtacccccatatccggatctcaaatcccaaaccccgaaccccacggggctttgataaatcgtggctcagactccccactagtcccaggaccccatctcgggtacccaccaggctcccacgcagttctagscccccacacccttgatccgccccgcaggcaggtacttcccggagcgagcggggaacgcgacgtaccccagtgcgcctcggcacaccattgctccccgaaactggggtgtccaggcggaacagcagagcccaggtgaggtcagaacggcccatcccagaactgtgggccttcccactcgagaccggggaccgccctccgggagctgggaccaccctgcgcctgtccgcggagacccactacccccgagccctgcctcctccccaggtcccgcggcctatacggtgccctcgctcttgggtccgcgcgtcatcggcaaagtctccgccccaacttgctccatctacggccgcagagcggctggcagtttcttcgaggacctcagcaagaccccgggcccctgcgcctatcaggtcgtgagtccaggggtctacaagtcccgggccccccagttcacgattctggcgcggacttcgctcccccaagacaacactcggaagccagggcccgcggcctacaacgtggatcaggtggcctggagcccagggtcaagggtcagagtcaggagagtggggagggcctgaggtcsgagtgatgggatcagagtccccgggggtccaggggtcccggcgcggagaggatsccggccccgcgaggtcagcggtgtctccgggcccgcagcaccggaagccccgcggctggagtttcgggatccggcactcggactacctggccccgctggtgaccgacgcggacaactgacccgccaggcgggagcggccccacacgtgtttgcttaaagtctgcgagtccgcatcgtgtccgcctctctctctctctctctgcgcgtcctggcgcaaggcctggggtggagccacggctggggccgtgtcccaactccgaacccagcggggcggggcccgagcgtcgggcgaggccgggaccccagcgctgcgccgcgtccgaacgtcgagaccccaccgagggcgggagggggactctcgggagccacagacgcccgagacccacgccgggcgggaccggccagggatcacccccgccgacggccccgggccccgacggcccggaagttccgcgtgtccgggggcaccgggggattggccggggcgcggcgtgcaaggcttcccgggggcggcgactgccgagctccgccctccaggcggccccacccgcctgccgtcctggggcgccgccgccccgccgccggcagtggaccgctgtgcgcgaaccctgaaccctacggtcccgacccgcgggcgaggccgggtacctgggctgggatccggagcaagcgggcgagggcagcgccctaagcaggtacgggcggggctcaagtcgcgaggcggggaagcgggaggcagacacggacgagggcgacacagacacgggaccgaggggcggacaccggagagacacgggaaaggggtcgggacaggagcacgtggctcagacaccgacgccgggaggccgcagaccccggacgtgtcaggcatccccgcaggcccggagcgatggcagccttgatgaccccgggaaccggggccccacccgcgcctggtgacttctccggggaagggagccagggacttcccgacccttcgccagagcccaagcagctcccggagctgatccgcatgaagcgagacggaggccgcctgagcgaagcggacatsaggggcttcgtggccgctgtggtgaatgggagcgcgcagggygcacagatcggggccatgctgatggccatccgacttcggggcatggatctggaggagacctcggtgctgacccaggccctggctcagtcgggacagcagctggagtggccagaggcctggcgccagcagcttgtggacaagcattccacagggggtgtgggtgacaaggtcagcctggtcctcgcacctgccctggcggcatgtggctgcaaggtgccaatgatcagcrgacgtggtctggggcacacaggargcaccttggataagctggagtctattcctggattcaatgtcatccagagcccagagcagakgcaagtgctgctggaccaggcgggctgctgtatcgtgggtcagagtgagcagctggttcctgcggacggaatcctatatgcagccagagatgtgacagccaccgtggacagcctgccactcatcacagcctccattctcagtaagaractcgtggaggggctgtccgctctggtggtggacgttaagttcggaggggccgccgtcttccccaaccaggagcaggcccgggagctggcaaagacgctggttggcgtgggagccagcctagggcttcgggtcgcggcagcgctgaccgccatggacaagcccctgggtcgctgcgtgggccacgccctggaggtggagrmggcgctgctctgcatggacggcgcaggcccgccagacttaagggacctggtcaccacgctcgggggcgccctgctctggctcagcggacacgcggggactcaggcycagggcgctgcccgggtggccgcggcgctggacgacggctcggcccttggccgcttcgagcggatgctggcggcgcagggcgtggatcccggtctggcccgagccctgtgctcgggaagtcccgcagaacgccggcagctgctgcctcgcgcccgggagcaggaggagctgctggcgcccgcagatggcaccgtggagctggtccgggcgctgccgctggcgctggtgctgcacgagctcggggccgggcgcagccgcgctggggagccgctccgcctgggggtgggcgcagagctgctggtcgacgtgggwcagaggctgcgccgtgggaccccctggctccgcgtgcaccgggacggccccgcgctcagcggcccgcagagccgcgccctgcaggaggcgctcgtactctccgaccgcrcgccattygccgccccctygcccttcgcagagctcgttctgccgccgcagcaataaagctcctttgccgcgaaaccttgtcagtgcttgggcgggagcggarggatccagggctgcggaggcgggggccgtctcgatgaacacgtgacccccggcgggctccgccttccgcgcacgcgctgagagcctgtcagcagcscagggagctggaggtcggcgcttcctctcgtgcttggtccactgacgcgcggccccgccgcgaggagcatcagatccatgctgctgctgactcggagccccacagcttggcacaggctctctcagctcaagcctcsggtcctccctgggaccctgggaggccaggccctgcatctgaggtcctggcttttgtcaaggcagggccctgcagagacaggtgggcagggccagcccyagggccctgggcttcgaacccggctgctgatcacaggcctgttcggggctggactcggtggggcctggctggccctgagggctgagaaggagaggctgcagcagcaaaagygaacagaagccctgcgccaggcagctgtgggccagggcgacttccacctgctggatcayagaggccgggctcgctgcaaggctgacttccggggccagtgggtgctgatgtactttggcttcactcactgccctgacatctgcccagacragctggagaagctggtgcaggtggtgcggcagctggaagcagagcctggtttgcctccagtgcagcctgtcttcatcactgtggaccccgagygggacgacgttgaagccatggcccgctacgtccaggacttccacccaagactgttgggtctgaccggctcyaccaaacaggttgcccaggctagtcacagttaccgcgtgtactacaatgcmggccccaaggatgaggaccaggactacatcgtggaccactycattgccatctacctgctcaaccctgacggcctcttcacggattactacggccggagcagatcggctgagcagatctcagacagtgtgcggcggcacatggcggctttccgcagtgtcctgtcttgagccactgcagtctgggccccatcattaaacgggctgcgtttaat

SEQ ID NO: 2520 - DNA, 6263 bp, Homo sapiens
attttgtttgcctagaattgtatttgattgtaatcaaatcatgtgtcacatctttttttcaatttgtgtgattattttgtggcccaatacatgattttttttgcgaatatttcatggacttaaatagataagtcctctctctrcacataattaaatggagtgtgtgctttgcattattcagttcctttattcccatccttgcttttgtctgcagatttgtcctattccagaatgggtatactgaaacttgggtaagggtgaggccagcgttctgggtggcccaggctactatcccacccgtgccacagaatccacacagaggcccagcggcggcactgggtggtggggaagggggaggcggrcccaggttgggggggcaggcagtcagtgcggttgccaggaagcgggaaagggccacaatggggtctgggaggtgggcggggcggagcggggatgtccagccacgtcgctttgttttcccacgctaggagctaccacaacaggtgctgcgagccgtaagcgccccccacccgcgctatgggctcggacgcctgggtgggcctttggcggccacaccggccccgcggccccatcgcggcgcactacggaggccccgggcccaaatacaagctgccgcccaacaccggctacgccctgcatgacccgtcgcggccgcgcgcccccgccttcaccttcggcgcgcgcttccccacgcagcagacgacgtgcggccccgggccaggccacctggtgcccgctcgcatgaccgtgcgcggcaccgacggcgcccccgcctactccatctacggccgcccacgccgctcagcgcccttcctcactccgggacctggtcaggacccccgggcccctggccaccccaacgccgaactgcctccagggaggcccacctgggaacccccgacctgaaccccgagtccccctcggataccctaacaccgcatattcggtacccccatatccggatctcaaatcccaaaccccgaaccccacggggctttgataaatcgtggctcagactccccactagtcccaggaccccatctcgggtacccaccaggctcccacgcagttctagscccccacacccttgatccgccccgcaggcaggtacttcccggagcgagcggggaacgcgacgtaccccagtgcgcctcggcacaccattgctccccgaaactggggtgtccaggcggaacagcagagcccaggtgaggtcagaacggcccatcccagaactgtgggccttcccactcgagaccggggaccgccctccgggagctgggaccaccctgcgcctgtccgcggagacccactacccccgagccctgcctcctccccaggtcccgcggcctatacggtgccctcgctcttgggtccgcgcgtcatcggcaaagtctccgccccaacttgctccatctacggccgcagagcggctggcagtttcttcgaggacctcagcaagaccccgggcccctgcgcctatcaggtcgtgagtccaggggtctacaagtcccgggccccccagttcacgattctggcgcggacttcgctcccccaagacaacactcggaagccagggcccgcggcctacaacgtggatcaggtggcctggagcccagggtcaagggtcagagtcaggagagtggggagggcctgaggtcsgagtgatgggatcagagtccccgggggtccaggggtcccggcgcggagaggatsccggccccgcgaggtcagcggtgtctccgggcccgcagcaccggaagccccgcggctggagtttcgggatccggcactcggactacctggccccgctggtgaccgacgcggacaactgacccgccaggcgggagcggccccacacgtgtttgcttaaagtctgcgagtccgcatcgtgtccgcctctctctctctctctctgcgcgtcctggcgcaaggcctggggtggagccacggctggggccgtgtcccaactccgaacccagcggggcggggcccgagcgtcgggcgaggccgggaccccagcgctgcgccgcgtccgaacgtcgagaccccaccgagggcgggagggggactctcgggagccacagacgcccgagacccacgccgggcgggaccggccagggatcacccccgccgacggccccgggccccgacggcccggaagttccgcgtgtccgggggcaccgggggattggccggggcgcggcgtgcaaggcttcccgggggcggcgactgccgagctccgccctccaggcggccccacccgcctgccgtcctggggcgccgccgccccgccgccggcagtggaccgctgtgcgcgaaccctgaaccctacggtcccgacccgcgggcgaggccgggtacctgggctgggatccggagcaagcgggcgagggcagcgccctaagcaggtacgggcggggctcaagtcgcgaggcggggaagcgggaggcagacacggacgagggcgacacagacacgggaccgaggggcggacaccggagagacacgggaaaggggtcgggacaggagcacgtggctcagacaccgacgccgggaggccgcagaccccggacgtgtcaggcatccccgcaggcccggagcgatggcagccttgatgaccccgggaaccggggccccacccgcgcctggtgacttctccggggaagggagccagggacttcccgacccttcgccagagcccaagcagctcccggagctgatccgcatgaagcgagacggaggccgcctgagcgaagcggacatsaggggcttcgtggccgctgtggtgaatgggagcgcgcagggygcacagatcggggccatgctgatggccatccgacttcggggcatggatctggaggagacctcggtgctgacccaggccctggctcagtcgggacagcagctggagtggccagaggcctggcgccagcagcttgtggacaagcattccacagggggtgtgggtgacaaggtcagcctggtcctcgcacctgccctggcggcatgtggctgcaaggtgccaatgatcagcrgacgtggtctggggcacacaggargcaccttggataagctggagtctattcctggattcaatgtcatccagagcccagagcagakgcaagtgctgctggaccaggcgggctgctgtatcgtgggtcagagtgagcagctggttcctgcggacggaatcctatatgcagccagagatgtgacagccaccgtggacagcctgccactcatcacagcctccattctcagtaagaractcgtggaggggctgtccgctctggtggtggacgttaagttcggaggggccgccgtcttccccaaccaggagcaggcccgggagctggcaaagacgctggttggcgtgggagccagcctagggcttcgggtcgcggcagcgctgaccgccatggacaagcccctgggtcgctgcgtgggccacgccctggaggtggagrmggcgctgctctgcatggacggcgcaggcccgccagacttaagggacctggtcaccacgctcgggggcgccctgctctggctcagcggacacgcggggactcaggcycagggcgctgcccgggtggccgcggcgctggacgacggctcggcccttggccgcttcgagcggatgctggcggcgcagggcgtggatcccggtctggcccgagccctgtgctcgggaagtcccgcagaacgccggcagctgctgcctcgcgcccgggagcaggaggagctgctggcgcccgcagatggcaccgtggagctggtccgggcgctgccgctggcgctggtgctgcacgagctcggggccgggcgcagccgcgctggggagccgctccgcctgggggtgggcgcagagctgctggtcgacgtgggwcagaggctgcgccgtgggaccccctggctccgcgtgcaccgggacggccccgcgctcagcggcccgcagagccgcgccctgcaggaggcgctcgtactctccgaccgcrcgccattygccgccccctygcccttcgcagagctcgttctgccgccgcagcaataaagctcctttgccgcgaaaccttgtcagtgcttgggcgggagcggarggatccagggctgcggaggcgggggccgtctcgatgaacacgtgacccccggcgggctccgccttccgcgcacgcgctgagagcctgtcagcggctgcgcccgtgtgcgcatgcgcagctccggggacgcctgcgccctgcctgtgagcgtgtggcgcccgctttccctgagccggcggggcagagcscagggagctggaggtcggcgcttcctctcgtgcttggtccactgacgcgcggccccgccgcgaggtgcggacgccggggctgggaggggaggaggtagccctgaggactcgctggactccggggtagtttcccagctccggctactgcgcggggctggcggggcacaccccagggcgcgctggaggccggagcgaggctggggcgcccgtgggaggctcccagcaggcaccggtgttctcgcggccaagcacagttataacgcgctcgcgcggcgcttcgagtggtcctggaacctttctggccacgagggcgctggccttgctggggagggcacaaacccagaaccgcccgggcgggggtgcagtgagtcctcgggagggtgccctcagcaggagggggcagtgaccgggagtcctgagacctscacctagcaaaccttctgcgggggcccgtgggaaaggctcaaaggtcaccaacgcaaaggcagggcgtcggctgtgagcccggaggagctgctgggaagcctggatgtgaggagggtggggttttgtggcgggtggaagtgtcgtgcgtctctgccaggagaggttaaacacagccggcgggsagagtctgagctccgggggttttctgctgggagtgtggaggaaggccgcggttggttgaagtggctggaggtaacaggaaagtgttggaggaatcggttgctctcggggattgcaagccagagagttacccacctccttttaagaaaygggtttattgcaaatagataacgtggttagttcaggcaaggcatgcacttggaatgctttccgtcagcaagaggttcaccttgctgaggtgcaggtgcagggcagggtgcggtgacaggctggtgatcccaggtagaggacaggagtgacaggtgtggttgcccaggtgtggatgtttggtggaggtggagttctgagctcaggtgagcagctgcaaatgcctgttaagcctgaacgtgggctgggtccttcagatgggtggctggtctcaagtcgcaggggcagcccaggcactgtcctgggccttcccttctggctcctgacgcctgtgcttgtttccaggagcatcagatccatgctgctgctgactcggagccccacagcttggcacaggctctctcagctcaagcctcsggtcctccctgggaccctgggaggccaggccctgcatctgaggtcctggcttttgtcaaggcagggccctgcagagacaggtgggcagggccagcccyagggccctgggcttcgaacccggctgctgatcacaggcctgttcggggctggactcggtggggcctggctggccctgagggctgagaaggagaggctgcagcagcaaaagygaacagaagccctgcgccaggcagctgtgggccagggcgacttccacctgctggatcayagaggccgggctcgctgcaaggctgacttccggggccagtgggtgctgatgtactttggcttcactcactgccctgacatctgcccagacragctggagaagctggtgcaggtggtgcggcagctggaagcagagcctggtttgcctccagtgcagcctgtcttcatcactgtggaccccgagygggacgacgttgaagccatggcccgctacgtccaggacttccacccaagactgttgggtctgaccggctcyaccaaacaggttgcccaggctagtcacagttaccgcgtgtactacaatgcmggccccaaggatgaggaccaggactacatcgtggaccactycattgccatctacctgctcaaccctgacggcctcttcacggattactacggccggagcagatcggctgagcagatctcagacagtgtgcggcggcacatggcggctttccgcagtgtcctgtcttgagccactgcagtctgggccccatcattaaacgggctgcgttta

SEQ ID NO: 2521 - DNA, 4582 bp, Homo sapiens
attttgtttgcctagaattgtatttgattgtaatcaaatcatgtgtcacatctttttttcaatttgtgtgattattttgtggcccaatacatgattttttttgcgaatatttcatggacttaaatagataagtcctctctctrcacataattaaatggagtgtgtgctttgcattattcagttcctttattcccatccttgcttttgtctgcagatttgtcctattccagaatgggtatactgaaacttgggtaagggtgaggccagcgttctgggtggcccaggctactatcccacccgtgccacagaatccacacagaggcccagcggcggcactgggtggtggggaagggggaggcggrcccaggttgggggggcaggcagtcagtgcggttgccaggaagcgggaaagggccacaatggggtctgggaggtgggcggggcggagcggggatgtccagccacgtcgctttgttttcccacgctaggagctaccacaacaggtgctgcgagccgtaagcgccccccacccgcgctatgggctcggacgcctgggtgggcctttggcggccacaccggccccgcggccccatcgcggcgcactacggaggccccgggcccaaatacaagctgccgcccaacaccggctacgccctgcatgacccgtcgcggccgcgcgcccccgccttcaccttcggcgcgcgcttccccacgcagcagacgacgtgcggccccgggccaggccacctggtgcccgctcgcatgaccgtgcgcggcaccgacggcgcccccgcctactccatctacggccgcccacgccgctcagcgcccttcctcactccgggacctggcaggtacttcccggagcgagcggggaacgcgacgtaccccagtgcgcctcggcacaccattgctccccgaaactggggtgtccaggcggaacagcagagcccaggtcccgcggcctatacggtgccctcgctcttgggtccgcgcgtcatcggcaaagtctccgccccaacttgctccatctacggccgcagagcggctggcagtttcttcgaggacctcagcaagaccccgggcccctgcgcctatcaggtcgtgagtccaggggtctacaagtcccgggccccccagttcacgattctggcgcggacttcgctcccccaagacaacactcggaagccagggcccgcggcctacaacgtggatcagcaccggaagccccgcggctggagtttcgggatccggcactcggactacctggccccgctggtgaccgacgcggacaactgacccgccaggcgggagcggccccacacgtgtttgcttaaagtctgcgagtccgcatcgtgtccgcctctctctctctctctctgcgcgtcctggcgcaaggcctggggtggagccacggctggggccgtgtcccaactccgaacccagcggggcggggcccgagcgtcgggcgaggccgggaccccagcgctgcgccgcgtccgaacgtcgagaccccaccgagggcgggagggggactctcgggagccacagacgcccgagacccacgccgggcgggaccggccagggatcacccccgccgacggccccgggccccgacggcccggaagttccgcgtgtccgggggcaccgggggattggccggggcgcggcgtgcaaggcttcccgggggcggcgactgccgagctccgccctccaggcggccccacccgcctgccgtcctggggcgccgccgccccgccgccggcagtggaccgctgtgcgcgaaccctgaaccctacggtcccgacccgcgggcgaggccgggtacctgggctgggatccggagcaagcgggcgagggcagcgccctaagcaggtacgggcggggctcaagtcgcgaggcggggaagcgggaggcagacacggacgagggcgacacagacacgggaccgaggggcggacaccggagagacacgggaaaggggtcgggacaggagcacgtggctcagacaccgacgccgggaggccgcagaccccggacgtgtcaggcatccccgcaggcccggagcgatggcagccttgatgaccccgggaaccggggccccacccgcgcctggtgacttctccggggaagggagccagggacttcccgacccttcgccagagcccaagcagctcccggagctgatccgcatgaagcgagacggaggccgcctgagcgaagcggacatsaggggcttcgtggccgctgtggtgaatgggagcgcgcagggygcacagatcggggccatgctgatggccatccgacttcggggcatggatctggaggagacctcggtgctgacccaggccctggctcagtcgggacagcagctggagtggccagaggcctggcgccagcagcttgtggacaagcattccacagggggtgtgggtgacaaggtcagcctggtcctcgcacctgccctggcggcatgtggctgcaaggtgccaatgatcagcrgacgtggtctggggcacacaggargcaccttggataagctggagtctattcctggattcaatgtcatccagagcccagagcagakgcaagtgctgctggaccaggcgggctgctgtatcgtgggtcagagtgagcagctggttcctgcggacggaatcctatatgcagccagagatgtgacagccaccgtggacagcctgccactcatcacagcctccattctcagtaagaractcgtggaggggctgtccgctctggtggtggacgttaagttcggaggggccgccgtcttccccaaccaggagcaggcccgggagctggcaaagacgctggttggcgtgggagccagcctagggcttcgggtcgcggcagcgctgaccgccatggacaagcccctgggtcgctgcgtgggccacgccctggaggtggagrmggcgctgctctgcatggacggcgcaggcccgccagacttaagggacctggtcaccacgctcgggggcgccctgctctggctcagcggacacgcggggactcaggcycagggcgctgcccgggtggccgcggcgctggacgacggctcggcccttggccgcttcgagcggatgctggcggcgcagggcgtggatcccggtctggcccgagccctgtgctcgggaagtcccgcagaacgccggcagctgctgcctcgcgcccgggagcaggaggagctgctggcgcccgcagatggcaccgtggagctggtccgggcgctgccgctggcgctggtgctgcacgagctcggggccgggcgcagccgcgctggggagccgctccgcctgggggtgggcgcagagctgctggtcgacgtgggwcagaggctgcgccgtgggaccccctggctccgcgtgcaccgggacggccccgcgctcagcggcccgcagagccgcgccctgcaggaggcgctcgtactctccgaccgcrcgccattygccgccccctygcccttcgcagagctcgttctgccgccgcagcaataaagctcctttgccgcgaaaccttgtcagtgcttgggcgggagcggarggatccagggctgcggaggcgggggccgtctcgatgaacacgtgacccccggcgggctccgccttccgcgcacgcgctgagagcctgtcagcagcscagggagctggaggtcggcgcttcctctcgtgcttggtccactgacgcgcggccccgccgcgaggagcatcagatccatgctgctgctgactcggagccccacagcttggcacaggctctctcagctcaagcctcsggtcctccctgggaccctgggaggccaggccctgcatctgaggtcctggcttttgtcaaggcagggccctgcagagacaggtgggcagggccagcccyagggccctgggcttcgaacccggctgctgatcacaggcctgttcggggctggactcggtggggcctggctggccctgagggctgagaaggagaggctgcagcagcaaaagygaacagaagccctgcgccaggcagctgtgggccagggcgacttccacctgctggatcayagaggccgggctcgctgcaaggctgacttccggggccagtgggtgctgatgtactttggcttcactcactgccctgacatctgcccagacragctggagaagctggtgcaggtggtgcggcagctggaagcagagcctggtttgcctccagtgcagcctgtcttcatcactgtggaccccgagygggacgacgttgaagccatggcccgctacgtccaggacttccacccaagactgttgggtctgaccggctcyaccaaacaggttgcccaggctagtcacagttaccgcgtgtactacaatgcmggccccaaggatgaggaccaggactacatcgtggaccactycattgccatctacctgctcaaccctgacggcctcttcacggattactacggccggagcagatcggctgagcagatctcagacagtgtgcggcggcacatggcggctttccgcagtgtcctgtcttgagccactgcagtctgggccccatcattaaacgggctgcgtttaat

SEQ ID NO: 2522 - DNA, 2472 bp, Homo sapiens
cccacccgcctgccgtcctggggcgccgccgccccgccgccggcagtggaccgctgtgcgcgaaccctgaaccctacggtcccgacccgcgggcgaggccgggtacctgggctgggatccggagcaagcgggcgagggcagcgccctaagcaggcccggagcgatggcagccttgatgaccccgggaaccggggccccacccgcgcctggtgacttctccggggaagggagccagggacttcccgacccttcgccagagcccaagcagctcccggagctgatccgcatgaagcgagacggaggccgcctgagcgaagcggacatsaggggcttcgtggccgctgtggtgaatgggagcgcgcagggygcacagatcggggccatgctgatggccatccgacttcggggcatggatctggaggagacctcggtgctgacccaggccctggctcagtcgggacagcagctggagtggccagaggcctggcgccagcagcttgtggacaagcattccacagggggtgtgggtgacaaggtcagcctggtcctcgcacctgccctggcggcatgtggctgcaaggtgccaatgatcagcrgacgtggtctggggcacacaggargcaccttggataagctggagtctattcctggattcaatgtcatccagagcccagagcagakgcaagtgctgctggaccaggcgggctgctgtatcgtgggtcagagtgagcagctggttcctgcggacggaatcctatatgcagccagagatgtgacagccaccgtggacagcctgccactcatcacagcctccattctcagtaagaractcgtggaggggctgtccgctctggtggtggacgttaagttcggaggggccgccgtcttccccaaccaggagcaggcccgggagctggcaaagacgctggttggcgtgggagccagcctagggcttcgggtcgcggcagcgctgaccgccatggacaagcccctgggtcgctgcgtgggccacgccctggaggtggagrmggcgctgctctgcatggacggcgcaggcccgccagacttaagggacctggtcaccacgctcgggggcgccctgctctggctcagcggacacgcggggactcaggcycagggcgctgcccgggtggccgcggcgctggacgacggctcggcccttggccgcttcgagcggatgctggcggcgcagggcgtggatcccggtctggcccgagccctgtgctcgggaagtcccgcagaacgccggcagctgctgcctcgcgcccgggagcaggaggagctgctggcgcccgcagatggcaccgtggagctggtccgggcgctgccgctggcgctggtgctgcacgagctcggggccgggcgcagccgcgctggggagccgctccgcctgggggtgggcgcagagctgctggtcgacgtgggwcagaggctgcgccgtgggaccccctggctccgcgtgcaccgggacggccccgcgctcagcggcccgcagagccgcgccctgcaggaggcgctcgtactctccgaccgcrcgccattygccgccccctygcccttcgcagagctcgttctgccgccgcagcaataaagctcctttgccgcgaaaccttgtcagtgcttgggcgggagcggarggatccagggctgcggaggcgggggccgtctcgatgaacacgtgacccccggcgggctccgccttccgcgcacgcgctgagagcctgtcagcggctgcgcccgtgtgcgcatgcgcagctccggggacgcctgcgccctgcctgtgagcgtgtggcgcccgctttccctgagccggcggggcagagcscagggagctggaggtcggcgcttcctctcgtgcttggtccactgacgcgcggccccgccgcgaggtgcggacgccggggctgggaggggaggaggtagccctgaggactcgctggactccggggtagtttcccagctccggctactgcgcggggctggcggggcacaccccagggcgcgctggaggccggagcgaggctggggcgcccgtgggaggctcccagcaggcaccggtgttctcgcggccaagcacagttataacgcgctcgcgcggcgcttcgagtggtcctggaacctttctggccacgagggcgctggccttgctggggagggcacaaacccagaaccgcccgggcgggggtgcagtgagtcctcgggagggtgccctcagcaggagggggcagtgaccgggagtcctgagacctscacctagcaaaccttctgcgggggcccgtgggaaaggctcaaaggtcaccaacgcaaaggcagggcgtcggctgtgagcccggaggagctgctgggaagcctggatgtgaggagggtggggttttgtggcgggtggaagtgtcgtgcgtctctgccaggagaggttaaacacagccggcgggsagagtctgagctccgggg

SEQ ID NO: 2523 - DNA, 2231 bp, Homo sapiens
acaccatcctcttagttgctcagactgaaaagctagcagccatcctggatttctctcacactgcctattcaacgtgtgaatgcatgagtggaaagctgagttcgcactcgtgactggccggggtcgactctgacattcactcccactttggcgcgctgatttgcctctgagcggatgaaggttgagccatggcgggcggggccggggaggcgggcttggagcgagggggcggggcaggcgcyacaaaaacgcgctcgcgccggcgccgaaccgcaactcccggcgacccccgcgctcccgggtggcaagatggtggcgcgcaggacgaagctcgcggcgcgggacccggaggacggtatcccgagcccaccgtgctacgcagctattccaatcaagttctctgaaaagcaacaggcttctcactacctctatgtgagagcacacggcrttcaacaaggcaccaagtccacctggcctcagaagaggactctttttgtcttcaatgtgcccccatactgcacagaggagagcctgtcctgcctccagtccacctgtggccttgtccagtctgtagagttgaaggagaagctggagctggctgggagtcaaggtcgaagttttttcatccaaagccagttccgggtttccaggtagcctacgtggtgttccagaagccaagtggggtgtcagcggccttggccctgaagggccccctgctggtgtccacagagagccaccctgtgaagagtggcattcacaaatggatcagtgactacgcagactcygtgcccgaccctgaggccctgagggtggaagtggacacgttcatggaggcatatgaccagaagatcgctgaggaagaagctaaggccaaggaggaggagggggtccctgacgaggagggctgggtgaaggtgacccgccggggccggcggcctgtgctcccccggactgaggcagccagcttgygggtgctggagagggagagacrgaagcgcagccraaaagagctgctcaactacgcctggcagcatcgagagagcaagatggagcatctagcgcagctgcgcaagaagtttgaggaggacaagcagaggatcgagctgctgcgggcccagcgcaaattccgaccstactgagcygtgagagcckcagtgratggctggaggtgcagggccaggaggmacatgaggtgagrcagggcctgcagcggtctctgagaggccgagctctggccaacgggccccaggttgaaggccaycgcgtccaacagccccatcagagtccacacaggccaggagkgaaggaccaggccacycctcgggtcttgtgcttcagcagtcctggagacccaggcgtgcckagaggaggacttgtccttcccacctcttgcctccacacccttgaggaccctggatgaatccgttctgtgcttccttttccctcaatgcaaaagcccttgctggcaacaaaaaagcctcaaaagcagtgagaawamaaraaccttttattttccatccagttgggcagcagggaaaggctaggtgggcccagccygcccttccttcctccagctggctggakatttattattagccaggagamagcagccctsgaacccagactctgtctcccycttgaggtcacagatgttgaagttggaatctcgctccttcccctgactaccatcctaggctgggcctcaagactagtgaggcctgtccccaccatccctggccttgttgtggggctcaggaactcagagtcccartgttgagtctgggagcactaggtcttcatagttccaggcccagagctacagctgggctgggagcrtgtgtgtgcrctgtaagaaggagctgatgatactggcsacgtgctggggttcgctcatgtggacacagtgattgcctgggacttccacaaactggaacygctctttgagggtggatttcatcgtgtctatcatgaacgacagggactccttstcagagtaattctgtcttgaatcaaaatatccgtggactacttacttgatcaacaggacatgggcctgcagcttcctgatggaatgcgcacacagctccctgctgaygaagtcaatgctgttctctgcctgcgagcctctggtctctgttcagaaccagacctgtggccaccttcgtggttcctctttgcaggagaagctccccgcactcctcactcaagtggctattgctcttcagtaacct

SEQ ID NO: 2524 - DNA, 2312 bp, Homo sapiens
acaccatcctcttagttgctcagactgaaaagctagcagccatcctggatttctctcacactgcctattcaacgtgtgaatgcatgagtggaaagctgagttcgcactcgtgactggccggggtcgactctgacattcactcccactttggcgcgctgatttgcctctgagcggatgaaggttgagccatggcgggcggggccggggaggcgggcttggagcgagggggcggggcaggcgcyacaaaaacgcgctcgcgccggcgccgaaccgcaactcccggcgacccccgcgctcccgggtggcaagatggtggcgcgcaggacgaagctcgcggcgcgggacccggaggacggtatcccgagcccaccgtgctacgcagctattccaatcaagttctctgaaaagcaacaggcttctcactacctctatgtgagagcacacggcrttcaacaaggcaccaagtccacctggcctcagaagaggactctttttgtcttcaatgtgcccccatactgcacagaggagagcctgtcctgcctccagtccacctgtggccttgtccagtctgtagagttgaaggagaagctggagctggctgggagtcaaggtcgaagttttttcatccaaagccagttccgggtttccaggtagcctacgtggtgttccagaagccaagtggggtgtcagcggccttggccctgaagggccccctgctggtgtccacagagagccaccctgtgaagagtggcattcacaaatggatcagtgactacgcagactcygtgcccgaccctgaggccctgagggtggaagtggacacgttcatggaggcatatgaccagaagatcgctgaggaagaagctaaggccaaggaggaggagggggtccctgacgaggagggctgggtgaaggtgacccgccggggccggcggcctgtgctcccccggactgaggcagccagcttgygggtgctggagagggagagacrgaagcgcagccraaaagagctgctcaactacgcctggcagcatcgagagagcaagatggagcatctagcgcagctgcgcaagaagtttgaggaggacaagcagaggatcgagctgctgcgggcccagcgcaaattccgaccstactgagcygtgagagcckcagtgratggctggaggtgcagggccaggaggmacatgaggtgagrcagggcctgcagcggtctctgagaggccgagctctggccaacgggccccaggttgaaggccaycgcgtccaacagccccatcagagtccacacaggccaggagkgaaggaccaggccacycctcgggtcttgtgcttcagcagtcctggagacccaggcgtgcckagaggaggacttgtccttcccacctcttgcctccacacccttgaggaccctggatgaatccgttctgtgcttccttttccctcaatgcaaaagcccttgctggcaacaaaaaagcctcaaaagcagtgagaawamaaraaccttttattttccatccagttgggcagcagggaaaggctaggtgggcccagccygcccttccttcctccagctggctggakatttattattagccaggagamagcagccctsgaacccagactctgtctcccycttgaggtcacagatgttgaagttggaatctcgctccttcccctgactaccatcctaggctgggcctcaagactagtgaggcctgtccccaccatccctggccttgttgtggggctcaggaactcagagtcccartgttgagtctgggagcactaggtcttcatagttccaggcccagagctacagctgggctgggagcrtgtgtgtgcrctgtaagaaggagctgatgatactggcsacgtgctggggttcgctcatgtggacacagtgattgcctgggacttccacaaactggaacygctggagaggggagggggtgggtggtgaggtgtggccagaggagcctagggagctccatgggcccyggggtcagggccctcccacagcmttccagctccctgcaggtcaggagcgcctcccacagtgagtttcccccacactcggctccttggagccccgacagtccatagcaccccaggaggtgtctaaccctagggacttggaggcctcccaggggtctaggcyagctgagttgtgaagttgcatggcagggacagggcggggccraggccagggttgctgtgattgtatcagaagaggtacccgtgagaaaagataatgagatgggggcgtgaacagcctgcagacttgtgtctgccttcaagaagccagacag

SEQ ID NO: 2525 - DNA, 2976 bp, Homo sapiens
acaccatcctcttagttgctcagactgaaaagctagcagccatcctggatttctctcacactgcctattcaacgtgtgaatgcatgagtggaaagctgagttcgcactcgtgactggccggggtcgactctgacattcactcccactttggcgcgctgatttgcctctgagcggatgaaggttgagccatggcgggcggggccggggaggcgggcttggagcgagggggcggggcaggcgcyacaaaaacgcgctcgcgccggcgccgaaccgcaactcccggcgacccccgcgctcccgggtggcaagatggtggcgcgcaggacgaagctcgcggcgcgggacccggaggacggtatcccgagcccaccgtgctacgcagctattccaatcaagttctctgaaaagcaacaggcttctcactacctctatgtgagagcacacggcrttcaacaaggcaccaagtccacctggcctcagaagaggactctttttgtcttcaatgtgcccccatactgcacagagaaactaaagggaattgctggattttcttttcttttttctttgttcttttttttttttttttttttttttttgagacagagtctctctcttgctcaggctggagcacagcgatcacgactcactgcaacctccacttcctgggttcaagcgattctcctgccacagcatcccgagcagctggaattacaggcgcccaccaccatgcccggctcgtttttgtattgttagtatagacaaggtttcaccatgttggccaggctggtctcgaactcctgacctgaagtaatccgcccccttcagcctcccaacgtgctgggattacatgcgtgagccaccgcccctggccaagggaattgctggatttgttttcaaaaaagaaaccctaatttgtaaaagattcctctaaacttagagaaaaaaagaagcatatagaagagggggtgtgagttctgaccttttttgaagtgcagcatgtgtgccgggaagggccccagtcgcaagtgtccagctcgctgcatcccagagacagaacatagctgtgtagtcagcacccaggtggagacacagcagcacatcccagaacccccgaacccccactgcctccaccagagacaaccaccatcccractgtcacagcatagggtcgctactgctgattcagcaggagagcctgtcctgcctccagtccacctgtggccttgtccagtctgtagagttgaaggagaagctggagctggctgggagtcaaggtcgaagttttttcatccaaagccagttccgggtttccaggtagcctacgtggtgttccagaagccaagtggggtgtcagcggccttggccctgaagggccccctgctggtgtccacagagagccaccctgtgaagagtggcattcacaaatggatcagtgactacgcagactcygtgcccgaccctgaggccctgagggtggaagtggacacgttcatggaggcatatgaccagaagatcgctgaggaagaagctaaggccaaggaggaggagggggtccctgacgaggagggctgggtgaaggtgacccgccggggccggcggcctgtgctcccccggactgaggcagccagcttgygggtgctggagagggagagacrgaagcgcagccraaaagagctgctcaactacgcctggcagcatcgagagagcaagatggagcatctagcgcagctgcgcaagaagtttgaggaggacaagcagaggatcgagctgctgcgggcccagcgcaaattccgaccstactgagcygtgagagcckcagtgratggctggaggtgcagggccaggaggmacatgaggtgagrcagggcctgcagcggtctctgagaggccgagctctggccaacgggccccaggttgaaggccaycgcgtccaacagccccatcagagtccacacaggccaggagkgaaggaccaggccacycctcgggtcttgtgcttcagcagtcctggagacccaggcgtgcckagaggaggacttgtccttcccacctcttgcctccacacccttgaggaccctggatgaatccgttctgtgcttccttttccctcaatgcaaaagcccttgctggcaacaaaaaagcctcaaaagcagtgagaawamaaraaccttttattttccatccagttgggcagcagggaaaggctaggtgggcccagccygcccttccttcctccagctggctggakatttattattagccaggagamagcagccctsgaacccagactctgtctcccycttgaggtcacagatgttgaagttggaatctcgctccttcccctgactaccatcctaggctgggcctcaagactagtgaggcctgtccccaccatccctggccttgttgtggggctcaggaactcagagtcccartgttgagtctgggagcactaggtcttcatagttccaggcccagagctacagctgggctgggagcrtgtgtgtgcrctgtaagaaggagctgatgatactggcsacgtgctggggttcgctcatgtggacacagtgattgcctgggacttccacaaactggaacygctggagaggggagggggtgggtggtgaggtgtggccagaggagcctagggagctccatgggcccyggggtcagggccctcccacagcmttccagctccctgcaggtcaggagcgcctcccacagtgagtttcccccacactcggctccttggagccccgacagtccatagcaccccaggaggtgtctaaccctagggacttggaggcctcccaggggtctaggcyagctgagttgtgaagttgcatggcagggacagggcggggccraggccagggttgctgtgattgtatcagaagaggtacccgtgagaaaagataatgagatgggggcgtgaacagcctgcagacttgtgtctgccttcaagaagccagacag

SEQ ID NO: 2526 - DNA, 1547 bp, Homo sapiens
caaggacttcagcggacatggctcccagcgtgccagcggcagaacccgagtatcctaaaggcatccaggccgtgctgctggggcctcccggggacggtaaaggcacccaggcacccatattggctgaaaacttctgtgtctgccattcggctactggggacaggctgagggccatggtggcttctggctcagagctagaaaaaaagctgaacgcaactatggatgctgggaaactggtgagtgatgaaatggtagtggagctcattgagaagaatttggagaccccccttgtgcaaaaatgtttttcttctggatggcttccctcggactgtgaggcaggcagaaatggctgattcaccccaagagtggccgttcctaccacgaggagttcaaccctccaaaagagcccatgaaagatgacatcaccggggaacccttgattcgtcgatcagatgataatgaaaacgccttgaaaatccgcctgcaagcctacgacactcaaactaccccactcatagagtacttcaggaaacgggagatccactctgccattgatgcatcccagacccctgatgtcgtgttcgcaagcaccctagcagccttctccaaagccacatcctagtatcagaaggccaggcgagactgcaccactgcttatcaccccaccgcgtgatccctgctcttaggtgctgggcagaagggaagggtggtcagggtgaggatggtgagggagggctggtgaggggctcagaggaatacctggaacaacagcagtgttattgtagtgtggcagtttcttttatacataggtgggagtttttaaagtaagggaaaaattaattttttaaaaaacaccatgcttggagggtgggggtagaaatacagagatacaatattatttctaaggaattgggttttcatttactctggactggtgaaaatattttttaaagccagtgctctgagacctcagcttttaactcagaactccatgggttccagaccaagagtacaggaaatcgaattgttgtcctgtctgtctatagcttggaacagggaggctttgattacttaccctggttccacatactgtaagatcaaaaaaccatctccacatttgaaagagatgtaaggtgtattcatagggatggtggctcaamaaatcaagcaaactgaaatcaaggggagggggaagggaatgaaatggaaagggaggctgattcccttcccctgacttaccactaatttactaggctacctactctcatgagtaacctctcacagctatccagcacatgccacaaccctatgctcttgccttcttttatctgcagtgtgtgaagggactcttttaaataaatgagcaastgtcctaagctatgtcatccaaagattgtcctttccgttctcaaatcttgtgactgggatcactcaacagcactgtgatgtattattttcaatgaggtgcctttcttaagaccaaatgctgccttgttgggcccctaaatcaataaaatatgttaaaatttgaaaaaaaactatacaaa

SEQ ID NO: 2527 - DNA, 1642 bp, Homo sapiens
caaggacttcagcggacatggctcccagcgtgccagcggcagaacccgagtatcctaaaggcatccaggccgtgctgctggggcctcccggggacggtaaaggcacccaggcacccatattggctgaaaacttctgtgtctgccattcggctactggggacaggctgagggccatggtggcttctggctcagagctagaaaaaaagctgaacgcaactatggatgctgggaaactggtgagtgatgaaatggtagtggagctcattgagaagaatttggagaccccccttgtgcaaaaatgtttttcttctggatggcttccctcggactgtgaggcaggcagaaatgctcgatgacctcatggagaagaggaaaaagaagcttgattctgtgattgaattcagcatcccagactctctgctgatccgaagaatcacaggaaggctgattcaccccaagagtggccgttcctaccacgaggagttcaaccctccaaaagagcccatgaaagatgacatcaccggggaacccttgattcgtcgatcagatgataatgaaaacgccttgaaaatccgcctgcaagcctacgacactcaaactaccccactcatagagtacttcaggaaacgggagatccactctgccattgatgcatcccagacccctgatgtcgtgttcgcaagcaccctagcagccttctccaaagccacatcctagtatcagaaggccaggcgagactgcaccactgcttatcaccccaccgcgtgatccctgctcttaggtgctgggcagaagggaagggtggtcagggtgaggatggtgagggagggctggtgaggggctcagaggaatacctggaacaacagcagtgttattgtagtgtggcagtttcttttatacataggtgggagtttttaaagtaagggaaaaattaattttttaaaaaacaccatgcttggagggtgggggtagaaatacagagatacaatattatttctaaggaattgggttttcatttactctggactggtgaaaatattttttaaagccagtgctctgagacctcagcttttaactcagaactccatgggttccagaccaagagtacaggaaatcgaattgttgtcctgtctgtctatagcttggaacagggaggctttgattacttaccctggttccacatactgtaagatcaaaaaaccatctccacatttgaaagagatgtaaggtgtattcatagggatggtggctcaamaaatcaagcaaactgaaatcaaggggagggggaagggaatgaaatggaaagggaggctgattcccttcccctgacttaccactaatttactaggctacctactctcatgagtaacctctcacagctatccagcacatgccacaaccctatgctcttgccttcttttatctgcagtgtgtgaagggactcttttaaataaatgagcaastgtcctaagctatgtcatccaaagattgtcctttccgttctcaaatcttgtgactgggatcactcaacagcactgtgatgtattattttcaatgaggtgcctttcttaagaccaaatgctgccttgttgggcccctaaatcaataaaatatgttaaaatttgaaaaaaaactatacaaa

SEQ ID NO: 2528 - DNA, 1870 bp, Homo sapiens
gccctttcaccctttaccttggacccctcaccaaggctcccactgggttgcagggacaccaagctgggctgccagcagacatggggcctgtgcctgttggaatctacagcagtgctgattgctttgggattctgcatgagacggagctgccccctgtcactacctggaaggtgaaggtcatgaaggagaagggcaagaggtcctctggacacatccaccagatcgacctggacatgagccggacattaaggaaccacctgttcttcagggaccgatatggagtcaacactgatgaagcaaatccaatacttagggaatggtggccacgtgctggaccagccccgggctctgaggatctgacagttctctgcatggacaagtacagggaggcacagctgttgctggtggagaccaccacatttgggaatggagacttccccagcaatggagagaaactgaagaaatccctcttcatgctgaaagagctcaccaacaaattcaggtatgccatgtttggcctcagctccagcaagtaccctcagttctgtgcctttgctcatgacctcacccagtagctgtcccacctgggggcctctcagctcaccccgatgggggaagaggatgaggtcagtgggcagaggatgccttccgcagctgggccatgcaaaccttcaaggcagcctgtgaaacgtttgatgtccgaagccaacagcacattcagatccccaagctctacacctccaatgtgacctggggcttgcaccacttcaggctcgtgcaggactcacagcctttggacctcagctaaccctcagcagcatgcacgccaataacatgttcaccacgaggctcaaatctcagcagaagctacagagtccaacatccagccacaccaccatcctggtggaattctcttgtgaggagggccaaggcctgaactacctgccaagggagcaccttggggtttgcccaggcaaccagctggccctggtccaaggyatgctggagcgagtggtggatggccccacaccccaccagacagggcacctggaggctctggatgagagcagtgagccctgggccagggagccagtgctgcctggcatcctctggccaccccatctggctgaggggctgagcctgggcctgccagtgacagtcatccctagtacagcaagtggaagttcaccaacagcctcacgttcctggaggtgctggaggagtttctgtccctgtgggtgtctgctagcttcctgctctcccagctccccattctgaatcccaggttctactccatcagctcctcctgggatcacatgcccatggagatccacctgactgtgaccgtgctcatgtaccacacccgagcggcttccacctccccgaggatccctcccatcctcgcatccttgtcaggcctggcacaggtatcgctcccttccacagtttctggcagcagcggctccatgactcccagcggaagggtcgatgttcaggacatcctgcagcagcagctggccagcaaggtgctccgtgtactccacgaggagccaggccacctctatgtttgctgggatatgcgcatggcctgggatgtggcccacaccctgaagcagctggtggctgccaagctgaaattgaatgaggagcaggtcgaggactatttctttcagctcaaggaggggttaaagctgccggcacagaacttaaccacggagccagctctgcattatccgaggtcacagggcctggggagatggaggaaagtgatatcccccagcctcacatcttattttttcacttcattccccatcaagccctttacttgacctcctaccaagtagcaccctggattgatcagagcctcctc

SEQ ID NO: 2529 - DNA, 1653 bp, Homo sapiens
ccaacccttccacccaggggctctggcccttcgctcttgcttccccgctagaattcccctctggggcaggacaaggacacggacagcagatcgttcgaatgacgccgaaagggacccccaaagccctctcccctggactcaagggctgttcttcacacaaaagagccgggccagcttgaaaagcaaaggggccagcgtcgcggcccttctctgggtgccaccctccaccgcgcccgcagaccctgtctccagccgcccgagcggtctccactgtaggcttcctacccccaayccggccagacaaagccccggcagcagggccggcacttccgagcctccggactcgggacgccgcgctcttaccctggcctcatccaragtgacgccggcgccaccgcttcccccggctttggcggcggggcagctggcggcgcgggtcttggaggagcgggtccgagaggagatgaaatggctgctgcctccggtcgccccaggctctgctccggccccaggcccaggcccgggaccaggagacttggacccgagaaggcggagagagctcttccgggtgttcaccatggtccagccagggggacggagtccacgccgcgcccgggagagccgagcaaggccggcccgccggccggtcagtcagggccagcggagccgagccgggcaatgagagacgagccggcccggagcgtgcggagcgcagacgagcacaagagagagccgggcagaggaagggaagtcggcgtgagcaggcggcgtgcgggaagcgggggcggtgctgcagaccggcagcacagacactccgccggcttcgccctcctcagcgggagccgagcggagccgccatttctacccctttctctcccgttctcgctctcgagctccgtgcgtcaaggctccagcgccgcagggccaacgagaccgcttccggccgcagccacggcggggcgctgcgaagccggccagcccttcccggctgctcgctcctctccctgccgcctccagctgccccgcccccggcgcggcgtcagcgctcggcggccggggagcgacgctctaggctgtcagctcggtggtttccagctctccccgaccgcagggctggggcgaccagaaaagccagactaatcaggacgagttcgggcgtggaattgggcctgaagccctcatgcccagccaggcctgaatgccccagaccccaccgtcacccccgtggcctggatggagcaggggacggccggcgaaggcgcggggtggaaggggagcggcgacgaaggcgcgaggagctgactgggaatccccaagctacccgaggcaagacactgaacttgagtcgcacttttcatgcctgtagaaatgagaatgacagctgtgataaaaaaaaaattcatctgggcggtatctggaacttggtaagcttaagaagagaaggggggggggaaacaccatgctagaactctgcgtttttaaacaaagcgaggcagggtcgttttctatccccttagccagatctaaggcggagccaaagaatgagtaccctgtaagagccgcctctatcrccgccccctgcccccggcccgctgaagaattaagaatacaaaaagctgaacccacagataaagcatttgcaatttaacttcc

SEQ ID NO: 2530 - DNA, 1143 bp, Homo sapiens
gcttcctacccccaayccggccagacaaagccccggcagcagggccggcacttccgagcctccggactcgggacgccgcgctcttaccctggcctcatccaragtgacgccggcgccaccgcttcccccggctttggcggcggggcagctggcggcgcgggtcttggaggagcgggtccgagaggagatgaaatggctgctgcctccggtcgccccaggctctgctccggccccaggcccaggcccgggaccaggagacttggacccgagaaggcggagagagctcttccgggtgttcaccatggtccagccagggggacggagtccacgccgcgcccgggagagccgagcaaggccggcccgccggccgctgccccgcccccggcgcggcgtcagcgctcggcggccggggagcgacgctctaggctgtcagctcggtggtttccagctctccccgaccgcagggctggggcgaccagaaaagccagactaatcaggacgagttcgggcgtggaattgggcctgaagccctcatgcccagccaggcctgaatgccccagaccccaccgtcacccccgtggcctggatggagcaggggacggccggcgaaggcgcggggtggaaggggagcggcgacgaaggcgcgaggagctgactgggaatccccaagctacccgaggcaagacactgaacttgagtcgcacttttcatgcctgtagaaatgagaatgacagctgtgataaaaaaaaaattcatctgggcggtatctggaacttgggcgttccgaaacttacagttatgcgcaacacaatgtttctattttcaaaggcgaacgctgcacgatcgcagtccagtgatacaaataataaaagagtttattacttgtcagcaatgatgaatgttcgtgtggcatccagcgttgagttcctattcttacttggaactcattggtccctgtgtctggggccagcactgatggacacaactaagtttgcactcgtcttccctctcatgtatcatacctggaatgggatccaacacttgatgtgggacctaggaaaaggcctgaagattccccagctataccagtctggagtggttgtcctggttcttactgtgttatttgtagggctggcagctgtg

SEQ ID NO: 2531 - DNA, 4152 bp, Homo sapiens
ccaacccttccacccaggggctctggcccttcgctcttgcttccccgctagaattcccctctggggcaggacaaggacacggacagcagatcgttcgaatgacgccgaaagggacccccaaagccctctcccctggactcaagggctgttcttcacacaaaagagccgggccagcttgaaaagcaaaggggccagcgtcgcggcccttctctgggtgccaccctccaccgcgcccgcagaccctgtctccagccgcccgagcggtctccactgtaggcttcctacccccaayccggccagacaaagccccggcagcagggccggcacttccgagcctccggactcgggacgccgcgctcttaccctggcctcatccaragtgacgccggcgccaccgcttcccccggctttggcggcggggcagctggcggcgcgggtcttggaggagcgggtccgagaggagatgaaatggctgctgcctccggtcgccccaggctctgctccggccccaggcccaggcccgggaccaggagacttggacccgagaaggcggagagagctcttccgggtgttcaccatggtccagccagggggacggagtccacgccgcgcccgggagagccgagcaaggccggcccgccggccggtcagtcagggccagcggagccgagccgggcaatgagagacgagccggcccggagcgtgcggagcgcagacgagcacaagagagagccgggcagaggaagggaagtcggcgtgagcaggcggcgtgcgggaagcgggggcggtgctgcagaccggcagcacagacactccgccggcttcgccctcctcagcgggagccgagcggagccgccatttctacccctttctctcccgttctcgctctcgagctccgtgcgtcaaggctccagcgccgcagggccaacgagaccgcttccggccgcagccacggcggggcgctgcgaagccggccagcccttcccggctgctcgctcctctccctgccgcctccagctgccccgcccccggcgcggcgtcagcgctcggcggccggggagcgacgctctaggctgtcagctcggtggtttccagctctccccgaccgcagggctggggcgaccagaaaagccagactaatcaggacgagttcgggcgtggaattgggcctgaagccctcatgcccagccaggcctgaatgccccagaccccaccgtcacccccgtggcctggatggagcaggggacggccggcgaaggcgcggggtggaaggggagcggcgacgaaggcgcgaggagctgactgggaatccccaagctacccgaggcaagacactgaacttgagtcgcacttttcatgcctgtagaaatgagaatgacagctgtgataaaaaaaaaattcatctgggcggtatctggaacttggcggtggatgaggagggctgctcgctggctgcggctgaggctcggtcaccgtgtagagaggcccagggagagctgcttcactcaagtcctgtcaagtcaaggcagccgggatttgtccacatctaaggcgaaagagaatgaaagacgtagataacctcaaaagtataaaagaagaatgggtttgtgaaacaggatctgataatcaacctcttggtaataatcaacaatcaaattgtgaatattttgttgatagcctttttgaggaagctcagaaggttagttccaaatgtgtgtctcccgctgaacagaagaaacaggtagatgtaaatataaaattatggaaaaacggattcaccgtcaacgacgatttcagaagttattccgatggtgccagtcagcagtttttgaactccatcaaaaagggggaattaccttcagaattacagggaatttttgataaagaagaggtggacgttaaagttgaagacaagaaaaatgaaatatgtttgtctacgaagcctgtgttccagcccttttcaggacagggtcacagactaggaagtgccacaccaaaaattgtttctaaagcaaagaatattgaagttgaaaataaaaataatttgtctgctgttccactgaacaacttggaacccattactaatatacagatctggttggccaatggaaaaaggattgtccagaaatttaacattactcatagagtaagccatatcaaagacttcattgaaaaataccaaggatctcaaagaagtcctccgttttccctggcaacagctcttcctgtcctcaggttgctagatgagacactcacactggaagaagcagatttacagaatgctgtcatcattcagagactccaaaaaactgcatcttttagagaactttcagagcactgatttttgatagactaagtggaaaatttgcagagaaatgatggttgtaagtggacatgcaaaccaaaattggggattggagaagtcagactcactagacttttggttcgagtactattgaactctctcctgatgagaagatgtttagataagtacaagttaagaaagtagcatatgactggaaactatattcagtgcactttctccraaagactacccagaaaaatagacttattttcaaataccagttatcaagatatattaaatagctgtattgtttagaatcttaatatgrtataaattagcatatgtattcacaatattcattcagacatcattcccagacagcagggatttatttaaatgttagctgtctgagtttttaaatagctaatacgaccgggtacagtggttcatgcctgtaatcccagaacttcgggaggccgagacaggcagatcacgaggtcaacagattgagaccatcctggcaaacatggtgaaaccccatctctagtaaaaatacaaaaattagctgggcgtggcggtgcgcaactgtagtcccagctactcgggaggctgaggcaggagaatctcttgaacctggcaagtgtaggttgcagtgagctgagattgagcaactgtactccagcttggcgacagagcaagaccccctctcaaaaataaataaaataaagtaaaataaatataaataattgtggccgggtgcaatggctcatgcctgtaatcccagcactttgggaggctgagatgggaggatcacttgaagccaggagtttaaaaccagaatgatcaacagagtgagacccctgtctatatatttttttaatttaaaaaataaaagaataaaattgtgtagctcagtatagtatcaagattaatctgcctactcacatttctacactttataaaaatgtaataaaagaaaattatctttctaaaaagcctattccctttccattttattttctttcaaaaattatggatttgtttttggctaacatttgggattagccattcatttgccaccactcacttagaatataatgccggtgtgtgtcacattactagtattttttaaatgcatcatataaagtatggttttctgtttctttttcgtttgtttgagatggagtttcgctcttgttgcccaggctggagtgcagtggcgcaatctcagctcaccacaacctccacctcccgggttcaagagattctcctgctcagcctcccaagtagctgggattacaggcatgcgccaccatgcttggctaattttgcatttttagtagacacgggatttcaccatgttggtcaggctggtctcgaactcccgacctcaggggatctgcctgcctaggcctcctgaagtgctgggattacaagtgtgaaccaccgtgcccagctggttttctgtttcatacatcagagtcaacttgtgaatacatttaaagattatttcattttgatatcacgaagaaaaacaggctttatatctcagactttaactaaatccagttagacctcaatttttcactgtcagattaaatccccatacctgaaaataagtttaacatttttttttgcaaatgatctattgaatcagatttaaaatgaagcatgcattgagtgtgccaaggaactaagtggtccatagcagcagtaatgttcatagggtgcgagatgcctgctatgaaacagcaactctcaaacatttttatctcaagaccatttgtttatgtgagctatatatattattatattaaatattaaatttttaaaatatttatttatgg

SEQ ID NO: 2532 - DNA, 5500 bp, Homo sapiens
gattttgtttttaaagttggtgtcagagcagctacaaacttttttcagcatccctgcctggctgccaactggagctctctgttcacttcctcaccaacttgaaccacccccaaactgagagtaagctggagttagacagcggcaggaactgacacactttcaagaagggtttgacaccgcakaaaactttcacttctccaacccttccacccaggggctctggcccttcgctcttgcttccccgctagaattcccctctggggcaggacaaggacacggacagcagatcgttcgaatgacgccgaaagggacccccaaagccctctcccctggactcaagggctgttcttcacacaaaagagccgggccagcttgaaaagcaaaggggccagcgtcgcggcccttctctgggtgccaccctccaccgcgcccgcagaccctgtctccagccgcccgagcggtctccactgtaggcttcctacccccaayccggccagacaaagccccggcagcagggccggcacttccgagcctccggactcgggacgccgcgctcttaccctggcctcatccaragtgacgccggcgccaccgcttcccccggctttggcggcggggcagctggcggcgcgggtcttggaggagcgggtccgagaggagatgaaatggctgctgcctccggtcgccccaggctctgctccggccccaggcccaggcccgggaccaggagacttggacccgagaaggcggagagagctcttccgggtgttcaccatggtccagccagggggacggagtccacgccgcgcccgggagagccgagcaaggccggcccgccggccggtcagtcagggccagcggagccgagccgggcaatgagagacgagccggcccggagcgtgcggagcgcagacgagcacaagagagagccgggcagaggaagggaagtcggcgtgagcaggcggcgtgcgggaagcgggggcggtgctgcagaccggcagcacagacactccgccggcttcgccctcctcagcgggagccgagcggagccgccatttctacccctttctctcccgttctcgctctcgagctccgtgcgtcaaggctccagcgccgcagggccaacgagaccgcttccggccgcagccacggcggggcgctgcgaagccggccagcccttcccggctgctcgctcctctccctgccgcctccagctgccccgcccccggcgcggcgtcagcgctcggcggccggggagcgacgctctaggctgtcagctcggtggtttccagctctccccgaccgcagggctggggcgaccagaaaagccagactaatcaggacgagttcgggcgtggaattgggcctgaagccctcatgcccagccaggcctgaatgccccagaccccaccgtcacccccgtggcctggatggagcaggggacggccggcgaaggcgcggggtggaaggggagcggcgacgaaggcgcgaggagctgactgggaatccccaagctacccgaggcaagacactgaacttgagtcgcacttttcatgcctgtagaaatgagaatgacagctgtgataaaaaaaaaattcatctgggcggtatctggaacttggcggtggatgaggagggctgctcgctggctgcggctgaggctcggtcaccgtgtagagaggcccagggagagctgcttcactcaagtcctgtcaagtcaaggcagccgggatttgtccacatctaaggcgaaagagaatgaaagacgtagataacctcaaaagtataaaagaagaatgggtttgtgaaacaggatctgataatcaacctcttggtaataatcaacaatcaaattgtgaatattttgttgatagcctttttgaggaagctcagaaggttagttccaaatgtgtgtctcccgctgaacagaagaaacaggtagatgtaaatataaaattatggaaaaacggattcaccgtcaacgacgatttcagaagttattccgatggtgccagtcagcagtttttgaactccatcaaaaagggggaattaccttcagaattacagggaatttttgataaagaagaggtggacgttaaagttgaagacaagaaaaatgaaatatgtttgtctacgaagcctgtgttccagcccttttcaggacagggtcacagactaggaagtgccacaccaaaaattgtttctaaagcaaagaatattgaagttgaaaataaaaataatttgtctgctgttccactgaacaacttggaacccattactaatatacagatctggttggccaatggaaaaaggattgtccagaaatttaacattactcatagagtaagccatatcaaagacttcattgaaaaataccaaggatctcaaagaagtcctccgttttccctggcaacagctcttcctgtcctcaggttgctagatgagacactcacactggaagaagcagatttacagaatgctgtcatcattcagagactccaaaaaactgcatcttttagagaactttcagagcactgatttttgatagactaagtggaaaatttgcagagaaatgatggttgtaagtggacatgcaaaccaaaattggggattggagaagtcagactcactagacttttggttcgagtactattgaactctctcctgatgagaagatgtttagataagtacaagttaagaaagtagcatatgactggaaactatattcagtgcactttctccraaagactacccagaaaaatagacttattttcaaataccagttatcaagatatattaaatagctgtattgtttagaatcttaatatgrtataaattagcatatgtattcacaatattcattcagacatcattcccagacagcagggatttatttaaatgttagctgtctgagtttttaaatagctaatacgaccgggtacagtggttcatgcctgtaatcccagaacttcgggaggccgagacaggcagatcacgaggtcaacagattgagaccatcctggcaaacatggtgaaaccccatctctagtaaaaatacaaaaattagctgggcgtggcggtgcgcaactgtagtcccagctactcgggaggctgaggcaggagaatctcttgaacctggcaagtgtaggttgcagtgagctgagattgagcaactgtactccagcttggcgacagagcaagaccccctctcaaaaataaataaaataaagtaaaataaatataaataattgtggccgggtgcaatggctcatgcctgtaatcccagcactttgggaggctgagatgggaggatcacttgaagccaggagtttaaaaccagaatgatcaacagagtgagacccctgtctatatatttttttaatttaaaaaataaaagaataaaattgtgtagctcagtatagtatcaagattaatctgcctactcacatttctacactttataaaaatgtaataaaagaaaattatctttctaaaaagcctattccctttccattttattttctttcaaaaattatggatttgtttttggctaacatttgggattagccattcatttgccaccactcacttagaatataatgccggtgtgtgtcacattactagtattttttaaatgcatcatataaagtatggttttctgtttctttttcgtttgtttgagatggagtttcgctcttgttgcccaggctggagtgcagtggcgcaatctcagctcaccacaacctccacctcccgggttcaagagattctcctgctcagcctcccaagtagctgggattacaggcatgcgccaccatgcttggctaattttgcatttttagtagacacgggatttcaccatgttggtcaggctggtctcgaactcccgacctcaggggatctgcctgcctaggcctcctgaagtgctgggattacaagtgtgaaccaccgtgcccagctggttttctgtttcatacatcagagtcaacttgtgaatacatttaaagattatttcattttgatatcacgaagaaaaacaggctttatatctcagactttaactaaatccagttagacctcaatttttcactgtcagattaaatccccatacctgaaaataagtttaacatttttttttgcaaatgatctattgaatcagatttaaaatgaagcatgcattgagtgtgccaaggaactaagtggtccatagcagcagtaatgttcatagggtgcgagatgcctgctatgaaacagcaactctcaaacatttttatctcaagaccatttgtttatgtgagctatatatattattatattaaatattaaatttttaaaatatttatttatggccactgtgcccagccaataataacttataaaacatgaaacgatttagtgagaaaagyggccggttttttggggggaattactttctgtcataaagaagatagatgggttctcatgtcttctacattcagtctgttgtgcagtcacatatcatgtagactctggaaaacacctctgtatactggtgaaagaatgaaaagaagcaaataatgccttagtatgattatgaaaaacgttttgacttcacagtgccctgaatgggtcttgggaatctccagggatccctcaggcacactttgagaaccaatctatataaagtgatggttcacaatgattctgaagccttagtttcagaatcatttggggcagcttttcaaaaatgccattcctgccacctaccacaaagattctgattcactgtatctgtgatgggtctcagatctctgcatttttaatctcacgtgattcttaagtatgtggtggaagtacctttcttcaggaaattctgtcctaagcttttaccctgagaaaataaaacctgcatgctttcaccatggacggtgggagactccactgaaacacatctgctagaccactaagtttatccttgtcacccagtttgctcttggaaagagtctgttcccttttgtcactgaaccaatcatgacataaacttgtgctttacctcctatagcacagccgagacaaggctggaacatttaattaaggtttttactaaggactcaggaataacaacagggaaatatctatgtaactagatgacctgacataaaatctatcttctgattgcagtctattgtgagaatgctgcttttcctagctcccagccttccatggggcagaaggctcttttaattaggaagagagggaggacaaaggagagccttttcttttgtccattactcttagaaatgaacaggtacataatagaaaataaataattattgttggtaatgtttacacagcagtgttagagcctctctgtagtgaaacaaaaataatgttcttaccaaaaaaaaaaaaaaagggtcctatggagaaagacctgttgtcatcaataaccttcattattctaactgtgaaacgttcattaatgcgaataatatcctcaaagattttctacaatgagaat

SEQ ID NO: 2533 - DNA, 1718 bp, Homo sapiens
gcctaaagctgaattcccagcgctttggcttctctgagttggggttgtgtataggggtcttcgaacagttccggaaccagccagcagcctttaattcttgggcggaccacggccggccactgttcttggctaagatgagcagccaccataccacctttccttttgaccctgagcggcgagtccggagtacgctgaagaaggtctttgggtttgactcttttaagaygcctttacaggagagtgcgaccatggctgtagtaaaaggtaacaaggacgtctttgtgtgcatgcccacaggggcaggaaaatccctatgctatcagstccctgctctgttggccaaaggcatcaccattgtagtctctcctctcattgctttgattcaggaccaagtggaccacttgctaaccctaaaggtacgagtaagttccctgaactcgaagctctctgcacaggaaaggaaggagctgcttgctgacctggagcgagaaaagccccagaccaagattctgtacatcaccccagagatggcagcttcatcctccttccagcccaccctgaactccctggtgtcccgccacctgctgtcttacttggtggtggatgaagctcattgtgtttcccaatgggggcatgactttcgtcctgactacttgcgtctgggtgccctgcgctcccgcctgggacatgccccttgtgtggctctgaccgccacagccaccccacaggtccaagaggacgtgtttgctgccctgcacctgaagaaaccagttgccatcttcaagactccctgcttccgggccaacctcttctatgatgtgcaattcaaggaactgatttctgatccctatgggaacctgaaggacttctgccttaaggctcttggacaggaggctgataaagggttatctggctgcggcattgtgtactgcaggactagagaggcttgtgaacagctggccatagagctcagctgcaggggtgtgaacgccaaggcttaccatgcagggctgaaggcctctgaaagaacgctggtgcagaacgactggatggaggagaaggtccctgtaattgttgcaaccattagttttgggaygggagtggataaagccaatgtcaggtttgtcgcccattggaatattgccaagtctatggctgggtactaccaggagtctggccgggctggcagggatgggaagccttcctggtgccgtctctattactccaggaatgaccgggaccaagtcagcttcctgatcaggaaggaagtagcaaaactccaggaaaagagaggaaacaaagcatctgataaagccactatcatggcctttgatgccctggtgaccttctgtgaagaactggggcgatggggcaggggccacggaaagagtctgagggctgcttggtgtagtcaggttgtgtccaggcatgcggagctgtgagtgcctgcaggagagacacccaggaggagtttttacattttggtctaaaaagctcttggattcatctcatctcatggaatgatcctgtcggatgacgctgacgtgattgcttcagacttagaggtgaataaattgaggtccagagaggtcacagtcacgaagctcatggtagactgaggccactaaacacccgtctcctgattttcagtggcgtcctcatttgcatacacctgggccatcttggtttttgcaagaaaaaagcgaggaaatcagaga

SEQ ID NO: 2534 - DNA, 1115 bp, Homo sapiens
atgggctctcctaggcctcctgggatgagggagccaccaggacccagtgctgtgatgcctgctcttccctctaccagcacctgcccgcccagagaccagggcacccctgaagtccagcccacccctgcaaaggacacatggaagggcaagcggcctcgatcccagcaggagaacccagagagccagcctcagaagaggccacgcccctcagccaagccctccgtcgtagctgaggtcaagggcagcgtctcggccagcgaacagggcaccttgaatcccacggctcaagaccccttccagctctccgctcctggcgtctccttgaaggaggctgcaaatgttgtggtcaagtgcctcacccctttctacaaggagggcaagtttgcttccaaggagttgtttaaaggctttgcccgccacctctcacacttgctgactcagaagacctctcctggaaggagcgtgaaagaagaggcccagaacctcatcaggcacttcttccatggccgggcccggtgcgagagcgaagctgactggcatggcctgtgtggcccccagagatgaccaactgctggctgggcagggcccgcgtcctcccccagattctagcatgggtcatcctgggcctcacctgctgatgccagggccatcgtcttttctcagtccttctcctttccaaccatacttggctttggggatgaccccagacaccccctgaatccaggtcagaggtcagcccacctttctttctrcttgcaaagcctatagacccttctcagagcggtcctcatggctgggttttctgggacacatgtcgaggacagaaggtggagggtggtggagctgctgctggaagaaggggaaggaagagtggcccctccccgagttytaagtcaggatgaggcccacctgtccaaggtatcggaacctacccaggggaccctcagatcctccacccactcccccatccattacgatgccagcttccagccttgcccaggtcagagctgtggcagaggagaggcagccaggccctgttcctgctcagctcctgctcaggaaggccaggcctgacagatgtttgggagaggaataaagttgtgttgttgtggggc

SEQ ID NO: 2535 - DNA, 3687 bp, Homo sapiens
acggatataagattgcgtgggttctgcctaaagctgaattcccagcgctttggcttctctgagttggggttgtgtataggggtcttcgaacagttccggaaccagccagcagcctttaattcttgggcggaccacggccggttctrtgttcttggctaagatgagcagccaccataccacctttccttttgaccctgagcggcgagtccggagtacgctgaagaaggtctttgggtttgactcttttaagaygcctttacaggagagtgcgaccatggctgtagtaaaaggtaacaaggacgtctttgtgtgcatgcccacaggggcaggaaaatccctatgctatcagstccctgctctgttggccaaaggcatcaccattgtagtctctcctctcattgctttgattcaggaccaagtggaccacttgctaaccctaaaggtacgagtaagttccctgaactcgaagctctctgcacaggaaaggaaggagctgcttgctgacctggagcgagaaaagccccagaccaagattctgtacatcaccccagagatggcagcttcatcctccttccagcccaccctgaactccctggtgtcccgccacctgctgtcttacttggtggtggatgaagctcattgtgtttcccaatgggggcatgactttcgtcctgactacttgcgtctgggtgccctgcgctcccgcctgggacatgccccttgtgtggctctgaccgccacagccaccccacaggtccaagaggacgtgtttgctgccctgcacctgaagaaaccagttgccatcttcaagactccctgcttccgggccaacctcttctatgatgtgcaattcaaggaactgatttctgatccctatgggaacctgaaggacttctgccttaaggctcttggacaggaggctgataaagggttatctggctgcggcattgtgtactgcaggactagagaggcttgtgaacagctggccatagagctcagctgcaggggtgtgaacgccaaggcttaccatgcagggctgaaggcctctgaaagaacgctggtgcagaacgactggatggaggagaaggtccctgtaattgttgcaaccattagttttgggaygggagtggataaagccaatgtcaggtttgtcgcccattggaatattgccaagtctatggctgggtactaccaggagtctggccgggctggcagggatgggaagccttcctggtgccgtctctattactccaggaatgaccgggaccaagtcagcttcctgatcaggaaggaagtagcaaaactccaggaaaagagaggaaacaaagcatctgataaagccactatcatggcctttgatgccctggtgaccttctgtgaagaactggggtgccgccatgccgccattgccaagtacttcggggatgcgctgcctgcctgcgccaaaggctgcgaccactgccagaaccccacggccgtgcggaggcggctggaggccttggagcgcagcagcagctggagcaagacctgcatcgggccctcccaggggaacggctttgaccccgagctgtaygagggaggccgcaagggctacggggrcttcagcaggtatgaygaaggttctggaggcagcggggatgaaggcagagatgaggcccacaagcgggagtggaacctcttctatcagaagcagatgcagctgcgcaagggcaaagaccccaagatagaagaatttgtacccccagatgagaactgtcccctgaaagaggcttctagcaggaggatccccaggctgactgtgaaggcacgggagcactgcctgcggcttctggaggaggcgctgagcagcaaccgccagtcaacacgtaccgctgatgaagctgacctccgggccaaggccgtggagctggaacatgagacattccggaacgccaaggtggccaacctctacaaggccagcgtgctgaagaaggtggccgatatccacagagcctccaaggatgggcagccctatgacatgggaggcagtgccaagagctgcartgcccaagctgagcccccggagcccaatgagtatgacattccaccagcctcccatgtgtactcgctcaaacccaagcgggtgggagctggtttccccaaaggctcctgcccgttccagacggccacggaactgatggagacractcggatcagggagcaagccccccagcccgagcsgggaggcgagcaygagcccccgagccggccctgtggcctcctggatgaggatgggagtgagcccctccctgggcccagaggggaggtccctggaggcagcgctcactatggggggccctcccctgagaagaaggcaaaaagttcctctgggggcagytcccttgccaagggccgggctagcaagaaacagcagctcctagccacagcggcccacaaggattctcagagcatcgcccgcttcttctgccgaagggtggaaagcccagctcygctggcatcagccccagaggcagaaggtgcctgcccctcctgtgagggggttcagggacccccgatggccccagagaagtacacaggggaggaagatggagccgggggacattygcctgcccctccccagactgaggagtgcctcagggagaggccaagcacctgcccgcccagagaccagggcacccctgaagtccagcccacccctgcaaaggacacatggaagggcaagcggcctcgatcccagcaggagaacccagagagccagcctcagaagaggccacgcccctcagccaagccctccgtcgtagctgaggtcaagggcagcgtctcggccagcgaacagggcaccttgaatcccacggctcaagaccccttccagctctccgctcctggcgtctccttgaaggaggctgcaaatgttgtggtcaagtgcctcacccctttctacaaggagggcaagtttgcttccaaggagttgtttaaaggctttgcccgccacctctcacacttgctgactcagaagacctctcctggaaggagcgtgaaagaagaggcccagaacctcatcaggcacttcttccatggccgggcccggtgcgagagcgaagctgactggcatggcctgtgtggcccccagagatgaccaactgctggctgggcagggcccgcgtcctcccccagattctagcatgggtcatcctgggcctcacctgctgatgccagggccatcgtcttttctcagtccttctcctttccaaccatacttggctttggggatgaccccagacaccccctgaatccaggtcagaggtcagcccacctttctttctrcttgcaaagcctatagacccttctcagagcggtcctcatggctgggttttctgggacacatgtcgaggacagaaggtggagggtggtggagctgctgctggaagaaggggaaggaagagtggcccctccccgagttytaagtcaggatgaggcccacctgtccaaggtatcggaacctacccaggggaccctcagatcctccacccactcccccatccattacgatgccagcttccagccttgcccaggtcagagctgtggcagaggagaggcagccaggccctgttcctgctcagctcctgctcaggaaggccaggcctgacagatgtttgggagaggaataaagttgtgttgttgtggggc

SEQ ID NO: 2536 - DNA, 3661 bp, Homo sapiens
gcctaaagctgaattcccagcgctttggcttctctgagttggggttgtgtataggggtcttcgaacagttccggaaccagccagcagcctttaattcttgggcggaccacggccggccactgttcttggctaagatgagcagccaccataccacctttccttttgaccctgagcggcgagtccggagtacgctgaagaaggtctttgggtttgactcttttaagaygcctttacaggagagtgcgaccatggctgtagtaaaaggtaacaaggacgtctttgtgtgcatgcccacaggggcaggaaaatccctatgctatcagstccctgctctgttggccaaaggcatcaccattgtagtctctcctctcattgctttgattcaggaccaagtggaccacttgctaaccctaaaggtacgagtaagttccctgaactcgaagctctctgcacaggaaaggaaggagctgcttgctgacctggagcgagaaaagccccagaccaagattctgtacatcaccccagagatggcagcttcatcctccttccagcccaccctgaactccctggtgtcccgccacctgctgtcttacttggtggtggatgaagctcattgtgtttcccaatgggggcatgactttcgtcctgactacttgcgtctgggtgccctgcgctcccgcctgggacatgccccttgtgtggctctgaccgccacagccaccccacaggtccaagaggacgtgtttgctgccctgcacctgaagaaaccagttgccatcttcaagactccctgcttccgggccaacctcttctatgatgtgcaattcaaggaactgatttctgatccctatgggaacctgaaggacttctgccttaaggctcttggacaggaggctgataaagggttatctggctgcggcattgtgtactgcaggactagagaggcttgtgaacagctggccatagagctcagctgcaggggtgtgaacgccaaggcttaccatgcagggctgaaggcctctgaaagaacgctggtgcagaacgactggatggaggagaaggtccctgtaattgttgcaaccattagttttgggaygggagtggataaagccaatgtcaggtttgtcgcccattggaatattgccaagtctatggctgggtactaccaggagtctggccgggctggcagggatgggaagccttcctggtgccgtctctattactccaggaatgaccgggaccaagtcagcttcctgatcaggaaggaagtagcaaaactccaggaaaagagaggaaacaaagcatctgataaagccactatcatggcctttgatgccctggtgaccttctgtgaagaactggggtgccgccatgccgccattgccaagtacttcggggatgcgctgcctgcctgcgccaaaggctgcgaccactgccagaaccccacggccgtgcggaggcggctggaggccttggagcgcagcagcagctggagcaagacctgcatcgggccctcccaggggaacggctttgaccccgagctgtaygagggaggccgcaagggctacggggrcttcagcaggtatgaygaaggttctggaggcagcggggatgaaggcagagatgaggcccacaagcgggagtggaacctcttctatcagaagcagatgcagctgcgcaagggcaaagaccccaagatagaagaatttgtacccccagatgagaactgtcccctgaaagaggcttctagcaggaggatccccaggctgactgtgaaggcacgggagcactgcctgcggcttctggaggaggcgctgagcagcaaccgccagtcaacacgtaccgctgatgaagctgacctccgggccaaggccgtggagctggaacatgagacattccggaacgccaaggtggccaacctctacaaggccagcgtgctgaagaaggtggccgatatccacagagcctccaaggatgggcagccctatgacatgggaggcagtgccaagagctgcartgcccaagctgagcccccggagcccaatgagtatgacattccaccagcctcccatgtgtactcgctcaaacccaagcgggtgggagctggtttccccaaaggctcctgcccgttccagacggccacggaactgatggagacractcggatcagggagcaagccccccagcccgagcsgggaggcgagcaygagcccccgagccggccctgtggcctcctggatgaggatgggagtgagcccctccctgggcccagaggggaggtccctggaggcagcgctcactatggggggccctcccctgagaagaaggcaaaaagttcctctgggggcagytcccttgccaagggccgggctagcaagaaacagcagctcctagccacagcggcccacaaggattctcagagcatcgcccgcttcttctgccgaagggtggaaagcccagctcygctggcatcagccccagaggcagaaggtgcctgcccctcctgtgagggggttcagggacccccgatggccccagagaagtacacaggggaggaagatggagccgggggacattygcctgcccctccccagactgaggagtgcctcagggagaggccaagcacctgcccgcccagagaccagggcacccctgaagtccagcccacccctgcaaaggacacatggaagggcaagcggcctcgatcccagcaggagaacccagagagccagcctcagaagaggccacgcccctcagccaagccctccgtcgtagctgaggtcaagggcagcgtctcggccagcgaacagggcaccttgaatcccacggctcaagaccccttccagctctccgctcctggcgtctccttgaaggaggctgcaaatgttgtggtcaagtgcctcacccctttctacaaggagggcaagtttgcttccaaggagttgtttaaaggctttgcccgccacctctcacacttgctgactcagaagacctctcctggaaggagcgtgaaagaagaggcccagaacctcatcaggcacttcttccatggccgggcccggtgcgagagcgaagctgactggcatggcctgtgtggcccccagagatgaccaactgctggctgggcagggcccgcgtcctcccccagattctagcatgggtcatcctgggcctcacctgctgatgccagggccatcgtcttttctcagtccttctcctttccaaccatacttggctttggggatgaccccagacaccccctgaatccaggtcagaggtcagcccacctttctttctrcttgcaaagcctatagacccttctcagagcggtcctcatggctgggttttctgggacacatgtcgaggacagaaggtggagggtggtggagctgctgctggaagaaggggaaggaagagtggcccctccccgagttytaagtcaggatgaggcccacctgtccaaggtatcggaacctacccaggggaccctcagatcctccacccactcccccatccattacgatgccagcttccagccttgcccaggtcagagctgtggcagaggagaggcagccaggccctgttcctgctcagctcctgctcaggaaggccaggcctgacagatgtttgggagaggaataaagttgtgttgttgtggggc

SEQ ID NO: 2537 - DNA, 3710 bp, Homo sapiens
acggatataagattgcgtgggttctgcctaaagctgaattcccagcgctttggcttctctgagttggggttgtgtataggggtcttcgaacagttccggaaccagccagcagcctttaattcttgggcggaccacggccggttctrtgttcttggctaagatgagcagccaccataccacctttccttttgaccctgagcggcgagtccggagtacgctgaagaaggtctttgggtttgactcttttaagaygcctttacaggagagtgcgaccatggctgtagtaaaaggtaacaaggacgtctttgtgtgcatgcccacaggggcaggaaaatccctatgctatcagstccctgctctgttggccaaaggcatcaccattgtagtctctcctctcattgctttgattcaggaccaagtggaccacttgctaaccctaaaggtacgagtaagttccctgaactcgaagctctctgcacaggaaaggaaggagctgcttgctgacctggagcgagaaaagccccagaccaagattctgtacatcaccccagagatggcagcttcatcctccttccagcccaccctgaactccctggtgtcccgccacctgctgtcttacttggtggtggatgaagctcattgtgtttcccaatgggggcatgactttcgtcctgactacttgcgtctgggtgccctgcgctcccgcctgggacatgccccttgtgtggctctgaccgccacagccaccccacaggtccaagaggacgtgtttgctgccctgcacctgaagaaaccagttgccatcttcaagactccctgcttccgggccaacctcttctatgatgtgcaattcaaggaactgatttctgatccctatgggaacctgaaggacttctgccttaaggctcttggacaggaggctgataaagggttatctggctgcggcattgtgtactgcaggactagagaggcttgtgaacagctggccatagagctcagctgcaggggtgtgaacgccaaggcttaccatgcagggctgaaggcctctgaaagaacgctggtgcagaacgactggatggaggagaaggtccctgtaattgttgcaaccattagttttgggaygggagtggataaagccaatgtcaggtttgtcgcccattggaatattgccaagtctatggctgggtactaccaggagtctggccgggctggcagggatgggaagccttcctggtgccgtctctattactccaggaatgaccgggaccaagtcagcttcctgatcaggaaggaagtagcaaaactccaggaaaagagaggaaacaaagcatctgataaagccactatcatggcctttgatgccctggtgaccttctgtgaagaactggggtaagtgacttattttatatgtggagcaaagtgtcagtgagatcatttacttccccggcacgccctagttaagcagctgacataagacagcccgtaggctaccaagggacacctgcctgcaaaggcyrttgtgtcgggcagtgtggaagtcaggaccttgctcttctctattggaggccccgggatctctcgcagtgtggggatttgctcagtattctgagtggtgtccttccctccactccaccctcttctgggatggctggccccacaagccactcagttccaagggatgtgaccagctctgagccatcggctttgtggtcatcatgtgccaccgagctgggacttctggcatcacttgagtagtcctcacccttatccaggacccacacagaagcctgtggccccacttacctcggggagtcatgtgctttgaactcacgcatctgttttacctgcatctgcaggcgatggggcaggggccacggaaagagtctgagggctgcttggtgtagtcaggttgtgtccaggcatgcggagctgtgagtgcctgcaggagagacacccaggaggagtttttacattttggtctaaaaagctcttggattcatctcatctcatggaatgatcctgtcggatgacgctgacgtgattgcttcagacttagaggtgaataaattgaggtccagagaggtcacagtcacgaagctcatggtagactgaggccactaaacacccgtctcctgattttcagtggcgtcctcatttgcatacacctgggccatcttggtttttgcaagaaaaaagcgaggaaatcagagaaactctttgggctgtgtgtttttatttccacctcctcctgttgaccagtgagtcggtggcttctggactgaagctattttcttctccaaactgctgtctctaatttggcctctgtggcaagaccacgcccagcaaaagtggtyggctgcagtgccaggaccacccttgcctgcagcctttgcgaccagagcccttttcaagcacaattaatatgggagttgctaaatttggccttcttaggcttcttgagcagagctcttatttctggtgaggaatgaaagggccaagtgttcctgttcattgtgagtcctgtttgctgaaaaaagctctggggctgtctgaggctctggaatgctctctggagggttaactctgcctgtccccagggtctgctccgcctgccaggcaagggaacaggtcctcccaagggcctctgccttcatttctcctgtcaccttccggggagctgggacttcttagtgcatcagtggcctggttgccaggggctggggtccaggcatctgtggactcaaggagtccaggtgacggtgttgcgctgcctcttgagcagcctcgtgcctgtctcctttgctacatgtgatgattctgaaatccaggcagcaggctggaataaacgctgctggtatgtctgtattggctactgttctttgaataagtgaatgtttctttattgcataactggcgtgtagcacaaagaaaaagccccttctccaccagatatttgcttcctaagaatagttctcattggaggctgaggtcgaagcagcctcccaccagcgatcccttggggcgggcacctggcagtgagggacagagctagtggggtgggctcagcagaagtgggtgcatttctgcaaaggaagctgtaggtttcttgtcagtttgttgtggggtctgaggcacatgggagtgggaccagcagaaaagatactcaggtcagttaactaatgaggcggggctgtggcagccagcggttttcctctcttctctatctgtagctactttctctgggctgcagccttgaaaaagcagtgtttgattattcataacaatgagtgtcttttagtgtcacagggaacagttattaggtttgaagcaacctccagcttgaggcctcggcatcttgagatggaagagcagccttgtgtttagacctggattgaattgggccctgttgtttcctgggatcttggggctgggggtgcccaacagcctggcatcttcttgtttctctgtgtgtttactcattcattcatttattcagctgataaatattgactgatgccagctctgtgccaggcacattggacatgggggatacactagtgggcagaaatagccccgtcccagagccggccatggtggctcatacctgttataccagcactttgggaggctgaagtgggaggatcgcttgagcctgggagttcaagaccagcctgggcaacatggcaagaccctgtctctactaaaaatac

SEQ ID NO: 2538 - DNA, 3684 bp, Homo sapiens
gcctaaagctgaattcccagcgctttggcttctctgagttggggttgtgtataggggtcttcgaacagttccggaaccagccagcagcctttaattcttgggcggaccacggccggccactgttcttggctaagatgagcagccaccataccacctttccttttgaccctgagcggcgagtccggagtacgctgaagaaggtctttgggtttgactcttttaagaygcctttacaggagagtgcgaccatggctgtagtaaaaggtaacaaggacgtctttgtgtgcatgcccacaggggcaggaaaatccctatgctatcagstccctgctctgttggccaaaggcatcaccattgtagtctctcctctcattgctttgattcaggaccaagtggaccacttgctaaccctaaaggtacgagtaagttccctgaactcgaagctctctgcacaggaaaggaaggagctgcttgctgacctggagcgagaaaagccccagaccaagattctgtacatcaccccagagatggcagcttcatcctccttccagcccaccctgaactccctggtgtcccgccacctgctgtcttacttggtggtggatgaagctcattgtgtttcccaatgggggcatgactttcgtcctgactacttgcgtctgggtgccctgcgctcccgcctgggacatgccccttgtgtggctctgaccgccacagccaccccacaggtccaagaggacgtgtttgctgccctgcacctgaagaaaccagttgccatcttcaagactccctgcttccgggccaacctcttctatgatgtgcaattcaaggaactgatttctgatccctatgggaacctgaaggacttctgccttaaggctcttggacaggaggctgataaagggttatctggctgcggcattgtgtactgcaggactagagaggcttgtgaacagctggccatagagctcagctgcaggggtgtgaacgccaaggcttaccatgcagggctgaaggcctctgaaagaacgctggtgcagaacgactggatggaggagaaggtccctgtaattgttgcaaccattagttttgggaygggagtggataaagccaatgtcaggtttgtcgcccattggaatattgccaagtctatggctgggtactaccaggagtctggccgggctggcagggatgggaagccttcctggtgccgtctctattactccaggaatgaccgggaccaagtcagcttcctgatcaggaaggaagtagcaaaactccaggaaaagagaggaaacaaagcatctgataaagccactatcatggcctttgatgccctggtgaccttctgtgaagaactggggtaagtgacttattttatatgtggagcaaagtgtcagtgagatcatttacttccccggcacgccctagttaagcagctgacataagacagcccgtaggctaccaagggacacctgcctgcaaaggcyrttgtgtcgggcagtgtggaagtcaggaccttgctcttctctattggaggccccgggatctctcgcagtgtggggatttgctcagtattctgagtggtgtccttccctccactccaccctcttctgggatggctggccccacaagccactcagttccaagggatgtgaccagctctgagccatcggctttgtggtcatcatgtgccaccgagctgggacttctggcatcacttgagtagtcctcacccttatccaggacccacacagaagcctgtggccccacttacctcggggagtcatgtgctttgaactcacgcatctgttttacctgcatctgcaggcgatggggcaggggccacggaaagagtctgagggctgcttggtgtagtcaggttgtgtccaggcatgcggagctgtgagtgcctgcaggagagacacccaggaggagtttttacattttggtctaaaaagctcttggattcatctcatctcatggaatgatcctgtcggatgacgctgacgtgattgcttcagacttagaggtgaataaattgaggtccagagaggtcacagtcacgaagctcatggtagactgaggccactaaacacccgtctcctgattttcagtggcgtcctcatttgcatacacctgggccatcttggtttttgcaagaaaaaagcgaggaaatcagagaaactctttgggctgtgtgtttttatttccacctcctcctgttgaccagtgagtcggtggcttctggactgaagctattttcttctccaaactgctgtctctaatttggcctctgtggcaagaccacgcccagcaaaagtggtyggctgcagtgccaggaccacccttgcctgcagcctttgcgaccagagcccttttcaagcacaattaatatgggagttgctaaatttggccttcttaggcttcttgagcagagctcttatttctggtgaggaatgaaagggccaagtgttcctgttcattgtgagtcctgtttgctgaaaaaagctctggggctgtctgaggctctggaatgctctctggagggttaactctgcctgtccccagggtctgctccgcctgccaggcaagggaacaggtcctcccaagggcctctgccttcatttctcctgtcaccttccggggagctgggacttcttagtgcatcagtggcctggttgccaggggctggggtccaggcatctgtggactcaaggagtccaggtgacggtgttgcgctgcctcttgagcagcctcgtgcctgtctcctttgctacatgtgatgattctgaaatccaggcagcaggctggaataaacgctgctggtatgtctgtattggctactgttctttgaataagtgaatgtttctttattgcataactggcgtgtagcacaaagaaaaagccccttctccaccagatatttgcttcctaagaatagttctcattggaggctgaggtcgaagcagcctcccaccagcgatcccttggggcgggcacctggcagtgagggacagagctagtggggtgggctcagcagaagtgggtgcatttctgcaaaggaagctgtaggtttcttgtcagtttgttgtggggtctgaggcacatgggagtgggaccagcagaaaagatactcaggtcagttaactaatgaggcggggctgtggcagccagcggttttcctctcttctctatctgtagctactttctctgggctgcagccttgaaaaagcagtgtttgattattcataacaatgagtgtcttttagtgtcacagggaacagttattaggtttgaagcaacctccagcttgaggcctcggcatcttgagatggaagagcagccttgtgtttagacctggattgaattgggccctgttgtttcctgggatcttggggctgggggtgcccaacagcctggcatcttcttgtttctctgtgtgtttactcattcattcatttattcagctgataaatattgactgatgccagctctgtgccaggcacattggacatgggggatacactagtgggcagaaatagccccgtcccagagccggccatggtggctcatacctgttataccagcactttgggaggctgaagtgggaggatcgcttgagcctgggagttcaagaccagcctgggcaacatggcaagaccctgtctctactaaaaatac

SEQ ID NO: 2539 - DNA, 2253 bp, Homo sapiens
gcgcgcggtagcgcgggcccctcagtgcacaatggctagagcaggcggcggagccccagccccacccagtgcggagcgcgccgcgagccccgccgcaagctgagcgcctccgcccgccaggcgcgccggcgccgggccatgtactcggggaaccgcagcggcggccacggctactgggacggcggcggggccgcgggcgctgaggggccggcgccggcggggacactgagccccgcgcccctcttcagccccggcacctacgagcgcctggcgctgctgctgggctccattgggctgctgggcgtcggcaacaacctgctggtgctcgtcctctactacaagttccagcggctccgcactcccactcacctcctcctggtcaacatcagcctcagcgacctgctggtgtccctcttcggggtcacctttaccttcgtgtcctgcctgaggaacggctgggtgtgggacaccgtgggctgcgtgtgggacgggtttagcggcagcctcttcgcttcgttgtgtggaagatcttcagacaattcaagtgatcaagattttaaaatatgaaaagaaactggccaaaatgtgctttttaatgatattcaccttcctggtctgttggatgccttatatcgtgatctgcttcttggtggttaatggtcatggtcacctggtcactccaacaatatctattgtttcgtacctctttgctaaatcgaacactgtatacaatccagtgatttatgtcttcatgatcagaaagtttcgaagatcccttttgcagcttctgtgcctccgactgctgaggtgccagaggcctgctaaagacctaccagcagctggaagtgaaatgcagatcagacccattgtgatgtcacagaaagatggggacaggccaaagaaaaaagtgactttcaactcttcttccatcatttttatcatcaccagtgrtgaatcactgtcagttgacgacagcgacaaaaccaatgggtccaaagttgatgtaatccaagttcgtcctttgtaggaatgaagaatggcaacgaaagatggggccttaaattggatgccacttttggactttcatcataagaagtgtctggaatacccgttctatgtaatatcaacagaaccttgtggtccagcaggaaatccgaattgcccatatgctcttgggcctcaggaagaggttgaacaaaaacaaattmttttaattcaacgggtgctttacataatgaaaaaaccacttgtggcacacgatgggcatctaacatcatcatcttctaatgtgttggagattttcatttcaaatatattttttaaattactctattttccaaaacacgtaatgcatttttctcgaaaataccttactgtaaaaataactgtcgcgtacacatgtgtgaagtagctagaacatactgaattttttttgtactgttggactctattcagtgtcatgtcctatatctgatcaagttatcaaggagataattctagaatgaaaaagaaaatcctcttgttggaaacaaaagacgttttatatgtgcagtatgacaaagaggagtttcagaracaactttgaatccttgtcagcctggagaccagcaccagaggaatctacaaggcaaactcccatatatttgcttcccccaaattgctgcccctacagactcaaagctctttttctttgttttgttgtttctctaaaaatttactgttctttgtcgatgctatataagccagggagttctaagacgccagctctttgagatttgctcattcccctgtatttcccacatatatattacatatacccgctaataaatttatgtttgtttttctcttgtcaatctgtcttttgttataggggccccagccaaggaacctaaagtgggtagaaggaaaaattattttttctttccctacaaactgaacatggattattagaactcaaggttttcattgacaatatagaaaagaaacactgaatcattttattttattgcccaatttttatttcttatatgactctagtgtttcatcttcataattaatcatgtttgaaggatttctgagtgactcagcagcctgttaaagaaggatgaaccaaagaaaacatttcactaaatgtgcttttaaaaatcaagtgtattgctggttctgctgcagtatgtagtcgaagaataaattagtaaattgcttctgagggtctgaaattgaataaagtaatggctttgtatttctataaaa

SEQ ID NO: 2540 - DNA, 2450 bp, Homo sapiens
gcgcgcggtagcgcgggcccctcagtgcacaatggctagagcaggcggcggagccccagccccacccagtgcggagcgcgccgcgagccccgccgcaagctgagcgcctccgcccgccaggcgcgccggcgccgggccatgtactcggggaaccgcagcggcggccacggctactgggacggcggcggggccgcgggcgctgaggggccggcgccggcggggacactgagccccgcgcccctcttcagccccggcacctacgagcgcctggcgctgctgctgggctccattgggctgctgggcgtcggcaacaacctgctggtgctcgtcctctactacaagttccagcggctccgcactcccactcacctcctcctggtcaacatcagcctcagcgacctgctggtgtccctcttcggggtcacctttaccttcgtgtcctgcctgaggaacggctgggtgtgggacaccgtgggctgcgtgtgggacgggtttagcggcagcctcttcgggattgtttccattgccaccctaaccgtgctggcctatgaacgttacattcgcgtggtccatgccagagtgatcaatttttcctgggcctggagggccattacctacatctggctctactcactggygtgggcaggagcacctctcctgggatggaacaggtacatcctggacrtacacggactaggctgcactgtggactggaaatccaaggatgccaacgattcctcctttgtgcttttcttatttcttggctgcctggtggtgcccctgggtgtcatagcccattgctatggccatattctatattccattcgaatgcttcgttgtgtggaagatcttcagacaattcaagtgatcaagattttaaaatatgaaaagaaactggccaaaatgtgctttttaatgatattcaccttcctggtctgttggatgccttatatcgtgatctgcttcttggtggttaatggtcatggtcacctggtcactccaacaatatctattgtttcgtacctctttgctaaatcgaacactgtatacaatccagtgatttatgtcttcatgatcagaaagtttcgaagatcccttttgcagcttctgtgcctccgactgctgaggtgccagaggcctgctaaagacctaccagcagctggaagtgaaatgcagatcagacccattgtgatgtcacagaaagatggggacaggccaaagaaaaaagtgactttcaactcttcttccatcatttttatcatcaccagtgrtgaatcactgtcagttgacgacagcgacaaaaccaatgggtccaaagttgatgtaatccaagttcgtcctttgtaggaatgaagaatggcaacgaaagatggggccttaaattggatgccacttttggactttcatcataagaagtgtctggaatacccgttctatgtaatatcaacagaaccttgtggtccagcaggaaatccgaattgcccatatgctcttgggcctcaggaagaggttgaacaaaaacaaattmttttaattcaacgggtgctttacataatgaaaaaaccacttgtggcacacgatgggcatctaacatcatcatcttctaatgtgttggagattttcatttcaaatatattttttaaattactctattttccaaaacacgtaatgcatttttctcgaaaataccttactgtaaaaataactgtcgcgtacacatgtgtgaagtagctagaacatactgaattttttttgtactgttggactctattcagtgtcatgtcctatatctgatcaagttatcaaggagataattctagaatgaaaaagaaaatcctcttgttggaaacaaaagacgttttatatgtgcagtatgacaaagaggagtttcagaracaactttgaatccttgtcagcctggagaccagcaccagaggaatctacaaggcaaactcccatatatttgcttcccccaaattgctgcccctacagactcaaagctctttttctttgttttgttgtttctctaaaaatttactgttctttgtcgatgctatataagccagggagttctaagacgccagctctttgagatttgctcattcccctgtatttcccacatatatattacatatacccgctaataaatttatgtttgtttttctcttgtcaatctgtcttttgttataggggccccagccaaggaacctaaagtgggtagaaggaaaaattattttttctttccctacaaactgaacatggattattagaactcaaggttttcattgacaatatagaaaagaaacactgaatcattttattttattgcccaatttttatttcttatatgactctagtgtttcatcttcataattaatcatgtttgaaggatttctgagtgactcagcagcctgttaaagaaggatgaaccaaagaaaacatttcactaa

SEQ ID NO: 2541 - DNA, 1848 bp, Homo sapiens
cactgaaacctccacctcccgggttcaagcgattctcctgcctcagcctcccgagtagctgagattacaggcgccygccaccacgcccagcctctaaagagagcaatcactayacttatggctgggattttgcgcttagtagttcaatggcccccaggcagactacagacygtgacaaaaggtgtggagtctcttatttgtacagattggattcgtcacaaattcaccagatcaagaattccagaaaaagtgtttcaggcctcacctgaagatcatgaaaaatacggtggggatccacagaaccctcataaactgcatattgttaccagaataaaaagtacaagaagacgtccatattgggaaaaagatataataaagatgcttggattagaaaaagcacatacccctcaagttcacaagaatatcccttcagtgaatgcaaaattgaaagtagttaagcatttgataaggtttgttgtttcttctcagctctttttaaaatgtattgcctagtgtaattctaaatgcatttttcttttttcgttaatgttctgaaaaaaactttttaaaaaactaaaattttattttgtttttttttaattgacacataataattgtacatatttatggggtacatagtgacgtttcaatatatataaagtatagtgatccgatcagggtaattggcatatccatcatctcagacatttaycatttcttcatgttgggaacattcaacatcctcctcctagctatttgaaactatgtgttattgttaactgtagttatcctgcggggatatagaacgctagaacgtattcctcctatctaaacgcattttcttgtgtcacagaatcaagcccttgaagttgccacaaggacttccarcagaggagaacatgtctaacacgtgcctcaaaagcacyggggagttagtagtgcagtggcatctgaaacctgtggagcagaaagcacatgagtcctaatgccccagcagcttccgattggaaaatgcaaattgtttttatttaaagatgatacctggaggggtggggagaagtaagaattgtaagggaggttcagtagtggggaattctgtgacagctgattgaagatgatgatgaagaacctctgcattctagttaccctttgcttcccttcacctcttgtaaaatttggcttggcaacaatgacattgtcatgcttattgtcccaatatccatcctgtcgtagatcttaatgtttttgatcgttgcgttaaagtggaagtgccacccacagtgaaaccagatcccattaataaataagcttaaaggcaactgcagttttaattccatagttattgaatatccagtgtgtgtaaggcctggaggggagccaaaggacactaacttctaagagctccgtctagttggagagaaacctgtgtgccacaacatacagtgtccttgcttatgtggggtcgaagacatctgtgaaaataaaagcagcctctgctaatttagcgccatctcttttactgtgctaatttttttttctttagagacagggtctcactctgtcgcccagcctggagggcagtggtgtgatcgtagctcactattacctccaactcttgggctcaagtgatcctcccacctcagcctcctgagcagctaggactacagatacatgccaccgctcccggctagtattttttaaaattttttgtagagccaaggtgttgctatgttgtccacactgatctggagcttctaatctcaaatgattctcctgcctcagcctcccaaagtgctgggaatacaggtgtgagccaccatacctggccttactgtactaatattaata

SEQ ID NO: 2542 - DNA, 1415 bp, Homo sapiens
agcatcgcgcgcaaggcctgccggttgctcggggtcgtatgacgcacttttccagctcgagccctcacgaggccgtgggtacgaccggaagccgcagactgaatctcgctctgttgcccagcccatctcggcccactgaaacctccacctcccgggttcaagcgattctcctgcctcagcctcccgagtagctgagattacaggcgccygccaccacgcccagcatgctgatcccattttcaatgaagaattgcttccagttactttgtaactgccaggtcccagcagctggctttaaaaaaacagtaaaaaatgggctcattttacagtcaatttccaatgatgtctatcaaaatctggctgtggaagactggatccatgaccatatgaatctagaaggcaaaccaattctattcttttggcagaattctccctctgttgtaattggtaggcatcaaaatccttggcaggaatgtaacctgaatctaatgagagaagaaggtataaaactggctcggagaagaagtggaggaggaacrgtctaccatgatatgggtaatatcaatttgactttctttacaaccaaaaaaaagtatgatagaatggaaaatctgaaattaattgtgagagctctgaatgctgtccaaccccagctggatgtgcaggctaccaaaagatttgaccttttacttgatggacagtttaaaatctcaggracagcttctaagatcggccggactactgcctatcaccattgcactttattatgtagtactgatgggacgttcytgtcttctttgctaaagagcccttaccaagggatcaggagcaatgccactgctagcataccttccttagtgaaaaatcttttggaaaaggatcccactctgacctgtgaagtactaatgaatgctgttgctacagagtatgctgcytatcatcaaattgataatcacattcacctaataaacccaacggatgagacactgtttcctggaataaatagcaaagccaaagaactgcaaacttgggagtggatatatggcaaaactccaaagtttagtataaatacttcctttcatgtgttatatgaacagtcacacttggaaattaaagtattcatagacataaagaatggaagaattgaaatttgtaatattgaagcacctgatcattggttgccattggaaatacgtgacaaattaaattcaagtcttattggcagtaagttttgcccaactgaaactaccatgctaacaaatatattacttagaacatgtccacaagaccacaaactaaacagtaaatggaatattctctgtgaaaaaattaagggaataatgtgattccaagtaaatgtcttaatacagtttcaattagaaaataaaatgtctcatacttgcacattgtatgtc

SEQ ID NO: 2543 - DNA, 2127 bp, Homo sapiens
cactgaaacctccacctcccgggttcaagcgattctcctgcctcagcctcccgagtagctgagattacaggcgccygccaccacgcccagcctctaaagagagcaatcactayacttatggctgggattttgcgcttagtagttcaatggcccccaggcagactacagacygtgacaaaaggtgtggagtctcttatttgtacagattggattcgtcacaaattcaccagatcaagaattccagaaaaagtgtttcaggcctcacctgaagatcatgaaaaatacggtggggatccacagaaccctcataaactgcatattgttaccagaataaaaagtacaagaagacgtccatattgggaaaaagatataataaagatgcttggattagaaaaagcacatacccctcaagttcacaagaatatcccttcagtgaatgcaaaattgaaagtagttaagcatttgataagaatcaagcccttgaagttgccacaaggacttccarcagaggagaacatgtctaacacgtgcctcaaaagcacyggggagttagtagtgcagtggcatctgaaacctgtggagcagaaagcacatgagtcctaatgccccagcagcttccgattggaaaatgcaaattgtttttatttaaagatggtgagaaagtgttttcattaaaatatgttttcaaaaccattttcaggccgggcacggtggctcacctcctcccaaaatgctgggattacaggcatgagccactgtacccagccaaaattgttttcttttttaagtgaattcaacaatttctgtgagtggctctttgcatgaacactgtgcaaggtgttggagaaatccaaagctgaccaaaacatggtccccaccttttggagcttacagtctgttctggggaacagagattcagccaaagtcaagaaacactggatgccagctagattatctgttctgtgctttggtgtctataagtacatatgtggatatgggttcattttatccctaaacttagtaccaaaccagcatttaatatctaattataaatctaatttggcctaaactttattattgcacactgcctgaacaaaacctatttgtctctatgtaaattttttcctcatggaacaagggtgtgaaatgaaaatattttaggatttattcaaaaacagactattctgttttcagcttcagaattgttctttgaatcctaaggaacctctgtcaacagttgaggttgctgttgaaaagaaagaagaaggaggcggaaatctctcagggagaattatttcctttcttttctatttyagatacctggaggggtggggagaagtaagaattgtaagggaggttcagtagtggggaattctgtgacagctgattgaagatgatgatgaagaacctctgcattctagttaccctttgcttcccttcacctcttgtaaaatttggcttggcaacaatgacattgtcatgcttattgtcccaatatccatcctgtcgtagatcttaatgtttttgatcgttgcgttaaagtggaagtgccacccacagtgaaaccagatcccattaataaataagcttaaaggcaactgcagttttaattccatagttattgaatatccagtgtgtgtaaggcctggaggggagccaaaggacactaacttctaagagctccgtctagttggagagaaacctgtgtgccacaacatacagtgtccttgcttatgtggggtcgaagacatctgtgaaaataaaagcagcctctgctaatttagcgccatctcttttactgtgctaatttttttttctttagagacagggtctcactctgtcgcccagcctggagggcagtggtgtgatcgtagctcactattacctccaactcttgggctcaagtgatcctcccacctcagcctcctgagcagctaggactacagatacatgccaccgctcccggctagtattttttaaaattttttgtagagccaaggtgttgctatgttgtccacactgatctggagcttctaatctcaaatgattctcctgcctcagcctcccaaagtgctgggaatacaggtgtgagccaccatacctggccttactgtactaatattaata

SEQ ID NO: 2544 - DNA, 2026 bp, Homo sapiens
agctgagattacaggcgccrgccaccacgcccagccacagcctctaaagagagcaatcactayacttatggctgggattttgcgcttagtagttcaatggcccccaggcagactacagacygtgacaaaaggtgtggagtctcttatttgtacagattggattcgtcacaaattcaccagatcaagaattccagaaaaagtgtttcaggcctcacctgaagatcatgaaaaatacggtggggatccacagaaccctcataaactgcatattgttaccagaataaaaagtacaagaagacgtccatattgggaaaaagatataataaagatgcttggattagaaaaagcacatacccctcaagttcacaagaatatcccttcagtgaatgcaaaattgaaagtagttaagcatttgataagaatcaagcccttgaagttgccacaaggacttccarcagaggagaacatgtctaacacgtgcctcaaaagcacyggggagttagtagtgcagtggcatctgaaacctgtggagcagaaagcacatgagtcctaatgccccagcagcttccgattggaaaatgcaaattgtttttatttaaagatggtgagaaagtgttttcattaaaatatgttttcaaaaccattttcaggccgggcacggtggctcacctgtaatcccagcactttgggaggccaaggcgggcagatcacctgaggtcaagagttcgagaccagcctgaccaacatggagaaacccccatctctactgaaaatacagaattagccaggcatggtggcacatgcctgtaacccagctactcgggaggctgaagcaggagaatcacttgaacccgggaggcagaggttgcagtgagctgagatggtgccactgtactccagcctgggtgataggatgagactccatctcaggggaaaaaaaaaaatttttttttcactgactaaacctgctgcagctctcttttactacagacttggagattttagtttaatttggtttaattctctgtcctttccctttcactgtttcactccaaaacatgtaagaatggcaatgtttgaacatctgcgtttgggtctactgccaccttagcaagcctcattaaccattttataaaaattgcgttagtattgttgttgttgtttttgagacagggtcttgctctgtcacccaagctggaatacagtggcatgatttcagttcactgcagcctcgacctcccaggctcaagtgatcctcccacctcagcctccagagtagctaggactacaggcagtgtgccaccacatccagctaattttttaaagttttttcatagagacagggactcactatgttgtccaagctggtctcaaactcctgggttcaagccatcctcccacctcagcctcccaaaatgctgggattacaggcatgagccactgtacccagccaaaattgttttcttttttaagtgaattcaacaatttctgtgagtggctctttgcatgaacactgtgcaaggtgttggagaaatccaaagctgaccaaaacatggtccccaccttttggagcttacagtctgttctggggaacagagattcagccaaagtcaagaaacactggatgccagctagattatctgttctgtgctttggtgtctataagtacatatgtggatatgggttcattttatccctaaacttagtaccaaaccagcatttaatatctaattataaatctaatttggcctaaactttattattgcacactgcctgaacaaaacctatttgtctctatgtaaattttttcctcatggaacaagggtgtgaaatgaaaatattttaggatttattcaaaaacagactattctgttttcagcttcagaattgttctttgaatcctaaggaacctctgtcaacagttgaggttgctgttgaaaagaaagaagaaggaggcggaaatctctcagggagaattatttcctttcttttctatttyagatacctggaggggtggggagaagta

SEQ ID NO: 2545 - DNA, 2092 bp, Homo sapiens
ccacagcctctaaagagagcaatcactayacttatggctgggattttgcgcttagtagttcaatggcccccaggcagactacaggcttgcttttagaaagtgcagtggtgctgcctaatctgctcataagggccagagcctagatgagcctattgacctgctcctggctgcagaggacaacaatacygtgacaaaaggtgtggagtctcttatttgtacagattggattcgtcacaaattcaccagatcaagaattccagaaaaagtgtttcaggcctcacctgaagatcatgaaaaatacggtggggatccacagaaccctcataaactgcatattgttaccagaataaaaagtacaagaagacgtccatattgggaaaaagatataataaagatgcttggattagaaaaagcacatacccctcaagttcacaagaatatcccttcagtgaatgcaaaattgaaagtagttaagcatttgataagaatcaagcccttgaagttgccacaaggacttccarcagaggagaacatgtctaacacgtgcctcaaaagcacyggggagttagtagtgcagtggcatctgaaacctgtggagcagaaagcacatgagtcctaatgccccagcagcttccgattggaaaatgcaaattgtttttatttaaagatggtgagaaagtgttttcattaaaatatgttttcaaaaccattttcaggccgggcacggtggctcacctgtaatcccagcactttgggaggccaaggcgggcagatcacctgaggtcaagagttcgagaccagcctgaccaacatggagaaacccccatctctactgaaaatacagaattagccaggcatggtggcacatgcctgtaacccagctactcgggaggctgaagcaggagaatcacttgaacccgggaggcagaggttgcagtgagctgagatggtgccactgtactccagcctgggtgataggatgagactccatctcaggggaaaaaaaaaaatttttttttcactgactaaacctgctgcagctctcttttactacagacttggagattttagtttaatttggtttaattctctgtcctttccctttcactgtttcactccaaaacatgtaagaatggcaatgtttgaacatctgcgtttgggtctactgccaccttagcaagcctcattaaccattttataaaaattgcgttagtattgttgttgttgtttttgagacagggtcttgctctgtcacccaagctggaatacagtggcatgatttcagttcactgcagcctcgacctcccaggctcaagtgatcctcccacctcagcctccagagtagctaggactacaggcagtgtgccaccacatccagctaattttttaaagttttttcatagagacagggactcactatgttgtccaagctggtctcaaactcctgggttcaagccatcctcccacctcagcctcccaaaatgctgggattacaggcatgagccactgtacccagccaaaattgttttcttttttaagtgaattcaacaatttctgtgagtggctctttgcatgaacactgtgcaaggtgttggagaaatccaaagctgaccaaaacatggtccccaccttttggagcttacagtctgttctggggaacagagattcagccaaagtcaagaaacactggatgccagctagattatctgttctgtgctttggtgtctataagtacatatgtggatatgggttcattttatccctaaacttagtaccaaaccagcatttaatatctaattataaatctaatttggcctaaactttattattgcacactgcctgaacaaaacctatttgtctctatgtaaattttttcctcatggaacaagggtgtgaaatgaaaatattttaggatttattcaaaaacagactattctgttttcagcttcagaattgttctttgaatcctaaggaacctctgtcaacagttgaggttgctgttgaaaagaaagaagaaggaggcggaaatctctcagggagaattatttcctttcttttctatttyagatacctggaggggtggggagaagta

SEQ ID NO: 2546 - DNA, 2074 bp, Homo sapiens
caggctttgagtgtagcacttggtagttcttcctctgctcygcttcccttcggaggaaaatttcaggctgaaggtttagcgggtgccgcctctaaagagagcaatcactayacttatggctgggattttgcgcttagtagttcaatggcccccaggcagactacagacygtgacaaaaggtgtggagtctcttatttgtacagattggattcgtcacaaattcaccagatcaagaattccagaaaaagtgtttcaggcctcacctgaagatcatgaaaaatacggtggggatccacagaaccctcataaactgcatattgttaccagaataaaaagtacaagaagacgtccatattgggaaaaagatataataaagatgcttggattagaaaaagcacatacccctcaagttcacaagaatatcccttcagtgaatgcaaaattgaaagtagttaagcatttgataagaatcaagcccttgaagttgccacaaggacttccarcagaggagaacatgtctaacacgtgcctcaaaagcacyggggagttagtagtgcagtggcatctgaaacctgtggagcagaaagcacatgagtcctaatgccccagcagcttccgattggaaaatgcaaattgtttttatttaaagatggtgagaaagtgttttcattaaaatatgttttcaaaaccattttcaggccgggcacggtggctcacctgtaatcccagcactttgggaggccaaggcgggcagatcacctgaggtcaagagttcgagaccagcctgaccaacatggagaaacccccatctctactgaaaatacagaattagccaggcatggtggcacatgcctgtaacccagctactcgggaggctgaagcaggagaatcacttgaacccgggaggcagaggttgcagtgagctgagatggtgccactgtactccagcctgggtgataggatgagactccatctcaggggaaaaaaaaaaatttttttttcactgactaaacctgctgcagctctcttttactacagacttggagattttagtttaatttggtttaattctctgtcctttccctttcactgtttcactccaaaacatgtaagaatggcaatgtttgaacatctgcgtttgggtctactgccaccttagcaagcctcattaaccattttataaaaattgcgttagtattgttgttgttgtttttgagacagggtcttgctctgtcacccaagctggaatacagtggcatgatttcagttcactgcagcctcgacctcccaggctcaagtgatcctcccacctcagcctccagagtagctaggactacaggcagtgtgccaccacatccagctaattttttaaagttttttcatagagacagggactcactatgttgtccaagctggtctcaaactcctgggttcaagccatcctcccacctcagcctcccaaaatgctgggattacaggcatgagccactgtacccagccaaaattgttttcttttttaagtgaattcaacaatttctgtgagtggctctttgcatgaacactgtgcaaggtgttggagaaatccaaagctgaccaaaacatggtccccaccttttggagcttacagtctgttctggggaacagagattcagccaaagtcaagaaacactggatgccagctagattatctgttctgtgctttggtgtctataagtacatatgtggatatgggttcattttatccctaaacttagtaccaaaccagcatttaatatctaattataaatctaatttggcctaaactttattattgcacactgcctgaacaaaacctatttgtctctatgtaaattttttcctcatggaacaagggtgtgaaatgaaaatattttaggatttattcaaaaacagactattctgttttcagcttcagaattgttctttgaatcctaaggaacctctgtcaacagttgaggttgctgttgaaaagaaagaagaaggaggcggaaatctctcagggagaattatttcctttcttttctatttyagatacctggaggggtggggagaagta

SEQ ID NO: 2547 - DNA, 1463 bp, Homo sapiens
caggctttgagtgtagcacttggtagttcttcctctgctcygcttcccttcggaggaaaatttcaggctgaaggtttagcgggtgccgcctctaaagagagcaatcactayacttatggctgggattttgcgcttagtagttcaatggcccccaggcagactacagacygtgacaaaaggtgtggagtctcttatttgtacagattggattcgtcacaaattcaccagatcaagaattccagaaaaagtgtttcaggcctcacctgaagatcatgaaaaatacggtggggatccacagaaccctcataaactgcatattgttaccagaataaaaagtacaagaagacgtccatattgggaaaaagatataataaagatgcttggattagaaaaagcacatacccctcaagttcacaagaatatcccttcagtgaatgcaaaattgaaagtagttaagcatttgataagaatcaagcccttgaagttgccacaaggacttccarcagaggagaacatgtctaacacgtgcctcaaaagcacyggggagttagtagtgcagtggcatctgaaacctgtggagcagaaagcacatgagtcctaatgccccagcagcttccgattggaaaatgcaaattgtttttatttaaagatgatacctggaggggtggggagaagtaagaattgtaagggaggttcagtagtggggaattctgtgacagctgattgaagatgatgatgaagaacctctgcattctagttaccctttgcttcccttcacctcttgtaaaatttggcttggcaacaatgacattgtcatgcttattgtcccaatatccatcctgtcgtagatcttaatgtttttgatcgttgcgttaaagtggaagtgccacccacagtgaaaccagatcccattaataaataagcttaaaggcaactgcagttttaattccatagttattgaatatccagtgtgtgtaaggcctggaggggagccaaaggacactaacttctaagagctccgtctagttggagagaaacctgtgtgccacaacatacagtgtccttgcttatgtggggtcgaagacatctgtgaaaataaaagcagcctctgctaatttagcgccatctcttttactgtgctaatttttttttctttagagacagggtctcactctgtcgcccagcctggagggcagtggtgtgatcgtagctcactattacctccaactcttgggctcaagtgatcctcccacctcagcctcctgagcagctaggactacagatacatgccaccgctcccggctagtattttttaaaattttttgtagagccaaggtgttgctatgttgtccacactgatctggagcttctaatctcaaatgattctcctgcctcagcctcccaaagtgctgggaatacaggtgtgagccaccatacctggccttactgtactaatattaata

SEQ ID NO: 2548 - DNA, 1378 bp, Homo sapiens
cactgaaacctccacctcccgggttcaagcgattctcctgcctcagcctcccgagtagctgagattacaggcgccrgccaccacgcccagcctctaaagagagcaatcactayacttatggctgggattttgcgcttagtagttcaatggcccccaggcagactacagacygtgacaaaaggtgtggagtctcttatttgtacagattggattcgtcacaaattcaccagatcaagaattccagaaaaagtgtttcaggcctcacctgaagatcatgaaaaatacggtggggatccacagaaccctcataaactgcatattgttaccagaataaaaagtacaagaagacgtccatattgggaaaaagatataataaagatgcttggattagaaaaagcacatacccctcaagttcacaagaatatcccttcagtgaatgcaaaattgaaagtagttaagcatttgataaggtttgttgtttcttctcagctctttttaaaatgtattgcctagtgtaattctaaatgcatttttcttttttcgttaatgttctgaaaaaaactttttaaaaaactaaaattttattttgtttttttttaattgacacataataattgtacatatttatggggtacatagtgacgtttcaatatatataaagtatagtgatccgatcagggtaattggcatatccatcatctcagacatttaycatttcttcatgttgggaacattcaacatcctcctcctagctatttgaaactatgtgttattgttaactgtagttatcctgcggggatatagaacgctagaacgtattcctcctatctaaacgcattttcttgtgtcacagaatcaagcccttgaagttgccacaaggacttccarcagaggagaacatgtctaacacgtgcctcaaaagcacyggggagttagtagtgcagtggcatctgaaacctgtggagcagaaagcacatgagtcctaatgccccagcagcttccgattggaaaatgcaaattgtttttatttaaagatggtgagaaagtgttttcattaaaatatgttttcaaaaccattttcaggccgggcacggtggctcacctgtaatcccagcactttgggaggccaaggcgggcagatcacctgaggtcaagagttcgagaccagcctgaccaacatggagaaacccccatctctactgaaaatacagaattagccaggcatggtggcacatgcctgtaacccagctactcgggaggctgaagcaggagaatcacttgaacccgggaggcagaggttgcagtgagctgagatggtgccactgtactccagcctgggtgataggatgagactccatctcaggggaaaaaaaaaaat

SEQ ID NO: 2549 - DNA, 1299 bp, Homo sapiens
gtgacgtcgtggcgggtcactcactcggggatcgccgattgcgatcgtaggggtcttccttctctaacttgcctccaggagagaggacctggcctgcgctgctaatgggtagtccgttcgcagcaggaccagccctggcctaaggaaacaggaaagagtttgagacttccttctaaaggagccacgtttgagaaatgggatgcaggcctaagattttctgccgtctcttggcaaaaatggcaaataatgatgctgttctsaagagactggagcagaagggtgcagaggcagatcaaatcattgaatatcttaagcagcaagtttctctacttaaggagaaagcaattttgcaggcaactttgagggaagagaagaaacttcgagttgaaaatgctaaactgaagaaagaaattgaagaactgaaacaagagctaattcaggcagaaattcaaaatggagtgaagcaaatascatttccatctggtactccactgcacgctaattctatggtttctgaaaatgtgatacagtctacagcagtaacarccgtatcttctggtaccaaagaacagataaaaggaggarcaggagacgaaaagaaagcgaaagagaaaattgaaaagaaaggagagaagaaggagaaaaaacagcaatcaatagctggaagtgccgactctaagccaatagatgtttcccgtctggatcttcgaattggttgcatcataactgctagaaaacaccctgatgcagattctttgtatgtggaagaagtagatgtcggagaaatagccccaaggacagttgtcagtggcctggtgaatcatgttcctcttgaacagatgcaaaatcggatggtgattttactttgtaacctgaaacctgcaaagatgaggggagtattatctcaagcaatggtcatgtgtgctagttcaccagagaaaattgaaatcttggctcctccaaatgggtctgttcctggagacagaattacttttgatgctttcccaggagagcctgacaaggagctgaatcctaagaagaagatttgggagcagatccagcctgatcttcacactaatgatgagtgtgtggctacatacaaaggagttccctttgaggtgaaagggaagggagtatgtagggctcaaaccatgagcaacagtggaatcaaataaaatgcttccactaccaaaagacattagagaaaaccttaaaagtaataaagagaaatatatttgtcacttatactcatttacttggtatatattgttttcattgattggggaaacactagatttt

SEQ ID NO: 2550 - DNA, 2614 bp, Homo sapiens
gtgacgtcgtggcgggtcactcactcggggatcgccgattgcgatcgtaggggtcttccttctctaacttgcctccaggagagaggacctggcctgcgctgctaatgggtagtccgttcgcagcaggaccagccctggcctaaggaaacaggaaagagtttgagacttccttctaaaggagccacgtttgagaaatgggatgcaggcctaagattttctgccgtctcttggcaaaaatggcaaataatgatgctgttctsaagagactggagcagaagggtgcagaggcagatcaaatcattgaatatcttaagcagcaagtttctctacttaaggagaaagcaattttgcaggcaactttgagggaagagaagaaacttcgagttgaaaatgctaaactgaagaaagaaattgaagaactgaaacaagagctaattcaggcagaaattcaaaatggagtgaagcaaatascatttccatctggtactccactgcacgctaattctatggtttctgaaaatgtgatacagtctacagcagtaacarccgtatcttctggtaccaaagaacagataaaaggaggarcaggagacgaaaagaaagcgaaagagaaaattgaaaagaaaggagagaagaaggagaaaaaacagcaatcaatagctggaagtgccgactctaagccaatagatgtttcccgtctggatcttcgaattggttgcatcataactgctagaaaacaccctgatgcagattctttgtatgtggaagaagtagatgtcggagaaatagccccaaggacagttgtcagtggcctggtgaatcatgttcctcttgaacagatgcaaaatcggatggtgattttactttgtaacctgaaacctgcaaagatgaggggagtattatctcaagcaatggtcatgtgtgctagttcaccagagaaaattgaaatcttggctcctccaaatgggtctgttcctggagacagaattacttttgatgctttcccaggagagcctgacaaggagctgaatcctaagaagaagatttgggagcagatccagcctgatcttcacactaatgatgagtgtgtggctacatacaaaggagttccctttgaggtgaaagggaagggagtatgtagggctcaaaccatgagcaacagtggaatcaaataaaatgcttccactaccaaaagacattagagaaaaccttaaaagtaataaagagaaatatatttgtcacttatacctaaaatatgagtggctcatttttgcrttactctcttctagacttgactagtcatttacttggtatatattgttttcattgattggggaaacactagatttttacctcggtttttgatcatttataatggrgagaggaagttgcctatgttttgtaataatttattttttagcaggaatattgattagcagcttttttttctttatacacatagataactaactagattaatgtttagtttcttatttgtaggcacaggatgcatgaaatttcaagctctgggattttttgtatattgtgtatctgtatcaaaaatatcctctccttttcaaaaatgacaggttggaaaatgtttgtcagacttattaactggtcatattataataatactgataatgaccaactgctcattctgaaagccaaacataaaagctaggagaagtggcatctgaacatttttgctttgctgccagagtaaccctgactaataatacaataacagcaatttttttaaaaaactgagatttcctactggcttgaagtttttctatttagcaaaataattagtaataagttttgactaggtctaaagaatgaacacattgtaaacagttgccacagtagtttctaataaattgatcataaaagcagctatcctttttttttttaattctagcttctttttaaagattatttgggtacctaataaaggataatttatatcttattacagactgatattttgctttttcatgtgtcatcatactgtcagtatattaaaagaaattacagcytaaaacttaacatataccatacatatatattaaggtgtcaaatagctattctcactcatcttacaaatattgtaagagcaataaaaattaattgaggaattataagcctacaggtcatcagccttgaggtgattactgatgatttgggcttacacacatgtcagcaagatagggagtgtggataggggagggctggtagctwacaaggggcctcacagagaaatattagtgactttaaccaggtttcagaatctgggccttacctttacaggttcaacaaaagaatggcatcaatagaggcagaagtataracattgttttaaaaatacacacatgcacacacacacaaaacattttagcattatagctgtctgaatccttcaataagaaggagaggcacacacaaatacacacactcacacaaaactcaacaaccataaaacaaccctgcatgttataaaaggcagaattaaattttatttatttaaatccatggaactctggtaggccaggatatattatagtaccattatcaatgtgatattctgaaaatatgaactgagcgtcattaa

SEQ ID NO: 2551 - DNA, 2403 bp, Homo sapiens
gattttctgccgtctcttggcaaaaatggcaaataatgatgctgttctsaagagactggagcagaagggtgcagaggcagatcaaatcattgaatatcttaagcagcaagtttctctacttaaggagaaagcaattttgcaggcaactttgagggaagagaagaaacttcgagttgaaaatgctaaactgaagaaagaaattgaagaactgaaacaagagctaattcaggcagaaattcaaaatggagtgaagcaaatascatttccatctggtactccactgcacgctaattctatggtttctgaaaatgtgatacagtctacagcagtaacarccgtatcttctggtaccaaagaacagataaaaggaggarcaggagacgaaaagaaagcgaaagagaaaattgaaaagaaaggagagaagaaggagaaaaaacagcaatcaatagctggaagtgccgactctaagccaatagatgtttcccgtctggatcttcgaattggttgcatcataactgctagaaaacaccctgatgcagattctttgtatgtggaagaagtagatgtcggagaaatagccccaaggacagttgtcagtggcctggtgaatcatgttcctcttgaacagatgcaaaatcggatggtgattttactttgtaacctgaaacctgcaaagatgaggggagtattatctcaagcaatggtcatgtgtgctagttcaccagagaaaattgaaatcttggctcctccaaatgggtctgttcctggagacagaattacttttgatgctttcccaggagagcctgacaaggagctgaatcctaagaagaagatttgggagcagatccagcctgatcttcacactaatgatgagtgtgtggctacatacaaaggagttccctttgaggtgaaagggaagggagtatgtagggctcaaaccatgagcaacagtggaatcaaataaaatgcttccactaccaaaagacattagagaaaaccttaaaagtaataaagagaaatatatttgtcacttatacctaaaatatgagtggctcatttttgcrttactctcttctagacttgactagtcatttacttggtatatattgttttcattgattggggaaacactagatttttacctcggtttttgatcatttataatggrgagaggaagttgcctatgttttgtaataatttattttttagcaggaatattgattagcagcttttttttctttatacacatagataactaactagattaatgtttagtttcttatttgtaggcacaggatgcatgaaatttcaagctctgggattttttgtatattgtgtatctgtatcaaaaatatcctctccttttcaaaaatgacaggttggaaaatgtttgtcagacttattaactggtcatattataataatactgataatgaccaactgctcattctgaaagccaaacataaaagctaggagaagtggcatctgaacatttttgctttgctgccagagtaaccctgactaataatacaataacagcaatttttttaaaaaactgagatttcctactggcttgaagtttttctatttagcaaaataattagtaataagttttgactaggtctaaagaatgaacacattgtaaacagttgccacagtagtttctaataaattgatcataaaagcagctatcctttttttttttaattctagcttctttttaaagattatttgggtacctaataaaggataatttatatcttattacagactgatattttgctttttcatgtgtcatcatactgtcagtatattaaaagaaattacagcytaaaacttaacatataccatacatatatattaaggtgtcaaatagctattctcactcatcttacaaatattgtaagagcaataaaaattaattgaggaattataagcctacaggtcatcagccttgaggtgattactgatgatttgggcttacacacatgtcagcaagatagggagtgtggataggggagggctggtagctwacaaggggcctcacagagaaatattagtgactttaaccaggtttcagaatctgggccttacctttacaggttcaacaaaagaatggcatcaatagaggcagaagtataracattgttttaaaaatacacacatgcacacacacacaaaacattttagcattatagctgtctgaatccttcaataagaaggagaggcacacacaaatacacacactcacacaaaactcaacaaccataaaacaaccctgcatgttataaaaggcagaattaaattttatttatttaaatccatggaactctggtaggccaggatatattatagtaccattatcaatgtgatattctgaaaatatgaactgagcgtcattaa

SEQ ID NO: 2552 - DNA, 2473 bp, Homo sapiens
agtacgcgggtggctggacctacatgcttcctgctgtggctgtctcggaacccgtggtcctccgcttcatgattttctgccgtctcttggcaaaaatggcaaataatgatgctgttctsaagagactggagcagaagggtgcagaggcagatcaaatcattgaatatcttaagcagcaagtttctctacttaaggagaaagcaattttgcaggcaactttgagggaagagaagaaacttcgagttgaaaatgctaaactgaagaaagaaattgaagaactgaaacaagagctaattcaggcagaaattcaaaatggagtgaagcaaatascatttccatctggtactccactgcacgctaattctatggtttctgaaaatgtgatacagtctacagcagtaacarccgtatcttctggtaccaaagaacagataaaaggaggarcaggagacgaaaagaaagcgaaagagaaaattgaaaagaaaggagagaagaaggagaaaaaacagcaatcaatagctggaagtgccgactctaagccaatagatgtttcccgtctggatcttcgaattggttgcatcataactgctagaaaacaccctgatgcagattctttgtatgtggaagaagtagatgtcggagaaatagccccaaggacagttgtcagtggcctggtgaatcatgttcctcttgaacagatgcaaaatcggatggtgattttactttgtaacctgaaacctgcaaagatgaggggagtattatctcaagcaatggtcatgtgtgctagttcaccagagaaaattgaaatcttggctcctccaaatgggtctgttcctggagacagaattacttttgatgctttcccaggagagcctgacaaggagctgaatcctaagaagaagatttgggagcagatccagcctgatcttcacactaatgatgagtgtgtggctacatacaaaggagttccctttgaggtgaaagggaagggagtatgtagggctcaaaccatgagcaacagtggaatcaaataaaatgcttccactaccaaaagacattagagaaaaccttaaaagtaataaagagaaatatatttgtcacttatacctaaaatatgagtggctcatttttgcrttactctcttctagacttgactagtcatttacttggtatatattgttttcattgattggggaaacactagatttttacctcggtttttgatcatttataatggrgagaggaagttgcctatgttttgtaataatttattttttagcaggaatattgattagcagcttttttttctttatacacatagataactaactagattaatgtttagtttcttatttgtaggcacaggatgcatgaaatttcaagctctgggattttttgtatattgtgtatctgtatcaaaaatatcctctccttttcaaaaatgacaggttggaaaatgtttgtcagacttattaactggtcatattataataatactgataatgaccaactgctcattctgaaagccaaacataaaagctaggagaagtggcatctgaacatttttgctttgctgccagagtaaccctgactaataatacaataacagcaatttttttaaaaaactgagatttcctactggcttgaagtttttctatttagcaaaataattagtaataagttttgactaggtctaaagaatgaacacattgtaaacagttgccacagtagtttctaataaattgatcataaaagcagctatcctttttttttttaattctagcttctttttaaagattatttgggtacctaataaaggataatttatatcttattacagactgatattttgctttttcatgtgtcatcatactgtcagtatattaaaagaaattacagcytaaaacttaacatataccatacatatatattaaggtgtcaaatagctattctcactcatcttacaaatattgtaagagcaataaaaattaattgaggaattataagcctacaggtcatcagccttgaggtgattactgatgatttgggcttacacacatgtcagcaagatagggagtgtggataggggagggctggtagctwacaaggggcctcacagagaaatattagtgactttaaccaggtttcagaatctgggccttacctttacaggttcaacaaaagaatggcatcaatagaggcagaagtataracattgttttaaaaatacacacatgcacacacacacaaaacattttagcattatagctgtctgaatccttcaataagaaggagaggcacacacaaatacacacactcacacaaaactcaacaaccataaaacaaccctgcatgttataaaaggcagaattaaattttatttatttaaatccatggaactctggtaggccaggatatattatagtaccattatcaatgtgatattctgaaaatatgaactgagcgtcattaa

SEQ ID NO: 2553 - DNA, 1051 bp, Homo sapiens
gggatgtgtagtccgcaggagtccggcatgaccgccttgagcgcgaggatgctgacccggagcyggagcctgggacccggggctgggccgcgggggtgtarggaggagcccgggcctctccggagaagagaggctgcagcagaagcgaggaaaagccacagccccgtgaagcgtccgcggaaagcacagagactgcgtgtggcctatgagggctcggacagtgagaaaggtgagggggctgagcccctcaaggtgccagtctgggagccccaggactggcagcaacagctggtcaacatccgtgccatgaggaacaaaaaggatgcacctgtggaccatctggggactgagcactgctatgactccagtgcccccccaaaggtacgcaggtaccaggtgctgctgtcactgatgctctccagccaaaccaaagaccaggtgacggcgggcgccatgcagcgactgcgggcgcggggcctgacggtggacagcatcctgcagacagatgatgccacgctgggcaagctcayctaccccgtcggtttctggaggagcaaggtgaaatacatcaagcagaccagcgccatcctgcagcagcactacggtggggacatcccagcctctgtggccgagctggtggcgctgccgggtgttgggcccaagatggcacacctggctatggctgtggcctggggcactgtgtcaggcattgcagtgkacacgcatgtgcacagaatcgccaacaggctgaggtggaccaagaaggcaaccaagtccccagaggagacccgcrccgccctggaggartggctgcctagggagctgtggcacgagatcaatggactcttggtgggcttcggccagcagacctgtctgcctgtgcaccctcgctgccacgcctgcctcaaccaagccctctgcccggccgcccagggtctytgatggccgcatggctctggccgaggtgccgctgtggccaccgtctgtgaagtggctttacgcttcaggaagccacgcctgttgaataaagctttggtgtgtttgcagatgg

SEQ ID NO: 2554 - DNA, 2034 bp, Homo sapiens
cgtgtatacccgctcaacgctgggacrttacagccagggccaatgggcagagcgsgactcgaggccccgcccccgccttgtggcgtcacggggacgccgggggcgcgcgggctgcagggccgcgtaggtccccgcccccagagtctggytttccrcggctgcccgcctcgcgcgtcttcccygcccgggtctcctcgctgtcgccgccgctgccacaccatggccttcgtcaccaggcagttcatgcgttccgtgtcctcctcgtccaccgcctcggcctcggccaagaagataatcgtcaagcacgtgacggtcatcggcggcgggctgatgggcgccggcattgcccaggttgctgcagcaactggtcacacagtagtgttggtagaccagacagaggacatcctggcaaaatccaaaaagggaattgaggaaagccttaggaaagtggcaaagaagaagtttgcagaaaaccytaaggccggcgatgaatktgtggagaagaccctgagcaccatagcgaccagcacggatgcagcctccgttgtccacagcacagacttggtggtggaagccatcgtggagaatctgaaggtgaaaaacgagctcttcaaaaggctggacaagtttgctgctgaacatacaatctttgccagcaacacttcctccttgcakattacaagcatagctaatgccaccaccagacaagaccgattcgctggcctccatttcttcaacccagtgcctgtcatgaaacttgtggaggtcattaaaacaccaatgaccagccagaagacatttgaatctttggtagactttagcaaagccctaggaaagcatcctgtttcttgcaaggacactcctgggtttattgtgaaccgcctcctggttccatacctcatggaagcaatcaggctgtatgaacgagacttccaaacgtgtggtgattctaactcgggtttgggcttttctttaaaaggtgacgcatccaaagaagacattgacactgctatgaaattaggagccggttaccccatgggccyatttgagcttctagattatgtcggactggatactacgaagttcatcgtggatgggtggcatgaaatggatgcagagaacccattacatcagcccagcccatccttaartaagctggtagcagagaacaagttcggcaagaagactggagaaggattttacaaatacaagtgatgtgcagcttctccggctctgagaagaacacctgagagcgctttccagccagtgccccgartgcctgtgggaatgctctttggtcagacattccctcacacagtacagwttaataaatgtgcattttgattgtaatctatcgaagtgattattacaccagttacagcagtaatagattctccattaagaaataattcccttttttagtctgttcatttctgtgtattttctaaacagctttacacccttggtgccttggagcaaacatgttttttgaaccttgtcatttttgtgaagaattgccwagattccttctctcatcaacgggaaagtacttcctctgagagtgcgagtgcaccatgctcactgttgctgcgtgggagagtcacaagccactggcaagcaagtggtatagtctgtgaagcactgcagcgagcagcacctggatcttgcctttataagaacattttactacctgcagctttgagtcttgccctacattttgggcatgacataagatgtgtctttattcagctcgtcgtgaagatgctgctgctgaatgggtcagcatatctctgtttgcatggtttgcaggaggtcggttttcatggtcattcagttccacagatctgaatgattactgtctgtctgtgtcttttttccatgagaaatcactgttgcaaattgcctataaattgactctactaaaataacaatgtttcagtctgaaaatttgaattgaaaaaaatgtataatataaaattgtaatacactcaaatgattataaaagtaaaagttggtaatttaggcagaagctat

SEQ ID NO: 2555 - DNA, 1983 bp, Homo sapiens
cgtgtatacccgctcaacgctgggacrttacagccagggccaatgggcagagcgsgactcgaggccccgcccccgccttgtggcgtcacggggacgccgggggcgcgcgggctgcagggccgcgtaggtccccgcccccagagtctggytttccrcggctgcccgcctcgcgcgtcttcccygcccgggtctcctcgctgtcgccgccgctgccacaccatggccttcgtcaccaggcagttcatgcgttccgtgtcctcctcgtccaccgcctcggcctcggccaagaagataatcgtcaagcacgtgacggtcatcggcggcgggctgatgggcgccggcattgcccaggttgctgcagcaactggtcacacagtagtgttggtagaccagacagaggacatcctggcaaaatccaaaaagggaattgaggaaagccttaggaaagtggcaaagaagaagtttgcagaaaaccytaaggccggcgatgaatktgtggagaagaccctgagcaccatagcgaccagcacggatgcagcctccgttgtccacagcacagacttggtggtggaagccatcgtggagaatctgaaggtgaaaaacgagctcttcaaaaggctggacaagtttgctgctgaacatacaatctttgccagcaacacttcctccttgcakattacaagcatagctaatgccaccaccagacaagaccgattcgctggcctccatttcttcaacccagtgcctgtcatgaaacttgtggaggtcattaaaacaccaatgaccagccagaagacatttgaatctttggtagactttagcaaagccctaggaaagcatcctgtttcttgcaaggacactcctgggtttattgtgaaccgcctcctggttccatacctcatggaagcaatcaggctgtatgaacgaggtgacgcatccaaagaagacattgacactgctatgaaattaggagccggttaccccatgggccyatttgagcttctagattatgtcggactggatactacgaagttcatcgtggatgggtggcatgaaatggatgcagagaacccattacatcagcccagcccatccttaartaagctggtagcagagaacaagttcggcaagaagactggagaaggattttacaaatacaagtgatgtgcagcttctccggctctgagaagaacacctgagagcgctttccagccagtgccccgartgcctgtgggaatgctctttggtcagacattccctcacacagtacagwttaataaatgtgcattttgattgtaatctatcgaagtgattattacaccagttacagcagtaatagattctccattaagaaataattcccttttttagtctgttcatttctgtgtattttctaaacagctttacacccttggtgccttggagcaaacatgttttttgaaccttgtcatttttgtgaagaattgccwagattccttctctcatcaacgggaaagtacttcctctgagagtgcgagtgcaccatgctcactgttgctgcgtgggagagtcacaagccactggcaagcaagtggtatagtctgtgaagcactgcagcgagcagcacctggatcttgcctttataagaacattttactacctgcagctttgagtcttgccctacattttgggcatgacataagatgtgtctttattcagctcgtcgtgaagatgctgctgctgaatgggtcagcatatctctgtttgcatggtttgcaggaggtcggttttcatggtcattcagttccacagatctgaatgattactgtctgtctgtgtcttttttccatgagaaatcactgttgcaaattgcctataaattgactctactaaaataacaatgtttcagtctgaaaatttgaattgaaaaaaatgtataatataaaattgtaatacactcaaatgattataaaagtaaaagttggtaatttaggcagaagctat

SEQ ID NO: 2556 - DNA, 1531 bp, Homo sapiens
atccacccacctcggtctcccaaagtgctgggattacaggcgtgagccaccacagacatacaatctttgccagcaacacttcctccttgcakattacaagcatagctaatgccaccaccagacaagaccgattcgctggcctccatttcttcaacccagtgcctgtcatgaaacttgtggaggtcattaaaacaccaatgaccagccagaagacatttgaatctttggtagactttagcaaagccctaggaaagcatcctgtttcttgcaaggacactcctgggtttattgtgaaccgcctcctggttccatacctcatggaagcaatcaggctgtatgaacgagggcctcctggcttccctgtgggcctctgagaaaggtttctggaactcccaccacccccactacagtcccagccagagcaattgcatggccggcccagattgatatcctggatctctgcttttgattaaaaggtgacgcatccaaagaagacattgacactgctatgaaattaggagccggttaccccatgggccyatttgagcttctagattatgtcggactggatactacgaagttcatcgtggatgggtggcatgaaatggatgcagagaacccattacatcagcccagcccatccttaartaagctggtagcagagaacaagttcggcaagaagactggagaaggattttacaaatacaagtgatgtgcagcttctccggctctgagaagaacacctgagagcgctttccagccagtgccccgartgcctgtgggaatgctctttggtcagacattccctcacacagtacagwttaataaatgtgcattttgattgtaatctatcgaagtgattattacaccagttacagcagtaatagattctccattaagaaataattcccttttttagtctgttcatttctgtgtattttctaaacagctttacacccttggtgccttggagcaaacatgttttttgaaccttgtcatttttgtgaagaattgccwagattccttctctcatcaacgggaaagtacttcctctgagagtgcgagtgcaccatgctcactgttgctgcgtgggagagtcacaagccactggcaagcaagtggtatagtctgtgaagcactgcagcgagcagcacctggatcttgcctttataagaacattttactacctgcagctttgagtcttgccctacattttgggcatgacataagatgtgtctttattcagctcgtcgtgaagatgctgctgctgaatgggtcagcatatctctgtttgcatggtttgcaggaggtcggttttcatggtcattcagttccacagatctgaatgattactgtctgtctgtgtcttttttccatgagaaatcactgttgcaaattgcctataaattgactctactaaaataacaatgtttcagtctgaaaatttgaattgaaaaaaatgtataatataaaattgtaatacactcaaatgattataaaagtaaaagttggtaatttaggcagaagctat

SEQ ID NO: 2557 - DNA, 1137 bp, Homo sapiens
tgggggcggggagagaaggggcccaacatggtccatctcgaccttcctctgccgggcccagggcttcagccccgctcccataggccccgccccatcccagacctcgcccgccttcgggatctcagccctggctccgcttcttcaagtaccgacaggaagttgacgagttcgggctcgtcaggggccgarctccgggctccgccctacgacaccgcccctccctaggccccggcccycrtcaggactccgcccagacgtgcgtcatcttcccgcgccggtgacggaagtgcggtgttgagcgccggcgkctcgcgcccacgctgggccgggagtcgaaatgcttcccggtgccgggagtgagcgatgagctggyttctgttcctggcccacagagtcgccttggccgccttgccctgccgccgcggctctcgcgggttcgggatgttctatgccgtgaggaggggccgcaagaccggggtctttctgacctggaatgagtgcagagcacaggtggaccggtttcctgctgccagatttaagaagtttgccacagaggatgaggcctgggcctttgtcaggaaatctgcaagcccggaagtttcagaagggcatgaaaatcaacatggacaagaatcggaggcgaaagccagcaagcgactccgtgagccactggatggagatggacatgaaagcgcagagccgtatgcaaagcacatgaagccgagcgtggagccggcgcctccagttagcagagacacgttttcctacatgggagacttcgtcgtcgtctacactgatggctgctgctccagtaatgggcgtagaaggccgcgagcrggaatcggcgtttactgggggccrggccatcctttaaatgtaggcattagacttcctgggcggcagacaaaccaaagagcggaaattcatgcagcctgcaaagccattgaacaagcaaagactcaaaacatcaataaactggttctgtatacagacagtatgtttacgataaatggtataactaactgggttcaaggttggaagaaaaatgggtggaagacaagtgcagggaaagaggtgatcaacaaagaggactttgtggcactggagaggcttacccaggggatggacattcagtgg

SEQ ID NO: 2558 - DNA, 1914 bp, Homo sapiens
tgggggcggggagagaaggggcccaacatggtccatctcgaccttcctctgccgggcccagggcttcagccccgctcccataggccccgccccatcccagacctcgcccgccttcgggatctcagccctggctccgcttcttcaagtaccgacaggaagttgacgagttcgggctcgtcaggggccgarctccgggctccgccctacgacaccgcccctccctaggccccggcccycrtcaggactccgcccagacgtgcgtcatcttcccgcgccggtgacggaagtgcggtgttgagcgccggcgkctcgcgcccacgctgggccgggagtcgaaatgcttcccggtgccgggagtgagcgatgagctggyttctgttcctggcccacagagtcgccttggccgccttgccctgccgccgcggctctcgcgggttcgggatgttctatgccgtgaggaggggccgcaagaccggggtctttctgacctggaatgagtgcagagcacaggtggaccggtttcctgctgccagatttaagaagtttgccacagaggatgaggcctgggcctttgtcaggaaatctgcaagcccggaagtttcagaagggcatgaaaatcaacatggacaagaatcggaggcgaaagccagcaagcgactccgtgagccactggatggagatggacatgaaagcgcagagccgtatgcaaagcacatgaagccgagcgtggagccggcgcctccagttagcagagacacgttttcctacatgggagacttcgtcgtcgtctacactgatggctgctgctccagtaatgggcgtagaaggccgcgagcrggaatcggcgtttactgggggccrggccatcctttaaatgtaggcattagacttcctgggcggcagacaaaccaaagagcggaaattcatgcagcctgcaaagccattgaacaagcaaagactcaaaacatcaataaactggttctgtatacagacagtatgtttacgataaatggtataactaactgggttcaaggttggaagaaaaatgggtggaagacaagtgcagggaaagaggtgatcaacaaagaggactttgtggcactggagaggcttacccaggggatggacattcagtggatgcatgttcctggtcattcgggatttataggcaatgaagaagctgacagattagccagagaaggagctaaacaatcggaagactgagccatgtgactttagtccttgggagaacttgagccagcggctgtcttgctgcctgtacttactggtgtggaaaatagcctgcaggtaggaccattgcagtgatgggcagatgcgtctttcacacggaatcaggcacagtggccttctgtgacatgtgtttataaaaaatggttaagtatataataaattgaacatctttgagattggagaattatgtgagatttccacattatgtttactgggttcaatactgtccttgcttgttttattgcaggcaagcaaggcaaatggcctaaaatgctgtggcttatattttgataagaaatcaaaaaaccattggttaaaagatgcaactcagaagtctggaagtattctgaaagcatccatttaccgtccagttgacaggtttgagtctcctgcttgtataggtgacttgtgcccatgggtacattaaaggaacatgctgcccagggcctgggcggacagctcagtgggcaggatgtgtgctgggtctcagccccatgtgcctgcttgctgggcagttagtatagggcaaagcctgcctgcggcgaccctggctgctaggccattctctaggaacagctgcgactcataaagaccaagaagcataaataaactttcaaaaatttatttggctctttcgttaaaaactgtgcaaattaaaaaaaa

SEQ ID NO: 2559 - DNA, 3709 bp, Homo sapiens
cccgctccccactctggactcccgcgctgggcgcgctgaggcggcccccgagcgagcgcgcgtgcagccgccgccgccccgagcacccgcagctccggcgccgcggcgagacggagacggaccgagccacgggcccccgcggccgcagcatctcggaggagaacatgcttgccaactcagccagcgtgaggatcctcatcaagggaggcaaggtggtgaacgatgactgcacccacgaggctgacgtctacatcgagaatggcatcatccagcaggtgggccgcgagctcatgatccctggcggggccaaggtgattgatgccacaggaaaactggtgatccctggtggcatcgacaccagcacccacttccaccagaccttcatgaatgccacgtgcgtggacgacttctaccatgggaccaaggcagcactcgtcggaggcaccaccatgatcatcggccacgtcctgcccgacaaggagacctcccttgtggacgcttatgagaagtgccgaggtctggccgaccccaaggtctgctgtgattacgccctccacgtggggatcacctggtgggcacccaaggtgaaagcagaaatggagacactggtgagggagaagggtgtcaactcgttccagatgttcatgacctacaaggacctgtacatgcttcgagacagtgagctgtaccaagtgttgcacgcttgcaaggacattggggcaatcgcccgcgtccatgctgaaaatggggagcttgtggccgagggtgctaaggaggcactggatttggggatcacaggcccagaaggaatcgagatcagccgtccagaggagctggaagctgaagccactcatcgtgttatcaccattgcaaacaggactcactgtccaatctacctggtcaacgtgtccagtatctcggctggtgacgttatcgcagctgctaagatgcaagggaaggttgtgctggcggagaccaccactgcacatgccacgctgacaggcttacactactaccaccaggactggtcccacgcggctgcctatgtcacggtgcctcccctgagactggacaccaacacctcaacctacctcatgagcctgctggccaatgacactctgaacatcgtggcatcagatcaccggcctttcaccacaaagcagaaagctatgggcaaggaagacttcaccaagatcccacatggagtgagtggcgtgcaggaccgcatgagcgtcatctgggagagaggagtggttggaggaaagatggatgagaaccgttttgtggccgttaccagttccaacgcagctaagcttctgaacctgtatccccgcaagggccgcattattcccggagccgatgctgatgtggtggtgtgggacccagaagccacaaagaccatctcagccagcacgcaggtccagggaggagacttcaacctgtatgagaacatgcgctgccacggcgtgccactggtcaccatcagccgggggcgcgtcgtgtatgagaacggcgtcttcatgtgcgccgagggcaccggcaagttctgtcccctgaggtccttcccagacactgtctacaagaagctggtccagagagagaagactttaaaggttagaggagtggaccgcactccctacctgggggatgtcgctgttgtcgtgcaccctgggaaaaaagagatgggaaccccactcgcagacactcctacccggcccgtcacccggcatgggggcatgagggaccttcacgaatccagcttcagcctctctggctctcagatcgatgaccatgttccaaagcgagcttcagctcggatcctcgctcctcccggaggmaggtcgagtggcatttggtaaaggcattgccaagccccccgagtgaggacgcaccgccgccaccagcccgcaactctccagccgaagctgcaggggcaggagaggctgggctgrgtggcayaccacccgaggggggccccgggacccacggagccctccctatgtctgcaaagtgattcactgtgcttcgagccaactctaacagrcactttgagatgtgttcctcctgctgtagtcctttctgccttggmctcrgcgggcttttctggggcccaggaagcccacactatgcacagagcccaatgcatagagccctggccagcccttcctctcactcctgcctccgctggctttgggaaagcccagactttagtgccctgccccctggctgactggccagttgcccagagcactttagcagatgtggtttcaaagtaaaggcctcctcccmcaccccttaggccccgtggtgacatttcccaagtcagacagatgtcagcttcccagccatgcccaggacgtcctatctcccccaacccacctctggccctgtgtaggggcagggatgggggtggctgggactcctggtgcccctcgccagcttctcctgcgccccgcccacaccctcgggggggtcacaggcccagaagggtagctgggcggggctcgaggctggtgccaggcgcgtgtaaatggttttgttttgcacgtttggtttgcgcagtagtttggtttgacttgtttgtgcatcctgtgaaaaataacggtgcttgtgtcactagcatagaatagcgacaggaatagatgtggtccttaggagacgctgcacttgacaccaaccagacagcacagggcaggggtggtggagggggctgggctcacaggcctctcttttccccgcctgcagtcttctgggctgcgggaggccctggccctttccccttcccctcccctccttgtctagtttcccacattccaaaagggggcctgggatgctagccccagagatgccagcccttcaggaagcaggtgtcctttcccctctctgcccctgatcactcccagcactccccttgccttcccctgtcttcacctgccaccacacacacacacacacacacacacacacacacacgcatggcttcctataacttcttcctgctggacagagactcagcgctcctcctgtgtgactggcaagaggcctcatgcctgctgagagaggaggagtgggagaggggcttgccagacaccagagagggagaccccaggcccacaggacctggctgtcgaacccgcattgctgctcaggtgccgtgatctcccgtggtcggcaccaggcccttgccagctcatggcctcatcttctcccctgtccatccaggtgggccctccctgcttytaaagccccacagaagttcccatggaaacactagaggccgggtgtctccttccacctccagtgatctgggaagtgacccagccgcctgcccttgttaagcctggtctgccccgtgggaagtgacttcatgttgcacatgtgatttcagcccccgaggcttgcgcgaggcttctggaccctcggttaaaggtcagcccctggccgggtgcggtggctcacgcctgtaatcccagcactttgggaggccaaggcgggtggatcatggagtcaggagatcgagaccatcctggctaacacggtgaaaccccgtctctactaaaaatacaaaaattacccaggcgtggtggcgggcgcctgtagtcccagctactgaggaggctgaggcaggagaatagcgtgaacccgggaggcggagcttgcagtgagccaagatcacgccactgcacttcagcctggacgacagagtgag

SEQ ID NO: 2560 - DNA, 3605 bp, Homo sapiens
tcctctcccccttctgtttctgcgtgaggcgcacaaaagggcggggagccgggaacatgcttgccaactcagccagcgtgaggatcctcatcaagggaggcaaggtggtgaacgatgactgcacccacgaggctgacgtctacatcgagaatggcatcatccagcaggtgggccgcgagctcatgatccctggcggggccaaggtgattgatgccacaggaaaactggtgatccctggtggcatcgacaccagcacccacttccaccagaccttcatgaatgccacgtgcgtggacgacttctaccatgggaccaaggcagcactcgtcggaggcaccaccatgatcatcggccacgtcctgcccgacaaggagacctcccttgtggacgcttatgagaagtgccgaggtctggccgaccccaaggtctgctgtgattacgccctccacgtggggatcacctggtgggcacccaaggtgaaagcagaaatggagacactggtgagggagaagggtgtcaactcgttccagatgttcatgacctacaaggacctgtacatgcttcgagacagtgagctgtaccaagtgttgcacgcttgcaaggacattggggcaatcgcccgcgtccatgctgaaaatggggagcttgtggccgaggcaaggtgctaaggaggcactggatttggggatcacaggcccagaaggaatcgagatcagccgtccagaggagctggaagctgaagccactcatcgtgttatcaccattgcaaacaggactcactgtccaatctacctggtcaacgtgtccagtatctcggctggtgacgttatcgcagctgctaagatgcaagggaaggttgtgctggcggagaccaccactgcacatgccacgctgacaggcttacactactaccaccaggactggtcccacgcggctgcctatgtcacggtgcctcccctgagactggacaccaacacctcaacctacctcatgagcctgctggccaatgacactctgaacatcgtggcatcagatcaccggcctttcaccacaaagcagaaagctatgggcaaggaagacttcaccaagatcccacatggagtgagtggcgtgcaggaccgcatgagcgtcatctgggagagaggagtggttggaggaaagatggatgagaaccgttttgtggccgttaccagttccaacgcagctaagcttctgaacctgtatccccgcaagggccgcattattcccggagccgatgctgatgtggtggtgtgggacccagaagccacaaagaccatctcagccagcacgcaggtccagggaggagacttcaacctgtatgagaacatgcgctgccacggcgtgccactggtcaccatcagccgggggcgcgtcgtgtatgagaacggcgtcttcatgtgcgccgagggcaccggcaagttctgtcccctgaggtccttcccagacactgtctacaagaagctggtccagagagagaagactttaaaggttagaggagtggaccgcactccctacctgggggatgtcgctgttgtcgtgcaccctgggaaaaaagagatgggaaccccactcgcagacactcctacccggcccgtcacccggcatgggggcatgagggaccttcacgaatccagcttcagcctctctggctctcagatcgatgaccatgttccaaagcgagcttcagctcggatcctcgctcctcccggaggmaggtcgagtggcatttggtaaaggcattgccaagccccccgagtgaggacgcaccgccgccaccagcccgcaactctccagccgaagctgcaggggcaggagaggctgggctgrgtggcayaccacccgaggggggccccgggacccacggagccctccctatgtctgcaaagtgattcactgtgcttcgagccaactctaacagrcactttgagatgtgttcctcctgctgtagtcctttctgccttggmctcrgcgggcttttctggggcccaggaagcccacactatgcacagagcccaatgcatagagccctggccagcccttcctctcactcctgcctccgctggctttgggaaagcccagactttagtgccctgccccctggctgactggccagttgcccagagcactttagcagatgtggtttcaaagtaaaggcctcctcccmcaccccttaggccccgtggtgacatttcccaagtcagacagatgtcagcttcccagccatgcccaggacgtcctatctcccccaacccacctctggccctgtgtaggggcagggatgggggtggctgggactcctggtgcccctcgccagcttctcctgcgccccgcccacaccctcgggggggtcacaggcccagaagggtagctgggcggggctcgaggctggtgccaggcgcgtgtaaatggttttgttttgcacgtttggtttgcgcagtagtttggtttgacttgtttgtgcatcctgtgaaaaataacggtgcttgtgtcactagcatagaatagcgacaggaatagatgtggtccttaggagacgctgcacttgacaccaaccagacagcacagggcaggggtggtggagggggctgggctcacaggcctctcttttccccgcctgcagtcttctgggctgcgggaggccctggccctttccccttcccctcccctccttgtctagtttcccacattccaaaagggggcctgggatgctagccccagagatgccagcccttcaggaagcaggtgtcctttcccctctctgcccctgatcactcccagcactccccttgccttcccctgtcttcacctgccaccacacacacacacacacacacacacacacacacacgcatggcttcctataacttcttcctgctggacagagactcagcgctcctcctgtgtgactggcaagaggcctcatgcctgctgagagaggaggagtgggagaggggcttgccagacaccagagagggagaccccaggcccacaggacctggctgtcgaacccgcattgctgctcaggtgccgtgatctcccgtggtcggcaccaggcccttgccagctcatggcctcatcttctcccctgtccatccaggtgggccctccctgcttytaaagccccacagaagttcccatggaaacactagaggccgggtgtctccttccacctccagtgatctgggaagtgacccagccgcctgcccttgttaagcctggtctgccccgtgggaagtgacttcatgttgcacatgtgatttcagcccccgaggcttgcgcgaggcttctggaccctcggttaaaggtcagcccctggccgggtgcggtggctcacgcctgtaatcccagcactttgggaggccaaggcgggtggatcatggagtcaggagatcgagaccatcctggctaacacggtgaaaccccgtctctactaaaaatacaaaaattacccaggcgtggtggcgggcgcctgtagtcccagctactgaggaggctgaggcaggagaatagcgtgaacccgggaggcggagcttgcagtgagccaagatcacgccactgcacttcagcctggacgacagagtgag

SEQ ID NO: 2561 - DNA, 3671 bp, Homo sapiens
tcctctcccccttctgtttctgcgtgaggcgcacaaaagggcggggagccgggaacatgcttgccaactcagccagcgtgaggatcctcatcaagggaggcaaggtggtgaacgatgactgcacccacgaggctgacgtctacatcgagaatggcatcatccagcaggtgggccgcgagctcatgatccctggcggggccaaggtgattgatgccacaggaaaactggtgatccctggtggcatcgacaccagcacccacttccaccagaccttcatgaatgccacgtgcgtggacgacttctaccatgggaccaaggcagcactcgtcggaggcaccaccatgatcatcggccacgtcctgcccgacaaggagacctcccttgtggacgcttatgagaagtgccgaggtctggccgaccccaaggtctgctgtgattacgccctccacgtggggatcacctggtgggcacccaaggtgaaagcagaaatggagacactggtgagggagaagggtgtcaactcgttccagatgttcatgacctacaaggacctgtacatgcttcgagacagtgagctgtaccaagtgttgcacgcttgcaaggacattggggcaatcgcccgcgtccatgctgaaaatggggagcttgtggccgaggcaaggtgctaaggaggcactggatttggggatcacaggcccagaaggaatcgagatcagccgtccagaggagctggaagctgaagccactcatcgtgttatcaccattgcaaacaggactcactgtccaatctacctggtcaacgtgtccagtatctcggctggtgacgttatcgcagctgctaagatgcaagggaaggttgtgctggcggagaccaccactgcacatgccacgctgacaggcttacactactaccaccaggactggtcccacgcggctgcctatgtcacggtgcctcccctgagactggacaccaacacctcaacctacctcatgagcctgctggccaatgacactctgaacatcgtggcatcagatcaccggcctttcaccacaaagcagaaagctatgggcaaggaagacttcaccaagatcccacatggagtgagtggcgtgcaggaccgcatgagcgtcatctgggagagaggagtggttggaggaaagatggatgagaaccgttttgtggccgttaccagttccaacgcagctaagcttctgaacctgtatccccgcaagggccgcattattcccggagccgatgctgatgtggtggtgtgggacccagaagccacaaagaccatctcagccagcacgcaggtccagggaggagacttcaacctgtatgagaacatgcgctgccacggcgtgccactggtcaccatcagccgggggcgcgtcgtgtatgagaacggcgtcttcatgtgcgccgagggcaccggcaagttctgtcccctgaggtccttcccagacactgtctacaagaagctggtccagagagagaagactttaaaggttagaggagtggaccgcactccctacctgggggatgtcgctgttgtcgtgcaccctgggaaaaaagagatgggaaccccactcgcagacactcctacccggcccgtcacccggcatgggggcatgagggaccttcacgaatccagcttcagcctctctggctctcagatcgatgaccatgttccaaagcgagcttcagctcggatcctcgctcctcccggaggmaggtcgagtggcatttggtaaaggcattgccaagccccccgagtgaggacgcaccgccgccaccagcccgcaactctccagccgaagctgcaggggcaggagaggctgggctgrgtggcayaccacccgaggggggccccgggacccacggagccctccctatgtctgcaaagtgattcactgtgcttcgagccaactctaacagrcactttgagatgtgttcctcctgctgtagtcctttctgccttggmctcrgcgggcttttctggggcccaggaagcccacactatgcacagagcccaatgcatagagccctggccagcccttcctctcactcctgcctccgctggctttgggaaagcccagactttagtgccctgccccctggctgactggccagttgcccagagcactttagcagatgtggtttcaaagtaaaggcctcctcccmcaccccttaggccccgtggtgacatttcccaagtcagacagatgtcagcttcccagccatgcccaggacgtcctatctcccccaacccacctctggccctgtgtaggggcagggatgggggtggctgggactcctggtgcccctcgccagcttctcctgcgccccgcccacaccctcgggggggtcacaggcccagaagggtagctgggcggggctcgaggctggtgccaggcgcgtgtaaatggttttgttttgcacgtttggtttgcgcagtagtttggtttgacttgtttgtgcatcctgtgaaaaataacggtgcttgtgtcactagcatagaatagcgacaggaatagatgtggtccttaggagacgctgcacttgacaccaaccagacagcacagggcaggggtggtggagggggctgggctcacaggcctctcttttccccgcctgcagtcttctgggctgcgggaggccctggccctttccccttcccctcccctccttgtctagtttcccacattccaaaagggggcctgggatgctagccccagagatgccagcccttcaggaagcaggtgtcctttcccctctctgcccctgatcactcccagcactccccttgccttcccctgtcttcacctgccaccacacacacacacacacacacacacacacacacacgcatggcttcctataacttcttcctgctggacagagactcagcgctcctcctgtgtgactggcaagaggcctcatgcctgctgagagaggaggagtgggagaggggcttgccagacaccagagagggagaccccaggcccacaggacctggctgtcgaacccgcattgctgctcaggtgccgtgatctcccgtggtcggcaccaggcccttgccagctcatggcctcatcttctcccctgtccatccaggtgggccctccctgcttytaaagccccacagaagttcccatggaaacactagaggccgggtgtctccttccacctccagtgatctgggaagtgacccagccgcctgcccttgttaagcctggtctgccccgtgggaagtgacttcatgttgcacatgtgatttcagcccccgaggcttgcgcgaggcttctggaccctcggttaaaggtcagcccctggccgggtgcggtggctcacgcctgtaatcccagcactttgggaggccaaggcgggtggatcatggagtcaggagatcgagaccatcctggctaacacggtgaaaccccgtctctactaaaaatacaaaaattacccaggcgtggtggcgggcgcctgtagtcccagctactgaggaggctgaggcaggagaatagcgtgaacccgggaggcggagcttgcagtgagccaagatcacgccactgcacttcagcctggacgacagagtgagtctctgtagtgcttttcatgtattcaaaccacttccgtatatgacctctcacttagtcctcatgac

SEQ ID NO: 2562 - DNA, 1064 bp, Homo sapiens
ggctcggctctctgctcctcctgttctacagtcagccgcatcttcttttgcatcgtcagccaaaccacatccctgagacaccatggggaaggtgaaggtcggagtcaacagatttggtcgtactgggcgcctggtcaccagggctgcttttaactctggtaaagtggatattgttgccatcaatgaccccttcattgacctgaactacatggtttacatgttccaatatgactccacccatagcaaattccatggcaccgtcaaggctgagaatgggaagcttgtcatcaatggaaatccctcyaaaatcaagtggggcgatgctggcgctgagtacgtcatggagtccactggcgtcttcaccaccatgtagaaggctgggcctcatttgcaggggggagccaaaagggtcatcatctctgccccctctgctgatgccccaatgtttgtcatgggtgtgaaccatgagaagtatgacaacaacctcaagattgtcggcagtgccttctgcaccaccaactgcttagcacccctggccaaggtcatccatgacaactttggtatcgtggaaggactcatgaccatagtccacgccatcactgccacccagaagactgtggatggcccctccgggaaactgtggcgtgatggccacggggctctccagaacatcatccctgcctctactggcactgcgaaggctatgggcaaggtcatccctgagctgaacgggaagctcactggcatggccttctgtgtccccactgccgtgtcagtggtggacctgacctgccgtctggaaaaacctgccaaatatgatgacaccaagaaggtggtgaagcaggcatcggagggccccctcaagggcatcctgggctacactgagcacctcatttcctggtatgacaatgaatttggctacagcaacaggatggtggacctcatggcccacatggcctccaaggagtaagacccctggaccaccagccccagtaagagcacaagaggaagagagagaccctcactgctggggagtccctgccacactcagtcccccaccacac

SEQ ID NO: 2563 - DNA, 1308 bp, Homo sapiens
gctcggctctctgctcctcctgttctacagtcagccgcatcttcttttgcatcgtcagccaaaccacatccctgagacaccatggggaaggtgaaggtcggagtcaacagatttggtcgtactgggcgcctggtcaccagggctgcttttaactctggtaaagtggatattgttgccatcaatgaccccttcattgacctgaactacatggtttacatgttccaatatgactccacccatagcaaattccatggcaccgtcaaggctgagaatgggaagcttgtcatcaatggaaatcccatcaccatcttccaggagcgagatccctcyaaaatcaagtggggcgatgctggcgctgagtacgtcatggagtccactggcgtcttcaccaccatgtagaaggctgggcctcatttgcaggggggagccaaaagggtcatcatctctgccccctctgctgatgccccaatgtttgtcatgggtgtgaaccatgagaagtatgacaacaacctcaagattgtcggcagtgccttctgcaccaccaactgcttagcacccctggccaaggtcatccatgacaactttggtatcgtggaaggactcatgaccatagtccacgccatcactgccacccagaagactgtggatggcccctccgggaaactgtggcgtgatggccacggggctctccagaacatcatccctgcctctactggcactgcgaaggctatgggcaaggtcatccctgagctgaacgggaagctcactggcatggccttctgtgtccccactgccgtgtcagtggtggacctgacctgccgtctggaaaaacctgccaaatatgatgacaccaagaaggtggtgaagcaggcatcggagggccccctcaagggcatcctgggctacactgagcaccaggtggtctcctccgacttcaacagcaacacccactcttccaccttcaatgctggggctgtcattgccctcaacaaccactttttcaagctcatttcctggtatgacaatgaatttggctacagcaacaggatggtggacctcatggcccacatggcctccaaggagtaagacccctggaccaccagccccagtaagagcacaagaggaagagagagaccctcactgctggggagtccctgccacactcagtcccccaccacactgaatctcccctcctcacagtttccatgtagaccccttgaagaggggaggggcctagggagccccaccttgtcatataccatcaataaagtaccctgtgctcagccaaaaaaaaaaaaaagagagaga

SEQ ID NO: 2564 - DNA, 1157 bp, Homo sapiens
cagccaaaccacatccctgagacaccatggggaaggtgaaggtcggagtcaacagatttggtcgtactgggcgcctggtcaccagggctgcttttaactctggtaaagtggatattgttgccatcaatgaccccttcattgacctgaactacatggtttacatgttccaatatgactccacccatagcaaattccatggcaccgtcaaggctgagaatgggaagcttgtcatcaatggaaatcccatcaccatcttccaggagcgagatccctcyaaaatcaagtggggcgatgctggcgctgagtacgtcatggagtccactggcgtcttcaccaccattgagaagtatgacaacaacctcaagattgtcggcagtgccttctgcaccaccaactgcttagcacccctggccaaggtcatccatgacaactttggtatcgtggaaggactcatgaccatagtccacgccatcactgccacccagaagactgtggatggcccctccgggaaactgtggcgtgatggccacggggctctccagaacatcatccctgcctctactggcactgcgaaggctatgggcaaggtcatccctgagctgaacgggaagctcactggcatggccttctgtgtccccactgccgtgtcagtggtggacctgacctgccgtctggaaaaacctgccaaatatgatgacaccaagaaggtggtgaagcaggcatcggagggccccctcaagggcatcctgggctacactgagcaccaggtggtctcctccgacttcaacagcaacacccactcttccaccttcaatgctggggctgtcattgccctcaacaaccactttttcaagctcatttcctggtatgacaatgaatttggctacagcaacaggatggtggacctcatggcccacatggcctccaaggagtaagacccctggaccaccagccccagtaagagcacaagaggaagagagagaccctcactgctggggagtccctgccacactcagtcccccaccacactgaatctcccctcctcacagtttccatgtagaccccttgaagaggggaggggcctagggagccccaccttgtcatataccatcaataaagtaccctgtgctcagccaaaaaaaaaaaaaagagagaga

SEQ ID NO: 2565 - DNA, 824 bp, Homo sapiens
cagccaaaccacatccctgagacaccatggggaaggtgaaggtcggagtcaacagatttggtcgtactgggcgcctggtcaccagggctgcttttaactctggtaaagtggatattgttgccatcaatgaccccttcattgacctgaactacatggtttacatgttccaatatgactccacccatagcaaattccatggcaccgtcaaggctgagaatgggaagcttgtcatcaatggaaatcccatcaccatcttccaggagcgagatccctcyaaaatcaagtggggcgatgctggcgctgagtacgtcatggagtccactggcgtcttcaccaccattgagaagtatgacaacaacctcaagattgtcggcagtgccttctgcaccaccaactgcttagcacccctggccaaggtcatccatgacaactttggtatcgtggaaggactcatgaccatagtccacgccatcactgccacccagaagactgtggatggcccctccgggaaactgtggcgtgatggccacggggctctccagaacatcatccctgcctctactggcactgcgaaggctatgggcaaggtcatccctgagctgaacgggaagctcactggcatggccttctgtgtccccactgccgtgtcagtggtggacctgacctgccgtctggaaaaacctgccaaatatgatgacaccaagaaggtggtgaagcaggcatcggagggccccctcaagggcatcctgggctacactgagcaccaggaagagagagaccctcactgctggggagtccctgccacactcagtcccccaccacac

SEQ ID NO: 2566 - DNA, 1038 bp, Homo sapiens
caaggggtctacatggaaactgtgaggaggggagattcagtgtggtgggggactgagtgtggcagggactccccagcagtgagggtctctctcttcctcttgtgctcttactggggctggtggtccaggggtcttactccttggaggccatgtgggccatgaggtccaccatcctgttgctgtagccaaattcattgtcataccaggaaatgagcttgaaaaagtggttgttgagggcaatgacagccccagcattgaaggtggaagagtgggtttttccagacggcaggtcaggtccaccactgacacggcagtggggacacagaaggccatgccagtgagcttcccgttcagctcagggatgaccttgcccatagccttcgcagtgccagtagaggcagggatgatgttctggagagccccgtggccatcacgccacagtttcccggaggggccatccacagtcttctgggtggcagtgatggcgtggactatggtcatgagtccttccacgataccaaagttgtcatggatgaccttggccaggggtgctaagcagttggtggtgcagaaggcactgccgacaatcttgaggttgttgtcatacttctcatggttcacacccatgacaaacattggggcatcagcagagggggcagagatgatgacccttttggctcccccctgcaaatgaggcccagccttctacatggtggtgaagacgccagtggactccatgacgtactcagcgccagcatcgccccacttgattttrgagggatctcgctcctggaagatggtgatgggatttccattgatgacaagcttcccattctcagccttgacggtgccatggaatttgctatgggtggagtcatattggaacatgtaaaccatgtagttcaggtcaatgaaggggtcattgatggcaacaatatccactttaccagagttaaaagcagccctggtgaccaggcgcccagtacgaccaaatctgttgactccgaccttcaccttccccatggtgtctcagggatg

SEQ ID NO: 2567 - DNA, 1687 bp, Homo sapiens
acacttcactcaaatggctggctgcagctggtgctagttatggtctgggatctcagatgaggctgctaagctgaatgtgttgttactcctttacatcgtctctccacatggcttgaacttctcacagcatgcctgctggattcgaagagatggcattcaagtgcttaaaaatggctgctgaagtatcaarctaatttagataccaaccctcccggctgtatcagtcttaactgaaccagctctcagaatatttccttaccagagtatatctcagaacattttcatgaacctttccctgaaggattttcaaaactggaagagtttacccagaacacatttgtgaagatttgtatggaagagcccagattccaagctaattttccacagrcttggctttggatttctggacctttgtgcctgtactgtgctgaaagactttacaggtatatgcggagcaataagccagtcaccatcattttggtcayragtcatccctcagatgtcatggaaatccgratggtcaaagaaaattttaaagcaagacctggtcagtatattactctacattgtcccagtatatctgcattagaaaatcatccatttaccctcacaatgtgtccaactgaaaccaaagcaacatttggggttcatcttaaaatagtagaagactggacagaacgatttcgagatttactactgcctccatctagtcaagactccgaaattctgcccttcattcaatctagaaattatcccaagctgtatattgatggtccttttggaagtccatttgaggaatcactgaactatgaggtcagcctctgcatggctggagtcattggagtaactccatttgcataaatactcaacaccctgttggatgactggaaaccatacaagcttagaagactatactttatttgggcatgcagagatatccagtccttccattggtttgcagacttactctgtatgttgcataacaagttttggcaagagaacagacctgactatgtcaacatccagctgtacctcagtcaaacagatgggatacagaagataattggagaaaaatatcatgcactgaattcaagactgtttcttggacgtcctcggtggaaacttttgtttgatgaaatagcaaaatataacagagggaaaacagttggtgttttctgttgtggacccaattcactatcyaagactcttcataaactgagaaaccagaacaactcatatgggacgagatttgaatacaataaagagtctttcagctgaaaacttttgccatgaagcaggactctaaagaaggaatgagtgcaatttctaagactttggaactcagcggaatcagacagckgtgttatgccaaagaatagtaaggttttctaatttatgattatttaaaatggaaatgtgagaatctggcaagatgaccggtcacattacatgtttaatctggaaaccaaagagaccctgaagaatatttgatgtgatgattcacttttcagttctcaaattaaaagaaaactattagatgcacactgttgatttttatggtggattcaagaaccccctagtgaggagctgaacttgctcagtctaaggctgattgtcgtgttcctctttaaattgtttttggttgaacaaatgcaagattgaacaaaattaaaaattcattgaagct

SEQ ID NO: 2568 - DNA, 974 bp, Homo sapiens
aggsggactgtactgccctttgagtactactgtgtggcccsgcaacccagcacaaccaggtatctgcttggaacccagccaccataaagcctgctagctaaaaaaaattttacatctctcagttcattcggcacagacccctgcctcattcacctgtgactctgcttggaaaattcatcagttacaaagcagccaatgcaattatctcaagggaaattgaaaaatggacctttgaaaatgctagatttacaatgagaaatgccataattcaaggtttattctatgggtccttgacatttgggatctggacagctctgttattcatatatttgcaccataatcatgtgagcagctggcagaagaaaagccaggagcctctgtcagcttggtcccctggaaaaaaagtgcatcagcaaattatctatggctcagagcaaataccaaaacctcatgtaatagtcaaaaggactgatgaagataaagcaaagtctatgttaggtacagattttaaccatacaaacccagaacttcrtaaagaacttttaaaatatggatttaatgtgattatcagtagaagcttgggcatcgaaagagaagtgccagataccaggagtaaaatgygtcttcaaaaacattacccagcccgcctcccgactgccagcattgtcatttgcttctrtaatgaagaatgtaatgccttgtttcagaccatgtccagtgtcaygaacctcacgccacactattttcttgaagaaattattttggtasatgacatgagcaaagttgatkatttgaaagraaaactagactatcacctggaaacttttcggggaaaggtaggaacattcctggggacaagagccagtgacggcgtcacagagatcttcccttctgagcgggactcctctgcagggagaccttctatgtctgtgtctgcttcatcagaagagtggaaatctattccagccatatga

SEQ ID NO: 2569 - DNA, 1719 bp, Homo sapiens
aggsggactgtactgccctttgagtactactgtgtggcccsgcaacccagcacaaccaggtatctgcttggaacccagccaccataaagcctgctagctaaaaaaaattttacatctctcagttcattcggcacagacccctgcctcattcacctgtgactctgcttggaaaattcatcagttacaaagcagccaatgcaattatctcaagggaaattgaaaaatggacctttgaaaatgctagatttacaatgagaaatgccataattcaaggtttattctatgggtccttgacatttgggatctggacagctctgttattcatatatttgcaccataatcatgtgagcagctggcagaagaaaagccaggagcctctgtcagcttggtcccctggaaaaaaagtgcatcagcaaattatctatggctcagagcaaataccaaaacctcatgtaatagtcaaaaggactgatgaagataaagcaaagtctatgttaggtacagattttaaccatacaaacccagaacttcrtaaagaacttttaaaatatggatttaatgtgattatcagtagaagcttgggcatcgaaagagaagtgccagataccaggagtaaaatgygtcttcaaaaacattacccagcccgcctcccgactgccagcattgtcatttgcttctrtaatgaagaatgtaatgccttgtttcagaccatgtccagtgtcaygaacctcacgccacactattttcttgaagaaattattttggtasatgacatgagcaaagttgatkatttgaaagraaaactagactatcacctggaaacttttcggggaaaggttaaaataataagaaacaaaaagagagaggsgctgattcgagcaaggctgattggagcttctcatgcttcaggggatgttctggtgttcctggacagccactgtgaggtgaacagagtatggctggagcccctgctgcatgccattgccaaggaccccaaaatggtggtgtgccccctgatagatgtcattgatgatagaactctggagtataagccctctcctcttgtaaggggaacttttgattggaacctacaatttaaatgggataatgttttctcttatgagatggatggaccagaaggatctactaaaccaatccggtcacctgcaatgtctggaggaatttttgctatacgtcggcattattttaatgaaattggacagtatgacaaggatatggatttttggggaagagaaaatttggaactttcactaaggatctggatgtgtggaggccaactctttataatcccctgctctcgagtaggacatatcagtaagaaacaaactggaaaaccttctacaatcatcagtgctatgacacataactacctaagactggtgcacgtttggctggatgaatataaggagcagttttttcttcgaaagcctggtctgaaatatgtcacctacggaaatattcgcgagcgtgttgagttaaggaaacgactgggttgcaagtcatttcagtggtatttggataatgtcttcccagagttggaggcatctgtgaacagcctgtgaaaggaaaacaaatcactttcattaataaagggttaaaagtctcctagtcattcaacatagtgtcacaagagtgtaagtttggaacatcgtggaattacgtgaaatgcaattaaaaaaatatgaccagacgtgagtg

SEQ ID NO: 2570 - DNA, 2147 bp, Homo sapiens
aggsggactgtactgccctttgagtactactgtgtggcccsgcaacccagcacaaccaggtatctgcttggaacccagccaccataaagcctgctagctaaaaaaaattttacatctctcagttcattcggcacagacccctgcctcattcacctgtgactctgcttggaaaattcatcagttacaaagcagccaatgcaattatctcaaggcattgaattctgcatcttttagtgaagaaaataactgaacatggttttcttctgaagacacaaagtccaaaggccaatcacacacctcttacatcgatctcttggaaattgaaaaatggacctttgaaaatgctagatttacaatgagaaatgccataattcaaggtttattctatgggtccttgacatttgggatctggacagctctgttattcatatatttgcaccataatcatgtgagcagctggcagaagaaaagccaggagcctctgtcagcttggtcccctggaaaaaaagtgcatcagcaaattatctatggctcagagcaaataccaaaacctcatgtaatagtcaaaaggactgatgaagataaagcaaagtctatgttaggtacagattttaaccatacaaacccagaacttcrtaaagaacttttaaaatatggatttaatgtgattatcagtagaagcttgggcatcgaaagagaagtgccagataccaggagtaaaatatgtactgtcaccttattaccataattatcagttgaaggagtaaagagtcaaaaagatgcaaataaggagaagtgtttgaacgagatgacacaacatccaaggcatttagatggatggttttcttcatattgcttctgcctgcaggygtcttcaaaaacattacccagcccgcctcccgactgccagcattgtcatttgcttctrtaatgaagaatgtaatgccttgtttcagaccatgtccagtgtcaygaacctcacgccacactattttcttgaagaaattattttggtasatgacatgagcaaagttgctatgaggagctattaagggcttaatgcaggaaaatgagatgatctaggaattccatgaaagaagcggaatcagaccaactgcagttaagaagaagatccctccttctgctgggattaccatgaacctgttcctgttcaacctgcccctgacccagattgctgggacttaggaatttagacctctgagatkatttgaaagraaaactagactatcacctggaaacttttcggggaaaggttaaaataataagaaacaaaaagagagaggsgctgattcgagcaaggctgattggagcttctcatgcttcaggggatgttctggtgttcctggacagccactgtgaggtgaacagagtatggctggagcccctgctgcatgccattgccaaggaccccaaaatggtggtgtgccccctgatagatgtcattgatgatagaactctggagtataagccctctcctcttgtaaggggaacttttgattggaacctacaatttaaatgggataatgttttctcttatgagatggatggaccagaaggatctactaaaccaatccggtcacctgcaatgtctggaggaatttttgctatacgtcggcattattttaatgaaattggacagtatgacaaggatatggatttttggggaagagaaaatttggaactttcactaaggatctggatgtgtggaggccaactctttataatcccctgctctcgagtaggacatatcagtaagaaacaaactggaaaaccttctacaatcatcagtgctatgacacataactacctaagactggtgcacgtttggctggatgaatataaggagcagttttttcttcgaaagcctggtctgaaatatgtcacctacggaaatattcgcgagcgtgttgagttaaggaaacgactgggttgcaagtcatttcagtggtatttggataatgtcttcccagagttggaggcatctgtgaacagcctgtgaaaggaaaacaaatcactttcattaataaagggttaaaagtctcctagtcattcaacatagtgtcacaagagtgtaagtttggaacatcgtggaattacgtgaaatgcaattaaaaaaatatgaccag

SEQ ID NO: 2571 - DNA, 2300 bp, Homo sapiens
aggsggactgtactgccctttgagtactactgtgtggcccsgcaacccagcacaaccaggtatctgcttggaacccagccaccataaagcctgctagctaaaaaaaattttacatctctcagttcattcggcacagacccctgcctcattcacctgtgactctgcttggaaaattcatcagttacaaagcagccaatgcaattatctcaaggcattgaattctgcatcttttagtgaagaaaataactgaacatggttttcttctgaagacacaaagtccaaaggccaatcacacacctcttacatcgatctcttggaaattgaaaaatggacctttgaaaatgctagatttacaatgagaaatgccataattcaaggtttattctatgggtccttgacatttgggatctggacagctctgttattcatatatttgcaccataatcatgtgagcagctggcagaagaaaagccaggagcctctgtcagcttggtcccctggaaaaaaagtgcatcagcaaattatctatggctcagagcaaataccaaaacctcatgtaatagtcaaaaggactgatgaagataaagcaaagtctatgttaggtacagattttaaccatacaaacccagaacttcrtaaagaacttttaaaatatggatttaatgtgattatcagtagaagcttgggcatcgaaagagaagtgccagataccaggagtaaaatatgtactgtcaccttattaccataattatcagttgaaggagtaaagagtcaaaaagatgcaaataaggagaagtgtttgaacgagatgacacaacatccaaggcatttagatggatggttttcttcatattgcttctgcctgcaggygtcttcaaaaacattacccagcccgcctcccgactgccagcattgtcatttgcttctrtaatgaagaatgtaatgccttgtttcagaccatgtccagtgtcaygaacctcacgccacactattttcttgaagaaattattttggtasatgacatgagcaaagttgctatgaggagctattaagggcttaatgcaggaaaatgagatgatctaggaattccatgaaagaagcggaatcagaccaactgcagttaaggcctggctcatggcgtcccacttttccctcctcttgctgcctyctacatcctggatgtgagtgaggtgtctggagatctttgagctgagatgctgcccaggcctgcaagtgcagctatgcagcctgtatccctgcctctttctaaaaacaaggaagaagatccctccttctgctgggattaccatgaacctgttcctgttcaacctgcccctgacccagattgctgggacttaggaatttagacctctgagatkatttgaaagraaaactagactatcacctggaaacttttcggggaaaggttaaaataataagaaacaaaaagagagaggsgctgattcgagcaaggctgattggagcttctcatgcttcaggggatgttctggtgttcctggacagccactgtgaggtgaacagagtatggctggagcccctgctgcatgccattgccaaggaccccaaaatggtggtgtgccccctgatagatgtcattgatgatagaactctggagtataagccctctcctcttgtaaggggaacttttgattggaacctacaatttaaatgggataatgttttctcttatgagatggatggaccagaaggatctactaaaccaatccggtcacctgcaatgtctggaggaatttttgctatacgtcggcattattttaatgaaattggacagtatgacaaggatatggatttttggggaagagaaaatttggaactttcactaaggatctggatgtgtggaggccaactctttataatcccctgctctcgagtaggacatatcagtaagaaacaaactggaaaaccttctacaatcatcagtgctatgacacataactacctaagactggtgcacgtttggctggatgaatataaggagcagttttttcttcgaaagcctggtctgaaatatgtcacctacggaaatattcgcgagcgtgttgagttaaggaaacgactgggttgcaagtcatttcagtggtatttggataatgtcttcccagagttggaggcatctgtgaacagcctgtgaaaggaaaacaaatcactttcattaataaagggttaaaagtctcctagtcattcaacatagtgtcacaagagtgtaagtttggaacatcgtggaattacgtgaaatgcaattaaaaaaatatgaccag

SEQ ID NO: 2572 - DNA, 1265 bp, Homo sapiens
agcgcctgcgcgacgcctggctgctgggccccggggcagttcagcccgcgccgctcctgcgggtcggactggggctgtggcgggagagaagatgccgcagcccgagtcccagaaggcggcgatcctgggctgcgggcaaggcggaaattgacaatggcccttcagctatgctaggtctataatgggaagtgtcacagttcggtatttctgttatgggtgcctttttacatctgcgacctggacagttttgctttttgtttatttcaacttcagtgaagtgactcagccacttaagaatgcctgtgactacagtgacccaaatcagatctggatctataatgaagagcatgaattggttttaaatagtctcctttgtctagatatgtcagagactcgctcatcagacccgccacggctcatgaaatgccacgggtcaggaggatcccagcagtggacctttgggaaaaacaatcggctataccaggtgtcggttggacagtgcctgagagcagtggatcccctgggtcagaagggctctgtcgccatggcgatctgcgatggctcctcttcacagcagtggcatttggaaggttaaggtggatgctgtggygggaacgttgcttcatcaggcgttgcctccggtgtggagtttggggctttaggaaagcctgggttgggtggagcagaaccatcttggagaagatgacagttccctgtcctcccggagatgcctgggtgtgttagcagaggtgacacgtgtctgacagagacgggagctctgagtgtccacgggtgaagaagtgagtgtccacgggtgaagaagtgagtatgtttcacctggacattaaggtgatgtttgagctgctgttaaggaatttcttgcttatagaggcaaaccacagtatcattttaactctagaattgggcttgtacagaaggataaaacccaggaaaatggatatttctattcagatttatttatgcctctttttaatcccctttaatgatgcagtggtttttatctgatcaggaacttgtcatgatttcctttcttagacttcataggagatagtgctttaaaaaaaaaaaaaacttctattatttgtttagtatgttgtaagtagatcattttaaaaaactgaatctatattatgtttaacttcagaaggcatcatttataagacagtatggcagttaattataaaattattttgatgaattatgatacaatctacataataaagaatccttttgattatttagga

SEQ ID NO: 2573 - DNA, 2580 bp, Homo sapiens
agttcagcccgcgccgctcctgcgggtcggactggggctgtggcggaaattgacaatggcccttcagctatgctaggtctataatgggaagtgtcacagttcggtatttctgttatgggtgcctttttacatctgcgacctggacagttttgctttttgtttatttcaacttcagtgaagtgactcagccacttaagaatgtgcccgtcaaggggtctgggccccacggaccatctccaaaaaaattctatccccgtttcactcgaggcccaagtcgagtgctcgagccacagttcaaagcaaacaaaattgacgatgtgatagacagtcgtgttgaagatccagaagaaggccacttgaaattctcttctgaattaggtatgatttttaatgaacgcgatcaagagttgagagacttgggctatcagaaacatgcttttaatatgcttatcagtgaccgcttgggctaccacagagatgtgccagacacaaggaatgcagcatgtaaagaaaagttctacccacctgacctgccagctgctagtgttgttatctgtttctataatgaagcgttttctgccttgcttcggacagtgcacagtgtcatagaccgcacgccagcacacctgcttcatgagatcatccttgtggatgatgatagtgactttgatkatttgaaaggagaactagatgaatatgtccaaaaatacctccctggaaaaattaaagtcataagaaatacaaagcgtgaggggttgattcgagggagaatgattggcgcggcccacgcgacaggagaagtccttgtgttcctggacagccactgtgaagtgaatgtgatgtggctgcagcccttgctggccgccatccgtgaggaccggcacaccgtggtgtgcccagtgattgacatcatcagcgccgacacgctggcctacagctcgtcccctgtcgtccgcggagggttcaactggggactgcacttcaaatgggatcttgtccccctttctgagctaggacgagcggagggagccactgcaccaataaagtcaccaacaatggctggaggtttgtttgccatgaacagacagtatttccatgaacttggacagtatgatagtggcatggatatctggggaggagaaaatttggaaatatcatttcggatctggatgtgtggcggtaagctcttcatcatcccttgctctagagtaggacacattttccgaaaaaggcgaccatatggatctcccgaaggccaggacaccatgacacacaactctttgcggctggcacatgtctggttggatgaatacaaggagcagtatttttccttaagacctgacctgaagacgaaaagctatggcaatatcagtgagcgtgtggaactgagaaagaagttgggctgtaaatcatttaaatggtatttggataatgtatacccagagatgcagatatctgggtcccacgccaaaccccaacaacccatttttgtcaatagagggccaaaacgacccaaagtccttcaacgtggaaggctctatcacctccagaccaacaaatgcctggtggcccagggccgcccaagtcagaagggaggtctcgtggtgcttaaggcctgtgactacagtgacccaaatcagatctggatctataatgaagagcatgaattggttttaaatagtctcctttgtctagatatgtcagagactcgctcatcagacccgccacggctcatgaaatgccacgggtcaggaggatcccagcagtggacctttgggaaaaacaatcggctataccaggtgtcggttggacagtgcctgagagcagtggatcccctgggtcagaagggctctgtcgccatggcgatctgcgatggctcctcttcacagcagtggcatttggaaggttaaggtggatgctgtggygggaacgttgcttcatcaggcgttgcctccggtgtggagtttggggctttaggaaagcctgggttgggtggagcagaaccatcttggagaagatgacagttccctgtcctcccggagatgcctgggtgtgttagcagaggtgacacgtgtctgacagagacgggagctctgagtgtccacgggtgaagaagtgagtgtccacgggtgaagaagtgagtatgtttcacctggacattaaggtgatgtttgagctgctgttaaggaatttcttgcttatagaggcaaaccacagtatcattttaactctagaattgggcttgtacagaaggataaaacccaggaaaatggatatttctattcagatttatttatgcctctttttaatcccctttaatgatgcagtggtttttatctgatcaggaacttgtcatgatttcctttcttagacttcataggagatagtgctttaaaaaaaaaaaaaacttctattatttgtttagtatgttgtaagtagatcattttaaaaaactgaatctatattatgtttaacttcagaaggcatcatttataagacagtatggcagttaattataaaattattttgatgaattatgatacaatctacataataaagaatccttttgattatttagga

SEQ ID NO: 2574 - DNA, 3457 bp, Homo sapiens
gcagcgctgcgtcctgctgcgcacgtgggaagccctggccccggccacccccgcgatgccgcgcgctccccgctgccgagccgtgcgctccctgctgcgcagccactaccgcgaggtgctgccgctggccacgttcgtgcggcgcctggggccccagggctggcggctggtgcagcgcggggacccggcggctttccgcgcgctggtggcccagtgcctggtgtgcgtgccctgggacgcacggccgccccccgccgccccctccttccgccaggtgtcctgcctgaaggagctggtggcccgagtgctgcagaggctgtgcgagcgcggcgcgaagaacgtgctggccttcggcttcgcgctgctggacggggcccgcgggggcccccccgaggccttcaccaccagcgtgcgcagctacctgcccaacacggtgaccgacgcactgcgggggagcggggcgtgggggctgctgctgcgccgcgtgggcgacgacgtgctggttcacctgctggcacgctgcgcgctctttgtgctggtggctcccagctgcgcctaccaggtgtgcgggccgccgctgtaccagctcggcgctgccactcaggcccggcccccgccacacgctagtggaccccgaaggcgtctgggatgcgaacgggcctggaaccatagcgtcagggaggccggggtccccctgggcctgccagccccgggtgcgaggaggcgcgggggcagtgccagccgaagtctgccgttgcccaagaggcccaggcgtggcgctgcccctgagccggagcggacgcccgttgggcaggggtcctgggcccacccgggcaggacgcgtggaccgagtgaccgtggtttctgtgtggtgtcacctgccagacccgccgaagaagccacctctttggagggtgcgctctctggcacgcgccactcccacccatccgtgggccgccagcaccacgcrggccccccatccacatcgcggccaccacgtccctgggacacgccttgtcccccggtgtacgccgagaccaagcacttcctctactcctcaggcgacaaggagcagctgcggccctccttcctactcagctctctgaggcccagcctgactggcgctcggaggctcgtggagaccatctttctgggttccaggccctggatgccagggactccccgcaggttgccccgcctgccccagcgctactggcaaatgcggcccctgtttctggagctgcttgggaaccacgcgcagtgcccctacggggtgctcctcaagacgcactgcccgctgcgagctgcggtcaccccagcagccggtgtctgtgcccgggagaagccccagggctctgtggcggcccccgaggaggaggacacagacccccgtcgcctggtgcagctgctccgccagcacagcagcccctggcaggtgtacggcttcgtgcgggcctgcctgcgccggctggtgcccccaggcctstggggctccaggcacaacgaacgccgcttcctcaggaacaccaagaagttcatctccctggggaagcatgccaagctctcgctgcaggagctgacgtggaagatgagcgtgcgggactgcgcttggctgcgcaggagcccaggggttggctgtgttccggccgcagagcaccgtctgcgtgaggagatcctggccaagttcctgcactggctgatgagtgtgtacgtcgtcgagctgctcaggtctttcttttatgtcacggagaccacgtttcaaaagaacaggctctttttctaccggaagagtgtctggagcaagttgcaaagcattggaatcagacagcacttgaagagggtgcagctgcgggagctgtcggaagcrgaggtcaggcagcatcgggaagccaggcccgccctgctgacgtccagactccgcttcatccccaagcctgacgggctgcggccgattgtgaacatggactacgtcgtgggagccagaacgttccgcagagaaaagagggccgagcgtctcacctcgagggtgaaggcactgttcagcgtgctcaactacgagcgggcgcggcgccccggcctcctgggygcctctgtgctgggcctggacgatatccacagggcctggcgcaccttcgtgctgcgtgtgcgggcccaggacccgccgcctgagctgtactttgtcaaggtggatgtgacgggcgcgtacgacaccatcccccaggacaggctcacggaggtcatcgccagcatcatcaaaccccagaacacgtactgcgtgcgtcggtatgccgtggtccagaaggccgcccatgggcacgtccgcaaggccttcaagagccacgtctctaccttgacagacctccagccgtacatgcgacagttcgtggctcacctgcaggagaccagcccgctgagggatgccgtcgtcatcgagcagagctcctccctgaatgaggccagcagtggcctcttcgacgtcttcctacgcttcatgtgccaccacgccgtgcgcatcaggggcaagtcctacgtccagtgccaggggatcccgcagggctccatcctctccacgctgctctgcagcctgtgctacggcgacatggagaacaagctgtttgcggggattcggcgggacgggctgctcctgcgtttggtggatgatttcttgttggtgacacctcacctcacccacgcgaaaaccttcctcaggaccctggtccgaggtgtccctgagtatggctgcgtggtgaacttgcggaagacagtggtgaacttccctgtagaagacgaggccctgggtggcacggcttttgttcagatgccggcccayggcctattcccctggtgcggcctgctgctggatacccggaccctggaggtgcagagcgactactccagmtatgcccggacctccatcagagccagtctcaccttcaaccgcggcttcaaggctgggaggaacatgcgtcgcaaactctttggggtcttgcggctgaagtgtcacagcctgtttctggatttgcaggtgaacagcctccagacggtgtgcaccaacatctacaagatcctcctgctgcaggcgtacaggtttcaygcatgtgtgctgcagctcccatttcatcagcaagtttggaagaaccccacatttttcctgcgcgtcatctctgacacggcctccctctgctactccatcctgaaagccaagaacgcagggatgtcgctgggggccaagggcgccgccggccctctgccctccgaggccgtgcagtggctgtgccaccaagcattcctgctcaagctgactcgacaccgtgtcacctacgtgccactcctggggtcactcaggacaggcaagtcccagacgcagctgagtcggaagctcccggggacgacgctgactgccctggaggccgcagccaacccggcactgccctcagacttcaagaccatcctggac

SEQ ID NO: 2575 - DNA, 1780 bp, Homo sapiens
gcagcgctgcgtcctgctgcgcacgtgggaagccctggccccggccacccccgcgatgccgcgcgctccccgctgccgagccgtgcgctccctgctgcgcagccactaccgcgaggtgctgccgctggccacgttcgtgcggcgcctggggccccagggctggcggctggtgcagcgcggggacccggcggctttccgcgcgctggtggcccagtgcctggtgtgcgtgccctgggacgcacggccgccccccgccgccccctccttccgccaggtgtcctgcctgaaggagctggtggcccgagtgctgcagaggctgtgcgagcgcggcgcgaagaacgtgctggccttcggcttcgcgctgctggacggggcccgcgggggcccccccgaggccttcaccaccagcgtgcgcagctacctgcccaacacggtgaccgacgcactgcgggggagcggggcgtgggggctgctgctgcgccgcgtgggcgacgacgtgctggttcacctgctggcacgctgcgcgctctttgtgctggtggctcccagctgcgcctaccaggtgtgcgggccgccgctgtaccagctcggcgctgccactcaggcccggcccccgccacacgctagtggaccccgaaggcgtctgggatgcgaacgggcctggaaccatagcgtcagggaggccggggtccccctgggcctgccagccccgggtgcgaggaggcgcgggggcagtgccagccgaagtctgccgttgcccaagaggcccaggcgtggcgctgcccctgagccggagcggacgcccgttgggcaggggtcctgggcccacccgggcaggacgcgtggaccgagtgaccgtggtttctgtgtggtgtcacctgccagacccgccgaagaagccacctctttggagggtgcgctctctggcacgcgccactcccacccatccgtgggccgccagcaccacgcrggccccccatccacatcgcggccaccacgtccctgggacacgccttgtcccccggtgtacgccgagaccaagcacttcctctactcctcaggcgacaaggagcagctgcggccctccttcctactcagctctctgaggcccagcctgactggcgctcggaggctcgtggagaccatctttctgggttccaggccctggatgccagggactccccgcaggttgccccgcctgccccagcgctactggcaaatgcggcccctgtttctggagctgcttgggaaccacgcgcagtgcccctacggggtgctcctcaagacgcactgcccgctgcgagctgcggtcaccccagcagccggtgtctgtgcccgggagaagccccagggctctgtggcggcccccgaggaggaggacacagacccccgtcgcctggtgcagctgctccgccagcacagcagcccctggcaggtgtacggcttcgtgcgggcctgcctgcgccggctggtgcccccaggcctstggggctccaggcacaacgaacgccgcttcctcaggaacaccaagaagttcatctccctggggaagcatgccaagctctcgctgcaggagctgacgtggaagatgagcgtgcgggactgcgcttggctgcgcaggagcccaggtgaggaggtggtggccgtcgagggcccaggccccagagctgaatgcagtaggggctcagaaaagggggcaggcagagccctggtcctcctgtctccatcgtcacgtgggcacacgtggcttttcgctcaggacgtmgagtggacacggtga

SEQ ID NO: 2576 - DNA, 4016 bp, Homo sapiens
gcagcgctgcgtcctgctgcgcacgtgggaagccctggccccggccacccccgcgatgccgcgcgctccccgctgccgagccgtgcgctccctgctgcgcagccactaccgcgaggtgctgccgctggccacgttcgtgcggcgcctggggccccagggctggcggctggtgcagcgcggggacccggcggctttccgcgcgctggtggcccagtgcctggtgtgcgtgccctgggacgcacggccgccccccgccgccccctccttccgccaggtgtcctgcctgaaggagctggtggcccgagtgctgcagaggctgtgcgagcgcggcgcgaagaacgtgctggccttcggcttcgcgctgctggacggggcccgcgggggcccccccgaggccttcaccaccagcgtgcgcagctacctgcccaacacggtgaccgacgcactgcgggggagcggggcgtgggggctgctgctgcgccgcgtgggcgacgacgtgctggttcacctgctggcacgctgcgcgctctttgtgctggtggctcccagctgcgcctaccaggtgtgcgggccgccgctgtaccagctcggcgctgccactcaggcccggcccccgccacacgctagtggaccccgaaggcgtctgggatgcgaacgggcctggaaccatagcgtcagggaggccggggtccccctgggcctgccagccccgggtgcgaggaggcgcgggggcagtgccagccgaagtctgccgttgcccaagaggcccaggcgtggcgctgcccctgagccggagcggacgcccgttgggcaggggtcctgggcccacccgggcaggacgcgtggaccgagtgaccgtggtttctgtgtggtgtcacctgccagacccgccgaagaagccacctctttggagggtgcgctctctggcacgcgccactcccacccatccgtgggccgccagcaccacgcrggccccccatccacatcgcggccaccacgtccctgggacacgccttgtcccccggtgtacgccgagaccaagcacttcctctactcctcaggcgacaaggagcagctgcggccctccttcctactcagctctctgaggcccagcctgactggcgctcggaggctcgtggagaccatctttctgggttccaggccctggatgccagggactccccgcaggttgccccgcctgccccagcgctactggcaaatgcggcccctgtttctggagctgcttgggaaccacgcgcagtgcccctacggggtgctcctcaagacgcactgcccgctgcgagctgcggtcaccccagcagccggtgtctgtgcccgggagaagccccagggctctgtggcggcccccgaggaggaggacacagacccccgtcgcctggtgcagctgctccgccagcacagcagcccctggcaggtgtacggcttcgtgcgggcctgcctgcgccggctggtgcccccaggcctstggggctccaggcacaacgaacgccgcttcctcaggaacaccaagaagttcatctccctggggaagcatgccaagctctcgctgcaggagctgacgtggaagatgagcgtgcgggactgcgcttggctgcgcaggagcccaggggttggctgtgttccggccgcagagcaccgtctgcgtgaggagatcctggccaagttcctgcactggctgatgagtgtgtacgtcgtcgagctgctcaggtctttcttttatgtcacggagaccacgtttcaaaagaacaggctctttttctaccggaagagtgtctggagcaagttgcaaagcattggaatcagacagcacttgaagagggtgcagctgcgggagctgtcggaagcrgaggtcaggcagcatcgggaagccaggcccgccctgctgacgtccagactccgcttcatccccaagcctgacgggctgcggccgattgtgaacatggactacgtcgtgggagccagaacgttccgcagagaaaagagggccgagcgtctcacctcgagggtgaaggcactgttcagcgtgctcaactacgagcgggcgcggcgccccggcctcctgggygcctctgtgctgggcctggacgatatccacagggcctggcgcaccttcgtgctgcgtgtgcgggcccaggacccgccgcctgagctgtactttgtcaaggtggatgtgacgggcgcgtacgacaccatcccccaggacaggctcacggaggtcatcgccagcatcatcaaaccccagaacacgtactgcgtgcgtcggtatgccgtggtccagaaggccgcccatgggcacgtccgcaaggccttcaagagccacgtctctaccttgacagacctccagccgtacatgcgacagttcgtggctcacctgcaggagaccagcccgctgagggatgccgtcgtcatcgagcagagctcctccctgaatgaggccagcagtggcctcttcgacgtcttcctacgcttcatgtgccaccacgccgtgcgcatcaggggcaagtcctacgtccagtgccaggggatcccgcagggctccatcctctccacgctgctctgcagcctgtgctacggcgacatggagaacaagctgtttgcggggattcggcgggacgggctgctcctgcgtttggtggatgatttcttgttggtgacacctcacctcacccacgcgaaaaccttcctcaggaccctggtccgaggtgtccctgagtatggctgcgtggtgaacttgcggaagacagtggtgaacttccctgtagaagacgaggccctgggtggcacggcttttgttcagatgccggcccayggcctattcccctggtgcggcctgctgctggatacccggaccctggaggtgcagagcgactactccagmtatgcccggacctccatcagagccagtctcaccttcaaccgcggcttcaaggctgggaggaacatgcgtcgcaaactctttggggtcttgcggctgaagtgtcacagcctgtttctggatttgcaggtgaacagcctccagacggtgtgcaccaacatctacaagatcctcctgctgcaggcgtacaggtttcaygcatgtgtgctgcagctcccatttcatcagcaagtttggaagaaccccacatttttcctgcgcgtcatctctgacacggcctccctctgctactccatcctgaaagccaagaacgcagggatgtcgctgggggccaagggcgccgccggccctctgccctccgaggccgtgcagtggctgtgccaccaagcattcctgctcaagctgactcgacaccgtgtcacctacgtgccactcctggggtcactcaggacaggcaagtacgcagctgagtcggaagctcccggggacgacgctgactgccctggaggccgcagccaacccggcactgccctcagacttcaagaccatcctggactgatggccacccgcccacagccaggccgagagcagacaccagcagccctgtcacgccgggctctacgtcccagggagggaggggcggcccacacccaggccygcaccgctgggagtctgaggcctgagtgagtgtttggccgaggcctgcatgtccggctgaaggctgagtgtccggctgaggcctgagcgagtgtccagccaagggctgagtgtccagcacacctgccgtcttcacttccccacaggctggcgctcggctccaccccagggccagcttttcctcaccaggagcccggcttccactccccacataggaatagtccatccccagattcgccattgttcacccctcgccctgccctcctttgccttccacccccaccatccaggtggagaccctgagaaggaccctgggagctctgggaatttggagtgaccaaaggtgtgccctgtacacaggcgaggaccctgcacctggatgggggtccctgtgggtcaaattggggggaggtgctgtgggagtaaaatactgaatatatgagtttttcagttttgaaaaaaa

SEQ ID NO: 2577 - DNA, 4033 bp, Homo sapiens
gatccagagcccggccttggggaccccagctcccacctgcgccctgccttccagatcagccaaccgcctgccatggagactttctttaggagacatttccgggggaaggtgccaggccctggagaggggcagcrgcggcccagcagcgyggggctgcccacaggcaaggcccggcgtcgctcccccgctgggcaggcctcctcctcactggcacagcggcgccgctccagcgcccagctccagggctgcctcctgagttgcggggtgagggcccagkgttccagccgccrgcgctccagcactgtgcccccttcctgcaacccccgcttcatcgtggataaggtgctcactccacagcctaccaccgtgggggcccagcttctgggtgcacccctgctgttgaccgggcttgtgggcatgaatgaggaggagggtgtccaggaggatgtggtagccgaggcatcgagcgccatccagccaggcacyaagacaccagggccacccccacctcggggcgcccagccgctgttgcccctaccccgctacctgcgccgagcctcctcccacctgctccccgcggatgccgtatatgaccacgctctctggggcctgcacggctactatcggcgcctcagccagcggcggccctcaggccagcaccctggccctgggggccgaagagcctcaggcaccaccgccggcaccatgctgcccacccgtgtgcgcccactgtcccgcaggcgccaggtagccctacggcgcaaggcggccggaccccaggcctggagcgccctgctcgcgaaagccatcaccaagtcgggcctccagcacctggccccccytccgcccacccctggggccccgtgcagcgagtcagagcggcagatccggagtacagtggactggagcgagtcagcgacatatggggagcacatctggttcgagaccaacgtgtccggggacttctgctacgttggggagcagtactgtgtagccaggatgctgaagtcagtgtctcgaagaaagtgcgcagcctgcaagattgtggtgcacacgccctgcatcgagcagctggagaagataaatttccgctgtaagccgtccttccgtgaatcaggctccaggaatgtccgsgagccaacctttgtacggcaccactgggtacacagacgacgccaggacggcaagtgtcggcactgtgggaagggattccagcagaagttcaccttccacagcaaggagattgtggccatcagctgctcgtggtgcaagcaggcataccacagcaaggtgtcctgcttcatgctgcagcagatcgaggagccgtgctcgctgggggtccacgcagccgtggtcatcccgcccacctggatcctccgcgcccggaggccccagaatactctgaaagcaagcaagaagaagaagagggcatccttcaagaggaagtccagcaagaaagggcctgaggagggccgctggagacccttcatcatcaggcccaccccctccccgctcatgaagcccctgctggtgtttgtgaaccccaagagtgggggcaaccagggtgcaaagatcatccagtctttcctctggtatctcaatccccgacaagtcttcgacctgagccagggagggcccaaggaggcgctggagatgtaccgcaaagtgcacaacctgcggatcctggcgtgcgggggcgacggcacggtgggctggatcctctccaccctggaccagctacgcctgaagccgccaccccctgttgccatcctgcccctgggtactggcaacgacttggcccgaaccctcaactggggtgggggctacacagatgagcctgtgtccaagatcctctcccacgtggaggaggggaacgtggtacagctggaccgctgggacctccacgctgagcccaaccccgaggcagggcctgaggaccgagatgaaggcgccaccgaccggttgcccctggatgtcttcaacaactacttcagcctgggctttgacgcccacgtcaccctggagttccacgagtctcgagaggccaacccagagaaattcaacagccgctttcggaataagatgttctaygccgggacagctttctctgacttcctgatgggcagctccaaggacctggccaagcacatccgagtggtgtgtgatggaatggacttgactcccaagatccaggacctgaaaccccagtgtgttgttttcctgaacatccccaggtactgtgcgggcaccatgccctggggccaccctggggagcaccacgactttgagccccagcggcatgacgacggctacctcgaggtcattggcttcaccatgacgtcgttggccgcgctgcaggtgggcggacacggcgagcggctgacgcagtgtcgcgaggtggtgctcaccacatccaaggccatcccggtgcaggtggatggcgagccctgcaagcttgcagcctcacgcatccgcatcgccctgcgcaaccaggccaccatggtgcagaaggccaagcggcggagcgccgcccccctgcacagcgaccagcagccggtgccagagcagttgcgcatccaggtgagtcgcgtcagcatgcacgactatgaggccctgcactacgacaaggagcagctcaaggaggcctctgtgccgctgggcactgtggtggtcccaggagacagtgacctagagctctgccgtgcccacattgagagactccagcaggagcccgatggtgctggagccaagtccccgacatgccagaaactgtcccccaagtggtgcttcctggacgccaccactgccagccgcttctacaggatcgaccgagcccaggagcacctcaactatgtgactgagatcgcacaggatgagatttatatcctggaccctgagctgctgggggcatcggcccggcctgacctcccaacccccacttcccctctccccacctcaccctgctcacccacgccccggtcactgcaaggggatgctgcaccccctcaaggtgaagagctgattgaggctgccaagaggaacgacttctgtaagctccaggagctgcaccgagctgggggcgacctcatgcaccgagacgagcagagtcgcacgctcctgcaccacgcagtcagcactggcagcaaggatgtggtccgctacctgctggaccacgcccccccagagatccttgatgcggtggaggaaaacggggagacctgtttgcaccaagcagcggccctgggccagcgcaccatctgccactacatcgtggaggccggggcctcgctcatgaagacagaccagcagggcgacactccccggcagcgggctgagaaggctcaggacaccgagctggccgcctacctggagaaccggcagcactaccagatgatccagcgggaggaccaggagacggctgtgtagcgggccgcccacgggcagcaggagggacaatgcggccaggggacgagcgccttccttgcccacctcactgccacattccagtgggacggccacggggggacctaggccccagggaaagagccccatgccgccccctaaggagccgcccagacctagggctggactcaggagctgggggggcctcacctgttcccctgaggaccccgccggacccggaggctcacagggaacaagacacggctgggttggatatgcctttgccggggttctggggcagggcgctccctggccgcagcagatgccctcccaggagtggaggggctggagagggggaggccttcgggaagaggcttcctgggccccctggtcttcggccgggtccccagcccccgctcctgccccaccccacctcctccgggcttcctcccggaaactcagcgcctgctgcacttgcctgccctgccttgcttggcacccgctccggcgaccctccccgctcccctgtcatttcatcgcggactgtgcggcctgggggtggggggcgggactctcacggtgacatgtttacagctgggtgtgactcagtaaagtggatttttttttcttt

SEQ ID NO: 2578 - DNA, 3588 bp, Homo sapiens
acttcctggagcggcggcggcagcggcttcccgggcacctgggcgtggggagcgggggcgcgcggcgcggggcgggcggagcgagcgcgcgccatggaggtggcgggcggcgcggagcgggcgtgctgaaccccggccgccggcccggcatgggcgtctcccgcgggccctccgccggccggggctagggccggatggagccgcgggacggtagccccgaggcccggagcagcgactccgagtcggcttccgcctcgtccagcggctccgagcgcgacgccggtcccgagccggacaaggcgccgcggcgactcaacaagcggcgcttcccggggctgcggctcttcgggcacaggaaagccatcaccaagtcgggcctccagcacctggccccccytccgcccacccctggggccccgtgcagcgagtcagagcggcagatccggagtacagtggactggagcgagtcagcgacatatggggagcacatctggttcgagaccaacgtgtccggggacttctgctacgttggggagcagtactgtgtagccaggatgctgaagtcagtgtctcgaagaaagtgcgcagcctgcaagattgtggtgcacacgccctgcatcgagcagctggagaagataaatttccgctgtaagccgtccttccgtgaatcaggctccaggaatgtccgsgagccaacctttgtacggcaccactgggtacacagacgacgccaggacggcaagtgtcggcactgtgggaagggattccagcagaagttcaccttccacagcaaggagattgtggccatcagctgctcgtggtgcaagcaggcataccacagcaaggtgtcctgcttcatgctgcagcagatcgaggagccgtgctcgctgggggtccacgcagccgtggtcatcccgcccacctggatcctccgcgcccggaggccccagaatactctgaaagcaagcaagaagaagaagagggcatccttcaagaggaagtccagcaagaaagggcctgaggagggccgctggagacccttcatcatcaggcccaccccctccccgctcatgaagcccctgctggtgtttgtgaaccccaagagtgggggcaaccagggtgcaaagatcatccagtctttcctctggtatctcaatccccgacaagtcttcgacctgagccagggagggcccaaggaggcgctggagatgtaccgcaaagtgcacaacctgcggatcctggcgtgcgggggcgacggcacggtgggctggatcctctccaccctggaccagctacgcctgaagccgccaccccctgttgccatcctgcccctgggtactggcaacgacttggcccgaaccctcaactggggtgggggctacacagatgagcctgtgtccaagatcctctcccacgtggaggaggggaacgtggtacagctggaccgctgggacctccacgctgagcccaaccccgaggcagggcctgaggaccgagatgaaggcgccaccgaccggttgcccctggatgtcttcaacaactacttcagcctgggctttgacgcccacgtcaccctggagttccacgagtctcgagaggccaacccagagaaattcaacagccgctttcggaataagatgttctaygccgggacagctttctctgacttcctgatgggcagctccaaggacctggccaagcacatccgagtggtgtgtgatggaatggacttgactcccaagatccaggacctgaaaccccagtgtgttgttttcctgaacatccccaggtactgtgcgggcaccatgccctggggccaccctggggagcaccacgactttgagccccagcggcatgacgacggctacctcgaggtcattggcttcaccatgacgtcgttggccgcgctgcaggtgggcggacacggcgagcggctgacgcagtgtcgcgaggtggtgctcaccacatccaaggccatcccggtgcaggtggatggcgagccctgcaagcttgcagcctcacgcatccgcatcgccctgcgcaaccaggccaccatggtgcagaaggccaagcggcggagcgccgcccccctgcacagcgaccagcagccggtgccagagcagttgcgcatccaggtgagtcgcgtcagcatgcacgactatgaggccctgcactacgacaaggagcagctcaaggaggcctctgtgccgctgggcactgtggtggtcccaggagacagtgacctagagctctgccgtgcccacattgagagactccagcaggagcccgatggtgctggagccaagtccccgacatgccagaaactgtcccccaagtggtgcttcctggacgccaccactgccagccgcttctacaggatcgaccgagcccaggagcacctcaactatgtgactgagatcgcacaggatgagatttatatcctggaccctgagctgctgggggcatcggcccggcctgacctcccaacccccacttcccctctccccacctcaccctgctcacccacgccccggtcactgcaaggggatgctgcaccccctcaaggtgaagagctgattgaggctgccaagaggaacgacttctgtaagctccaggagctgcaccgagctgggggcgacctcatgcaccgagacgagcagagtcgcacgctcctgcaccacgcagtcagcactggcagcaaggatgtggtccgctacctgctggaccacgcccccccagagatccttgatgcggtggaggaaaacggggagacctgtttgcaccaagcagcggccctgggccagcgcaccatctgccactacatcgtggaggccggggcctcgctcatgaagacagaccagcagggcgacactccccggcagcgggctgagaaggctcaggacaccgagctggccgcctacctggagaaccggcagcactaccagatgatccagcgggaggaccaggagacggctgtgtagcgggccgcccacgggcagcaggagggacaatgcggccaggggacgagcgccttccttgcccacctcactgccacattccagtgggacggccacggggggacctaggccccagggaaagagccccatgccgccccctaaggagccgcccagacctagggctggactcaggagctgggggggcctcacctgttcccctgaggaccccgccggacccggaggctcacagggaacaagacacggctgggttggatatgcctttgccggggttctggggcagggcgctccctggccgcagcagatgccctcccaggagtggaggggctggagagggggaggccttcgggaagaggcttcctgggccccctggtcttcggccgggtccccagcccccgctcctgccccaccccacctcctccgggcttcctcccggaaactcagcgcctgctgcacttgcctgccctgccttgcttggcacccgctccggcgaccctccccgctcccctgtcatttcatcgcggactgtgcggcctgggggtggggggcgggactctcacggtgacatgtttacagctgggtgtgactcagtaaagtggatttttttttcttt

SEQ ID NO: 2579 - DNA, 3572 bp, Homo sapiens
acttcctggagcggcggcggcagcggcttcccgggcacctgggcgtggggagcgggggcgcgcggcgcggggcgggcggagcgagcgcgcgccatggaggtggcgggcggcgcggagcgggcgtgctgaaccccggccgccggcccggcatgggcgtctcccgcgggccctccgccggccggggctagggccggatggagccgcgggacggtagccccgaggcccggagcagcgactccgagtcggcttccgcctcgtccagcggctccgagcgcgacgccggtcccgagccggacaaggcgccgcggcgactcaacaagcggcgcttcccggggctgcggctcttcgggcacaggaaagccatcaccaagtcgggcctccagcacctggccccccytccgcccacccctggggccccgtgcagcgagtcagagcggcagatccggagtacagtggactggagcgagtcagcgacatatggggagcacatctggttcgagaccaacgtgtccggggacttctgctacgttggggagcagtactgtgtagccaggatgctgcagaagtcagtgtctcgaagaaagtgcgcagcctgcaagattgtggtgcacacgccctgcatcgagcagctggagaagataaatttccgctgtaagccgtccttccgtgaatcaggctccaggaatgtccgsgagccaacctttgtacggcaccactgggtacacagacgacgccaggacggcaagtgtcggcactgtgggaagggattccagcagaagttcaccttccacagcaaggagattgtggccatcagctgctcgtggtgcaagcaggcataccacagcaaggtgtcctgcttcatgctgcagcagatcgaggagccgtgctcgctgggggtccacgcagccgtggtcatcccgcccacctggatcctccgcgcccggaggccccagaatactctgaaagcaagcaagaagaagaagagggcatccttcaagaggaagtccagcaagaaagggcctgaggagggccgctggagacccttcatcatcaggcccaccccctccccgctcatgaagcccctgctggtgtttgtgaaccccaagagtgggggcaaccagggtgcaaagatcatccagtctttcctctggtatctcaatccccgacaagtcttcgacctgagccagggagggcccaaggaggcgctggagatgtaccgcaaagtgcacaacctgcggatcctggcgtgcgggggcgacggcacggtgggctggatcctctccaccctggaccagctacgcctgaagccgccaccccctgttgccatcctgcccctgggtactggcaacgacttggcccgaaccctcaactggggtgggggctacacagatgagcctgtgtccaagatcctctcccacgtggaggaggggaacgtggtacagctggaccgctgggacctccacgctgagcccaaccccgaggcagggcctgaggaccgagatgaaggcgccaccgaccggttgcccctggatgtcttcaacaactacttcagcctgggctttgacgcccacgtcaccctggagttccacgagtctcgagaggccaacccagagaaattcaacagccgctttcggaataagatgttctaygccgggacagctttctctgacttcctgatgggcagctccaaggacctggccaagcacatccgagtggtgtgtgatggaatggacttgactcccaagatccaggacctgaaaccccagtgtgttgttttcctgaacatccccaggtactgtgcgggcaccatgccctggggccaccctggggagcaccacgactttgagccccagcggcatgacgacggctacctcgaggtcattggcttcaccatgacgtcgttggccgcgctgcaggtgggcggacacggcgagcggctgacgcagtgtcgcgaggtggtgctcaccacatccaaggccatcccggtgcaggtggatggcgagccctgcaagcttgcagcctcacgcatccgcatcgccctgcgcaaccaggccaccatggtgcagaaggccaagcggcggagcgccgcccccctgcacagcgaccagcagccggtgccagagcagttgcgcatccaggtgagtcgcgtcagcatgcacgactatgaggccctgcactacgacaaggagcagctcaaggaggcctctgtgccgctgggcactgtggtggtcccaggagacagtgacctagagctctgccgtgcccacattgagagactccagcaggagcccgatggtgctggagccaagtccccgacatgccagaaactgtcccccaagtggtgcttcctggacgccaccactgccagccgcttctacaggatcgaccgagcccaggagcacctcaactatgtgactgagatcgcacaggatgagatttatatcctggaccctgagctgctgggggcatcggcccggcctgacctcccaacccccacttcccctctccccacctcaccctgctcacccacgccccggtcactgcaaggggatgctgcaccccctcaaggtgaagagctgattgaggctgccaagaggaacgacttctgtaagctccaggagctgcaccgagctgggggcgacctcatgcaccgagacgagcagagtcgcacgctcctgcaccacgcagtcagcactggcagcaaggatgtggtccgctacctgctggaccacgcccccccagagatccttgatgcggtggaggaaaacggggagacctgtttgcaccaagcagcggccctgggccagcgcaccatctgccactacatcgtggaggccgggccctcctccagggcgacactccccggcagcgggctgagaaggctcaggacaccgagctggccgcctacctggagaaccggcagcactaccagatgatccagcgggaggaccaggagacggctgtgtagcgggccgcccacgggcagcaggagggacaatgcggccaggggacgagcgccttccttgcccacctcactgccacattccagtgggacggccacggggggacctaggccccagggaaagagccccatgccgccccctaaggagccgcccagacctagggctggactcaggagctgggggggcctcacctgttcccctgaggaccccgccggacccggaggctcacagggaacaagacacggctgggttggatatgcctttgccggggttctggggcagggcgctccctggccgcagcagatgccctcccaggagtggaggggctggagagggggaggccttcgggaagaggcttcctgggccccctggtcttcggccgggtccccagcccccgctcctgccccaccccacctcctccgggcttcctcccggaaactcagcgcctgctgcacttgcctgccctgccttgcttggcacccgctccggcgaccctccccgctcccctgtcatttcatcgcggactgtgcggcctgggggtggggggcgggactctcacggtgacatgtttacagctgggtgtgactcagtaaagtggatttttttttc

SEQ ID NO: 2580 - DNA, 3870 bp, Homo sapiens
gacgcgagatccgcgctcgccgccgcccgcccaggcggcgatgacacggcgcccgcggcggcccggaggcgccgggtgggccgtttgctgaccggatcgcggctacccgccagcgtgtccgcggcgccgccgccagcatgggctgtgccccgagcatccacatttccgagcgcctggtggccgaggacgcgcctagccccgcggcaccgccgctgtcgtccggcgggccgcgcctcccgcagggccagaagacggccgccttgccccggacccgcggcgccggcctcttggagtcggagcttcgcgacggcagcggcaagaaggtagcagtagctgatgtgcwgtttggccccatgagatttcatcaagatcaacttcaggtacttttagtgtttaccaaagaagataaccaatgtaatggattctgcagggcatgtgaaaaagcagggtttaagtgtacagttaccaaggaggctcaggctgtycttgcctgtttcctggacaaacatcatgacattatcatcatagaccacagaaatcctcgacagctggatgcagaggcactgtgcaggtctatcagatcatcaaaactctcagaaaacacagttattgttggtgtagtacgcagggtggatagagaagagttgtccgtaatgcctttcatttctgctggatttacaaggaggtatgtagaaaaccccaacatcatggcctgctacaatgaactgctccagctggagtttggagaggtgcgatcacaactgaaactcagggcttgtaactcagtattcactgcattagaaaacagtgaagatgcaattgaaattacaagcgaagaccgttttatacagtatgcaaatcctgcatttgaaacaacaatgggctatcagtcaggtgaattaatagggaaggagttaggagaagtgcctataaatgaaaaaaaggctgacttgctcgatactataaattcatgcatcaggataggcaaggagtggcaaggaatttactatgccaaaaagaraaacggagataatatacaacaaaatgtgaagataatacctgtcattggacagggaggaaaaattagacactatgtgtccattatcagagtgtgcaatggcaacaataaggctgagaaaatatccgaatgtgttcagtctgacactcatacagataatcagacaggcaaacataaagacaggagaaaaggctcactagacgtcaaagctgttgcctcccgtgcaactgaagtttccagccagagacgacactcttccatggcccggatacattccatgacaattgaggcgcccatcaccaaggtaatcaatattatcaatgctgcccaggaaagtagtcccatgcctgtgacagaagccctagaccgtgtgctggaaattctaagaaccactgagttatattcaccacagtttggtgctaaagatgatgatccccatgccaatgaccttgttgggggcttaatgtctgatggtttgcgaagactatcagggaatgaatatgttctttcaacaaaaaacactcaaatggtttcaagcaatataatcactcccatctcccttgatgatgtcccaccacggatagctcgggccatggaaaatgaggaatactgggactttgatatttttgaactggaggctgccacccacaataggcctttgatttatcttggtctcaaaatgtttgctcgctttggaatctgtgaattcttacactgctccgagtcaacgctaagatcatggttacaaattatcgaagccaattatcattcctccaatccctaccacaattctacacattctgctgatgtgcttcatgccactgcctattttctctccaaggagaggataaaggaaactttagatccaattgatgaggtcgctgcactcatcgcagccaccattcatgatgtggatcaccctgggagaaccaactccttcctgtgtaatgctggaagtgagctggccattttgtacaatgacactgctgtgctggagagccaccatgcggccttggccttccagctgaccactggagatgataaatgcaatatatttaaaaacatggagaggaatgattatcggacactgcgccaggggattatcgacatggtcttagccacagaaatgacaaagcactttgagcatgtcaacaaatttgtcaacagcatcaacaaacccttggcaacactagaagaaaatggggaaactgataaaaaccaggaagtgataaacactatgcttaggactccagagaaccggaccctaatcaaacgaatgctgattaaatgtgctgatgtgtccaatccctgccgacccctgcagtactgcatcgagtgggctgcacgcatttcggaagaatatttttctcagactgatgaagagaagcagcagggcttacctgtggtgatgccagtgtttgacagaaatacctgcagcatccccaaatcccaaatctctttcattgattacttcatcacagacatgtttgatgcttgggatgcctttgtagacctgcctgatttaatgcagcatcttgacaacaactttaaatactggaaaggactggacgaaatgaagctgcggaacctccgaccacctcctgaatagtgggagacaccacccagagccctgaagctttgttccttcggtcatttggaattcctgagggcagccagagctccttggtcctttcagtactaggcagaacagcccccgatctgcatagcctgtgaaagcccacggggacatcagtaaccttctgcagccaccatccaatgccattactgtcaagtgagacttggccactgtagcctgggcctgctgcaggagctcttcagaaaggcacatgaggaccacggtttgcctcagtttctggtaaaacacaaggtctggagtgcccctgcaaagggtattgatggacttcctgccagtgacagagcatgtctattgcaaacaattctctcagttacgttcagcacttaagaacggctaatggcaataggatctttagcaactttttcacatcatagaaggtgcaatcgctcacttgggaacactactgagagtgacttctcttttaaaattgagtagcagatgaaaaattaaaatttgaacttgattattaatatcaattaaaatgttttatttattttattaaaagctcaatattttctatgaattcaaaaatacttcagagccaaagccaacttcaaataccgtgaccaaatttacatgattcatattcattatgcattacttggtatacagacttattttcataatgcaaattaataaaatgacacttttactgcactatagaaatattcatgtatgttaaacttttctgattgaggctaactggaaaaagctggggtcgtattctaagtgctaaagaaggctgcttctactgtatagaacccagggctctgaaacagctctagccgcctaatgcacttcacaggtaactccccaaggtaaaactagactctcttgttggttcgcaaagaaaagttaggacttaacacttttttctaaaattttataattcaatttccaaaagtctactctattttatactgtttctacaaaatattccttataaaaacaaagaacaaaaattgaatatttaatgaattgacattttataaccaacctgtttttatctacggtgggaatctttgatgccagaaatttataaagaggttctgtatcttcacaccttgaataagcataataccataaaaaatgacacttgacatgtcaatgtatttgtcatttcattttaaactcgtatttgtggtttttttcccagataaaaatgaaattaaaccatttctttttaagaaatcat

SEQ ID NO: 2581 - DNA, 3726 bp, Homo sapiens
gacgcgagatccgcgctcgccgccgcccgcccaggcggcgatgacacggcgcccgcggcggcccggaggcgccgggtgggccgtttgctgaccggatcgcggctacccgccagcgtgtccgcggcgccgccgccagcatgggctgtgccccgagcatccacatttccgagcgcctggtggccgaggacgcgcctagccccgcggcaccgccgctgtcgtccggcgggccgcgcctcccgcagggccagaagacggccgccttgccccggacccgcggcgccggcctcttggagtcggagcttcgcgacggcagcggcaagaaggtagcagtagctgatgtgcwgtttggccccatgagatttcatcaagatcaacttcaggtacttttagtgtttaccaaagaagataaccaatgtaatggattctgcagggcatgtgaaaaagcagggtttaagtgtacagttaccaaggaggctcaggctgtycttgcctgtttcctggacaaacatcatgacattatcatcatagaccacagaaatcctcgacagctggatgcagaggcactgtgcaggtctatcagatcatcaaaactctcagaaaacacagttattgttggtgtagtacgcagggcttgtaactcagtattcactgcattagaaaacagtgaagatgcaattgaaattacaagcgaagaccgttttatacagtatgcaaatcctgcatttgaaacaacaatgggctatcagtcaggtgaattaatagggaaggagttaggagaagtgcctataaatgaaaaaaaggctgacttgctcgatactataaattcatgcatcaggataggcaaggagtggcaaggaatttactatgccaaaaagaraaacggagataatatacaacaaaatgtgaagataatacctgtcattggacagggaggaaaaattagacactatgtgtccattatcagagtgtgcaatggcaacaataaggctgagaaaatatccgaatgtgttcagtctgacactcatacagataatcagacaggcaaacataaagacaggagaaaaggctcactagacgtcaaagctgttgcctcccgtgcaactgaagtttccagccagagacgacactcttccatggcccggatacattccatgacaattgaggcgcccatcaccaaggtaatcaatattatcaatgctgcccaggaaagtagtcccatgcctgtgacagaagccctagaccgtgtgctggaaattctaagaaccactgagttatattcaccacagtttggtgctaaagatgatgatccccatgccaatgaccttgttgggggcttaatgtctgatggtttgcgaagactatcagggaatgaatatgttctttcaacaaaaaacactcaaatggtttcaagcaatataatcactcccatctcccttgatgatgtcccaccacggatagctcgggccatggaaaatgaggaatactgggactttgatatttttgaactggaggctgccacccacaataggcctttgatttatcttggtctcaaaatgtttgctcgctttggaatctgtgaattcttacactgctccgagtcaacgctaagatcatggttacaaattatcgaagccaattatcattcctccaatccctaccacaattctacacattctgctgatgtgcttcatgccactgcctattttctctccaaggagaggataaaggaaactttagatccaattgatgaggtcgctgcactcatcgcagccaccattcatgatgtggatcaccctgggagaaccaactccttcctgtgtaatgctggaagtgagctggccattttgtacaatgacactgctgtgctggagagccaccatgcggccttggccttccagctgaccactggagatgataaatgcaatatatttaaaaacatggagaggaatgattatcggacactgcgccaggggattatcgacatggtcttagccacagaaatgacaaagcactttgagcatgtcaacaaatttgtcaacagcatcaacaaacccttggcaacactagaagaaaatggggaaactgataaaaaccaggaagtgataaacactatgcttaggactccagagaaccggaccctaatcaaacgaatgctgattaaatgtgctgatgtgtccaatccctgccgacccctgcagtactgcatcgagtgggctgcacgcatttcggaagaatatttttctcagactgatgaagagaagcagcagggcttacctgtggtgatgccagtgtttgacagaaatacctgcagcatccccaaatcccaaatctctttcattgattacttcatcacagacatgtttgatgcttgggatgcctttgtagacctgcctgatttaatgcagcatcttgacaacaactttaaatactggaaaggactggacgaaatgaagctgcggaacctccgaccacctcctgaatagtgggagacaccacccagagccctgaagctttgttccttcggtcatttggaattcctgagggcagccagagctccttggtcctttcagtactaggcagaacagcccccgatctgcatagcctgtgaaagcccacggggacatcagtaaccttctgcagccaccatccaatgccattactgtcaagtgagacttggccactgtagcctgggcctgctgcaggagctcttcagaaaggcacatgaggaccacggtttgcctcagtttctggtaaaacacaaggtctggagtgcccctgcaaagggtattgatggacttcctgccagtgacagagcatgtctattgcaaacaattctctcagttacgttcagcacttaagaacggctaatggcaataggatctttagcaactttttcacatcatagaaggtgcaatcgctcacttgggaacactactgagagtgacttctcttttaaaattgagtagcagatgaaaaattaaaatttgaacttgattattaatatcaattaaaatgttttatttattttattaaaagctcaatattttctatgaattcaaaaatacttcagagccaaagccaacttcaaataccgtgaccaaatttacatgattcatattcattatgcattacttggtatacagacttattttcataatgcaaattaataaaatgacacttttactgcactatagaaatattcatgtatgttaaacttttctgattgaggctaactggaaaaagctggggtcgtattctaagtgctaaagaaggctgcttctactgtatagaacccagggctctgaaacagctctagccgcctaatgcacttcacaggtaactccccaaggtaaaactagactctcttgttggttcgcaaagaaaagttaggacttaacacttttttctaaaattttataattcaatttccaaaagtctactctattttatactgtttctacaaaatattccttataaaaacaaagaacaaaaattgaatatttaatgaattgacattttataaccaacctgtttttatctacggtgggaatctttgatgccagaaatttataaagaggttctgtatcttcacaccttgaataagcataataccataaaaaatgacacttgacatgtcaatgtatttgtcatttcattttaaactcgtatttgtggtttttttcccagataaaaatgaaattaaaccatttctttttaagaaatcat

SEQ ID NO: 2582 - DNA, 3732 bp, Homo sapiens
gacgcgagatccgcgctcgccgccgcccgcccaggcggcgatgacacggcgcccgcggcggcccggaggcgccgggtgggccgtttgctgaccggatcgcggctacccgccagcgtgtccgcggcgccgccgccagcatgggctgtgccccgagcatccacatttccgagcgcctggtggccgaggacgcgcctagccccgcggcaccgccgctgtcgtccggcgggccgcgcctcccgcagggccagaagacggccgccttgccccggacccgcggcgccggcctcttggagtcggagcttcgcgacggcagcggcaagaaggtagcagtagctgatgtgcwgtttggccccatgagatttcatcaagatcaacttcaggtacttttagtgtttaccaaagaagataaccaatgtaatggattctgcagggcatgtgaaaaagcagggtttaagtgtacagttaccaaggaggctcaggctgtycttgcctgtttcctggacaaacatcatgacattatcatcatagaccacagaaatcctcgacagctggatgcagaggcactgtgcaggtctatcagatcatcaaaactctcagaaaacacagttattgttggtgtagtacgcagggtggatagagaagagttgtccgtaatgcctttcatttctgctggatttacaaggaggtatgtagaaaaccccaacatcatggcctgctacaatgaactgctccagctggagtttggagaggtgcgatcacaactgaaactcagggcttgtaactcagtattcactgcattagaaaacagtgaagatgcaattgaaattacaagcgaagaccgttttatacaggagtggcaaggaatttactatgccaaaaagaraaacggagataatatacaacaaaatgtgaagataatacctgtcattggacagggaggaaaaattagacactatgtgtccattatcagagtgtgcaatggcaacaataaggctgagaaaatatccgaatgtgttcagtctgacactcatacagataatcagacaggcaaacataaagacaggagaaaaggctcactagacgtcaaagctgttgcctcccgtgcaactgaagtttccagccagagacgacactcttccatggcccggatacattccatgacaattgaggcgcccatcaccaaggtaatcaatattatcaatgctgcccaggaaagtagtcccatgcctgtgacagaagccctagaccgtgtgctggaaattctaagaaccactgagttatattcaccacagtttggtgctaaagatgatgatccccatgccaatgaccttgttgggggcttaatgtctgatggtttgcgaagactatcagggaatgaatatgttctttcaacaaaaaacactcaaatggtttcaagcaatataatcactcccatctcccttgatgatgtcccaccacggatagctcgggccatggaaaatgaggaatactgggactttgatatttttgaactggaggctgccacccacaataggcctttgatttatcttggtctcaaaatgtttgctcgctttggaatctgtgaattcttacactgctccgagtcaacgctaagatcatggttacaaattatcgaagccaattatcattcctccaatccctaccacaattctacacattctgctgatgtgcttcatgccactgcctattttctctccaaggagaggataaaggaaactttagatccaattgatgaggtcgctgcactcatcgcagccaccattcatgatgtggatcaccctgggagaaccaactccttcctgtgtaatgctggaagtgagctggccattttgtacaatgacactgctgtgctggagagccaccatgcggccttggccttccagctgaccactggagatgataaatgcaatatatttaaaaacatggagaggaatgattatcggacactgcgccaggggattatcgacatggtcttagccacagaaatgacaaagcactttgagcatgtcaacaaatttgtcaacagcatcaacaaacccttggcaacactagaagaaaatggggaaactgataaaaaccaggaagtgataaacactatgcttaggactccagagaaccggaccctaatcaaacgaatgctgattaaatgtgctgatgtgtccaatccctgccgacccctgcagtactgcatcgagtgggctgcacgcatttcggaagaatatttttctcagactgatgaagagaagcagcagggcttacctgtggtgatgccagtgtttgacagaaatacctgcagcatccccaaatcccaaatctctttcattgattacttcatcacagacatgtttgatgcttgggatgcctttgtagacctgcctgatttaatgcagcatcttgacaacaactttaaatactggaaaggactggacgaaatgaagctgcggaacctccgaccacctcctgaatagtgggagacaccacccagagccctgaagctttgttccttcggtcatttggaattcctgagggcagccagagctccttggtcctttcagtactaggcagaacagcccccgatctgcatagcctgtgaaagcccacggggacatcagtaaccttctgcagccaccatccaatgccattactgtcaagtgagacttggccactgtagcctgggcctgctgcaggagctcttcagaaaggcacatgaggaccacggtttgcctcagtttctggtaaaacacaaggtctggagtgcccctgcaaagggtattgatggacttcctgccagtgacagagcatgtctattgcaaacaattctctcagttacgttcagcacttaagaacggctaatggcaataggatctttagcaactttttcacatcatagaaggtgcaatcgctcacttgggaacactactgagagtgacttctcttttaaaattgagtagcagatgaaaaattaaaatttgaacttgattattaatatcaattaaaatgttttatttattttattaaaagctcaatattttctatgaattcaaaaatacttcagagccaaagccaacttcaaataccgtgaccaaatttacatgattcatattcattatgcattacttggtatacagacttattttcataatgcaaattaataaaatgacacttttactgcactatagaaatattcatgtatgttaaacttttctgattgaggctaactggaaaaagctggggtcgtattctaagtgctaaagaaggctgcttctactgtatagaacccagggctctgaaacagctctagccgcctaatgcacttcacaggtaactccccaaggtaaaactagactctcttgttggttcgcaaagaaaagttaggacttaacacttttttctaaaattttataattcaatttccaaaagtctactctattttatactgtttctacaaaatattccttataaaaacaaagaacaaaaattgaatatttaatgaattgacattttataaccaacctgtttttatctacggtgggaatctttgatgccagaaatttataaagaggttctgtatcttcacaccttgaataagcataataccataaaaaatgacacttgacatgtcaatgtatttgtcatttcattttaaactcgtatttgtggtttttttcccagataaaaatgaaattaaaccatttctttttaagaaatcat

SEQ ID NO: 2583 - DNA, 4970 bp, Homo sapiens
atgggatgtcaggtcgggaaccatccttggaaatcctgccgcggacttctctgcacagcatccctgtgacagtggaggtgaagccggtgctgccaagagccatgcccagttccatggggggtgggggtggaggcagccccagccctgtggagctacggggggctctggtgggctctgtggaccccacactgcgggagcagcaactgcagcaggagctcctggcgctcaagcagcagcagcagctgcagaagcagctcctgttcgctgagttccagaaacagcatgaccacctgacaaggcagcatgaggtccagctgcagaagcacctcaagcagcagcaggagatgctggcagccaagcagcagcaggagatgctggcagccaagcrgcagcaggagctggagcagcagcggcagcgggagcagcagcggcaggaagagctggagaagcagcggctggagcagcagctgctcatcctgcggaacaaggagaagagcaaagagagtgccattgccagcactgaggtaaagctgaggctccaggaattcctcttgtcgaagtcaaaggagcccacaccaggcggcctcaaccattccctcccacagcaccccaaatgctggggagcccaccatgcttctttggaccagagttcccctccccagagcggcccccctgggacgcctccctcctacaaactgcctttgcctgggccctacgacagtcgagacgacttccccctccgcaaaacagcctctgaacccaacttgaaagtgcgttcaaggctaaaacagaaggtggctgagcggagaagcagtcccctcctgcgtcgcaaggatgggactgttattagcacctttaagaagagagctgttgagatcacaggtgccgggcctggggcgtcgtccgtgtgtaacagcgcacccggctccggccccagctctcccaacagctcccacagcaccatcgctgagaatggctttactggctcagtccccaacatccccactgagatgctccctcagcaccgagccctccctctggacagctcccccaaccagttcagcctctacacgtctccttctctgcccaacatctccctagggctgcaggccacggtcactgtcaccaactcacacctcactgsctccccgaagctgtcgacacagcaggaggccgagaggcaggccctccagtccctgcggcagggtggcacgctgaccggcaagttcatgagcacatcctctattcctggctgcctgctgggcgtggcactggagggcgacgggagcccccacgggcatgcctccctgctgcagcatgtgctgttgctggagcaggcccggcagcagagcaccctcattgctgtgccactccacgggcagtccccactagtgacgggtgaacgtgtggccaccagcatgcggacggtaggcaagctcccgcggcatcggcccctgagccgcactcagtcctcaccgctgccgcagagtccccaggccctgcagcagctggtcatgcaacaacagcaccagcagttcctggagaagcagaagcagcagcagctacagctgggcaagatcctcaccaagacaggggagctgcccaggcagcccaccacccaccctgaggagacagaggaggagctgacggagcagcaggaggtcttgctggvggagggagccctgaccatgccccgggagggctccacagagagtgagagcacacaggaagacctggaggaggaggacgaggaagasgatggggaggaggaggaggattgcatccaggttaaggaygaggagggcgagagtggtgctgaggaggggcccgacttggaggagcctggtgctggatacaaaaaactgttctcagatgcccagccgctgcagcctttgcaggtgtaccaggcgcccctcagcctggccactgtgccccaccaggccctgggccgtacccagtcctcccctgctgcccctgggggcatgaagagccccccagaccagcccgtcaagcacctcttcaccacaggtgtggtctacgacacgttcatgctaaagcaccagtgcatgtgcgggaacacacacgtgcaccctgagcatgctggccggatccagagcatctggtcccggctgcaggagacaggcctgcttagcaagtgcgagcggatccgaggtcgcaaagccacgctagatgagatccagacagtgcactctgaataccacaccctgctctatgggaccagtcccctcaaccggcagaagctagacagcaagaagttgctcggccccatcagccagaagatgtatgctgtgctgccttgtgggggcatcggggtggacagtgacaccgtgtggaatgagatgcactcctccagtgctgtgcgcatggcagtgggctgcctgctggagctggccttcaaggtggctgcaggagagctcaagaatggatttgccatcatccggcccccaggacaccacgccgaggaatccacagccatgggattctgcttcttcaactctgtagccatcaccgcaaaactcctacagcagaagttgaacgtgggcaaggtcctcatcgtggactgggacattcaccatggcaatggcacccagcaggcgttctayaatgacccctctgtgctctacatctctctgcatcgctatgacaacgggaacttctttccaggctctggggctcctgaagaggttggtggaggaccaggcgtggggtacaatgtgaacgtggcatggacaggaggtgtggacccccccattggagacgtggagtaccttacagccttcaggacagtggtgatgcccattgcccacgagttctcacctgatgtggtcctagtctccgccgggtttgatgctgttgaaggacatctgtctcctctgggtggctactctgtcaccgccagatgttttggccacttgaccaggcagctgatgaccctggcagggggccgggtggtgctggccctggagggaggccatgacttgaccgccatctgtgatgcctctgaggcttgtgtctcggctctgctcagtgtagagctgcagcccttggatgaggcagtcttgcagcaaaagcccaacatcaacgcagtggccacgctagagaaagtcatcgagatccagagcaaacactggagctgtgtgcagaagttcgccgctggtctgggccggtccctgcgagaggcccaagcaggtgagaccgaggaggccgagactgtgagcgccatggccttgctgtcggtgggggccgagcaggcccaggctgcggcagcccgggaacacagccccaggccggcagaggagcccatggagcaggagcctgccctgtgacrccccggcccccatccctctgggcttcaccattgtgattttgtttattttttctattaaaaacaaaaagtcacacattcaacaaggtgtgccgtgtgggtctctcagccttgcccctcctgctcctctacgctgcctcaggcccccagccctgtggcttccacctcagctctagaagcctgctccctctgcagggggtggtggtgtcttcccagccctgtcccatgtgtccctccmcccattttcctgcattctgtctgtccttttcctccttggagcctgggccagctcaaggtgggcacgggggcccagacagtactctccagttctggggccccccgagtgaggagggaacgggaagtcggtgccttggtttcagctgatttggggggaaatgccttaatttcactctcctcccttctccagcctcaggggaggatctggaggatccactactgtctttaagatgcagagtggaggggaggtgggcacccaccctgcgattctccaccctttccccttctttcgtcctcaccatctctgcagacccctctcctcctccttcctcttggtctcagcactgatgggaggctggtgcccaagctgwggcctgcagtctgtgaggagggctgtcttgcctcacactcctcacagcctacttccccttccccggggctgagagggtgaaagtgtgtggggaaggagaggactggtttcctgggttctcaggggccaggaggagtaacagaaccaggtctgctccccaccttactcggatggcctccctgcccctctgctggcacagcctgggcaaggggagaaggtggtccctgcagaggggctccaggctggtgagagcccccctgctgtcaggaccagattttcccagccatccagcatgctgcggggagaaggggcagaggctcacctccctcctggggccttttgttttggatcctggggatggtgagaatggaggttctagaaggggtaaggccagaacccagggatccaggagtcggctctcagctggagcttccataccttctgggctccctttgctgaccaccagcccaagggagctaagaccaggagggggctgggcgctgtcccttctctttcccaggagccctgccaggggctgtgggcctacaaggcttccaggggatgccatccagcctgtaggaaaccaaagatgggaagtggctcctakggggctgactcttccttcctcctcctccccagtaccacatatactttctctccttctatcyccagggccccaccaatctgtttacatatttattatcctatgggggcctgagcaggattgagggagccaggggaggggcaggagtcccagcaccatcggttcatagtgtgcttgtgtgtttgttttagatcctcctgggrgatggggatggggccaggctcagtgtactaggcctctctgtgctgagccccaggctcccggccccttacccactctctccctgtggctggtctggttctcatgtaaacccactccttgctttgtctccctggatatggatttcagttaagtattttgtaacccgttacactgtgtgtccttgtgtaaataaacttgtttctggcagtgcc

SEQ ID NO: 2584 - DNA, 3806 bp, Homo sapiens
acgggagtgacgtctccgaatgttgttgttggtggcggcggcgagcggagccggaggagccgccgcaaagatggaggagccgtcgaggaggtgctgccgccgctgccgccgccgctgctgccgccgccgcccgcgaagccggagctcgagccgcagcggggatgccgttctgagtgcctgactgcctcgccccgaaggatggcctcggatgggcattagaggcacggcggccccgggctcccgtcccgtccgtctgtctgttatcgtctgtctctcttgacatcaccgcagctccaccccctcccgtcccagcccccaacgccagcttcctgcaggcccagagccggcatgaactctcccaacgagtcggatgggatgtcaggtcgggaaccatccttggaaatcctgccgcggacttctctgcacagcatccctgtgacagtggaggtgaagccggtgctgccaagagccatgcccagttccatggggggtgggggtggaggcagccccagccctgtggagctacggggggctctggtgggctctgtggaccccacactgcgggagcagcaactgcagcaggagctcctggcgctcaagcagcagcagcagctgcagaagcagctcctgttcgctgagttccagaaacagcatgaccacctgacaaggcagcatgaggtccagctgcagaagcacctcaagcagcagcaggagatgctggcagccaagcagcagcaggagatgctggcagccaagcrgcagcaggagctggagcagcagcggcagcgggagcagcagcggcaggaagagctggagaagcagcggctggagcagcagctgctcatcctgcggaacaaggagaagagcaaagagagtgccattgccagcactgaggtaaagctgaggctccaggaattcctcttgtcgaagtcaaaggagcccacaccaggcggcctcaaccattccctcccacagcaccccaaatgctggggagcccaccatgcttctttggaccagagttcccctccccagagcggcccccctgggacgcctccctcctacaaactgcctttgcctgggccctacgacagtcgagacgacttccccctccgcaaaacagcctctgaacccaacttgaaagtgcgttcaaggctaaaacagaaggtggctgagcggagaagcagtcccctcctgcgtcgcaaggatgggactgttattagcacctttaagaagagagctgttgagatcacaggtgccgggcctggggcgtcgtccgtgtgtaacagcgcacccggctccggccccagctctcccaacagctcccacagcaccatcgctgagaatggctttactggctcagtccccaacatccccactgagatgctccctcagcaccgagccctccctctggacagctcccccaaccagttcagcctctacacgtctccttctctgcccaacatctccctagggctgcaggccacggtcactgtcaccaactcacacctcactgsctccccgaagctgtcgacacagcaggaggccgagaggcaggccctccagtccctgcggcagggtggcacgctgaccggcaagttcatgagcacatcctctattcctggctgcctgctgggcgtggcactggagggcgacgggagcccccacgggcatgcctccctgctgcagcatgtgctgttgctggagcaggcccggcagcagagcaccctcattgctgtgccactccacgggcagtccccactagtgacgggtgaacgtgtggccaccagcatgcggacggtaggcaagctcccgcggcatcggcccctgagccgcactcagtcctcaccgctgccgcagagtccccaggccctgcagcagctggtcatgcaacaacagcaccagcagttcctggagaagcagaagcagcagcagctacagctgggcaagatcctcaccaagacaggggagctgcccaggcagcccaccacccaccctgaggagacagaggaggagctgacggagcagcaggaggtcttgctggvggagggagccctgaccatgccccgggagggctccacagagagtgagagcacacaggaagacctggaggaggaggacgaggaagasgatggggaggaggaggaggattgcatccaggttaaggaygaggagggcgagagtggtgctgaggaggggcccgacttggaggagcctggtgctggatacaaaaaactgttctcagatgcccagccgctgcagcctttgcaggtgtaccaggcgcccctcagcctggccactgtgccccaccaggccctgggccgtacccagtcctcccctgctgcccctgggggcatgaagagccccccagaccagcccgtcaagcacctcttcaccacaggtgtggtctacgacacgttcatgctaaagcaccagtgcatgtgcgggaacacacacgtgcaccctgagcatgctggccggatccagagcatctggtcccggctgcaggagacaggcctgcttagcaagtgcgagcggatccgaggtcgcaaagccacgctagatgagatccagacagtgcactctgaataccacaccctgctctatgggaccagtcccctcaaccggcagaagctagacagcaagaagttgctcggccccatcagccagaagatgtatgctgtgctgccttgtgggggcatcggggtggacagtgacaccgtgtggaatgagatgcactcctccagtgctgtgcgcatggcagtgggctgcctgctggagctggccttcaaggtggctgcaggagagctcaagaatggatttgccatcatccggcccccaggacaccacgccgaggaatccacagccatgggattctgcttcttcaactctgtagccatcaccgcaaaactcctacagcagaagttgaacgtgggcaaggtcctcatcgtggactgggtaggcagtgagctggtggggctgggcaggggcgggtagagctaggaccagggtcagccttcaggaagtctcctcccccagccccaccttcaagcaccccagtcgtcctcatcctcgggtgctgggtgtgggtgcagaaggaagggcgctggggctcctgccggatgactaacgtcacattccaacagggctccctcctcaactatgaaagacatttagctcctgttccatcttggccctcacgttgcagtttcaagcaacgaaggggatttcctaccttgaacggtagtgacgctgccgccattgctagtagccgatatttcctcccaccccctacaattaggagcagactgtataccaggaacacaatgagtactttatggccacctcgagtagtaagaacgaggatgtccatttctgtgaacaaaggtgttgttgcgtgacttacccaaggccactcagctggggatgtcggcactgggtttcagaccaaggcttttggccccagcactctgctcttgctaccatgggtgcttcccaaaccctgctcctaatggtggaggcagaggcacacaccactctctgtgagctggggaagtagccaggaccaagcctcaggaaggacaaaatctcttggaagcccaattctggcttaaaaattcatgtaaatgttggatcctccttcagaatcttacgtgcttgtggttgggcacaatggctcaaagcctgtacctcccaaaatgctaggattacaggcatgagctacagtgctcagctgacaggtggmatttgaccattgggtcagagcgcgggccattttcccgatgcttctacctcccctcayaggacat

SEQ ID NO: 2585 - DNA, 5340 bp, Homo sapiens
acgggagtgacgtctccgaatgttgttgttggtggcggcggcgagcggagccggaggagccgccgcaaagatggaggagccgtcgaggaggtgctgccgccgctgccgccgccgctgctgccgccgccgcccgcgaagccggagctcgagccgcagcggggatgccgttctgagtgcctgactgcctcgccccgaaggatggcctcggatgggcattagaggcacggcggccccgggctcccgtcccgtccgtctgtctgttatcgtctgtctctcttgacatcaccgcagctccaccccctcccgtcccagcccccaacgccagcttcctgcaggcccagagccggcatgaactctcccaacgagtcggatgggatgtcaggtcgggaaccatccttggaaatcctgccgcggacttctctgcacagcatccctgtgacagtggaggtgaagccggtgctgccaagagccatgcccagttccatggggggtgggggtggaggcagccccagccctgtggagctacggggggctctggtgggctctgtggaccccacactgcgggagcagcaactgcagcaggagctcctggcgctcaagcagcagcagcagctgcagaagcagctcctgttcgctgagttccagaaacagcatgaccacctgacaaggcagcatgaggtccagctgcagaagcacctcaagcagcagcaggagatgctggcagccaagcagcagcaggagatgctggcagccaagcrgcagcaggagctggagcagcagcggcagcgggagcagcagcggcaggaagagctggagaagcagcggctggagcagcagctgctcatcctgcggaacaaggagaagagcaaagagagtgccattgccagcactgaggtaaagctgaggctccaggaattcctcttgtcgaagtcaaaggagcccacaccaggcggcctcaaccattccctcccacagcaccccaaatgctggggagcccaccatgcttctttggaccagagttcccctccccagagcggcccccctgggacgcctccctcctacaaactgcctttgcctgggccctacgacagtcgagacgacttccccctccgcaaaacagcctctgaacccaacttgaaagtgcgttcaaggctaaaacagaaggtggctgagcggagaagcagtcccctcctgcgtcgcaaggatgggactgttattagcacctttaagaagagagctgttgagatcacaggtgccgggcctggggcgtcgtccgtgtgtaacagcgcacccggctccggccccagctctcccaacagctcccacagcaccatcgctgagaatggctttactggctcagtccccaacatccccactgagatgctccctcagcaccgagccctccctctggacagctcccccaaccagttcagcctctacacgtctccttctctgcccaacatctccctagggctgcaggccacggtcactgtcaccaactcacacctcactgsctccccgaagctgtcgacacagcaggaggccgagaggcaggccctccagtccctgcggcagggtggcacgctgaccggcaagttcatgagcacatcctctattcctggctgcctgctgggcgtggcactggagggcgacgggagcccccacgggcatgcctccctgctgcagcatgtgctgttgctggagcaggcccggcagcagagcaccctcattgctgtgccactccacgggcagtccccactagtgacgggtgaacgtgtggccaccagcatgcggacggtaggcaagctcccgcggcatcggcccctgagccgcactcagtcctcaccgctgccgcagagtccccaggccctgcagcagctggtcatgcaacaacagcaccagcagttcctggagaagcagaagcagcagcagctacagctgggcaagatcctcaccaagacaggggagctgcccaggcagcccaccacccaccctgaggagacagaggaggagctgacggagcagcaggaggtcttgctggvggagggagccctgaccatgccccgggagggctccacagagagtgagagcacacaggaagacctggaggaggaggacgaggaagasgatggggaggaggaggaggattgcatccaggttaaggaygaggagggcgagagtggtgctgaggaggggcccgacttggaggagcctggtgctggatacaaaaaactgttctcagatgcccagccgctgcagcctttgcaggtgtaccaggcgcccctcagcctggccactgtgccccaccaggccctgggccgtacccagtcctcccctgctgcccctgggggcatgaagagccccccagaccagcccgtcaagcacctcttcaccacaggtgtggtctacgacacgttcatgctaaagcaccagtgcatgtgcgggaacacacacgtgcaccctgagcatgctggccggatccagagcatctggtcccggctgcaggagacaggcctgcttagcaagtgcgagcggatccgaggtcgcaaagccacgctagatgagatccagacagtgcactctgaataccacaccctgctctatgggaccagtcccctcaaccggcagaagctagacagcaagaagttgctcggccccatcagccagaagatgtatgctgtgctgccttgtgggggcatcggggtggacagtgacaccgtgtggaatgagatgcactcctccagtgctgtgcgcatggcagtgggctgcctgctggagctggccttcaaggtggctgcaggagagctcaagaatggatttgccatcatccggcccccaggacaccacgccgaggaatccacagccatgggattctgcttcttcaactctgtagccatcaccgcaaaactcctacagcagaagttgaacgtgggcaaggtcctcatcgtggactgggacattcaccatggcaatggcacccagcaggcgttctayaatgacccctctgtgctctacatctctctgcatcgctatgacaacgggaacttctttccaggctctggggctcctgaagaggttggtggaggaccaggcgtggggtacaatgtgaacgtggcatggacaggaggtgtggacccccccattggagacgtggagtaccttacagccttcaggacagtggtgatgcccattgcccacgagttctcacctgatgtggtcctagtctccgccgggtttgatgctgttgaaggacatctgtctcctctgggtggctactctgtcaccgccagatgttttggccacttgaccaggcagctgatgaccctggcagggggccgggtggtgctggccctggagggaggccatgacttgaccgccatctgtgatgcctctgaggcttgtgtctcggctctgctcagtgtagagctgcagcccttggatgaggcagtcttgcagcaaaagcccaacatcaacgcagtggccacgctagagaaagtcatcgagatccagagcaaacactggagctgtgtgcagaagttcgccgctggtctgggccggtccctgcgagaggcccaagcaggtgagaccgaggaggccgagactgtgagcgccatggccttgctgtcggtgggggccgagcaggcccaggctgcggcagcccgggaacacagccccaggccggcagaggagcccatggagcaggagcctgccctgtgacrccccggcccccatccctctgggcttcaccattgtgattttgtttattttttctattaaaaacaaaaagtcacacattcaacaaggtgtgccgtgtgggtctctcagccttgcccctcctgctcctctacgctgcctcaggcccccagccctgtggcttccacctcagctctagaagcctgctccctctgcagggggtggtggtgtcttcccagccctgtcccatgtgtccctccmcccattttcctgcattctgtctgtccttttcctccttggagcctgggccagctcaaggtgggcacgggggcccagacagtactctccagttctggggccccccgagtgaggagggaacgggaagtcggtgccttggtttcagctgatttggggggaaatgccttaatttcactctcctcccttctccagcctcaggggaggatctggaggatccactactgtctttaagatgcagagtggaggggaggtgggcacccaccctgcgattctccaccctttccccttctttcgtcctcaccatctctgcagacccctctcctcctccttcctcttggtctcagcactgatgggaggctggtgcccaagctgwggcctgcagtctgtgaggagggctgtcttgcctcacactcctcacagcctacttccccttccccggggctgagagggtgaaagtgtgtggggaaggagaggactggtttcctgggttctcaggggccaggaggagtaacagaaccaggtctgctccccaccttactcggatggcctccctgcccctctgctggcacagcctgggcaaggggagaaggtggtccctgcagaggggctccaggctggtgagagcccccctgctgtcaggaccagattttcccagccatccagcatgctgcggggagaaggggcagaggctcacctccctcctggggccttttgttttggatcctggggatggtgagaatggaggttctagaaggggtaaggccagaacccagggatccaggagtcggctctcagctggagcttccataccttctgggctccctttgctgaccaccagcccaagggagctaagaccaggagggggctgggcgctgtcccttctctttcccaggagccctgccaggggctgtgggcctacaaggcttccaggggatgccatccagcctgtaggaaaccaaagatgggaagtggctcctakggggctgactcttccttcctcctcctccccagtaccacatatactttctctccttctatcyccagggccccaccaatctgtttacatatttattatcctatgggggcctgagcaggattgagggagccaggggaggggcaggagtcccagcaccatcggttcatagtgtgcttgtgtgtttgttttagatcctcctgggrgatggggatggggccaggctcagtgtactaggcctctctgtgctgagccccaggctcccggccccttacccactctctccctgtggctggtctggttctcatgtaaacccactccttgctttgtctccctggatatggatttcagttaagtattttgtaacccgttacactgtgtgtccttgtgtaaataaacttgtttctggcagtgcc

SEQ ID NO: 2586 - DNA, 8008 bp, Homo sapiens
cggccgcgaggcccgccggccggcggggagctacgcccggacggccagcaggcccgcgggagtggggctgccgcggctgaggcgaggcgggccgcgcgcgtcggcgtcacagcccgcggcagaggcgcccagggcggccgggcccacgacgccgaaagcgccgctgcggttgccgcctcggaggctcccccgggccccggcggctggacccggcgcgggcgggaggctcgggcgggcggtccggcccgggactcgggtttgggcgaccaggaggtgccggtggccgcgctcggacccggtgagtggctccctagctccttttattgtcctttgtccttgggaggaaaagcaaaatgtccttgagcgcgcgagcaggagggggcggcgggccgggcctcgccgctcggctcttctcgcactgcccctccgtggtcgggggccggctctcgccggcgggatgcgcctcggtgccctgggcccgagtcgtagggtcctggggtagggggcacgcggggccccgctgcagagccygcgggcggcaggtgggcggggggcagcctcgtcgccgggactggatccgccgggaaaggggcggcgggtgaatgccggcgagagcccgaaggggatckggcgtggagagcccctttctgtcctggtgacttaagagattaaaattaatttggttgctgttggttctgaacaaataatgagttcttttatttgaggtatgccattttgaagactgagacgttggagttttatcctagaggataaaggaaatctttgggaaagtcagtattttatatagcaaaaatatgaacctcaaactgaatcctctaaaggccccatacaatgaagtagacattggtggaaacatttataaatacctgggcacaggacttcaaagcaaacacagattccccctcccccttaatatttaagaattaaaagatgatgagaaataaggacaaaagccaagaggaggacagttcgctacacagcaatgcatcgagtcactcagcctctgaagaagcttcgggttcagactcaggcagtcagtcggaaagtgagcagggaagtgatccaggaagtggacatggcagcgagtcgaacagcagctctgaatcttctgagagtcagtcggaatctgagagcgaatcagcaggttccaaatcccagccagtcctcccagaagccaaagagaagccagcctctaagaaggaacggatagctgatgtgaagaagatgtgggaagaatatcctgatgtttatggggtcaggcggtcaaaccgaagcagacaagaaccatcgcgatttaatattaaggaagaggcaagtagcgggtctgagagtgggagcccaaaaagaagaggccagaggcagctgaaaaaacaagaaaaatggaaacaggaaccctcagaagatgaacaggaacaaggcaccagtgcagagagtgagccagaacaaaaaaaagtaaaagccagaagacctgtccccagaagaacagtgcccaaacctcgtgttaaaaagcagccgaagactcagcgtggaaagagaaaaaagcaagattcttctgatgaggatgatgatgatgacgaagctcccaaaaggcagactcgtcgaagagcggctaaaaacgttagttacaaagaagatgatgactttgagactgactcagatgatctcattgaaatgactggagaaggagttgatgaacagcaagataatagtgaaactattgaaaaggtcttagattcaagactgggaaagaaaggagccactggagcatctactactgtatatgcgattgaagctaatggcgaccctagtggtgactttgacactgaaaaggatgaaggtgaaatccagtacctcatcaagtggaagggttggtcttacatccacagcacatgggagagtgaagaatccttacagcaacagaaagtgaagggcctaaaaaaactagagaacttcaagaaaaaagaggacgaaatcaaacaatggttagggaaagtttctcctgaagatgtagaatatttcaattgccaacaggagctggcttcagagttgaataaacagtatcagatagtagaaagagtaatagctgtgaagacaagtaaatctacattgggtcaaacagattttccagctcatagtcggaagccggcaccctcaaatgagcccgaatatctatgtaaatggatgggactcccctattcagagtgtagctgggaagatgaagccctcattggaaagaaattccagaattgcattgacagcttccacagtaggaacaactcaaaaaccatcccaacaagagaatgcaaggccctgaagcagagaccacgatttgtagctttaaagaaacaacctgcatatttaggaggggagaatctggaacttcgagattatcagctagaaggtctaaactggctagctcattcctggtgcaaaaataatagtgtaatccttgctgatgaaatgggcctaggaaagaccatccagaccatatcattcctctcctacctgttccaccaacaccagctgtatggcccctttcttatagtcgtccctttatccaccctcacctcatggcagagagagtttgaaatctgggcaccagagattaacgtagtggtttacataggtgacctgatgagcagaaatacgatacgggaatatgaatggattcattcccaaaccaaaagattgaagttcaacgcacttataacaacatatgagatcctcttgaaagataagactgtgctgggcagtattaactgggcctttctgggagtggatgaagcccatcggttgaagaatgatgactctttattgtataaaactctgattgatttcaagtccaaccataggctcctgattacggggacccctcttcagaattccctcaaagagctctggtccttgctgcactttattatgccggagaagtttgaattttgggaagattttgaagaagaccatgggaaggggagagaraatggctaccagagtcttcataaggtgctagagcctttccttctccggagagtcaaaaaagatgtggagaaatcccttcctgctaaagtggaacagattctcagggtggagatgtcagcccttcagaaacagtattacaagtggattctgaccaggaattacaaggctcttgccaaaggaacaagaggcagcacatctggttttcttaatattgtgatggaactgaaaaaatgttgcaaccactgctatctgattaaaccccctgaagaaaatgaaagggaaaatggacaggagattcttctgtccctcataaggagcagtgggaagttgattttattagacaaactgttgacaagacttcgagaaagggggaatcgagtgcttatcttctctcagatggtgagaatgttggatatcctggctgaatacctaactattaaacactatcctttccagcgtctggatggttccatcaagggagaaatccgaaaacaggcactggaccacttcaatgcagatgggtctgaggacttctgtttcctgctctcgacaagggctggtggcctgggaatcaatttggcttcagcggacacagtcgtcatctttgactctgactggaacccccagaatgacttgcaggcacaagcccgagcgcatagaattggtcaraagaagcaggtaaatatttaccgcttagttacaaaggggactgtggaggaggagatcatagaacgggccaaaaagaagatggtattagatcatctggtgattcagcgcatggacaccactggccggacgatcctggaaaacaactcaggaaggtccaactcaaatccttttaataaagaagagctgacagctattttgaaatttggagcagaggatctcttcaaagaactggaaggggaggaatcagaacctcaggaaatggatatagatgaaattttgcggttggctgaaacgagagagaatgaagtgtcaacaagtgcaacagatgaacttctatcacagtttaaggttgccaactttgcaacaatggaagatgaagaagagctagaagagcgtcctcacaaggactgggatgagatcattccagaggaacaaaggaaaaaagtagaggaggaagagcggcagaaggagctagaagaaatttatatgctgcctcgaattcggagttccactaaaaaggctcagacaaatgacagtgactctgacactgagtctaagaggcaggcccagagatcctctgcttctgagagtgaaacggaagactctgatgatgacaagaagccaaagcgcagagggcgtccgaggagtgtgcggaaggacctcgtggagggatttactgatgcagagatccgaaggttcatcaaggcttataagaagtttggtctccctcttgaacggctggagtgcatagcacgtgatgctgagctggtagataagtcggtggcagatctgaagcgcctgggtgaactgatccacaacagctgtgtgtcagcaatgcaggaataygaagagcagctgaaagaaaatgccagcgagggaaaaggaccagggaaaaggagaggtccaacaatcaagatatccggagttcaggttaatgtgaaatccattatccaacatgaagaggagtttgagatgctgcataaatctatccctgtggaccctgaagaaaaaaaaaaatactgcttaacctgtcgtgtcaaagctgcacattttgatgtagagtggggggtggaagatgattctcgcctgttgctggggatttatgaacatggctatggaaactgggagttaattaaaacagacccagagcttaaattaactgacaaaattctgccggtggagacagataaaaagcctcaggggaagcagctacagacccgagcggattacttgttgaagctgctcagaaagggtctggagaagaagggggctgtgacaggtggggaagaggccaaattaaagaagcggaagcctcgggtaaagaaggaaaacaaagtgcccaggctgaaagaggagcatggaattgagctttcatctcctaggcattcagataatccatcagaagagggagaagtgaaagatgatggcttggaaaaaagtccaatgaaaaaaaaacagaagaagaaagagaacaaggagaacaaggagaaacaaatgagttctaggaaagacaaagaaggggacaaggaaagaaagaagtcaaaagataagaaagagaagcctaaragtggtgatgccaaatcttcgagtaaatcaaagcgatctcagggtcctgtccatattacagcaggaagtgaacctgtccccattggagaggatgaggatgatgatctggaccaggagacattcagcatatgtaaggagaggatgaggcccgtgaaaaaggcactgaaacagctcgacaaacctgacaaggggctcaacgtgcaagaacagctggaacacacccggaactgcctgctgaaaatyggagaccggatagccgagtgccttaaagcctactcagatcaggagcacatcaaactctggaggaggaacctatggatttttgtttccaagtttacagaatttgatgctcgaaaactgcataagttatacaagatggctcataagaaaaggtctcaagaagaagaggagcaaaagaagaaagacgacgtgactgsgggtaagaaaccatttcgtccagaggcctcaggctccagccgggactctctgatatctcagtcccatacctcacacaaccttcaccctcagaagcctcatttgcctgcctcccatggcccacagatgcatggacacccaagagataactacaatcaccccaacaagagacacttcagtaatgcagatcgaggagactggcagagggaaagaaagttcaactatggtggtggcaacaacaatccaccatggggaagcgacaggcaccatcagtatgagcagcactggtacaaggaccaccattatggggaccggcgacatatggatgcccaccgttccggaagctatcgacccaacaacatgtccagaaagaggccttatgaccagtacagcagtgaccgagaccaccggggacacagagattattatgacaggtatgcaaaaggctgtgagacaccaggtgccaacctttgccaggagctgtttctagggagaaagtgacgyatacatgaatgtatttatctatcaaattactgaagatstcatcatgcatgtgtcagccacagcgaatcccatgtcttggttataggttttatgttttgttttstgggtcatagggagcacatttcacctgtgcaggaaaagagttttctgccgtcttttgaggaaatctagtgaagaggtcgccataaaatattagagtcaacaaccaaaattattaagctctgtgcgaggctgtcagccacactaggtatcagggatcccgagatgggtaccagcccacagtccttacctgccacgagcccataattgaagagtcaaagtcttctgaagctgcaccctctttacttcagtacaatgccaccagtagtacgatgagccraagctttacattgtgagagtagcaagtccagggagagctaaagaggttttatctgtatttcctaatttcaaatcttggataatttaacctcatagcagctttggttttccctgggctgatgatgtgcgtcatttgcactgtaccttgaatttacagtgggaaaatttcatataaacgtgtcaaagtcgtgctttgtttttggaagatctggtaacagcagcccgcattagcagagagctgtagctgagtagctgccacctcgttgggagactgcccctcgctcccacccttctctattgtctggacccagtgggcatcttgccctgcgttcttctagtaggtctgtatttctatttgatgtcactttccttttgcctgaaggactttttctgctggtgataaactctttcagtgtttgtatatatgcctgaaaaagtattttgccttcatttttgaaagtagtttttgctgagtgtatacatttttggctttacagtttctttcagtgctttaaagatgtacctctgctatttacttgcattgttttgtgatgaaaaatctgtcatccttatctttgttcctctttacataatgttccttttaaaaaaaatcactgattatgatgtgccttggtgtatttttccttggtttcttgtgcttggaaatttttgaacttcttggatctgtgggtttattgtttccataaaatttggaaatttttacaatcttcttcaaatattttttctgatcccccactctctcttcttctttggagattctcattacacctatattagcttgcttgaagttgtctcacagctcacttgtatyctgttgacttttaaaaaattatgctttctgtttcactgtggatagtttctattgctacctcttcaagttcactaatactttccttttcaatgtcaagactgctgtgaggcccatccagtgtactttgcattttatacattgtagttctaaaagttcggaaagttgtttttgggtctttttatatatgttctgtgtctaaccttytaaaacctggaacacagatataacaatggttttgatgtccttgtctgcgaatcttatcacttgggtcagtttcagttgatacctcctcactgtgggtcttgctcccctggtgctttctgtgcctagtaatttttgtcagatgccagatgtaacatttaccttgttgggtgctggatatttctgtattcctgtaagtattctggagctttgttatgagttgcaggttatttggaagcagtttcctttttcaggtcttgctgttaagattcgttaggtagaaccagagcagtgctcagtcaagggctaatgattgcccacccccaaggtaaagagcctcattgcactctacccaattgcgttagtctgttttgcaggaatacctgaggctgggtaatttatagagaaaagagttttatttgg

SEQ ID NO: 2587 - DNA, 8125 bp, Homo sapiens
taaagaaggaaaaacttgwatttatattatgaaattaaggttttacttttatttagcaatcatttcacccattgggggattaatttttaaaaagattagtacttagctgagctttagattctctaagaattatccctttttcaaaatggcttgataaaacaccacttcctgtccagggaggaagttattttagctcaaggactgaaatatttagcagatctttagacaaaaggaacaaattacatttctctctggcttaaaaagggtgcttgagccagagggggttaagaagccctcccccctccccctgttggggtggtctggaggggcagggaggtgtgggggtgggggtccttaggctccctgggatggaggatctgtctctctctctctctctcctttttttttttttggtggagatgaaggggtgggtctatggtacatcacctgagttgtggggtaaatgtagagagtgtcaatcaaaggcagagctctcagagctgggaaggaggctctagatggcggctgtgccttagagagagcgcgctctgctccctgcctttgcctcactttacgcaactttccctaactttcgggcagcctcagggggcccccgtagccccctgcctttcctagggacttactggggtcgattcgaacctttttttgggagaaaagcagcttttaggagctttcttttcgtgccttgttggaaagaagcagccgtactgagagcccaggtcgttgttttttccagcttagaagccatggcgcacctccatttttgtgcgctctcctaatgaggttttttttctttcggacctgttttagtattaattattgctttatttttttgaccagttaacatatttgagggttattttatttatttttcgttttttaacggaggattttgcctttatttttaattatttgggatctgatatttttctactagtagataggactcttggtttggacatactacatggatcagtaaatacctgggcacaggacttcaaagcaaacacagattccccctcccccttaatatttaagaattaaaagatgatgagaaataaggacaaaagccaagaggaggacagttcgctacacagcaatgcatcgagtcactcagcctctgaagaagcttcgggttcagactcaggcagtcagtcggaaagtgagcagggaagtgatccaggaagtggacatggcagcgagtcgaacagcagctctgaatcttctgagagtcagtcggaatctgagagcgaatcagcaggttccaaatcccagccagtcctcccagaagccaaagagaagccagcctctaagaaggaacggatagctgatgtgaagaagatgtgggaagaatatcctgatgtttatggggtcaggcggtcaaaccgaagcagacaagaaccatcgcgatttaatattaaggaagaggcaagtagcgggtctgagagtgggagcccaaaaagaagaggccagaggcagctgaaaaaacaagaaaaatggaaacaggaaccctcagaagatgaacaggaacaaggcaccagtgcagagagtgagccagaacaaaaaaaagtaaaagccagaagacctgtccccagaagaacagtgcccaaacctcgtgttaaaaagcagccgaagactcagcgtggaaagagaaaaaagcaagattcttctgatgaggatgatgatgatgacgaagctcccaaaaggcagactcgtcgaagagcggctaaaaacgttagttacaaagaagatgatgactttgagactgactcagatgatctcattgaaatgactggagaaggagttgatgaacagcaagataatagtgaaactattgaaaaggtcttagattcaagactgggaaagaaaggagccactggagcatctactactgtatatgcgattgaagctaatggcgaccctagtggtgactttgacactgaaaaggatgaaggtgaaatccagtacctcatcaagtggaagggttggtcttacatccacagcacatgggagagtgaagaatccttacagcaacagaaagtgaagggcctaaaaaaactagagaacttcaagaaaaaagaggacgaaatcaaacaatggttagggaaagtttctcctgaagatgtagaatatttcaattgccaacaggagctggcttcagagttgaataaacagtatcagatagtagaaagagtaatagctgtgaagacaagtaaatctacattgggtcaaacagattttccagctcatagtcggaagccggcaccctcaaatgagcccgaatatctatgtaaatggatgggactcccctattcagagtgtagctgggaagatgaagccctcattggaaagaaattccagaattgcattgacagcttccacagtaggaacaactcaaaaaccatcccaacaagagaatgcaaggccctgaagcagagaccacgatttgtagctttaaagaaacaacctgcatatttaggaggggagaatctggaacttcgagattatcagctagaaggtctaaactggctagctcattcctggtgcaaaaataatagtgtaatccttgctgatgaaatgggcctaggaaagaccatccagaccatatcattcctctcctacctgttccaccaacaccagctgtatggcccctttcttatagtcgtccctttatccaccctcacctcatggcagagagagtttgaaatctgggcaccagagattaacgtagtggtttacataggtgacctgatgagcagaaatacgatacgggaatatgaatggattcattcccaaaccaaaagattgaagttcaacgcacttataacaacatatgagatcctcttgaaagataagactgtgctgggcagtattaactgggcctttctgggagtggatgaagcccatcggttgaagaatgatgactctttattgtataaaactctgattgatttcaagtccaaccataggctcctgattacggggacccctcttcagaattccctcaaagagctctggtccttgctgcactttattatgccggagaagtttgaattttgggaagattttgaagaagaccatgggaaggggagagaraatggctaccagagtcttcataaggtgctagagcctttccttctccggagagtcaaaaaagatgtggagaaatcccttcctgctaaagtggaacagattctcagggtggagatgtcagcccttcagaaacagtattacaagtggattctgaccaggaattacaaggctcttgccaaaggaacaagaggcagcacatctggttttcttaatattgtgatggaactgaaaaaatgttgcaaccactgctatctgattaaaccccctgaagaaaatgaaagggaaaatggacaggagattcttctgtccctcataaggagcagtgggaagttgattttattagacaaactgttgacaagacttcgagaaagggggaatcgagtgcttatcttctctcagatggtgagaatgttggatatcctggctgaatacctaactattaaacactatcctttccagcgtctggatggttccatcaagggagaaatccgaaaacaggcactggaccacttcaatgcagatgggtctgaggacttctgtttcctgctctcgacaagggctggtggcctgggaatcaatttggcttcagcggacacagtcgtcatctttgactctgactggaacccccagaatgacttgcaggcacaagcccgagcgcatagaattggtcaraagaagcaggtaaatatttaccgcttagttacaaaggggactgtggaggaggagatcatagaacgggccaaaaagaagatggtattagatcatctggtgattcagcgcatggacaccactggccggacgatcctggaaaacaactcaggaaggtccaactcaaatccttttaataaagaagagctgacagctattttgaaatttggagcagaggatctcttcaaagaactggaaggggaggaatcagaacctcaggaaatggatatagatgaaattttgcggttggctgaaacgagagagaatgaagtgtcaacaagtgcaacagatgaacttctatcacagtttaaggttgccaactttgcaacaatggaagatgaagaagagctagaagagcgtcctcacaaggactgggatgagatcattccagaggaacaaaggaaaaaagtagaggaggaagagcggcagaaggagctagaagaaatttatatgctgcctcgaattcggagttccactaaaaaggctcagacaaatgacagtgactctgacactgagtctaagaggcaggcccagagatcctctgcttctgagagtgaaacggaagactctgatgatgacaagaagccaaagcgcagagggcgtccgaggagtgtgcggaaggacctcgtggagggatttactgatgcagagatccgaaggttcatcaaggcttataagaagtttggtctccctcttgaacggctggagtgcatagcacgtgatgctgagctggtagataagtcggtggcagatctgaagcgcctgggtgaactgatccacaacagctgtgtgtcagcaatgcaggaataygaagagcagctgaaagaaaatgccagcgagggaaaaggaccagggaaaaggagaggtccaacaatcaagatatccggagttcaggttaatgtgaaatccattatccaacatgaagaggagtttgagatgctgcataaatctatccctgtggaccctgaagaaaaaaaaaaatactgcttaacctgtcgtgtcaaagctgcacattttgatgtagagtggggggtggaagatgattctcgcctgttgctggggatttatgaacatggctatggaaactgggagttaattaaaacagacccagagcttaaattaactgacaaaattctgccggtggagacagataaaaagcctcaggggaagcagctacagacccgagcggattacttgttgaagctgctcagaaagggtctggagaagaagggggctgtgacaggtggggaagaggccaaattaaagaagcggaagcctcgggtaaagaaggaaaacaaagtgcccaggctgaaagaggagcatggaattgagctttcatctcctaggcattcagataatccatcagaagagggagaagtgaaagatgatggcttggaaaaaagtccaatgaaaaaaaaacagaagaagaaagagaacaaggagaacaaggagaaacaaatgagttctaggaaagacaaagaaggggacaaggaaagaaagaagtcaaaagataagaaagagaagcctaaragtggtgatgccaaatcttcgagtaaatcaaagcgatctcagggtcctgtccatattacagcaggaagtgaacctgtccccattggagaggatgaggatgatgatctggaccaggagacattcagcatatgtaaggagaggatgaggcccgtgaaaaaggcactgaaacagctcgacaaacctgacaaggggctcaacgtgcaagaacagctggaacacacccggaactgcctgctgaaaatyggagaccggatagccgagtgccttaaagcctactcagatcaggagcacatcaaactctggaggaggaacctatggatttttgtttccaagtttacagaatttgatgctcgaaaactgcataagttatacaagatggctcataagaaaaggtctcaagaagaagaggagcaaaagaagaaagacgacgtgactgsgggtaagaaaccatttcgtccagaggcctcaggctccagccgggactctctgatatctcagtcccatacctcacacaaccttcaccctcagaagcctcatttgcctgcctcccatggcccacagatgcatggacacccaagagataactacaatcaccccaacaagagacacttcagtaatgcagatcgaggagactggcagagggaaagaaagttcaactatggtggtggcaacaacaatccaccatggggaagcgacaggcaccatcagtatgagcagcactggtacaaggaccaccattatggggaccggcgacatatggatgcccaccgttccggaagctatcgacccaacaacatgtccagaaagaggccttatgaccagtacagcagtgaccgagaccaccggggacacagagattattatgacaggtatgcaaaaggctgtgagacaccaggtgccaacctttgccaggagctgtttctagggagaaagtgacgyatacatgaatgtatttatctatcaaattactgaagatstcatcatgcatgtgtcagccacagcgaatcccatgtcttggttataggttttatgttttgttttstgggtcatagggagcacatttcacctgtgcaggaaaagagttttctgccgtcttttgaggaaatctagtgaagaggtcgccataaaatattagagtcaacaaccaaaattattaagctctgtgcgaggctgtcagccacactaggtatcagggatcccgagatgggtaccagcccacagtccttacctgccacgagcccataattgaagagtcaaagtcttctgaagctgcaccctctttacttcagtacaatgccaccagtagtacgatgagccraagctttacattgtgagagtagcaagtccagggagagctaaagaggttttatctgtatttcctaatttcaaatcttggataatttaacctcatagcagctttggttttccctgggctgatgatgtgcgtcatttgcactgtaccttgaatttacagtgggaaaatttcatataaacgtgtcaaagtcgtgctttgtttttggaagatctggtaacagcagcccgcattagcagagagctgtagctgagtagctgccacctcgttgggagactgcccctcgctcccacccttctctattgtctggacccagtgggcatcttgccctgcgttcttctagtaggtctgtatttctatttgatgtcactttccttttgcctgaaggactttttctgctggtgataaactctttcagtgtttgtatatatgcctgaaaaagtattttgccttcatttttgaaagtagtttttgctgagtgtatacatttttggctttacagtttctttcagtgctttaaagatgtacctctgctatttacttgcattgttttgtgatgaaaaatctgtcatccttatctttgttcctctttacataatgttccttttaaaaaaaatcactgattatgatgtgccttggtgtatttttccttggtttcttgtgcttggaaatttttgaacttcttggatctgtgggtttattgtttccataaaatttggaaatttttacaatcttcttcaaatattttttctgatcccccactctctcttcttctttggagattctcattacacctatattagcttgcttgaagttgtctcacagctcacttgtatyctgttgacttttaaaaaattatgctttctgtttcactgtggatagtttctattgctacctcttcaagttcactaatactttccttttcaatgtcaagactgctgtgaggcccatccagtgtactttgcattttatacattgtagttctaaaagttcggaaagttgtttttgggtctttttatatatgttctgtgtctaaccttytaaaacctggaacacagatataacaatggttttgatgtccttgtctgcgaatcttatcacttgggtcagtttcagttgatacctcctcactgtgggtcttgctcccctggtgctttctgtgcctagtaatttttgtcagatgccagatgtaacatttaccttgttgggtgctggatatttctgtattcctgtaagtattctggagctttgttatgagttgcaggttatttggaagcagtttcctttttcaggtcttgctgttaagattcgttaggtagaaccagagcagtgctcagtcaagggctaatgattgcccacccccaaggtaaagagcctcattgcactctacccaattgcgttagtctgttttgcaggaatacctgaggctgggtaatttatagagaaaagagttttatttgg

SEQ ID NO: 2588 - DNA, 2396 bp, Homo sapiens
agctcctgccgccgccgcagccgctgccgccgcagcgaagaggccatgttgtgtggtgtgtggggcggggggaggaggaggagggagtaaagcctagagaggagacgggagagagacaccacacacacggcacaagatggccggagaggcagcagcaccccgagctgtcaggcgttccgccgcggccgcgaggcccgccggccggcggggagctacgcccggacggccagcaggcccgcgggagtggggctgccgcggctgaggcgaggcgggccgcgcgcgtcggcgtcacagcccgcggcagaggcgcccagggcggccgggcccacgacgccgaaagcgccgctgcggttgccgcctcggaggctcccccgggccccggcggctggacccggcgcgggcgggaggctcgggcgggcggtccggcccgggactcgggtttgggcgaccaggaggtgccggtggccgcgctcggacccggtgacttaagagattaaaattaatttggttgctgttggttctgaacaaataatgagttcttttatttgaggtatgccattttgaagactgagacgttggagttttatcctagaggataaaggaaatctttgggaaagtcagtattttatatagcaaaaatatgaacctcaaactgaatcctctaaaggccccatacaatgaagtagacattggtggaaacatttacacccagtcagcttgaagagtttcaaatggaccctaccactgagaaatcaagatggcagtctactatggggaattgaggaaaaatggattaatacaagagtcctgtgataatatacaaccaagacagggttcttttaacatggattccatgcagtgaatgaagacataggtttcttacccaacacaaatggacagtggatttgactttctaaagactttttttgtggacattttgacatttggagaagaaagatggcacactaacccagataatagtttttatgcctggaattttttgcagtttgatttgtatrcgtatgacctcttgaaatgttaatttttaataaaatttgtaacacttaaaaatttctcagtttgggtttttttttttaagtggaagtttaattaaatgtttagttttattttagtaatactttggcctttgtagttgccgagtggtaaagtgtactgaatatgaataaagctggtaaattggaaatggtgtaatcgaaaacattttacttggtttatgaagatttacgtttttcacaaagttgtgctcttagatggtcatttggtttaaatactgttttgtttgtgctttcatgaaacacctttcaaaacaactcaatgggtaataatagaatctgattttaatctgccacaagattttaatgaacttgaaacaaactgcttgttgctcgaaaattcaggatgagtgatacacatatacttctgaattattttgtgttgattgaaatggtttcttaagctttttaatactataaatacatcttgctatagaatattcatctgaatatttaaattaatgtctcctattgtcttactattagaggaagaagtgttggatttatgggttagggtccttggagtattcacaattttttaaatttgaaattatgtgtgtaatccattttatataactttgaagtrggattaatatcttgtatcgtctttattttgtacaattggggatttagaataaatgaattgcaccctgccatagattacttacgtttgmtttttaaatgccaggttttcatttattactaatcaactgataccagttttggtaactattacaaaggtggtaggcattattttggtagacaaaatgagttcttgattctgttttcccattttacatgagaagaataaatagttcaggttaaattgttttgtgttaatcatactgtttgtgattcatgtcaaatactgcagcatacacatccatggttaatacacgagcaccatttgttattgactgatgtgaggtggttggtctttgttaaattcaaaaatggaattttggatattgttcttgctacgaaatttatctttgtgtgtagagtatggaattgaaacagtttggattatggattttacctagattggacattgttgmttttgtttggtgtaaatctaaagtggatttcttcagtgagggagagacatggttctggcagattatgttgaataaggaaagttgattggatttttttgggtgtgtgaatatgcttgtctgaatggagtgcttggtaggatattgtttctggaattagtaatttgtttctgtggatctcatggttttgatatttaggagaatttgctttgtgacattactttgataatttgcaatcacgtatgtcctattgttaataacattgttg

SEQ ID NO: 2589 - DNA, 8126 bp, Homo sapiens
taaagaaggaaaaacttgwatttatattatgaaattaaggttttacttttatttagcaatcatttcacccattgggggattaatttttaaaaagattagtacttagctgagctttagattctctaagaattatccctttttcaaaatggcttgataaaacaccacttcctgtccagggaggaagttattttagctcaaggactgaaatatttagcagatctttagacaaaaggaacaaattacatttctctctggcttaaaaagggtgcttgagccagagggggttaagaagccctcccccctccccctgttggggtggtctggaggggcagggaggtgtgggggtgggggtccttaggctccctgggatggaggatctgtctctctctctctctctcctttttttttttttggtggagatgaaggggtgggtctatggtacatcacctgagttgtggggtaaatgtagagagtgtcaatcaaaggcagagctctcagagctgggaaggaggctctagatggcggctgtgccttagagagagcgcgctctgctccctgcctttgcctcactttacgcaactttccctaactttcgggcagcctcagggggcccccgtagccccctgcctttcctagggacttactggggtcgattcgaacctttttttgggagaaaagcagcttttaggagctttcttttcgtgccttgttggaaagaagcagccgtactgagagcccaggtcgttgttttttccagcttagaagccatggcgcacctccatttttgtgcgctctcctaatgaggttttttttctttcggacctgttttagtattaattattgctttatttttttgaccagttaacatatttgagggttattttatttatttttcgttttttaacggaggattttgcctttatttttaattatttgggatctgatatttttctactagtagataggactcttggtttggacatactacatggatcaggtaagttcacgatcattggacttcaaagcaaacacagattccccctcccccttaatatttaagaattaaaagatgatgagaaataaggacaaaagccaagaggaggacagttcgctacacagcaatgcatcgagtcactcagcctctgaagaagcttcgggttcagactcaggcagtcagtcggaaagtgagcagggaagtgatccaggaagtggacatggcagcgagtcgaacagcagctctgaatcttctgagagtcagtcggaatctgagagcgaatcagcaggttccaaatcccagccagtcctcccagaagccaaagagaagccagcctctaagaaggaacggatagctgatgtgaagaagatgtgggaagaatatcctgatgtttatggggtcaggcggtcaaaccgaagcagacaagaaccatcgcgatttaatattaaggaagaggcaagtagcgggtctgagagtgggagcccaaaaagaagaggccagaggcagctgaaaaaacaagaaaaatggaaacaggaaccctcagaagatgaacaggaacaaggcaccagtgcagagagtgagccagaacaaaaaaaagtaaaagccagaagacctgtccccagaagaacagtgcccaaacctcgtgttaaaaagcagccgaagactcagcgtggaaagagaaaaaagcaagattcttctgatgaggatgatgatgatgacgaagctcccaaaaggcagactcgtcgaagagcggctaaaaacgttagttacaaagaagatgatgactttgagactgactcagatgatctcattgaaatgactggagaaggagttgatgaacagcaagataatagtgaaactattgaaaaggtcttagattcaagactgggaaagaaaggagccactggagcatctactactgtatatgcgattgaagctaatggcgaccctagtggtgactttgacactgaaaaggatgaaggtgaaatccagtacctcatcaagtggaagggttggtcttacatccacagcacatgggagagtgaagaatccttacagcaacagaaagtgaagggcctaaaaaaactagagaacttcaagaaaaaagaggacgaaatcaaacaatggttagggaaagtttctcctgaagatgtagaatatttcaattgccaacaggagctggcttcagagttgaataaacagtatcagatagtagaaagagtaatagctgtgaagacaagtaaatctacattgggtcaaacagattttccagctcatagtcggaagccggcaccctcaaatgagcccgaatatctatgtaaatggatgggactcccctattcagagtgtagctgggaagatgaagccctcattggaaagaaattccagaattgcattgacagcttccacagtaggaacaactcaaaaaccatcccaacaagagaatgcaaggccctgaagcagagaccacgatttgtagctttaaagaaacaacctgcatatttaggaggggagaatctggaacttcgagattatcagctagaaggtctaaactggctagctcattcctggtgcaaaaataatagtgtaatccttgctgatgaaatgggcctaggaaagaccatccagaccatatcattcctctcctacctgttccaccaacaccagctgtatggcccctttcttatagtcgtccctttatccaccctcacctcatggcagagagagtttgaaatctgggcaccagagattaacgtagtggtttacataggtgacctgatgagcagaaatacgatacgggaatatgaatggattcattcccaaaccaaaagattgaagttcaacgcacttataacaacatatgagatcctcttgaaagataagactgtgctgggcagtattaactgggcctttctgggagtggatgaagcccatcggttgaagaatgatgactctttattgtataaaactctgattgatttcaagtccaaccataggctcctgattacggggacccctcttcagaattccctcaaagagctctggtccttgctgcactttattatgccggagaagtttgaattttgggaagattttgaagaagaccatgggaaggggagagaraatggctaccagagtcttcataaggtgctagagcctttccttctccggagagtcaaaaaagatgtggagaaatcccttcctgctaaagtggaacagattctcagggtggagatgtcagcccttcagaaacagtattacaagtggattctgaccaggaattacaaggctcttgccaaaggaacaagaggcagcacatctggttttcttaatattgtgatggaactgaaaaaatgttgcaaccactgctatctgattaaaccccctgaagaaaatgaaagggaaaatggacaggagattcttctgtccctcataaggagcagtgggaagttgattttattagacaaactgttgacaagacttcgagaaagggggaatcgagtgcttatcttctctcagatggtgagaatgttggatatcctggctgaatacctaactattaaacactatcctttccagcgtctggatggttccatcaagggagaaatccgaaaacaggcactggaccacttcaatgcagatgggtctgaggacttctgtttcctgctctcgacaagggctggtggcctgggaatcaatttggcttcagcggacacagtcgtcatctttgactctgactggaacccccagaatgacttgcaggcacaagcccgagcgcatagaattggtcaraagaagcaggtaaatatttaccgcttagttacaaaggggactgtggaggaggagatcatagaacgggccaaaaagaagatggtattagatcatctggtgattcagcgcatggacaccactggccggacgatcctggaaaacaactcaggaaggtccaactcaaatccttttaataaagaagagctgacagctattttgaaatttggagcagaggatctcttcaaagaactggaaggggaggaatcagaacctcaggaaatggatatagatgaaattttgcggttggctgaaacgagagagaatgaagtgtcaacaagtgcaacagatgaacttctatcacagtttaaggttgccaactttgcaacaatggaagatgaagaagagctagaagagcgtcctcacaaggactgggatgagatcattccagaggaacaaaggaaaaaagtagaggaggaagagcggcagaaggagctagaagaaatttatatgctgcctcgaattcggagttccactaaaaaggctcagacaaatgacagtgactctgacactgagtctaagaggcaggcccagagatcctctgcttctgagagtgaaacggaagactctgatgatgacaagaagccaaagcgcagagggcgtccgaggagtgtgcggaaggacctcgtggagggatttactgatgcagagatccgaaggttcatcaaggcttataagaagtttggtctccctcttgaacggctggagtgcatagcacgtgatgctgagctggtagataagtcggtggcagatctgaagcgcctgggtgaactgatccacaacagctgtgtgtcagcaatgcaggaataygaagagcagctgaaagaaaatgccagcgagggaaaaggaccagggaaaaggagaggtccaacaatcaagatatccggagttcaggttaatgtgaaatccattatccaacatgaagaggagtttgagatgctgcataaatctatccctgtggaccctgaagaaaaaaaaaaatactgcttaacctgtcgtgtcaaagctgcacattttgatgtagagtggggggtggaagatgattctcgcctgttgctggggatttatgaacatggctatggaaactgggagttaattaaaacagacccagagcttaaattaactgacaaaattctgccggtggagacagataaaaagcctcaggggaagcagctacagacccgagcggattacttgttgaagctgctcagaaagggtctggagaagaagggggctgtgacaggtggggaagaggccaaattaaagaagcggaagcctcgggtaaagaaggaaaacaaagtgcccaggctgaaagaggagcatggaattgagctttcatctcctaggcattcagataatccatcagaagagggagaagtgaaagatgatggcttggaaaaaagtccaatgaaaaaaaaacagaagaagaaagagaacaaggagaacaaggagaaacaaatgagttctaggaaagacaaagaaggggacaaggaaagaaagaagtcaaaagataagaaagagaagcctaaragtggtgatgccaaatcttcgagtaaatcaaagcgatctcagggtcctgtccatattacagcaggaagtgaacctgtccccattggagaggatgaggatgatgatctggaccaggagacattcagcatatgtaaggagaggatgaggcccgtgaaaaaggcactgaaacagctcgacaaacctgacaaggggctcaacgtgcaagaacagctggaacacacccggaactgcctgctgaaaatyggagaccggatagccgagtgccttaaagcctactcagatcaggagcacatcaaactctggaggaggaacctatggatttttgtttccaagtttacagaatttgatgctcgaaaactgcataagttatacaagatggctcataagaaaaggtctcaagaagaagaggagcaaaagaagaaagacgacgtgactgsgggtaagaaaccatttcgtccagaggcctcaggctccagccgggactctctgatatctcagtcccatacctcacacaaccttcaccctcagaagcctcatttgcctgcctcccatggcccacagatgcatggacacccaagagataactacaatcaccccaacaagagacacttcagtaatgcagatcgaggagactggcagagggaaagaaagttcaactatggtggtggcaacaacaatccaccatggggaagcgacaggcaccatcagtatgagcagcactggtacaaggaccaccattatggggaccggcgacatatggatgcccaccgttccggaagctatcgacccaacaacatgtccagaaagaggccttatgaccagtacagcagtgaccgagaccaccggggacacagagattattatgacaggtatgcaaaaggctgtgagacaccaggtgccaacctttgccaggagctgtttctagggagaaagtgacgyatacatgaatgtatttatctatcaaattactgaagatstcatcatgcatgtgtcagccacagcgaatcccatgtcttggttataggttttatgttttgttttstgggtcatagggagcacatttcacctgtgcaggaaaagagttttctgccgtcttttgaggaaatctagtgaagaggtcgccataaaatattagagtcaacaaccaaaattattaagctctgtgcgaggctgtcagccacactaggtatcagggatcccgagatgggtaccagcccacagtccttacctgccacgagcccataattgaagagtcaaagtcttctgaagctgcaccctctttacttcagtacaatgccaccagtagtacgatgagccraagctttacattgtgagagtagcaagtccagggagagctaaagaggttttatctgtatttcctaatttcaaatcttggataatttaacctcatagcagctttggttttccctgggctgatgatgtgcgtcatttgcactgtaccttgaatttacagtgggaaaatttcatataaacgtgtcaaagtcgtgctttgtttttggaagatctggtaacagcagcccgcattagcagagagctgtagctgagtagctgccacctcgttgggagactgcccctcgctcccacccttctctattgtctggacccagtgggcatcttgccctgcgttcttctagtaggtctgtatttctatttgatgtcactttccttttgcctgaaggactttttctgctggtgataaactctttcagtgtttgtatatatgcctgaaaaagtattttgccttcatttttgaaagtagtttttgctgagtgtatacatttttggctttacagtttctttcagtgctttaaagatgtacctctgctatttacttgcattgttttgtgatgaaaaatctgtcatccttatctttgttcctctttacataatgttccttttaaaaaaaatcactgattatgatgtgccttggtgtatttttccttggtttcttgtgcttggaaatttttgaacttcttggatctgtgggtttattgtttccataaaatttggaaatttttacaatcttcttcaaatattttttctgatcccccactctctcttcttctttggagattctcattacacctatattagcttgcttgaagttgtctcacagctcacttgtatyctgttgacttttaaaaaattatgctttctgtttcactgtggatagtttctattgctacctcttcaagttcactaatactttccttttcaatgtcaagactgctgtgaggcccatccagtgtactttgcattttatacattgtagttctaaaagttcggaaagttgtttttgggtctttttatatatgttctgtgtctaaccttytaaaacctggaacacagatataacaatggttttgatgtccttgtctgcgaatcttatcacttgggtcagtttcagttgatacctcctcactgtgggtcttgctcccctggtgctttctgtgcctagtaatttttgtcagatgccagatgtaacatttaccttgttgggtgctggatatttctgtattcctgtaagtattctggagctttgttatgagttgcaggttatttggaagcagtttcctttttcaggtcttgctgttaagattcgttaggtagaaccagagcagtgctcagtcaagggctaatgattgcccacccccaaggtaaagagcctcattgcactctacccaattgcgttagtctgttttgcaggaatacctgaggctgggtaatttatagagaaaagagttttatttgg

SEQ ID NO: 2590 - DNA, 2466 bp, Homo sapiens
taaagaaggaaaaacttgwatttatattatgaaattaaggttttacttttatttagcaatcatttcacccattgggggattaatttttaaaaagattagtacttagctgagctttagattctctaagaattatccctttttcaaaatggcttgataaaacaccacttcctgtccagggaggaagttattttagctcaaggactgaaatatttagcagatctttagacaaaaggaacaaattacatttctctctggcttaaaaagggtgcttgagccagagggggttaagaagccctcccccctccccctgttggggtggtctggaggggcagggaggtgtgggggtgggggtccttaggctccctgggatggaggatctgtctctctctctctctctcctttttttttttttggtggagatgaaggggtgggtctatggtacatcacctgagttgtggggtaaatgtagagagtgtcaatcaaaggcagagctctcagagctgggaaggaggctctagatggcggctgtgccttagagagagcgcgctctgctccctgcctttgcctcactttacgcaactttccctaactttcgggcagcctcagggggcccccgtagccccctgcctttcctagggacttactggggtcgattcgaacctttttttgggagaaaagcagcttttaggagctttcttttcgtgccttgttggaaagaagcagccgtactgagagcccaggtcgttgttttttccagcttagaagccatggcgcacctccatttttgtgcgctctcctaatgaggttttttttctttcggacctgttttagtattaattattgctttatttttttgaccagttaacatatttgagggttattttatttatttttcgttttttaacggaggattttgcctttatttttaattatttgggatctgatatttttctactagtagataggactcttggtttggacatactacatggatcaggtaagttcacgatcattggtgataattttaaagatttatttgtttaagtttgccttgttttctgtaaatacgagaaattcttggatgacgcaataagatacagagattgttatttgtatctagtgtgctactttgagaaagtttccttattgatagtgatgcttccactgttcggtttatcctgttgttttttcttttaaggaaaaaatagaaatatttagttttttggtgcttaccgttgttgtgttataacaatatcgttaacatcgtcaggactttgttcctgataataaaaagcatcgatagaagccgggaccttacctttctttcaacttttgacagtaaatacctgggcacaggacttcaaagcaaacacagattccccctcccccttaatatttaagaattaaaagatgatgagaaataaggacaaaagccaagaggaggacagttcgctacacagcaatgcatcgaggtatgagctatcaactttcttcctttttgtctttttttttgggggagaaacctcagcttacaattgtttaccttgacagacatggattgctgtctgttttattgtgtttttctaatttggattcgttttttaaagcatgaccttgagattgctaatatgccacaccctaattttttggtagcaatttatgaaagttgagttgtgacttaaggcctcttacagcagtcaaaaggtaaggtacctttattcaaaggggcctttactgtaatgtacagtttttctgtcagtaaatttcartttttaggtttttgtactgcagaaaaatgaccttgtcggtttagccattgctgcattgcaccattttacatacaaggcaaattttttctttgaagaatccaggatatctaaacttgtaactgagggccatagagaagccttgtagtagtaaattatagtaaatagacatatcagaaagttatatgaatgaaaaaatgtacatttaaaaacaaaatcacttaaaggaccctttgactgatgcctctcagtttatatttttatgtgactttatatttcttttgatacacttgacattttaggaaattttgatgtgatttatcaaaacctttacttgatggttagagttcctgcatttatgaaatcaaatctgtaataacagaaatcctggaatactcttaatatatacttctattttgtgtttgttactgtgattaatatttgcagttgtatattttacatttaaattattttaaggtttgcatttgtatgcttaagacattgatttcctgttggtagatgtattttatcctcacaatttagatgtagctgctttaaatttattgatgtatttcgacagagtcgtctggaatgctttatcttctgaagcttaaaaatgtactgtttgtgcaaatcatgatctgtttcacattccttggagtaccttgttagtgatgaagtaataaagcctctaagatgt

SEQ ID NO: 2591 - DNA, 6525 bp, Homo sapiens
cggccgcgaggcccgccggccggcggggagctacgcccggacggccagcaggcccgcgggagtggggctgccgcggctgaggcgaggcgggccgcgcgcgtcggcgtcacagcccgcggcagaggcgcccagggcggccgggcccacgacgccgaaagcgccgctgcggttgccgcctcggaggctcccccgggccccggcggctggacccggcgcgggcgggaggctcgggcgggcggtccggcccgggactcgggtttgggcgaccaggaggtgccggtggccgcgctcggacccggtgagtggctccctagctccttttattgtcctttgtccttgggaggaaaagcaaaatgtccttgagcgcgcgagcaggagggggcggcgggccgggcctcgccgctcggctcttctcgcactgcccctccgtggtcgggggccggctctcgccggcgggatgcgcctcggtgccctgggcccgagtcgtagggtcctggggtagggggcacgcggggccccgctgcagagccygcgggcggcaggtgggcggggggcagcctcgtcgccgggactggatccgccgggaaaggggcggcgggtgaatgccggcgagagcccgaaggggatckggcgtggagagcccctttctgtcctggtgacttaagagattaaaattaatttggttgctgttggttctgaacaaataatgagttcttttatttgaggtatgccattttgaagactgagacgttggagttttatcctagaggataaaggaaatctttgggaaagtcagtattttatatagcaaaaatatgaacctcaaactgaatcctctaaaggccccatacaatgaagtagacattggtggaaacatttataaatacctgggcacaggacttcaaagcaaacacagattccccctcccccttaatatttaagaattaaaagatgatgagaaataaggacaaaagccaagaggaggacagttcgctacacagcaatgcatcgagtcactcagcctctgaagaagcttcgggttcagactcaggcagtcagtcggaaagtgagcagggaagtgatccaggaagtggacatggcagcgagtcgaacagcagctctgaatcttctgagagtcagtcggaatctgagagcgaatcagcaggttccaaatcccagccagtcctcccagaagccaaagagaagccagcctctaagaaggaacggatagctgatgtgaagaagatgtgggaagaatatcctgatgtttatggggtcaggcggtcaaaccgaagcagacaagaaccatcgcgatttaatattaaggaagaggcaagtagcgggtctgagagtgggagcccaaaaagaagaggccagaggcagctgaaaaaacaaacagtgcccaaacctcgtgttaaaaagcagccgaagactcagcgtggaaagagaaaaaagcaagattcttctgatgaggatgatgatgatgacgaagctcccaaaaggcagactcgtcgaagagcggctaaaaacgttagttacaaagaagatgatgactttgagactgactcagatgatctcattgaaatgactggagaaggagttgatgaacagcaagataatagtgaaactattgaaaaggtcttagattcaagactgggaaagaaaggagccactggagcatctactactgtatatgcgattgaagctaatggcgaccctagtggtgactttgacactgaaaaggatgaaggtgaaatccagtacctcatcaagtggaagggttggtcttacatccacagcacatgggagagtgaagaatccttacagcaacagaaagtgaagggcctaaaaaaactagagaacttcaagaaaaaagaggacgaaatcaaacaatggttagggaaagtttctcctgaagatgtagaatatttcaattgccaacaggagctggcttcagagttgaataaacagtatcagatagtagaaagagtaatagctgtgaagacaagtaaatctacattgggtcaaacagattttccagctcatagtcggaagccggcaccctcaaatgagcccgaatatctatgtaaatggatgggactcccctattcagagtgtagctgggaagatgaagccctcattggaaagaaattccagaattgcattgacagcttccacagtaggaacaactcaaaaaccatcccaacaagagaatgcaaggccctgaagcagagaccacgatttgtagctttaaagaaacaacctgcatatttaggaggggagaatctggaacttcgagattatcagctagaaggtctaaactggctagctcattcctggtgcaaaaataatagtgtaatccttgctgatgaaatgggcctaggaaagaccatccagaccatatcattcctctcctacctgttccaccaacaccagctgtatggcccctttcttatagtcgtccctttatccaccctcacctcatggcagagagagtttgaaatctgggcaccagagattaacgtagtggtttacataggtgacctgatgagcagaaatacgatacgggaatatgaatggattcattcccaaaccaaaagattgaagttcaacgcacttataacaacatatgagatcctcttgaaagataagactgtgctgggcagtattaactgggcctttctgggagtggatgaagcccatcggttgaagaatgatgactctttattgtataaaactctgattgatttcaagtccaaccataggctcctgattacggggacccctcttcagaattccctcaaagagctctggtccttgctgcactttattatgccggagaagtttgaattttgggaagattttgaagaagaccatgggaaggggagagaraatggctaccagagtcttcataaggtgctagagcctttccttctccggagagtcaaaaaagatgtggagaaatcccttcctgctaaagtggaacagattctcagggtggagatgtcagcccttcagaaacagtattacaagtggattctgaccaggaattacaaggctcttgccaaaggaacaagaggcagcacatctggttttcttaatattgtgatggaactgaaaaaatgttgcaaccactgctatctgattaaaccccctgaagaaaatgaaagggaaaatggacaggagattcttctgtccctcataaggagcagtgggaagttgattttattagacaaactgttgacaagacttcgagaaagggggaatcgagtgcttatcttctctcagatggtgagaatgttggatatcctggctgaatacctaactattaaacactatcctttccagcgtctggatggttccatcaagggagaaatccgaaaacaggcactggaccacttcaatgcagatgggtctgaggacttctgtttcctgctctcgacaagggctggtggcctgggaatcaatttggcttcagcggacacagtcgtcatctttgactctgactggaacccccagaatgacttgcaggcacaagcccgagcgcatagaattggtcaraagaagcaggtaaatatttaccgcttagttacaaaggggactgtggaggaggagatcatagaacgggccaaaaagaagatggtattagatcatctggtgattcagcgcatggacaccactggccggacgatcctggaaaacaactcaggaaggtccaactcaaatccttttaataaagaagagctgacagctattttgaaatttggagcagaggatctcttcaaagaactggaaggggaggaatcagaacctcaggaaatggatatagatgaaattttgcggttggctgaaacgagagagaatgaagtgtcaacaagtgcaacagatgaacttctatcacagtttaaggttgccaactttgcaacaatggaagatgaagaagagctagaagagcgtcctcacaaggactgggatgagatcattccagaggaacaaaggaaaaaagtagaggaggaagagcggcagaaggagctagaagaaatttatatgctgcctcgaattcggagttccactaaaaaggctcagacaaatgacagtgactctgacactgagtctaagaggcaggcccagagatcctctgcttctgagagtgaaacggaagactctgatgatgacaagaagccaaagcgcagagggcgtccgaggagtgtgcggaaggacctcgtggagggatttactgatgcagagatccgaaggttggtggaggctctrttctcactgagcttgtttgaaagtgcrtactttgctcaaggtctttctcaggctcagacaaatgacagtgactctgacagtgagtccaagaggcaggcccagagatcctctgcttctgagagtgagacagaagagtctgatgatgacaagaagccaaagcgcagagggtgtcccaggagcgtgcggaaggaccctttgagatctttcctctgcatggacacagacctgcacatgttcatcaaggcttataagaagtttggtctccctcttgaacggctggagtgcatagcacgtgatgctgagctggtagataagtcggtggcagatctgaagcgcctgggtgaactgatccacaacagctgtgtgtcagcaatgcaggaataygaagagcagctgaaagaaaatgccagcgagggaaaaggaccagggaaaaggagaggtccaacaatcaagatatccggagttcaggttaatgtgaaatccattatccaacatgaagaggagtttgagatgctgcataaatctatccctgtggaccctgaagaaaaaaaaaaatactgcttaacctgtcgtgtcaaagctgcacattttgatgtagagtggggggtggaagatgattctcgcctgttgctggggatttatgaacatggctatggaaactgggagttaattaaaacagacccagagcttaaattaactgacaaagaggaaatccacgacggctgggatgctctagcagatgaagccacaagcccctcctacctgagttgttctaccctgttaacagcacagattctgccggtggagacagataaaaagcctcaggggaagcagctacagacccgagcggattacttgttgaagctgctcagaaagggtctggagaagaagggggctgtgacaggtggggaagaggccaaattaaagaagcggaagcctcgggtaaagaaggaaaacaaagtgcccaggctgaaagaggagcatggaattgagctttcatctcctaggcattcagataatccatcagaagagggagaagtgaaacctaaragtggtgatgccaaatcttcgagtaaatcaaagcgatctcagggtcctgtccatattacagcaggaagtgaacctgtccccattggagaggatgaggatgatgatctggaccaggagacattcagcatatgtaaggagaggatgaggcccgtgaaaaaggcactgaaacagctcgacaaacctgacaaggggctcaacgtgcaagaacagctggaacacacccggaactgcctgctgaaaatyggagaccggatagccgagtgccttaaagcctactcagatcaggagcacatcaaactctggaggaggaacctatggatttttgtttccaagtttacagaatttgatgctcgaaaactgcataagttatacaagatggctcataagaaaaggtctcaagaagaagaggagcaaaagaagaaagacgacgtgactgsgggtaagaaaccatttcgtccagaggcctcaggctccagccgggactctctgatatctcagtcccatacctcacacaaccttcaccctcagaagcctcatttgcctgcctcccatggcccacagatgcatggacacccaagagataactacaatcaccccaacaagagacacttcagtaatgcagatcgaggagactggcagagggaaagaaagttcaactatggtggtggcaacaacaatccaccatggggaagcgacaggcaccatcagtatgagcagcactggtacaaggaccaccattatggggaccggcgacatatggatgcccaccgttccggaagctatcgacccaacaacatgtccagaaagaggccttatgaccagtacagcagtgaccgagaccaccggggacacagagattattatgacaggcaccatcatgactccaagcggaggagatccgatgaatttaggcctcaaaattaccaccagcaggatttccgacgaatgtctgatcaccgccccgctatgggctaccatggccagggaccctcagaccattaccgctctttccacacagataaactgggggaatataaacagcctctacccccattgcaccctgcagtctcagatcctcgctcacccccttctcagaaatctcctcacgattccaagtcacccctggatcataggtctcctttggagagatcactagaacagaaaaacaacccagattataactggaatgttcggaaaacataa

SEQ ID NO: 2592 - DNA, 3116 bp, Homo sapiens
gcgctggcggggcgggcggcggcgctcggagtcgccgggagctgccaggctgctccgcgcgccgctgcggggccatgatccggaacgggcgcggggctgcaggcggcgcagagcagccgggcccggggggcaggcgcgccgtgagggtgtggtgcgatggctgctatgacatggtgcattacggccactccaaccagctgcgccaggcacgggccatgggtgactacctcatcgtaggcgtgcacaccgatgaggagatcgccaagcacaaggggcccccggtgttcactcaggaggagagatacaagatggtgcaggccatcaaatgggtggacgaggtggtgccagcggctccctacgtcactacactagagaccctggacaaayacaactgtgacttctgtgttcacggcaatgacatcaccctgactgtagatggccgggacacctatgaggaagtaaagcaggctgggaggtacagagaatgcaagcgcacgcaaggggtgtccaccacagacctcgtgggccgcatgctgctggtaaccaaagcccatcacagcagccaggagatgtcctctgagtaccgggagtatgcagacagttttggcaagtgccctggtgggcggaacccytggaccggggtatcccagttcctgcagacatctcagaagatcatccagtttgcttctgggaaggagccccagccaggggagacagtcatctatgtggctggtgccttcgacctgttccacatcgggcatgtggacttcctggagaaggtgcacaggctggcagagaggccctacatcatcgcgggcttacactttgaccaggaggtcaatcactacaaggggaaraactaccccatcatgaatctgcatgaacggactctgagcgtgctggcctgccggtacgtgtcagaagtggtgattggagccccgtacgcggtcacagcagagctcctaagtcacttcaaggtggacctggtgtgtcacggcaagacagaaattatccctkacagggatggctccgacccataccaggagcccaagagaaggggcatcttccgtcagattgacagtggcagcaacctcaccacagacctcatcgtccagcggatcatcaccaacaggttggagtatgaggcgcgaaaccagaagaaggawgccaaggagctggccttcctggaggctgccaggcagcaggcggcacagcccctgggggagcgcgatggtgacttctaacctggcagaggccctggccggccctccccctgctctgcttctgygccttctgcgtttggacataggactctgcagggcygccctctctaactggcctggctctgsaagggctggtgaggactctgcctccttgcctgcctacaaggtgcctggtttgcagcaggctctccgctctttccagcaaagctgctcagagagggtgtccagcacagtggagaggccggaagtgagacgggcagacggcacctgcagcctgaaacgcaccgctcctgcgtgcgcccccacctggtccccggatgcccccaccacctggacagaggccacactgactgcccacccagctgtggcgggaggtgcagagcagagggctttagggagcagtgactgcggtcacccctttagttctctgggtgtagaccacaccacctcccactgggcaccccccaacacggtgtcctgccacccagcgcctggctccaggaaaacacgcttgccttccttcccggcagcttcgccactctccttatggactctgttctgtttgtacatggctgacggaaatctctttggtacaaccgaataaagcctggtggcagtgctgcgcggggctcccagccctgctgggaaggaccagggaaccactcagcaaggagaccctcttggccctgcccccaccatgcacccagcagccgggagtgcagcgggcagcctggcagtgagtgaaacccaggcctccagccctccaaagcctggggccaccccctgtagcaggcgatgctagaataaggaggagagccagagctgaggctccttgccccttggcccctccaggggccatgggatctctgtctcccacacccctgtcacggcccgcctggagcagcccagaggccgaagaggttcttactgcagcctccgggaggtgtctagggaggccatagattgcctggtctcgccgcattcaaaatgaggcttatgatcagtacttttttcagccccacattcctctccagaatggcctctgccctacagcacctggcccatgtggcaccccatgggcctgtcctctgctgttgtgaggtcgacctcacgacccagcacaggagctggaggcgaggtgcacgcgaggctctccacagcccaggaaggcagcctgtcaccctgctctccgagccaggggccaaggtgtggggggcacaggccatcctcatcctgccaggcccccgctttcaggagtggggtggtgccaatgctcccactcagaaccctggactgcggggtcccctgagcagagggaccagccagttccccatagacagattggtgctggacaggggctgcctgggccccaggcttggggagggtagaaaggccctgcagtgctgctgcctgggcccggaggtgggcctggccccgtagcagcattggaggccagagcccaagccagttccggagtcacacccaacggcggagggagaacctacccatctcccaccttcagctctggggaggcatgctctgggcctctggagccagggctcaggcccccaactctcctccttgcccctgcaccctcggacttggcctggccagaagggatgggggcaagaggaaggcagccaggggctccagcccatgccctcacagatttggctctcgagttggggagcgaagggctgggggaggacactgggaaccgggccarccgtggccctgcacttcccccagggagcaccaaggctaggcgcggcttcaccgcggggctgggtcgtggccagcttcgcccctgggtctgaagacctctgggcggcccaggccaaccttgccctgccgccgcacactcggctgccttctcatacccaggcttgggga

SEQ ID NO: 2593 - DNA, 2566 bp, Homo sapiens
ggttttggtgtgctgctggacgaccagaccgggcgtcgggtgagcccagaagtgagagcagttggctgcgccccagtgctgtgtgacccagaggcgccacacaccctctctgagctggtggacatcatagcrggtgcagcccagaactgtcttctgaggaagaggtgctctcctgggcccccactgtccccaggcctcagatgctgcatattgctggcccagctcctgaggctctttggacctccaggaatcggtgtctctaycaggaacccttaaccctgacccrgactcccggctgggacccagggtgttggagtggcaggagcgctgtcaggcttggtgaagggtgtgagctgtccaacggggcaaggaggaggcagggcctgttctgtagttggacagacagagccctctagctgctttctggaagactgaagggcagcaaggcaagtgaggtgctgccatcttccaggctggacagttcagtgatttgcctgaggccccacagcaggagaacgagaaggctgcctgatcagagagtctctgaagaagattctgtggctacaggcttcagcagagtgtgagggagaccccagttatttcctcagstgtttccaccaaatcctcctgtctttcgtggccaacaccccaggcaaggcttggggcccccgtctgctgctggacgcagagccatgaagaagaagttagtggtgctgggcctgctggccgtggtcctggtgctggtcattgtcaatctctgtctctggctgccctcagcctccaaggaacctgacaaccatgtgtacaccagggctgccgtggctgcagatgccaagcagtgctcggagattgggagggacacactgcgggatggtggctctgcggtggatgcagccattgcagccctgttgtgtgtggggctcatgaatgcccacagcatgagcatcgggggtggcctcttcctcaccatctacaacagcaccactcgaaaagctgaggtcatcaatgccygmgaggtggcccccaggctggcctttgccagcatgttcaacagctyggagcagtcccagaagggagggctgtcagtggcagtgcctggggagatccgaggctatgagctggcacaccagcggcatgggcggctgccctgggctcgcctcttccagcccagcatccagctggcccgccagggcttccccgtgggcaagggcttggcggcagtcctggaaaacaagcggaccgtcatcgagcagcagcctgtcttgtgtgaggtgttctgccgggatagaaaggtgcttcgggagggggagagactgaccctgccgcgggtggctgacacctacgagacgctggccattgagggtgcccaggccttctacaatggcagcctcatggcccagattgtgaaggacatccaggcggccggggcattgtgacagctgaggacctgaacaactactgtgctgagctgatcgagcacccgctgaacatcagcctgggagacgcggtgctgtacatgcccagtgcgccgctcagcgggcccgtgctggccctcatcctcaacatcctcaaagggtacaacttctcctgggagagtgtggagacccccgagcagaagggcctgacgtaccaccgcatcgtagaggctttctggtttgcctacgccaagaggaccctgcttggggaccccaagtttgtgaatgtgactgaggtggtccgcaacatgacctctgagttcttcgctgcccagctctgggcccagatctctgacaacaccactcacacgatctcctactacaagcccaagttctacacgccggatgacaggggcactgctcacctgtctgtcatcacagaggacggcagtgctgtgtccgccaccagcaccatcaacctctactttggctccaaggtctgctccccggtcagcgggatcctgttcaataatgaatggaygacttcagctctcccagcatcaccaatgagtttggggtacccccctcacctgccaatttcatccagccagggaagcagccgctctcgtccatgttcccaacgatcatggtgggccaggacggccaggtccggatggtggtgggagctgctgggggcacgcagatcaccacagccactgcactggccatcatctacaacctctggttcggctatgacatgaagcgggccgtggaggagccccggctgcacaaccagcttctgcccaacatcacgacagtggagagaaacattgaccaggcagtgactgcagccctggagacccggcaccatcacacccagatcgcgtccaccttcatcgctgtggtgcaagccatcgtccgcacggctggtggctgggcagctgcctyagactccaggaaaggcrgggagcctgccggctactgagtgctccgggcagacaaggctgacaagcaatccagggacaagatactcacsaggaygaggaagaggactttgggggacgggcttcccctgtgagcagcagagcagcataataaatgaggccactgtgccaggctccaggtggcctccctggcctgtctccccacty

SEQ ID NO: 2594 - DNA, 2478 bp, Homo sapiens
gtgctgctggacgaccagaccgggcgtcgggtgagcccagaagtgagagcagttggctgcgccccagtgctgtgtgacccagaggcgccacacaccctctctgagctggtggacatcataggtggggaagctcaggtcagggcactcccatgagtgtctggaggcctgagttccattctcagctctgccatatgcttgctgcgctctagaggagttcctcttcctctccgagcctcggtttatgtacccgtgcagtgggagtgagttgcacttcggggtgaagggggcaagacttgtgtgggcgcatcctgcagagggtcccagcagcaaggcaagtgaggtgctgccatcttccaggctggacagttcagtgatttgcctgaggccccacagcagagttcaactggagacagaraaaccagctagaggcagagggaggtaacccggagtcccccagaaaggtctgggctgtgcgtgcttcaggcttcagcagagtgtgagggagaccccagttatttcctcagstgtttccaccaaatcctcctgtctttcgtggccaacaccccaggcaaggcttggggcccccgtctgctgctggacgagccatgaagaagaagttagtggtgctgggcctgctggccgtggtcctggtgctggtcattgtcaatctctgtctctggctgccctcagcctccaaggaacctgacaaccatgtgtacaccagggctgccgtggctgcagatgccaagcagtgctcggagattgggagggacacactgcgggatggtggctctgcggtggatgcagccattgcagccctgttgtgtgtggggctcatgaatgcccacagcatgagcatcgggggtggcctcttcctcaccatctacaacagcaccactcgaaaagctgaggtcatcaatgccygmgaggtggcccccaggctggcctttgccagcatgttcaacagctyggagcagtcccagaagggagggctgtcagtggcagtgcctggggagatccgaggctatgagctggcacaccagcggcatgggcggctgccctgggctcgcctcttccagcccagcatccagctggcccgccagggcttccccgtgggcaagggcttggcggcagtcctggaaaacaagcggaccgtcatcgagcagcagcctgtctttgaggtgttctgccgggatagaaaggtgcttcgggagggggagagactgaccctgccgcgggtggctgacacctacgagacgctggccattgagggtgcccaggccttctacaatggcagcctcatggcccagattgtgaaggacatccaggcggccgtgaggggcattgtgacagctgaggacctgaacaactactgtgctgagctgatcgagcacccgctgaacatcagcctgggagacgcggtgctgtacatgcccagtgcgccgctcagcgggcccgtgctggccctcatcctcaacatcctcaaagggtacaacttctcctgggagagtgtggagacccccgagcagaagggcctgacgtaccaccgcatcgtagaggctttctggtttgcctacgccaagaggaccctgcttggggaccccaagtttgtgaatgtgactgaggtggtccgcaacatgacctctgagttcttcgctgcccagctctgggcccagatctctgacaacaccactcacacgatctcctactacaagcccaagttctacacgccggatgacaggggcactgctcacctgtctgtcatcacagaggacggcagtgctgtgtccgccaccagcaccatcaacctctactttggctccaaggtctgctccccggtcagcgggatcctgttcaataatgaatggaygacttcagctctcccagcatcaccaatgagtttggggtacccccctcacctgccaatttcatccagccagggaagcagccgctctcgtccatgttcccaacgatcatggtgggccaggacggccaggtccggatggtggtgggagctgctgggggcacgcagatcaccacagccactgcactggccatcatctacaacctctggttcggctatgacatgaagcgggccgtggaggagccccggctgcacaaccagcttctgcccaacatcacgacagtggagagaaacattgaccaggcagtgactgcagccctggagacccggcaccatcacacccagatcgcgtccaccttcatcgctgtggtgcaagccatcgtccgcacggctggtggctgggcagctgcctyagactccaggaaaggcrgggagcctgccggctactgagtgctccgggcagacaaggctgacaagcaatccagggacaagatactcacsaggaygaggaagaggactttgggggacgggcttcccctgtgagcagcagagcagcataataaatgaggccactgtgccaggctccagcagtcccccaatctcagtctcccaaa

SEQ ID NO: 2595 - DNA, 2610 bp, Homo sapiens
gtgctgctggacgaccagaccgggcgtcgggtgagcccagaagtgagagcagttggctgcgccccagtgctgtgtgacccagaggcgccacacaccctctctgagctggtggacatcataggtggggaagctcaggtcagggcactcccatgagtgtctggaggcctgagttccattctcagctctgccatatgcttgctgcgctctagaggagttcctcttcctctccgagcctcggtttatgtacccgtgcagtgggagtgagttgcacttcggggtgaagggggcaagacttgtgtgggcgcatcctgcagagggatcccacagaagggtgcagcccagaactgtcttctgaggaagaggtgctctcctgggcccccactgtccccaggcctcagcagcaaggcaagtgaggtgctgccatcttccaggctggacagttcagtgatttgcctgaggccccacagcaggagaacgagaaggctgcctgatcagagagtctctgaagaagattctgtggctacaggcttcagcagagtgtgagggagaccccagttatttcctcagstgtttccaccaaatcctcctgtctttcgtggccaacaccccaggcaaggcttggggcccccgtctgctgctggacgcagagccatgaagaagaagttagtggtgctgggcctgctggccgtggtcctggtgctggtcattgtcaatctctgtctctggctgccctcagcctccaaggaacctgacaaccatgtgtacaccagggctgccgtggctgcagatgccaagcagtgctcggagattgggagggacacactgcgggatggtggctctgcggtggatgcagccattgcagccctgttgtgtgtggggctcatgaatgcccacagcatgagcatcgggggtggcctcttcctcaccatctacaacagcaccagaaaagctgaggtcatcaatgccygmgaggtggcccccaggctggcctttgccagcrtgttcaacagctyggagcagtcccagaagggagggctgtcagtggcagtgcctggggagatccgaggctatgagctggcacaccagcggcatgggcggctgccctgggctcgcctcttccagcccagcatccagctggcccgccagggcttccccgtgggcaagggcttggcggcagtcctggaaaacaagcggaccgtcatcgagcagcagcctgtcttgtytgaggtgttctgccgggatagaaaggtgcttcgggagggggagagactgaccctgccgcgggtggctgacacctacgagacgctggccattgagggtgcccaggccttctacaatggcagcctcatggcccagattgtgaaggacatccaggcggccgtgaggggcattgtgacagctgaggacctgaacaactactgtgctgagctgatcgagcacccgctgaacatcagcctgggagacgcggtgctgtacatgcccagtgcgccgctcagcgggcccgtgctggccctcatcctcaacatcctcaaagggtacaacttctcctgggagagtgtggagacccccgagcagaagggcctgacgtaccaccgcatcgtagaggctttctggtttgcctacgccaagaggaccctgcttggggaccccaagccagctctggggtctcggcaggtggtccgcaacatgacctctgagttcttcgctgcccagctctgggcccagatctctgacaacaccactcacacgatctcctactacaagcccaagttctacacgccggatgacaggggcactgctcacctgtctgtcatcacagaggacggcagtgctgtgtccgccaccagcaccatcaacctctactttggctccaaggtctgctccccggtcagcgggatcctgttcaataatgaatggaygacttcagctctcccagcatcaccaatgagtttggggtacccccctcacctgccaatttcatccagccagggaagcagccgctctcgtccatgttcccaacgatcatggtgggccaggacggccaggtccggatggtggtgggagctgctgggggcacgcagatcaccacagccactgcactggtatgcgtcaccccttttctccctggccctgcccactccgcacagcccccaagccatgctgatcacactcccatgccccaggccatcatctacaacctctggttcggctatgacatgaagcgggccgtggaggagccccggctgcacaaccagcttctgcccaacatcacgacagtggagagaaacattgaccaggcagtgactgcagccctggagacccggcaccatcacacccagatcgcgtccaccttcatcgctgtggtgcaagccatcgtccgcacggctggtggctgggcagctgcctyagactccaggaaaggcrgggagcctgccggctactgagtgctccgggcagacaaggctgacaagcaatccagggacaagatactcacsaggaygaggaagaggactttgggggacgggcttcccctgtgagcagcagagcagcataataaatgaggccactgtgccaggctccaggtggcctccctggcctgtctccccactc

SEQ ID NO: 2596 - DNA, 2482 bp, Homo sapiens
gtgctgctggacgaccagaccgggcgtcgggtgagcccagaagtgagagcagttggctgcgccccagtgctgtgtgacccagaggcgccacacaccctctctgagctggtggacatcataggtggggaagctcaggtcagggcactcccatgagtgtctggaggcctgagttccattctcagctctgccatatgcttgctgcgctctagaggagttcctcttcctctccgagcctcggtttatgtacccgtgcagtgggagtgagttgcacttcggggtgaagggggcaagacttgtgtgggcgcatcctgcagagggatcccacagaagggtgcagcccagaactgtcttctgaggaagaggtgctctcctgggcccccactgtccccaggcctcagcagcaaggcaagtgaggtgctgccatcttccaggctggacagttcagtgatttgcctgaggccccacagcaggagaacgagaaggctgcctgatcagagagtctctgaagaagattctgtggctacaggcttcagcagagtgtgagggagaccccagttatttcctcagstgtttccaccaaatcctcctgtctttcgtggccaacaccccaggcaaggcttggggcccccgtctgctgctggacgcagagccatgaagaagaagttagtggtgctgggcctgctggccgtggtcctggtgctggtcattgtcaatctctgtctctggctgccctcagcctccaaggaacctgacaaccatgtgtacaccagggctgccgtggctgcagatgccaagcagtgctcggagattgggagggacacactgcgggatggtggctctgcggtggatgcagccattgcagccctgttgtgtgtggggctcatgaatgcccacagcatgagcatcgggggaaaagctgaggtcatcartgccygmgaggtggcccccaggctggcctttgccagcatgttcaacagctyggagcagagggctgtcagtggcagtgcctggggagatccgaggctatgagctggcacaccagcggcatgggcggctgccctgggctcgcctcttccagcccagcatccagctggcccgccagggcttccccgtgggcaagggcttggcggcagtcctggaaaacaagcggaccgtcatcgagcagcagcctgtcttgtytgaggtgttctgccgggatagaaaggtgcttcgggagggggagagactgaccctgccgcgggtggctgacacctacgagacgctggccattgagggtgcccaggccttctacaatggcagcctcatggcccagattgtgaaggacatccaggcggccgtgaggggcattgtgacagctgaggacctgaacaactactgtgctgagctgatcgagcacccgctgaacatcagcctgggagacgcggtgctgtacatgcccagtgcgccgctcagcgggcccgtgctggccctcatcctcaacatcctcaaagggtacaacttctcctgggagagtgtggagacccccgagcagaagggcctgacgtaccaccgcatcgtagaggctttctggtttgcctacgccaagaggaccctgcttggggaccccaagtttgtgaatgtgactgaggtggtccgcaacatgacctctgagttcttcgctgcccagctctgggcccagatctctgacaacaccactcacacgatctcctactacaagcccaagttctacacgccggatgacaggggcactgctcacctgtctgtcatcacagaggacggcagtgctgtgtccgccaccagcaccatcaacctctactttggctccaaggtctgctccccggtcagcgggatcctgttcaataatgaatggaygacttcagctctcccagcatcaccaatgagtttggggtacccccctcacctgccaatttcatccagccagggaagcagccgctctcgtccatgttcccaacgatcatggtgggccaggacggccaggtccggatggtggtgggagctgctgggggcacgcagatcaccacagccactgcactggccatcatctacaacctctggttcggctatgacatgaagcgggccgtggaggagccccggctgcacaaccagcttctgcccaacatcacgacagtggagagaaacattgaccaggcagtgactgcagccctggagacccggcaccatcacacccagatcgcgtccaccttcatcgctgtggtgcaagccatcgtccgcacggctggtggctgggcagctgcctyagactccaggaaaggcrgggagcctgccggctactgagtgctccgggcagacaaggctgacaagcaatccagggacaagatactcacsaggaygaggaagaggactttgggggacgggcttcccctgtgagcagcagagcagcataataaatgaggccactgtgccaggctccaggtggcctccctggcctgtctccccactc

SEQ ID NO: 2597 - DNA, 1032 bp, Homo sapiens
agggagtcagactggtcatgcaaggtcctgggcctgcccttgggtcctggggagccacggaaggttgtgggtgccagagggttttggtcagagtcacagtcaggggccttctgagacctgtgccccctccccaccctccctccccacctcatcaggccagctctggggtctcggcaggtggtccgcaacatgacctctgagttcttcgctgcccagctctgggcccagatctctgacaacaccactcacacgatctcctactacaagcccaagttctacacgccggatgacaggggcactgctcacctgtctgtcatcacagaggacggcagtgctgtgtccgccaccagcaccatcaacctctactttggctccaaggtctgctccccggtcagcgggatcctgttcaataatgaatggaygacttcagctctcccagcatcaccaatgagtttggggtacccccctcacctgccaatttcatccagccagggaagcagccgctctcgtccatgttcccaacgatcatggtgggccaggacggccaggtccggatggtggtgggagctgctgggggcacgcagatcaccacagccactgcactggccatcatctacaacctctggttcggctatgacatgaagcgggccgtggaggagccccggctgcacaaccagcttctgcccaacatcacgacagtggagagaaacattgaccaggcagtgactgcagccctggagacccggcaccatcacacccagatcgcgtccaccttcatcgctgtggtgcaagccatcgtccgcacggctggtggctgggcagctgcctyagactccaggaaaggcrgggagcctgccggctactgagtgctccgggcagacaaggctgacaagcaatccagggacaagatactcacsaggaygaggaagaggactttgggggacgggcttcccctgtgagcagcagagcagcataataaatgaggccactgtgccaggctccaggtggcctccctggcctgtctccccactc

SEQ ID NO: 2598 - DNA, 2563 bp, Homo sapiens
gtgctgctggacgaccagaccgggcgtcgggtgagcccagaagtgagagcagttggctgcgccccagtgctgtgtgacccagaggcgccacacaccctctctgagctggtggacatcataggtggggaagctcaggtcagggcactcccatgagtgtctggaggcctgagttccattctcagctctgccatatgcttgctgcgctctagaggagttcctcttcctctccgagcctcggtttatgtacccgtgcagtgggagtgagttgcacttcggggtgaagggggcaagacttgtgtgggcgcatcctgcagagggtcccagcagcaaggcaagtgaggtgctgccatcttccaggctggacagttcagtgatttgcctgaggccccacagcagagttcaactggagacagaraaaccagctagaggcagagggaggtaacccggagtcccccagaaaggtctgggctgtgcgtgcttcaggtaacctcccttgaccttcaggagaacgagaaggctgcctgatcagagagtctctgaagaagattctgtggctacaggcttcagcagagtgtgagggagaccccagttatttcctcagstgtttccaccaaatcctcctgtctttcgtggccaacaccccaggcaaggcttggggcccccgtctgctgctggacgcagagccatgaagaagaagttagtggtgctgggcctgctggccgtggtcctggtgctggtcattgtcaatctctgtctctggctgccctcagcctccaaggaacctgacaaccatgtgtacaccagggctgccgtggctgcagatgccaagcagtgctcggagattgggagggacacactgcgggatggtggctctgcggtggatgcagccattgcagccctgttgtgtgtggggctcatgaatgcccacagcatgagcatcgggggtggcctcttcctcaccatctacaacagcaccactcgaaaagctgaggtcatcaatgccygmgaggtggcccccaggctggcctttgccagcatgttcaacagctyggagcagtcccagaagggagggctgtcagtggcagtgcctggggagatccgaggctatgagctggcacaccagcggcatgggcggctgccctgggctcgcctcttccagcccagcatccagctggcccgccagggcttccccgtgggcaagggcttggcggcagtcctggaaaacaagcggaccgtcatcgagcagcagcctgtcttgtggyatgtgttctgccgggatagaaaggtgcttcgggagggggagagactgaccctgccgcgggtggctgacacctacgagacgctggccattgagggtgcccaggccttctacaatggcagcctcatggcccagattgtgaaggacatccaggcggccgtgaggggcattgtgacagctgaggacctgaacaactactgtgctgagctgatcgagcacccgctgaacatcagcctgggagacgcggtgctgtacatgcccagtgcgccgctcagcgggcccgtgctggccctcatcctcaacatcctcaaagggtacaacttctcctgggagagtgtggagacccccgagcagaagggcctgacgtaccaccgcatcgtagaggctttctggtttgcctacgccaagaggaccctgcttggggaccccaagtttgtgaatgtgactgaggtggtccgcaacatgacctctgagttcttcgctgcccagctctgggcccagatctctgacaacaccactcacacgatctcctactacaagcccaagttctacacgccggatgacaggggcactgctcacctgtctgtcatcacagaggacggcagtgctgtgtccgccaccagcaccatcaacctctactttggctccaaggtctgctccccggtcagcgggatcctgttcaataatgaatggaygacttcagctctcccagcatcaccaatgagtttggggtacccccctcacctgccaatttcatccagccagggaagcagccgctctcgtccatgttcccaacgatcatggtgggccaggacggccaggtccggatggtggtgggagctgctgggggcacgcagatcaccacagccactgcactggccatcatctacaacctctggttcggctatgacatgaagcgggccgtggaggagccccggctgcacaaccagcttctgcccaacatcacgacagtggagagaaacattgaccaggcagtgactgcagccctggagacccggcaccatcacacccagatcgcgtccaccttcatcgctgtggtgcaagccatcgtccgcacggctggtggctgggcagctgcctyagactccaggaaaggcrgggagcctgccggctactgagtgctccgggcagacaaggctgacaagcaatccagggacaagatactcacsaggaygaggaagaggactttgggggacgggcttcccctgtgagcagcagagcagcataataaatgaggccactgtgccaggctccaggtggcctccctggcctgtctccccactc

SEQ ID NO: 2599 - DNA, 2623 bp, Homo sapiens
caggcccaccaagcctggggaggtggccacccttccacgatggcatttggatgttccctgtgtgtggggagggcacagggactccattcrtagaccacctctgggacagtgtgtctgcctctgaggtcagacgctctgcactgggacagggtggagtggagggaaacccagcttggggctcattggaggggcttgctggcagacaccgccctttgtgggaaactgactgtgggagaggggaaccccaacctctgtcaccacatccctcttccctgttgtcacacctgtcacttgctgccatagccatgagacttcccaagggtcactgctgccactcactgcacagcctggaagggagtccacaggggacatayagtgagcaagagacctgtgccactcaggcctcctgggggtgtccccagtgcagccatgatgataatcacagctaccattcaccaagtcctgcccacagtctaacctactctattcacaacactcccagcagcaaggcaagtgaggtgctgccatcttccaggctggacagttcagtgatttgcctgaggccccacagcagagttcaactggagacagaraaaccagctagaggcagagggaggtaacccggagtcccccagaaaggtctgggctgtgcgtgcttcagstgtttccaccaaatcctcctgtctttcgtggccaacaccccaggcaaggcttggggcccccgtctgctgctggacgcagagccatgaagaagaagttagtggtgctgggcctgctggccgtggtcctggtgctggtcattgtcaatctctgtctctggctgccctcagcctccaaggaacctgacaaccatgtgtacaccagggctgccgtggctgcagatgccaagcagtgctcggagattgggagggacacactgcgggatggtggctctgcggtggatgcagccattgcagccctgttgtgtgtggggctcatgaatgcccacagcatgagcatcgggggtggcctcttcctcaccatctacaacagcaccactcgaaaagctgaggtcatcaatgccygmgaggtggcccccaggctggcctttgccagcatgttcaacagctyggagcagtcccagaagggagggctgtcagtggcagtgcctggggagatccgaggctatgagctggcacaccagcggcatgggcggctgccctgggctcgcctcttccagcccagcatccagctggcccgccagggcttccccgtgggcaagggcttggcggcagtcctggaaaacaagcggaccgtcatcgagcagcagcctgtcttgtytgaggtgttctgccgggatagaaaggtgcttcgggagggggagagactgaccctgccgcgggtggctgacacctacgagacgctggccattgagggtgcccaggccttctacaatggcagcctcatggcccagattgtgaaggacatccaggcggccgtgaggggcattgtgacagctgaggacctgaacaactactgtgctgagctgatcgagcacccgctgaacatcagcctgggagacgcggtgctgtacatgcccagtgcgccgctcagcgggcccgtgctggccctcatcctcaacatcctcaaagggtacaacttctcctgggagagtgtggagacccccgagcagaagggcctgacgtaccaccgcatcgtagaggctttctggtttgcctacgccaagaggaccctgcttggggaccccaagtttgtgaatgtgactgaggtggtccgcaacatgacctctgagttcttcgctgcccagctctgggcccagatctctgacaacaccactcacacgatctcctactacaagcccaagttctacacgccggatgacaggggcactgctcacctgtctgtcatcacagaggacggcagtgctgtgtccgccaccagcaccatcaacctctactttggctccaaggtctgctccccggtcagcgggatcctgttcaataatgaatggaygacttcagctctcccagcatcaccaatgagtttggggtacccccctcacctgccaatttcatccagccagggaagcagccgctctcgtccatgttcccaacgatcatggtgggccaggacggccaggtccggatggtggtgggagctgctgggggcacgcagatcaccacagccactgcactggccatcatctacaacctctggttcggctatgacatgaagcgggccgtggaggagccccggctgcacaaccagcttctgcccaacatcacgacagtggagagaaacattgaccaggcagtgactgcagccctggagacccggcaccatcacacccagatcgcgtccaccttcatcgctgtggtgcaagccatcgtccgcacggctggtggctgggcagctgcctyagactccaggaaaggcrgggagcctgccggctactgagtgctccgggcagacaaggctgacaagcaatccagggacaagatactcacsaggaygaggaagaggactttgggggacgggcttcccctgtgagcagcagagcagcataataaatgaggccactgtgccaggctccaggtggcctccctggcctgtctccccactc

SEQ ID NO: 2600 - DNA, 882 bp, Homo sapiens
gacagggagtcagactggtcatgcaaggtggtccgcaacatgacctctgagttcttcgctgcccagctctgggcccagatctctgacaacaccactcacacgatctcctactacaagcccaagttctacacgccggatgacaggggcactgctcacctgtctgtcatcacagaggacggcagtgctgtgtccgccaccagcaccatcaacctctactttggctccaaggtctgctccccggtcagcgggatcctgttcaataatgaatggaygacttcagctctcccagcatcaccaatgagtttggggtacccccctcacctgccaatttcatccagccagggaagcagccgctctcgtccatgttcccaacgatcatggtgggccaggacggccaggtccggatggtggtgggagctgctgggggcacgcagatcaccacagccactgcactggccatcatctacaacctctggttcggctatgacatgaagcgggccgtggaggagccccggctgcacaaccagcttctgcccaacatcacgacagtggagagaaacattgaccaggcagtgactgcagccctggagacccggcaccatcacacccagatcgcgtccaccttcatcgctgtggtgcaagccatcgtccgcacggctggtggctgggcagctgcctyagactccaggaaaggcrgggagcctgccggctactgagtgctccgggcagacaaggctgacaagcaatccagggacaagatactcacsaggaygaggaagaggactttgggggacgggcttcccctgtgagcagcagagcagcataataaatgaggccactgtgccaggctccaggtggcctccctggcctgtctccccactc

SEQ ID NO: 2601 - DNA, 2529 bp, Homo sapiens
gtgctgctggacgaccagaccgggcgtcgggtgagcccagaagtgagagcagttggctgcgccccagtgctgtgtgacccagaggcgccacacaccctctctgagctggtggacatcataggtggggaagctcaggtcagggcactcccatgagtgtctggaggcctgagttccattctcagctctgccatatgcttgctgcgctctagaggagttcctcttcctctccgagcctcggtttatgtacccgtgcagtgggagtgagttgcacttcggggtgaagggggcaagacttgtgtgggcgcatcctgcagagggatcccacagaagggtgcagcccagaactgtcttctgaggaagaggtgctctcctgggcccccactgtccccaggcctcagcagcaaggcaagtgaggtgctgccatcttccaggctggacagttcagtgatttgcctgaggccccacagcaggagaacgagaaggctgcctgatcagagagtctctgaagaagattctgtggctacaggcttcagcagagtgtgagggagaccccagttatttcctcagstgtttccaccaaatcctcctgtctttcgtggccaacaccccaggcaaggcttggggcccccgtctgctgctggacgcagagccatgaagaagaagttagtggtgctgggcctgctggccgtggtcctggtgctggtcattgtcaatctctgtctctggctgccctcagcctccaaggaacctgacaaccatgtgtacaccagggctgccgtggctgcagatgccaagcagtgctcggagattgggagggacacactgcgggatggtggctctgcggtggatgcagccattgcagccctgttgtgtgtggggctcatgaatgcccacagcatgagcatcgggggtggcctcttcctcaccatctacaacagcaccagaaaagctgaggtcatcaatgccygmgaggtggcccccaggctggcctttgccagcrtgttcaacagctyggagcagtcccagaagggagggctgtcagtggcagtgcctggggagatccgaggctatgagctggcacaccagcggcatgggcggctgccctgggctcgcctcttccagcccagcatccagctggcccgccagggcttccccgtgggcaagggcttggcggcagtcctggaaaacaagcggaccgtcatcgagcagcagcctgtcttgtytgaggtgttctgccgggatagaaaggtgcttcgggagggggagagactgaccctgccgcgggtggctgacacctacgagacgctggccattgagggtgcccaggccttctacaatggcagcctcatggcccagattgtgaaggacatccaggcggccgtgaggggcattgtgacagctgaggacctgaacaactactgtgctgagctgatcgagcacccgctgaacatcagcctgggagacgcggtgctgtacatgcccagtgcgccgctcagcgggcccgtgctggccctcatcctcaacatcctcaaagggtacaacttctcctgggagagtgtggagacccccgagcagaagggcctgacgtaccaccgcatcgtagaggctttctggtttgcctacgccaagaggaccctgcttggggaccccaagccagctctggggtctcggcaggtggtccgcaacatgacctctgagttcttcgctgcccagctctgggcccagatctctgacaacaccactcacacgatctcctactacaagcccaagttctacacgccggatgacaggggcactgctcacctgtctgtcatcacagaggacggcagtgctgtgtccgccaccagcaccatcaacctctactttggctccaaggtctgctccccggtcagcgggatcctgttcaataatgaatggaygacttcagctctcccagcatcaccaatgagtttggggtacccccctcacctgccaatttcatccagccagggaagcagccgctctcgtccatgttcccaacgatcatggtgggccaggacggccaggtccggatggtggtgggagctgctgggggcacgcagatcaccacagccactgcactggccatcatctacaacctctggttcggctatgacatgaagcgggccgtggaggagccccggctgcacaaccagcttctgcccaacatcacgacagtggagagaaacattgaccaggcagtgactgcagccctggagacccggcaccatcacacccagatcgcgtccaccttcatcgctgtggtgcaagccatcgtccgcacggctggtggctgggcagctgcctyagactccaggaaaggcrgggagcctgccggctactgagtgctccgggcagacaaggctgacaagcaatccagggacaagatactcacsaggaygaggaagaggactttgggggacgggcttcccctgtgagcagcagagcagcataataaatgaggccactgtgccaggctccaggtggcctccctggcctgtctccccactc

SEQ ID NO: 2602 - DNA, 2572 bp, Homo sapiens
ggttttggtgtgctgctggacgaccagaccgggcgtcgggtgagcccagaagtgagagcagttggctgcgccccagtgctgtgtgacccagaggcgccacacaccctctctgagctggtggacatcatagcrggtgcagcccagaactgtcttctgaggaagaggtgctctcctgggcccccactgtccccaggcctcagatgctgcatattgctggcccagctcctgaggctctttggacctccaggaatcggtgtctctaycaggaacccttaaccctgacccrgactcccggctgggacccagggtgttggagtggcaggagcgctgtcaggcttggtgaagggtgtgagctgtccaacggggcaaggaggaggcagggcctgttctgtagttggacagacagagccctctagctgctttctggaagactgaagggcaggygatcaaggcaagtgaggtgctgccatcttccaggctggacagttcagtgatttgcctgaggccccacagcaggagaacgagaaggctgcctgatcagagagtctctgaagaagattctgtggctacaggcttcagcagagtgtgagggagaccccagttatttcctcagstgtttccaccaaatcctcctgtctttcgtggccaacaccccaggcaaggcttggggcccccgtctgctgctggacgcagagccatgaagaagaagttagtggtgctgggcctgctggccgtggtcctggtgctggtcattgtcaatctctgtctctggctgccctcagcctccaaggaacctgacaaccatgtgtacaccagggctgccgtggctgcagatgccaagcagtgctcggagattgggagggacacactgcgggatggtggctctgcggtggatgcagccattgcagccctgttgtgtgtggggctcatgaatgcccacagcatgagcatcgggggtggcctcttcctcaccatctacaacagcaccactcgaaaagctgaggtcatcaatgccygmgaggtggcccccaggctggcctttgccagcatgttcaacagctyggagcagtcccagaagggagggctgtcagtggcagtgcctggggagatccgaggctatgagctggcacaccagcggcatgggcggctgccctgggctcgcctcttccagcccagcatccagctggcccgccagggcttccccgtgggcaagggcttggcggcagtcctggaaaacaagcggaccgtcatcgagcagcagcctgtctttgaggtgttctgccgggatagaaaggtgcttcgggagggggagagactgaccctgccgcgggtggctgacacctacgagacgctggccattgagggtgcccaggccttctacaatggcagcctcatggcccagattgtgaaggacatccaggcggccgtgaggggcattgtgacagctgaggacctgaacaactactgtgctgagctgatcgagcacccgctgaacatcagcctgggagacgcggtgctgtacatgcccagtgcgccgctcagcgggcccgtgctggccctcatcctcaacatcctcaaagggtacaacttctcctgggagagtgtggagacccccgagcagaagggcctgacgtaccaccgcatcgtagaggctttctggtttgcctacgccaagaggaccctgcttggggaccccaagtttgtgaatgtgactgaggtggtccgcaacatgacctctgagttcttcgctgcccagctctgggcccagatctctgacaacaccactcacacgatctcctactacaagcccaagttctacacgccggatgacaggggcactgctcacctgtctgtcatcacagaggacggcagtgctgtgtccgccaccagcaccatcaacctctactttggctccaaggtctgctccccggtcagcgggatcctgttcaataatgaatggaygacttcagctctcccagcatcaccaatgagtttggggtacccccctcacctgccaatttcatccagccagggaagcagccgctctcgtccatgttcccaacgatcatggtgggccaggacggccaggtccggatggtggtgggagctgctgggggcacgcagatcaccacagccactgcactggccatcatctacaacctctggttcggctatgacatgaagcgggccgtggaggagccccggctgcacaaccagcttctgcccaacatcacgacagtggagagaaacattgaccaggcagtgactgcagccctggagacccggcaccatcacacccagatcgcgtccaccttcatcgctgtggtgcaagccatcgtccgcacggctggtggctgggcagctgcctyagactccaggaaaggcrgggagcctgccggctactgagtgctccgggcagacaaggctgacaagcaatccagggacaagatactcacsaggaygaggaagaggactttgggggacgggcttcccctgtgagcagcagagcagcataataaatgaggccactgtgccaggctccaggtggcctccctggcctgtctccccactc

SEQ ID NO: 2603 - DNA, 2302 bp, Homo sapiens
crggtgcagcccagaactgtcttctgaggaagaggtgctctcctgggcccccactgtccccaggcctcagcaaggcaagtgaggtgctgccatcttccaggctggacagttcagtgatttgcctgaggccccacagcagagttcaactggagacagaraaaccagctagaggcagagggaggtaacccggagtcccccagaaaggtctgggctgtgcgtgcttcaggtaacctcccttgaccttcaggagaacgagaaggctgcctgatcagagagtctctgaagaagattctgtggctacaggcttcagcagagtgtgagggagaccccagttatttcctcagstgtttccaccaaatcctcctgtctttcgtggccaacaccccaggcaaggcttggggcccccgtctgctgctggacgcagagccatgaagaagaagttagtggtgctgggcctgctggccgtggtcctggtgctggtcattgtcaatctctgtctctggctgccctcagcctccaaggaacctgacaaccatgtgtacaccagggctgccgtggctgcagatgccaagcagtgctcggagattgggagggacacactgcgggatggtggctctgcggtggatgcagccattgcagccctgttgtgtgtggggctcatgaatgcccacagcatgagcatcgggggtggcctcttcctcaccatctacaacagcaccactcgaaaagctgaggtcatcaatgccygmgaggtggcccccaggctggcctttgccagcatgttcaacagctyggagcagtcccagaagggagggctgtcagtggcagtgcctggggagatccgaggctatgagctggcacaccagcggcatgggcggctgccctgggctcgcctcttccagcccagcatccagctggcccgccagggcttccccgtgggcaagggcttggcggcagtcctggaaaacaagcggaccgtcatcgagcagcagcctgtcttgtgtgaggtgttctgccgggatagaaaggtgcttcgggagggggagagactgaccctgccgcgggtggctgacacctacgagacgctggccattgagggtgcccaggccttctacaatggcagcctcatggcccagattgtgaaggacatccaggcggccggggcattgtgacagctgaggacctgaacaactactgtgctgagctgatcgagcacccgctgaacatcagcctgggagacgcggtgctgtacatgcccagtgcgccgctcagcgggcccgtgctggccctcatcctcaacatcctcaaagggtacaacttctcctgggagagtgtggagacccccgagcagaagggcctgacgtaccaccgcatcgtagaggctttctggtttgcctacgccaagaggaccctgcttggggaccccaagtttgtgaatgtgactgaggtggtccgcaacatgacctctgagttcttcgctgcccagctctgggcccagatctctgacaacaccactcacacgatctcctactacaagcccaagttctacacgccggatgacaggggcactgctcacctgtctgtcatcacagaggacggcagtgctgtgtccgccaccagcaccatcaacctctactttggctccaaggtctgctccccggtcagcgggatcctgttcaataatgaatggaygacttcagctctcccagcatcaccaatgagtttggggtacccccctcacctgccaatttcatccagccagggaagcagccgctctcgtccatgttcccaacgatcatggtgggccaggacggccaggtccggatggtggtgggagctgctgggggcacgcagatcaccacagccactgcactggccatcatctacaacctctggttcggctatgacatgaagcgggccgtggaggagccccggctgcacaaccagcttctgcccaacatcacgacagtggagagaaacattgaccaggcagtgactgcagccctggagacccggcaccatcacacccagatcgcgtccaccttcatcgctgtggtgcaagccatcgtccgcacggctggtggctgggcagctgcctyagactccaggaaaggcrgggagcctgccggctactgagtgctccgggcagacaaggctgacaagcaatccagggacaagatactcacsaggaygaggaagaggactttgggggacgggcttcccctgtgagcagcagagcagcataataaatgaggccactgtgccaggctccaggtggcctccctggcctgtctccccacty

SEQ ID NO: 2604 - DNA, 1111 bp, Homo sapiens
agggagtcagactggtcatgcaaggtcctgggcctgcccttgggtcctggggagccacggaaggttgtgggtgccagagggttttggtcagagtcacagtcaggggccttctgagacctgtgccccctccccaccctccctccccacctcatcaggccagctctggggtctcggcaggtggtccgcaacatgacctctgagttcttcgctgcccagctctgggcccagatctctgacaacaccactcacacgatctcctactacaagcccaagttctacacgccggatgacaggggcactgctcacctgtctgtcatcacagaggacggcagtgctgtgtccgccaccagcaccatcaacctctactttggctccaaggtctgctccccggtcagcgggatcctgttcaataatgaatggaygacttcagctctcccagcatcaccaatgagtttggggtacccccctcacctgccaatttcatccagccagggaagcagccgctctcgtccatgttcccaacgatcatggtgggccaggacggccaggtccggatggtggtgggagctgctgggggcacgcagatcaccacagccactgcactggtatgcgtcaccccttttctccctggccctgcccactccgcacagcccccaagccatgctgatcacactcccatgccccaggccatcatctacaacctctggttcggctatgacatgaagcgggccgtggaggagccccggctgcacaaccagcttctgcccaacatcacgacagtggagagaaacattgaccaggcagtgactgcagccctggagacccggcaccatcacacccagatcgcgtccaccttcatcgctgtggtgcaagccatcgtccgcacggctggtggctgggcagctgcctyagactccaggaaaggcrgggagcctgccggctactgagtgctccgggcagacaaggctgacaagcaatccagggacaagatactcacsaggaygaggaagaggactttgggggacgggcttcccctgtgagcagcagagcagcataataaatgaggccactgtgccaggctccagcagtcccccaatctcagtctcccaaa

SEQ ID NO: 2605 - DNA, 2306 bp, Homo sapiens
tcccagccaggctggatctctgtgagaggcctgcctgtcctgcaccctgtgcggatgcctcccactgtccrccrgggctgctgggcaccccctggctggtctcttggactagcrggtgcagcccagaactgtcttctgaggaagaggtgctctcctgggcccccactgtccccaggcctcagcaaggcaagtgaggtgctgccatcttccaggctggacagttcagtgatttgcctgaggccccacagcaggagaacgagaaggctgcctgatcagagagtctctgaagaagattctgtggctacaggcttcagcagagtgtgagggagaccccagttatttcctcagstgtttccaccaaatcctcctgtctttcgtggccaacaccccaggcaaggcttggggcccccgtctgctgctggacgcagagccatgaagaagaagttagtggtgctgggcctgctggccgtggtcctggtgctggtcattgtcaatctctgtctctggctgccctcagcctccaaggaacctgacaaccatgtgtacaccagggctgccgtggctgcagatgccaagcagtgctcggagattgggagggacacactgcgggatggtggctctgcggtggatgcagccattgcagccctgttgtgtgtggggctcatgaatgcccacagcatgagcatcgggggtggcctcttcctcaccatctacaacagcaccactcgaaaagctgaggtcatcaatgccygmgaggtggcccccaggctggcctttgccagcatgttcaacagctyggagcagtcccagaagggagggctgtcagtggcagtgcctggggagatccgaggctatgagctggcacaccagcggcatgggcggctgccctgggctcgcctcttccagcccagcatccagctggcccgccagggcttccccgtgggcaagggcttggcggcagtcctggaaaacaagcggaccgtcatcgagcagcagcctgtcttgtgtgaggtgttctgccgggatagaaaggtgcttcgggagggggagagactgaccctgccgcgggtggctgacacctacgagacgctggccattgagggtgcccaggccttctacaatggcagcctcatggcccagattgtgaaggacatccaggcggccggggcattgtgacagctgaggacctgaacaactactgtgctgagctgatcgagcacccgctgaacatcagcctgggagacgcggtgctgtacatgcccagtgcgccgctcagcgggcccgtgctggccctcatcctcaacatcctcaaagggtacaacttctcctgggagagtgtggagacccccgagcagaagggcctgacgtaccaccgcatcgtagaggctttctggtttgcctacgccaagaggaccctgcttggggaccccaagtttgtgaatgtgactgaggtggtccgcaacatgacctctgagttcttcgctgcccagctctgggcccagatctctgacaacaccactcacacgatctcctactacaagcccaagttctacacgccggatgacaggggcactgctcacctgtctgtcatcacagaggacggcagtgctgtgtccgccaccagcaccatcaacctctactttggctccaaggtctgctccccggtcagcgggatcctgttcaataatgaatggaygacttcagctctcccagcatcaccaatgagtttggggtacccccctcacctgccaatttcatccagccagggaagcagccgctctcgtccatgttcccaacgatcatggtgggccaggacggccaggtccggatggtggtgggagctgctgggggcacgcagatcaccacagccactgcactggccatcatctacaacctctggttcggctatgacatgaagcgggccgtggaggagccccggctgcacaaccagcttctgcccaacatcacgacagtggagagaaacattgaccaggcagtgactgcagccctggagacccggcaccatcacacccagatcgcgtccaccttcatcgctgtggtgcaagccatcgtccgcacggctggtggctgggcagctgcctyagactccaggaaaggcrgggagcctgccggctactgagtgctccgggcagacaaggctgacaagcaatccagggacaagatactcacsaggaygaggaagaggactttgggggacgggcttcccctgtgagcagcagagcagcataataaatgaggccactgtgccaggctccaggtggcctccctggcctgtctccccacty

SEQ ID NO: 2606 - DNA, 2587 bp, Homo sapiens
caggcccaccaagcctggggaggtggccacccttccacgatggcatttggatgttccctgtgtgtggggagggcacagggactccattcrtagaccacctctgggacagtgtgtctgcctctgaggtcagacgctctgcactgggacagggtggagtggagggaaacccagcttggggctcattggaggggcttgctggcagacaccgccctttgtgggaaactgactgtgggagaggggaaccccaacctctgtcaccacatccctcttccctgttgtcacacctgtcacttgctgccatagccatgagacttcccaagggtcactgctgccactcactgcacagcctggaagggagtccacaggggacatayagtgagcaagagacctgtgccactcaggcctcctgggggtgtccccagtgcagccatgatgataatcacagctaccattcaccaagtcctgcccacagtctaacctactctattcacaacactcccagcagcaaggcaagtgaggtgctgccatcttccaggctggacagttcagtgatttgcctgaggccccacagcagagttcaactggagacagaraaaccagctagaggcagagggaggtaacccggagtcccccagaaaggtctgggctgtgcgtgcttcagstgtttccaccaaatcctcctgtctttcgtggccaacaccccaggcaaggcttggggcccccgtctgctgctggacgcagagccatgaagaagaagttagtggtgctgggcctgctggccgtggtcctggtgctggtcattgtcaatctctgtctctggctgccctcagcctccaaggaacctgacaaccatgtgtacaccagggctgccgtggctgcagatgccaagcagtgctcggagattgggagggacacactgcgggatggtggctctgcggtggatgcagccattgcagccctgttgtgtgtggggctcatgaatgcccacagcatgagcatcgggggaaaagctgaggtcatcaatgccygmgaggtggcccccaggctggcctttgccagcatgttcaacagctyggagcagtcccagaagggagggctgtcagtggcagtgcctggggagatccgaggctatgagctggcacaccagcggcatgggcggctgccctgggctcgcctcttccagcccagcatccagctggcccgccagggcttccccgtgggcaagggcttggcggcagtcctggaaaacaagcggaccgtcatcgagcagcagcctgtcttgtytgaggtgttctgccgggatagaaaggtgcttcgggagggggagagactgaccctgccgcgggtggctgacacctacgagacgctggccattgagggtgcccaggccttctacaatggcagcctcatggcccagattgtgaaggacatccaggcggccgtgaggggcattgtgacagctgaggacctgaacaactactgtgctgagctgatcgagcacccgctgaacatcagcctgggagacgcggtgctgtacatgcccagtgcgccgctcagcgggcccgtgctggccctcatcctcaacatcctcaaagggtacaacttctcctgggagagtgtggagacccccgagcagaagggcctgacgtaccaccgcatcgtagaggctttctggtttgcctacgccaagaggaccctgcttggggaccccaagtttgtgaatgtgactgaggtggtccgcaacatgacctctgagttcttcgctgcccagctctgggcccagatctctgacaacaccactcacacgatctcctactacaagcccaagttctacacgccggatgacaggggcactgctcacctgtctgtcatcacagaggacggcagtgctgtgtccgccaccagcaccatcaacctctactttggctccaaggtctgctccccggtcagcgggatcctgttcaataatgaatggaygacttcagctctcccagcatcaccaatgagtttggggtacccccctcacctgccaatttcatccagccagggaagcagccgctctcgtccatgttcccaacgatcatggtgggccaggacggccaggtccggatggtggtgggagctgctgggggcacgcagatcaccacagccactgcactggccatcatctacaacctctggttcggctatgacatgaagcgggccgtggaggagccccggctgcacaaccagcttctgcccaacatcacgacagtggagagaaacattgaccaggcagtgactgcagccctggagacccggcaccatcacacccagatcgcgtccaccttcatcgctgtggtgcaagccatcgtccgcacggctggtggctgggcagctgcctyagactccaggaaaggcrgggagcctgccggctactgagtgctccgggcagacaaggctgacaagcaatccagggacaagatactcacsaggaygaggaagaggactttgggggacgggcttcccctgtgagcagcagagcagcataataaatgaggccactgtgccaggctccaggtggcctccctggcctgtctccccactc

SEQ ID NO: 2607 - DNA, 2432 bp, Homo sapiens
ggttttggtgtgctgctggacgaccagaccgggcgtcgggtgagcccagaagtgagagcagttggctgcgccccagtgctgtgtgacccagaggcgccacacaccctctctgagctggtggacatcatagcrggtgcagcccagaactgtcttctgaggaagaggtgctctcctgggcccccactgtccccaggcctcagcaaggcaagtgaggtgctgccatcttccaggctggacagttcagtgatttgcctgaggccccacagcagagttcaactggagacagaraaaccagctagaggcagagggaggtaacccggagtcccccagaaaggtctgggctgtgcgtgcttcaggtaacctcccttgaccttcaggagaacgagaaggctgcctgatcagagagtctctgaagaagattctgtggctacaggcttcagcagagtgtgagggagaccccagttatttcctcagstgtttccaccaaatcctcctgtctttcgtggccaacaccccaggcaaggcttggggcccccgtctgctgctggacgcagagccatgaagaagaagttagtggtgctgggcctgctggccgtggtcctggtgctggtcattgtcaatctctgtctctggctgccctcagcctccaaggaacctgacaaccatgtgtacaccagggctgccgtggctgcagatgccaagcagtgctcggagattgggagggacacactgcgggatggtggctctgcggtggatgcagccattgcagccctgttgtgtgtggggctcatgaatgcccacagcatgagcatcgggggtggcctcttcctcaccatctacaacagcaccactcgaaaagctgaggtcatcaatgccygmgaggtggcccccaggctggcctttgccagcatgttcaacagctyggagcagtcccagaagggagggctgtcagtggcagtgcctggggagatccgaggctatgagctggcacaccagcggcatgggcggctgccctgggctcgcctcttccagcccagcatccagctggcccgccagggcttccccgtgggcaagggcttggcggcagtcctggaaaacaagcggaccgtcatcgagcagcagcctgtcttgtgtgaggtgttctgccgggatagaaaggtgcttcgggagggggagagactgaccctgccgcgggtggctgacacctacgagacgctggccattgagggtgcccaggccttctacaatggcagcctcatggcccagattgtgaaggacatccaggcggccggggcattgtgacagctgaggacctgaacaactactgtgctgagctgatcgagcacccgctgaacatcagcctgggagacgcggtgctgtacatgcccagtgcgccgctcagcgggcccgtgctggccctcatcctcaacatcctcaaagggtacaacttctcctgggagagtgtggagacccccgagcagaagggcctgacgtaccaccgcatcgtagaggctttctggtttgcctacgccaagaggaccctgcttggggaccccaagtttgtgaatgtgactgaggtggtccgcaacatgacctctgagttcttcgctgcccagctctgggcccagatctctgacaacaccactcacacgatctcctactacaagcccaagttctacacgccggatgacaggggcactgctcacctgtctgtcatcacagaggacggcagtgctgtgtccgccaccagcaccatcaacctctactttggctccaaggtctgctccccggtcagcgggatcctgttcaataatgaatggaygacttcagctctcccagcatcaccaatgagtttggggtacccccctcacctgccaatttcatccagccagggaagcagccgctctcgtccatgttcccaacgatcatggtgggccaggacggccaggtccggatggtggtgggagctgctgggggcacgcagatcaccacagccactgcactggccatcatctacaacctctggttcggctatgacatgaagcgggccgtggaggagccccggctgcacaaccagcttctgcccaacatcacgacagtggagagaaacattgaccaggcagtgactgcagccctggagacccggcaccatcacacccagatcgcgtccaccttcatcgctgtggtgcaagccatcgtccgcacggctggtggctgggcagctgcctyagactccaggaaaggcrgggagcctgccggctactgagtgctccgggcagacaaggctgacaagcaatccagggacaagatactcacsaggaygaggaagaggactttgggggacgggcttcccctgtgagcagcagagcagcataataaatgaggccactgtgccaggctccaggtggcctccctggcctgtctccccacty

SEQ ID NO: 2608 - DNA, 2534 bp, Homo sapiens
ggttttggtgtgctgctggacgaccagaccgggcgtcgggtgagcccagaagtgagagcagttggctgcgccccagtgctgtgtgacccagaggcgccacacaccctctctgagctggtggacatcatagcrggtgcagcccagaactgtcttctgaggaagaggtgctctcctgggcccccactgtccccaggcctcagatgctgcatattgctggcccagctcctgaggctctttggacctccaggaatcggtgtctctaycaggaacccttaaccctgacccrgactcccggctgggacccagggtgttggagtggcaggagcgctgtcaggcttggtgaagggtgtgagctgtccaacggggcaaggaggaggcagggcctgttctgtagttggacagacagagccctctagctgctttctggaagactgaagggcagcaaggcaagtgaggtgctgccatcttccaggctggacagttcagtgatttgcctgaggccccacagcaggagaacgagaaggctgcctgatcagagagtctctgaagaagattctgtggctacaggcttcagcagagtgtgagggagaccccagttatttcctcagstgtttccaccaaatcctcctgtctttcgtggccaacaccccaggcaaggcttggggcccccgtctgctgctggacgcagagccatgaagaagaagttagtggtgctgggcctgctggccgtggtcctggtgctggtcattgtcaatctctgtctctggctgccctcagcctccaaggaacctgacaaccatgtgtacaccagggctgccgtggctgcagatgccaagcagtgctcggagattgggagggacacactgcgggatggtggctctgcggtggatgcagccattgcagccctgttgtgtgtggggctcatgaatgcccacagcatgagcatcgggggaaaagctgaggtcatcaatgccygmgaggtggcccccaggctggcctttgccagcatgttcaacagctyggagcagtcccagaagggagggctgtcagtggcagtgcctggggagatccgaggctatgagctggcacaccagcggcatgggcggctgccctgggctcgcctcttccagcccagcatccagctggcccgccagggcttccccgtgggcaagggcttggcggcagtcctggaaaacaagcggaccgtcatcgagcagcagcctgtcttgtytgaggtgttctgccgggatagaaaggtgcttcgggagggggagagactgaccctgccgcgggtggctgacacctacgagacgctggccattgagggtgcccaggccttctacaatggcagcctcatggcccagattgtgaaggacatccaggcggccgtgaggggcattgtgacagctgaggacctgaacaactactgtgctgagctgatcgagcacccgctgaacatcagcctgggagacgcggtgctgtacatgcccagtgcgccgctcagcgggcccgtgctggccctcatcctcaacatcctcaaagggtacaacttctcctgggagagtgtggagacccccgagcagaagggcctgacgtaccaccgcatcgtagaggctttctggtttgcctacgccaagaggaccctgcttggggaccccaagtttgtgaatgtgactgaggtggtccgcaacatgacctctgagttcttcgctgcccagctctgggcccagatctctgacaacaccactcacacgatctcctactacaagcccaagttctacacgccggatgacaggggcactgctcacctgtctgtcatcacagaggacggcagtgctgtgtccgccaccagcaccatcaacctctactttggctccaaggtctgctccccggtcagcgggatcctgttcaataatgaatggaygacttcagctctcccagcatcaccaatgagtttggggtacccccctcacctgccaatttcatccagccagggaagcagccgctctcgtccatgttcccaacgatcatggtgggccaggacggccaggtccggatggtggtgggagctgctgggggcacgcagatcaccacagccactgcactggccatcatctacaacctctggttcggctatgacatgaagcgggccgtggaggagccccggctgcacaaccagcttctgcccaacatcacgacagtggagagaaacattgaccaggcagtgactgcagccctggagacccggcaccatcacacccagatcgcgtccaccttcatcgctgtggtgcaagccatcgtccgcacggctggtggctgggcagctgcctyagactccaggaaaggcrgggagcctgccggctactgagtgctccgggcagacaaggctgacaagcaatccagggacaagatactcacsaggaygaggaagaggactttgggggacgggcttcccctgtgagcagcagagcagcataataaatgaggccactgtgccaggctccaggtggcctccctggcctgtctccccacty

SEQ ID NO: 2609 - DNA, 693 bp, Homo sapiens
cctggggctgtgttcccgggctgccgcagcctgggcctgctcggcccccaccgacagcaaggccatggcgctcacagtctcggcctcctcggtctcacctgcttgggcctctcgcagggaccggcccagaccagcggcgaacttctgcacacagctccagtgtttgctctggatctcgatgactttctctagcgtggccactgcgttgatgttgggcttttgctgcaagactgcctcatccaagggctgcagctctacactgagcagagccgagacacaagcctcagaggcatcacagatggcggtcaagtcatggcctccctccagggccagcaccacccggccccctgccagggtcatcagctgcctggtcaagtggccaaaacatctggcggtgacagagtagccacccagaggagacagatgtccttcaacagcatcaaacccggcggagactaggaccacatcaggtgagaactcgtgggcaatgggcatcaccactgtcctgaaggctgtaaggtactccacgtctccaatgggggggtccacacctcctgtccatgccacgttcacattgtaccccacgcctggtcctccaccaacctcttcaggagccccagagcctggaaagaagttcccgttgtcatagcgatgcagagagatgtagagcacagaggggtcattrtagaacgc

SEQ ID NO: 2610 - DNA, 2513 bp, Homo sapiens
tgccgctgccgckgttctcctagcagcgcgggccggtcggaccgccaaggcagccggcgctggcgatgggaagcggcgtggccgccgacacaggcagtggcaaagtttcccagacgtacacatctggacgcgcggctgccggctacccgtgacccctctaggaagggttcagggatttttaatttggaaaaaaatccacctggtttcctttgtcaaggtctctccgggtggccagcggcaggagctgcaaacttgggcacggcggctacaccggcagcggaccgggctttggagaacctcgggactcaggtgctgaggtgcccagcggctccggacgtgctacggggtgcgagcgcgggggagttcggggcgcacgacaaggaagggcccccgggasctctatatggaggaaggagcccagaatggtgtgcaccaggaagaccaaaactttggtgtccacttgcgtgatcctgagcggcatgactaacatcatctgcctgctctacgtgggctgggtcaccaactacatcgccagcgtgtatgtgcgggggcaggagccggcgcccgacaagaagctggaggaagacaaaggggacactctgaagattattgagcggctggaccacctggagaatgtcatcaagcagcacattcaagaggctcctgccaagcctgaggaggcagaggccgagcccttcacagactcctctctgtttgcacactggggccaggagctcagccccgaaggccggcgcgtggccctgaagcaattccagtactacggctacaacgcctacctcagcgaccgcctgcccctggaccggcccctgcctgacctcagacccagtgggtgccgtaacctctcatttcctgacagcctgccagaggtgagcatcgtgttcatcttcgtcaatgaagcgctttcagtgctgctgcgctccatccactcggccatggaacgcacgcccccacatctgctcaaggagatcattctggtggatgacaacagcagtaacgaggaactgaaggagaagctgaccgaatatgtggacaaggtgaacagccagaagccaggcttcatcaaagtcgtgcgtcacagcaagcaggaaggcctcatccgctccagggtcagtggctggagggcggccactgcccctgtggtggcactctttgatgcccacgtggagttcaatgtgggctgggctgaacctgtactcacccgcatcaaggagaaccggaagcggatcatctcgccatcctttgataacatcaaatatgacaactttgagatagaagagtacccgctggctgcccagggctttgactgggagctgtggtgccgctacctaaatccccccaaggcctggtggaagctggagaactccacagcgccaatcaggagccctgccctcattggctgcttcattgtggaccggcagtacttccaggagatcggcctgctggacgaaggcatggaagtctacgggggcgagaatgtggagcttgggatcagggtgtggcagtgtggcgggagtgtggaggtcctgccctgctcacggattgcccacattgagcgagcccacaagccctacacagaggacctcaccgcccatgtccgcaggaacgctctcagggtggctgaagtctggatggatgaatttaaaagccacgtctacatggcatggaacataccgcaggaggactcaggaattgacattggggacatcactgcraggaaggctctcaggaaacagctgcagtgcaagaccttccggtggtacctggtcagcgtgtacccagagatgaggatgtactccgacatcattgcctatggagtgctgcagaattctctgaagactgatttgtgtcttgaccaggggccagatacagagaatgtycccatcatgtacatctgccatgggatgacgcctcagaacgtgtactacacgagcagtcagcagatccatgtgggcattctgagccccaccgtggatgatgatgacaaccgatgcctggtggaygtcaacagccggccccggctcatcgaatgcagctaygccaaagccaagaggatgaagcttcactggcagttctctcagggaggacccatccagaaccgcaagtctaagcgctgtctggagctgcaggagaatagcgacctggagttcggcttccagctggtgttgcagaagtgctcgggccagcactggagcatcaccaacgtcctgaggagcctsgcgtcctgacccaccggggccacttccggctgcctctttgctactgtgtagcacctgctgcaacrttgcctgctgtccacgtggggttgtttggagtctggggaaccaggttagtgggcccccaagaagagctttttatttcctattcaattttcatggagtttatagaaagatgctgattggtaggtgatggtatgatatcaaactattttgcagttgtaaataggggacagatggaaaatatttataactgacaataaaatattattaagaaaa

SEQ ID NO: 2611 - DNA, 1797 bp, Homo sapiens
agacgcaagacgccgggcctacarcgggagcgtgaggaaagccgtgcgttgcgttccaaggcatctgtgagcccgcggagtatacaccatgagcaaagctcaccctcccgagttgaaaaaatttatggacaagaagttatcattgaaattaaatggtggcagacatgtccaaggaatattgcggggatttgatccctttatgaaccttgtgatagatgaatgtgtggagatggcgactagtggacaacagaacaatattggaatggtggtaatacgaggaaatagtatcatcatgttagaagccttggaacgagtataaataatggctgttcagcagagaaacccatgtcctctctccatagggcctgttttactatgatgtaaaaattaggtcatgtacattttcatattagactttttgttaaataaacttttgtaatagtcaaaaatgctttytcagatgttctgaatatagaatatcagctctcattccagytttttytaacatgaattttcctggttgacrttgatttcaaagggttttatgcattaaagtgaaagaatcttattaaatgtgaaacatggcaaggattccttctgtccatcatctttcaacactgaacagataaagaagttacaaacatgagtgagtttcttctaaaacactaattttcaaaacttgtaagaatagtaactttgatctagyctgactttcccaagtacatctacattccaaatatagtacaacagaagcaaaagacaagaagtaatgatgtagttgtttattttgaatataatcatgaagtggggaaaaattttaatacaagagtagaaagaggattccagagaaaaacattccagtgtatcatggttctttgtgagtgagtagagaggggtagtgaggatgctgtccacaatgtattcatctagttaatgaattgtatggcccacaagctcaaacgagagatacattacagatggttgtattataaacctaatcttaagaaaccttaccaagcaaatgcttaaagactgatttttttgtgatctgataaaaagcctgcaaatcgtgaatcacttttaaactgtacagaatggactacacaccagtatggtaaagttcttgtaaaacaccaaacacaatggctcatagatatatacctctctcactcttaaatggcatttcctaattatagaaaatgtttacaacaaaagaacaagagggatcaaactaacaatcaataaggagaactgatgtgaagtcccatacactgttactccatttttcagcaactctttataactccttcattgacttgactcctttacaacatacagctgaattgtagaactagttcttcaagtgtggttcctatagtagaacagcagcatcactggggaacttaataaaatgcatcttcttatatcccataacaaacttattgaataaacagggtggagcctagcgatgttttaacaagcccttaaggtaactgatgcatgctcaactcagagagccactggagcagagctggctttcattcagcccctgcatcatttttaccagtctcttctattaaaaaaaaaggtctggagcagtaagctctgacagtgttttttcttccaataaaactcttaatactatagttgcataaaactacctaatgcgcccagagtagcaggttctgctaggatttttctcccagtaaaaaagcactcaacactgtagttgcattaaaactacttgatgtccttggtgtattgataacctgttttgcttttgccaaagcaatttca

SEQ ID NO: 2612 - DNA, 1976 bp, Homo sapiens
ccgcggcgtccacactcgccgcgcgcgcggcggccgggctggaccttgctggcccgcggcgccatgagccgcagcctggactcggcgcggagcttcctggagcggctggaagcgcggggcggccgggagggggcagtcctcgccggcgagttcagcgacatccaggcctgctcggccgcctggaaggctgacggcgtgtgctccaccgtggccggcagtcggccagagaacgtgaggaagaaccgctacaaagacgtgctgccttatgatcagacgcgagtaatcctctccctgctccaggaagagggacacagcgactacattaatggcaacttcatccggggcrtggatggaagcctggcctacattgccacgcaaggacccttgcctcacaccctgctagacttctggagactggtctgggagtttggggtcaaggtgatcctgatggcctgtcgagagatagagaatgggcggaaaaggtgtgagcggtactgggcccaggagcaggagccactgcagactgggcttttctgcatcactctgataaaggagaagtggctgaatgaggacatcatgctcaggaccctcaaggtcacattccagaaggagtcccgttctgtgtaccagctacagtatrtgtcctggccagaccgtggggtccccagcagtcctgaccacatgctcgccatggtggaggaagcccgtcgcctccagggatctggccctgaacccctctgtgtccactgcagtgcgggttgtgggcgaacaggcgtcctgtgcaccgtggattatgtgaggcagctgctcctgacccagatgatcccacctgacttcagtctctttgatgtggtccttaagatgaggaagcagcggcctgcggccgtgcagacagaggagcagtacaggttcctgtaccacacggtggctcagatgttctgctccacrctccagaatgccagccccsactaccagaacatcaaagagaattgtgccccactctacgacgatgccctcttcctccggactccccaggcacttctcsccataccccgcccaccmggaggggtcctcaggagcatctctgtgcccgggtccccgggccacgccatggctgacacctacgcggtggtgcagaagcgcggggctccagcgggcgccgggagtgggacgcagacggggacggggacggggacgggggcgcgcagcgcggaggaggcgccgctctacagcaaggtgacgccgcgcgcccagcgacccggggcgcacgcggaggacgcgagggggacgctgcctggccgcgttcctgctgaccaaagtcctgccggatctggcgcctacgaggacgtggcgggtggagctcagaccggtgggctaggtttcaacctgcgcattgggaggccgaagggtccccgggacccgcctgctgagtggacccgggtgtaagtctaacgccagttcctgcctgttgcctcttgtgagctcggactgctgatgccccggtgctgctgagcgccgtgcgcagaatggaaacagtgggcctggatcaaagttaaagtttctcagggtgggaaatgtgggggctttgccccaatgactgtagcattcaaggcttgaggctggaggaggtagctagggtatagtggctggtgaggtgctctcctcaccacacagcactagtccatcctcagcacctgagcctccctcacttggacactcaggggaccacacagagaagtggatggacacttcgccatccaggcagaactaagccaggcataaccacagccaagcagattaaccccaggcagaccgagaagaaaggcaggtcctccacagccctgataaaatctccaagtctcccagtttcgggtccctctcctgggatgcagacccactgcctgcccagctggtacgatccacatgccctcttcttgggaataggggcatgggaaagtgactaaagatactgttct

SEQ ID NO: 2613 - DNA, 1655 bp, Homo sapiens
ccgcggcgtccacactcgccgcgcgcgcggcggccgggctggaccttgctggcccgcggcgccatgagccgcagcctggactcggcgcggagcttcctggagcggctggaagcgcggggcggccgggagggggcagtcctcgccggcgagttcagcaaaaggtgtgagcggtactgggcccaggagcaggagccactgcagactgggcttttctgcatcactctgataaaggagaagtggctgaatgaggacatcatgctcaggaccctcaaggtcacattccagaaggagtcccgttctgtgtaccagctacagtatrtgtcctggccagaccgtggggtccccagcagtcctgaccacatgctcgccatggtggaggaagcccgtcgcctccagggatctggccctgaacccctctgtgtccactgcagtgcgggttgtgggcgaacaggcgtcctgtgcaccgtggattatgtgaggcagctgctcctgacccagatgatcccacctgacttcagtctctttgatgtggtccttaagatgaggaagcagcggcctgcggccgtgcagacagaggagcagtacaggttcctgtaccacacggtggctcagatgttctgctccacrctccagaatgccagccccsactaccagaacatcaaagagaattgtgccccactctacgacgatgccctcttcctccggactccccaggcacttctcsccataccccgcccaccmggaggggtcctcaggagcatctctgtgcccgggtccccgggccacgccatggctgacacctacgcggtggtgcagaagcgcggggctccagcgggcgccgggagtgggacgcagacggggacggggacggggacgggggcgcgcagcgcggaggaggcgccgctctacagcaaggtgacgccgcgcgcccagcgacccggggcgcacgcggaggacgcgagggggacgctgcctggccgcgttcctgctgaccaaagtcctgccggatctggcgcctacgaggacgtggcgggtggagctcagaccggtgggctaggtttcaacctgcgcattgggaggccgaagggtccccgggacccgcctgctgagtggacccgggtgtaagtctaacgccagttcctgcctgttgcctcttgtgagctcggactgctgatgccccggtgctgctgagcgccgtgcgcagaatggaaacagtgggcctggatcaaagttaaagtttctcagggtgggaaatgtgggggctttgccccaatgactgtagcattcaaggcttgaggctggaggaggtagctagggtatagtggctggtgaggtgctctcctcaccacacagcactagtccatcctcagcacctgagcctccctcacttggacactcaggggaccacacagagaagtggatggacacttcgccatccaggcagaactaagccaggcataaccacagccaagcagattaaccccaggcagaccgagaagaaaggcaggtcctccacagccctgataaaatctccaagtctcccagtttcgggtccctctcctgggatgcagacccactgcctgcccagctggtacgatccacatgccctcttcttgggaataggggcatgggaaagtgactaaagatactgttct

SEQ ID NO: 2614 - DNA, 3391 bp, Homo sapiens
ccgcggcgtccacactcgccgcgcgcgcggcggccgggctggaccttgctggcccgcggcgccatgagccgcagcctggactcggcgcggagcttcctggagcggctggaagcgcggggcggccgggagggggcagtcctcgccggcgagttcagcgacatccaggcctgctcggccgcctggaaggctgacggcgtgtgctccaccgtggccggcagtcggccagagaacgtgaggaagaaccgctacaaagacgtgctgccttatgatcagacgcgagtaatcctctccctgctccaggaagagggacacagcgactacattaatggcaacttcatccggggcrtggatggaagcctggcctacattgccacgcaaggacccttgcctcacaccctgctagacttctggagactggtctgggagtttggggtcaaggtgatcctgatggcctgtcgagagatagagaatgggcggaaaaggtgtgagcggtactgggcccaggagcaggagccactgcagactgggcttttctgcatcactctgataaaggagaagtggctgaatgaggacatcatgctcaggaccctcaaggtcacattccagaaggagtcccgttctgtgtaccagctacagtatrtgtcctggccagaccgtggggtccccagcagtcctgaccacatgctcgccatggtggaggaagcccgtcgcctccagggatctggccctgaacccctctgtgtccactgcagtgcgggttgtgggcgaacaggcgtcctgtgcaccgtggattatgtgaggcagctgctcctgacccagatgatcccacctgacttcagtctctttgatgtggtccttaagatgaggaagcagcggcctgcggccgtgcagacagaggagcagtacaggttcctgtaccacacggtggctcagatgttctgctccacrctccagaatgccagccccsactaccagaacatcaaagagaattgtgccccactctacgacgatgccctcttcctccggactccccaggcacttctcsccataccccgcccaccmggaggggtcctcaggagcatctctgtgcccgggtccccgggccacgccatggctgacacctacgcggtggtgcagaagcgcggggctccagcgggcgccgggagtgggacgcagacggggacggggacggggacgggggcgcgcagcgcggaggaggcgccgctctacagcaaggtgacgccgcgcgcccagcgacccggggcgcacgcggaggacgcgagggggacgctgcctggccgcgttcctgctgaccaaagtcctgccggatctggcgcctacgaggacgtggcgggtggagctcagaccggtgggctaggtttcaacctgcgcattgggaggccgaagggtccccgggacccgcctgctgagtggacccgggtgtaagtctaacgccagttcctgcctgttgcctcttgtgagctcggactgctgatgccccggtgctgctgagcgccgtgcgcagaatggaaacagtgggcctggatcaaagttaaagtttctcagggtgggaaatgtgggggctttgccccaatgactgtagcattcaaggcttgaggctggaggaggtagctagggtatagtggctggtgaggctgcacagagcagattcaagaaagaagatcaggaaggggcatgacccctgagttatgaaggggagaagggacagatgagcttccggagactgctctcctcaccacacagcactagtccatcctcagcacctgagcctccctcacttggacactcaggggaccacacagagaagtggatggacacttcgccatccaggcagaactaagccaggcataaccacagccaagcagattaaccccaggcagaccgataaaaagacctccagataggcagacagacagatggaccaccaacctggacagacagccaaagcttcagagatacagtccacaggtggacaaagggatccccagccagagagagagagaccagccaacagcttgatagaccagtgcagccagagagaccaccaaacasagcccccaaaagacagacatctctgctagctggacagccaggtggaccccctaagttagattactagacagatataaacagatcccctgctgaacagatayacagagttctcagaccccacccccaccctcaggtgggctggctggctgacagaccttctggccagacagactcctaaccaaccagatggactgccagacaggcagacatcagccacatggaatcctgacatcccagccagccggccagactctcatcttgatgtcttgatggatggaccccagctagtcagacatgatcctccagattgacagacaagtcccccaaatgagtacacatctccagctattcagacagatggacccccagcaaatcaggacctatctaggcagaccccagccagacccccgccagacagactcccaaccagactgaccccttactattcacacagcctgccgagtagctgggactacaggtctaattttttttttttttaagaaatgagtttttgccatgttgcccagactggtcttgaactcccaacctcaagcaatcctcctgcctcagcctcccaaagtgctgagattacaggtgtgagccaccaggctcagccccctaagatttgaaacactttaaatggcccatggtagggttcctgctaggataaaacattaagcggctgttaaaagaaataaaaggaggacacgtctctgtgcactggtgtggacaaatctccaagtcactgcaaaatggaaaaagtataagatgctctttccctgaacctcaagggtcccgcccctctcactttcaggtctctggacctctgactgacactgtgcctgcccaggtccctgtatgcactgccacagtgccctgggccccatgtccacccctgtcctgcccttctctgggatagggctggccttcctctgcctctgcctggctgcatccatggtcgatctcaagtgccttggcatgaactccactctcctgcagccttcaatcaaggaatgatggggatgtgtacataccccaccccaccccttggcagggtgatgctgaggtgtggatttttaacagttcccagactttcccaggaggcttgggtttgggtgcccacagtgggagctggtgtgatatcataccttcgccggccgcctttccttcctgttctctgtgcccctactcccactctagagctgccccgtttctctgttttcgtgaaagagctgaccctgtgctgcctcccactctcccaatgcccctgccactcctgtgagcctgctgctggtgaggtcggtgctgacctctgtgt

SEQ ID NO: 2615 - DNA, 8398 bp, Homo sapiens
  misc_feature (1)...(8398): n = A,T,C or G
gaagctttcggcggcggctgagccagctgaggggaaaaatggctcggactgtggcggcttcggcggctcaggttgtggtagaggcggaggctcaggcagcttgaggccttgctattttggaagctacaagaaaaaaatagaggaaggaaggtttggtctttttagtggacatggctcagatatctagcaacagcggatttaaagaatgtccatcttcacatccggaaccaacaagagcraaagatgtggacaaagaagaagcattacagatggaagcagaggctttagcaaaactgcaaaaggatagacaagtgactgacaatcagagaggctttgagttgtcaagcagcaccagaaaaaaagcacaggtttataacaagcaggattatgatctcatggtgtttcctgaatcagattcccaaaaaagagcattagatatygatgtagaaaagctcacccaagctgaacttgagaaactattgctggaygacagtttcgagactaaaaaaacacctgtattaccagttactcctattctgagcccttccttttcagcacagctctattttagacctactattcagagaggacagtggccacctggattacctgggccttccacttatgctttaccttctatttatccttctacttacagtaaacaggctgcattccaaaatggcttcaatccaagaatgcccacttttccatctacagaacctatatatttaagtcttccgggacaatctccatatttctcatatcctttgacacctgccayaccctttcatccacaaggaagcttacctatctatcgtccagtagtcagtactgacatggcaaaactatttgacaaaatagctagtacatcagaatttttaaaaaatgggaaagcaaggactgatttggagataacagattcaaaagtcagcaatctacaggtatctccaaagtctgaggatatcagtaaatttgactggttagacttggatcctctaagtaagcctaaggtggataatgtggaggtattagaccatgaggaagagaaaaatgtttcaagtttgctagcaaaggatccttgggatgctgttcttcttgaagagagatcgacagcaaattgtcatcttgaaagaaaggtgaatggaaaatccctttctgtggcaactgttacaagaagccagtctttaaatattcgaacaactcagcttgcaaaagcccagggccatatatctcagaaagacccaaatgggaccagtagtttgccaactggaagttctcttcttcaagaagttgaagtacagaatgaggagatggcagctttttgtcgatccattacaaaattgaagaccaaatttccatataccaatcaccgcacaaacccaggctatttgttaagtccagtcacagcrcaaagaaacatatgcggagaaaatgctagtgtgaaggtctccattgacattgaaggatttcagctaccagttacttttacgtgtgatgtgagttctactgtagaaatcattataatgcaagccctttgctgggtacatgatgacttgaatcaagtagatgttggcagctatgttctaaaagtttgtggtcaagaggaagtgctgcagaataatcattgccttggaagtcatgagcatattcaaaactgtcgaaaatgggacacagaaattagactacaactcttgaccttcagtgcaatgtgtcaaaatctggcccgaacagcagaagatgatgaaacacccgtggatttaaacaaacacctgtatcaaatagaaaaaccttgcaaagaagccatgacgagacaccctgttgaagaactcttagattcttatcacaaccaagtagaactggctcttcaaattgaaaaccaacaccgagcagtagatcaagtaattaaagctgtaagaaaaatctgtartgctttagatggtgtcgagactcttgccattacagaatcagtaaagaagctaaagagagcagttaatcttccaaggagtaaaactgctgatgtgacttctttgtttggaggagaagacactagcaggagttcaactaggggctcacttaatcctgaaaatcctgttcaagtaagcataaaccaattaactgcagcaatttatgatcttctcagactccatgcaaattctggtaggagtcctacagactgtgcccaaagtagcaagagtgtcaaggaagcatggactacarcagagcagctccagtttactatttttgctgctcatggaatttcaagtaattgggtatcaaattatgaaaaatactacttgatatgttcactgtctcacaatggaaaggatctttttaaacctattcaatcaaagaaggttggcacttacaagaatttcttctatcttattaaatgggatgaactaatcatttttcctatccagatatcacaattgccattagaatcagttcttcaccttactctttttggaattttaaatcagagcagtggaagttcccctgattctaataagcagagaaagggaccagaagctttgggcaaagtttctttacctctttttgactttaaacggtttttaacatgtggaactaaacttctatatctttggacttcatcacatacaaattctgttcctggaacagttaccaaaaaaggatatgtcatggaaagaatagtgctacaggttgattttccttctcctgcatttgatattatttatacaactcctcaagttgacagaagcattatacagcaacataacttagaaacactagagaatgatataaaagggaaacttcttgatattcttcataaagactcatcacttggactttctaaagaagataaagcttttttatgggagaaacgttattattgcttcaaacacccaaattgtcttcctaaaatattagcaagcgccccaaactggaaatgggttaatcttgccaaaacttactcattgcttcaccagtggcctgcattgtacccactaattgcattggaacttcttgattcaaaatttgctgatcaggaagtaagatccctagctgtgacctggattgaggccattagtgatgatgagctaacagatcttcttccacagtttgtacaagctttgaaatatgaaatttacttgaatagttcattagtgcaattccttttgtccagggcattgggaaatatccagatagcacacaatttatattggcttctcaaagatgccctgcatgatgtacagtttagtacccgatacgaacatgttttgggtgctctcctgtcagtaggaggaaaacgacttagagaagaacttctaaaacagacgaaacttgtacagcttttaggaggagtagcagaaaaagtaaggcaggctagtggatcagccagacaggttgttctccaaagaagtatggaacgagtacagtccttttttcagaaaaataaatgccgtctccctctcaagccaagtctagtggcaaaagaattaaatattaagtcgtgttccttcttcagttctaatgctgtccccctaaaagtcacaatggtgaatgctgaccctatgggagaagaaattaatgtcatgtttaaggttggtgaagatcttcggcaagatatgttagctttacagatgataaagattatggataagatctggcttaaagaaggactagatctgaggatggtaattttcaaatgtctctcaactggcagagatcgaggcatggtggagctggttcctgcttccgataccctcaggaaaatccaagtggaatatggtgtgacaggatcctttaaagataaaccacttgcagagtggctaaggaaatacaatccctctgaagaagaatatgaaaaggcttcagagaactttatctattcctgtgctggatgctgtgtagccacctatgttttaggcatctgtgatcgacacaatgacaatataatgcttcgaagcacgggacacatgtttcacattgactttggaaagtttttgggacatgcacagatgtttggcagcttcaaaagggatcgggctccttttgtgctgacctctgatatggcatatgtcattaatgggggtgaaaagcccaccattcgttttcagttgtttgtggacctctgctgtcaggcctacaacttgataagaaagcagacaaacctttttcttaacctcctttcactgatgattccttcagggttaccagaacttacaagtattcaagatttgaaatacgttagagatgcacttcaaccccaaactacagacgcagaagctacaattttctttactaggcttattgaatcaagtttgggaagcattgccacaaagtttaacttcttcattcacaaccttgctcagcttcgtttttctggtcttccttctaatgatgagcccatcctttcattttcacctaaancatactcctttagacaagatggtcgaatcaaggaagtctctgtttttacatatcataagaaatacaacccagataaacattatatttatgtagtccgaattttgagggaaggacagattgaaccatcatttgtcttccgaacatttgwcgaatttcaggaacttcacaataagctcagtattatttttccactttggaagttaccaggctttcctaataggatggttctaggaagaacacacataaaagatgtagcagccaaaaggaaaattgagttaaacagttacttacagagtttgatgaatgcttcaacggatgtagcagagtgtgatcttgtttgtactttcttccaccctttacttcgtgatgagaaagctgaagggatagctaggtctgcagatgcaggttccttcagtcctactccaggccaaataggaggagctgtgaaattatccatctcttaccgaaatggtactcttttcatcatggtgatgcatatcaaagatcttgttactgaagatggagctgacccaaatccatatgtcaaaacatacctacttccagataaccacaaaacatccaaacgtaaaaccaaaatttcacgaaaaacgaggaatccgacattcaatgaaatgcttgtatacagtggatatagcaaagaaaccctaagacagcgagaacttcaactaagtgtactcagtgcagaatctctgcgggagaattttttcttgggtggagtaaccctgcctttgaaagatttcaacttgagcaaagagacggttaaatggtatcagctgactgcggcaacatacttgtaaactagtgaatgtytgagctttggaagcatgaacagttataaacgtgcatgcatacatgcacacacacacagacacacacacacacacttgttaattttgtatagtatttttatacttggacagaacttataaagttaaatatacttgctgcatttcaacacatctgttggaccaacagtcacataactaacctttttgaatttttggaagccattgctgttttaaagtcattatgtagaatgctacaaaccctaaacktaatatatactaattcctgaaaaagactttgagacagtactatgtcagttcagccacctattttgcattgttttctataaggaggcaaagcatatgtgttttcctgttatgcaccttttatagcctttaccactgtgtaatgttcacaaacaccaaagtaaaggaaaaatgcaggatgttaccgtaaaatccagctgctattcatggagctgaaaaacaaagcacaaataatagatagctaagttaagaactactaagtagtttatagaagtagggaaaaacgtaatactgctttttattcatgtctttaaagcctttttcagaataagtgccaatcactgatgttgtaaataatggtgccttaactttatatgcttccctggcacttcgtttctgatttttttcctgatttgataaataattagtacatagttttcactcacttgcagcttactaaagacaagaaattatgtacatgtactaatgtttttcccacaaaaaaatcctttacttctgatgtatgaattagttatctaaatagttaagcctaatacctgaataagactcaccaatgtgattgtacaataaattctatcattccattaaaatcctacatttattcccaggaatggtaatttcacctccctacatctatactccactccctcagtaaataagtgaaaattgttaacccatgtgcccattcctgagtagggcagactcttcacaagaggcccatgacaagaattctagggtccagattgaactttaatatagacctttgtctgtgtagaccagtttgtcttgtaaactgtcttacttatgtgtgtaaacattttacattcacatgaaaagttattttcctttatataattggattcagaatcataagggacaggactgaaattattctacagtaaccagtaagaataagattcggccgggcacggtggctcctgcctgtaatcccaacactttgggaggccaaggtgggcggatcacctgaggtcaggagtttgagaccagcctggccaacatggtgaaaccccgtctctacacaaaaattagccaggcgtggtagcgggcatctgtaatcccagctacttggggggctgaggcaggagaatcgcttgaacccaggaggcggaggttgcagtgagccgagatcacgccactgcactcccgcctgggtgacaagagcaaaactccatcttaaaaaaaaagaaaaaaagagtaagattcatttttattagttactcaacttcagacacaattttgttaatttggatatatacatatatataataagaactcatggttagaatagaaatacagatactttaaaaatggtaatagaaattgtaccaatcaggttgctgtgagaaaactgacaaaatatgcaataaagaataccaagagagaaaggacaatcgccaattcagtttcccagaacagaatttttatgaactgcacaaatgtttaatgtaaatggtgatacctacagggaagaaatagaagagttgataatatatcactgggacggggtgggggaaagacttgaaatttttggtgcctaacactaatggtccatatgtagttaaacccatgagtatggtatatgaatgtcttttttaaatgttaaaatgtgttgtctatttaargttaattaaaatgcagatcaaagcaccaccatttgctttttccacagatcattaacatttccttaaagtatgtaagtacctttgcaaatgcaaatgtactagtaattttcacttaagcttttgagaccgaattccattccaccagttatcacttagccactgtaatttaaaaacaaacaaacaaacaaaaactgtcttggtagaggtcgttaattagactcaacatgtactgcctttttgcagtctattatgacagtgtcttttagcacaaataatagagctaaaaaatgtcctgtcacttccattataagaaatctggattcatatctaagtgtatattataatactgtacagttaagagttcagaacaagtggtaatgttttctcttaatttaactcattttgtgccttctttactcattcaaacacacatacattttacatatagtttatttctttatgaaatgctaatcttcagcccgtaccaaaaagtagagtggagcctctttgcactactactatcaataaattttaaatcagttggatttttaagcattttttaaaagctgacattaaagtaaatctaaaaaaagtttaacaaactggccaagacactaatttttatgtataatcacaatattttatactcacctttattgactaaaaataattatgctacatgttgtcctgcatcagaagaattatttcttcttgccagtgttttgggatttgaagataatggttcactcaaagaacctattattttctctactgaggaacccaatgtagaacttgcactgatatttttattactgcctttatatgaatctataggtatctaaatgttaaggcatgtatgatctttgatcatttcttttttcaaattaaagttgtataaaagtttcaatatcttgccttaaattagttgcctattctttctaggattcaaatattgtgacatttaaaaaagaaaacattcacttttgaaacttagacttcagatcaaaaaggactgaacccccactatcataatccatacattcatttccatgttgtttgactagcagtgcatatatgaatgaatatggtaattaatcttacctataagaaccaaatactttaattatattaagatagtgaataaagatgtataatatttttattaataccttgaatatattcagtggattgaatgtgacttcataactgtactacgattgtattaaaatatttctggaataaaagaac

SEQ ID NO: 2616 - DNA, 752 bp, Homo sapiens
gaaggacattttataatgaagaaagagtcaattcatcaagaagatacaacaattataaaaactatatcattgaaagcctttyctctaagatcgggaataagacaaggacgcccactttcacaactgttattcaacacagtactgggagtcctagcttgcagagagcccaaaggatggtatgacagctcggtaaagaaagaggaagtcaaattgtccctgtttgcagatgacatgattgtatatctagaaaaccccattgtctcagcccaagatctccttaagccgataagcaacttcaggaaagtctcaggatacaaaataaatatgcaaaaatcacaagcattcttatacaccaataacagacaaacagagagccaaatcatgagtgaactcccattcacaattgcttcaaagagaataaaatacctaggaatccaacttacaagggatgtgaaggacctcttcaaggagaactacaaaccactgctcaatgaaataaaagaggacacaaatggaaaaacattccatgctcatggataggaagaatcaatgtcgtgaaaatggccatactgcccaaggtagtttatagattcaatgtcatccccatcaagctaccaataactttcttcacagaattggaaaaaactactttaaagttcatatggaaccaaaaaagagccctcattgccaagtcaatcctaagccaaaagaacaaagcgggaggcatcatgctacctgacttcaaactatac

SEQ ID NO: 2617 - DNA, 6302 bp, Homo sapiens
gggactagcgcagaggccctgtccgtgtccctcactgctcactgcagtgcttggcccccagcaggtcctcaacggctgcaggataaatataataagtgccatgccctttcctgttttccctcagaggcaccctcccccgagctgggggagcaggcttctggctgcgtgtgtccttggcacccagcctctccgaggacagcaagttcactgcaggagggcggggatgggacccacagagcctggagtggagagtcccggacagagtggtgggaaaggaagcgttttcttgcttggggcgaaagggggcagcggagcggagcgcccgaaacccagcccctgcggaccgcaatctttgggaaaaaggcgcaaggtgggaacgcagggccgcacgtgggaaccgttcgcggctgccgggtttgcagcccctgcccgcgcagctgggagccgcaggaggcggcccgggactccagcctgcagcccctatcccgcctcctcccacgctccagccacggcgcggcgctacctgctgcagcctctcttctccggagaggcccgggctcctccytacacccccgcggcccagccccgggtcccaggctccrgctccgggtcagcatcctcgcgctcaaggcggtcatgccggactcctgcggactacacatcccggcggcccatgcggccccgtcacgtgatgcaaggatcgccggcctttccgccagagggcggcacagaactacaactcccagcaagctcccaaggcggccctccgcgcaatgccgctaccggaagtgcgggtcgcgcttccggcggcgtcccggggccaggggggtgcgcctttctccgcgtcggggcggcccggagcgcggtggcgcggcgcgggaggggttttctggtgcgtcctggtccaccatggccaaaccaacaagcaaagattcaggcttgwaggagaagtttaagattctgttgggactgggaacaccgaggccaaatcccaggtctgcagagggtaaacagacggagtttatcatcaccgcggaaatactgagagaactgagcatggaatgtggcctcaacaatcgcatccggatgatagggcagatttgtgaagtcgcaaaaaccaagaaatttgaagagcacgcagtggaagcactctggaaggyggtcgcggatctgttgyagccggagcggmcgctggaggcccggcacgcggtgctggctctgctgaaggccatcgtgcaggggcagggcgagcgtttgggggtcctcagagccctcttctttaaggtcatcaaggattacccttccaacgaagaccttcrcgaaaggctggaggttttcaaggccctcacagacaatgggagacacatcacctasttggaggaagagctggctgactttgtcctgyagtggatggatgttggcttgtcctcggaattccttctggtgctggtgaacttggtcaaattcaatagctgttacctcgacgagtacatcgcaaggatggttyagatgatctgtctgctgtgcgtccggaccgcgtcctctgtggacatagaggtctccctgcaggtgctggaygccgtggtctgctacaactgcctgccggctgagagcctcccgctgttcatcgttaccctctrtcgcaccatcaacgtcaaggagctctgmgagccttgmtggaasctgatgcsgaacctccttggcacccacctgggccacagcgccatctacaacatgtgccacctcatggaggacagagcctacrtggaggacgcgcccctgctgagaggagccgtgttttttgtgggcatggctctctgrggagcccaccggctctattctctcaggaactcgccgacatctgtgttgccatcattttascaggccatggcatgtccgaacgaggtggtgtcctatgagatcgtcctgtccatcaccaggctcatcaagaagtataggaaggagctccaggtggtggcgtgggacattctgctgaacatcatckaacrgctccttcarcagctccagaccttggacagcccggagctcaggaccatcgtccatgacctgttgaccacggtggaggagctgtgtgaccagaacgagttccacgggtctcaggagagakactttgaactggtggagagatgtgcggaccagaggyctgagtcctccctcctgaacctgatctcctatagagcgcagtccatccacccggccaaggacggctggattcagaacctgcaggcgctgatskagagattcttcaggagygagtccygaggcgccgtgcgcatcaaggtgctggacgtgctgtcctttgtgctgctcatcaacaggyagttctatgaggaggagctgattawctcagtggtcatctcgcagctctcccacatccccgaggataaagaccaccaggtcygaaagctggccacccagttgctggtggacytggcagagggctgccacacacaccacttcaacagyctgctggacatcatcgagaaggtgatggcccgctccctctccccacccccggagctggaagaaagggatgtggccgcatactmggcctccttggaggatgtgaagacagccgtcctggggcttctggtcatccttcagaccaagctgtacaccctgcctgcaagccacrccacgcgtgtgtatgagatgctggtcagccacattyagctccactasawgcacagctacaccctgccaatcgcgagcagcatcyrgctgcaggmctttgacttcctgttgctgctgcgggccgactcactgcaccgcctgggcctgcccaacaaggatggagtcgtgcggttcagcccctactgcgtctgcractacatggagccagagagaggctctgagaagaagaccagcggccccctttctcctcccacagggcctcctggcccggcgcctgcaggccccgccgtgcggctggggtccgtgccctactccctgctcttccgcgtcctgctgcagtrcttgaagcaggagtctgactgraaggtgctgaagctggttctgggcaggctgcctgagtccckgcgctataaagtgctcatctttacttccccttgcagtgtggaccagctgtgctctgctctctgctccatgctttsaggcccaaagacactggagcggctccgaggcgccccagaaggcttctccagaactgacttgcacctggccgtggttccagwgctgacagcattaatctcttaccataactacctggacaaaaccaaacagcgcgagatggtctastgcctggagcagggcctcatccaccgctgtgccagmcagtgcgtcgtggccttgtccatctgcagcgtgragatgcytgacatcatcatcaaggcgctgcctgttmtggtggtgaagctcacgcacatctcagccacagccagcatggccgtcccactgctggagttcctgtccactctggccaggctgccgcacctctacaggaacttygccgcggagyagtatgccagtgtgttcgccatctccctgccgtacaccaacccctccaagtttaatcagtacatcgtgtgwctggcccatcacgtcatagccrtgtgrttcatcaggtgccgcctgcccttccggaaggattttgtccctttcatcactaagggcctgcggtccaatgtcctcttgtcttttgatgacaccccckagaaggacagcttcagggcccggagtactagtctcaacgagagacccaagaggatayagacgtccctcaccagtgccagcttggggtctgcagatgagaactccgtggccyaggctgacgatagcctgaaaaacctccacctggagctcacggaaacctgtctggacatgatggctygatacgtcttctccaacttcacggctgtcccsaagaggtctcctgtgggcgagttcctcctagcgggtggcaggaccaaaaccyggctggttgggaacaagcttgtcactgtgacgasaagcgtgggaaccgggacccggtcgttactaggcctggactcgggggagctgyagtccggcccggagtcgagctccagccccggggtgcatgtgagacagaccaaggaggcgccggccaagctggagtcccaggctgggcagcaggtgtcccgtggggcccgggatcgggtccgttccatgtcggggggccatggtcttygagttggcgycctggacgtgccggcctccyagttcctgggcagtgccacttctccaggaccacggactgcaccagccgcgaaacctgagaaggcctcagctggcacccgggttcctgtgyaggagaagacgaacctggcggcctatgtgcccctgctgacccagggctgggcggagatcctggtcyggaggcccacagggaacaccagctggctgatgagcctggagaacccgctcagccctttctcctmggacatcaacaacatgcccctgyaggagctgtctaacgccctcatggcggctgagcgcttcaaggagcaccgggacacagccctgtasaagtcactgtcggtgccggcagccagcacggccaaaccccctcctctgcctcgctccaacacagtggcctctttctcctccctgtaccagtccagctgccaaggacagctgcacaggagcgtttcctgggcagwctccgccgtggtcatggaggagggaagtccgggcraggttcctgtgctggtggagcccccagggttggaggacgttgaggcagcgctaggcatggacaggcrcacggatgcctacagcaggtcgtcctcagtctccagccaggaggagaagtcgctccacgcggaggagctggttggcaggggcatccccatcgagcgagtcgtctcctcgkagggtggccggccctctgtggacctctccttccagccctcgcagcccctgagcaagtccagctcctctcccgagctgcagactctgcaggacatcctcggggaccctggggacaaggccgacgtgggccggctgagccctgaggttaaggcccggtcayagtcagggaccctggacggggaaagtgctgcctggtcggcctmgggcgaagacagtcggggccagcccgagggtcccttgccttccagctccccccgctcgcccagtggcctccggcccygaggttacaccatctccgactcggccccatcacgcaggggcaagagagtagagagggacgcctwaaagagcagagccacagcctccaatgcagagaaagtgccaggcatcaaccscartttcgtgttcctgymgctctaccattcccccttctttggcgaygagtcaaacaagccaatcctgctgcccaatgagtcacagtcctttgagcggtcggtgcagctcctcgaccagatcccatcatacgacacccacaagatcgccgtcctgwrtgttggagaaggccagagcaacagcragctcgccatcctgtccaatgagcatggctcctacaggtasacggagttcctgacgggcctgggccggctcatcgagctgaaggactgccagccggacaaggtgtacmtgggaggccyggacgtgtgtggtgaggacggccagttcacctactgctggcacgatgacatcatgcaagccgtcttcyacatcgccaccctgatgcccaccaaggacgtggacaagcaccgctgcgacaaraagcgccacctgggcmwsgactttgtgtccaytgtctrcaatgactccggtgaggacttcaagcttggcacyatcaagggcyagttcaactttgtccacgtgatcgtcaccccrctggactacgagtgcaacctggtgtccctgcagtgcaggaaakacatggagggccttgtggacaccagcgtggccaagatcgkgwctgaccgcaacctgcccttcgtggcccgccagatggccctgcacgcaaatatggccycayaggtgcatcatagccgctccaaccccaccgayatctacccctccaagtggattgcccggctccgccacatcaagcggytccgccagcggatctgcgaggaagccgcctactccaaccccagcctacctytggtgcaccctccgtcccmtascaaagcccctgcacagactccagccgagcccacacctggctatsaggtgggccagcggaagcgcctcatctcctcsgtggaggacttcaccgagtttgtgtgaggccggggccctccctcctgcactgrccttggacggtattgcctgtcagtgaaataaataaagtcctgaccccagtgcacagacatagaggcacagattgc

SEQ ID NO: 2618 - DNA, 1369 bp, Homo sapiens
cctccccccagtgcctccmtccccaccctcccctcttctccctctcaaccctcccctcttctccccgcagcacctccctctccaccctccccccatcctcccagcgcctccctccccaccctcytcccccattcccccagcgcctccctccctaccattcccctcctgtccccgcagagcctccctccccaccctccccctttmtccccccagcacctccctccccaccccacctgctgaggggatactcttcctcctccctcctcagaggcggcccgggactccagcctgcagcccctatcccgcctcctcccacgctccagccacggcgcggcgctacctgctgcagcctctcttctccggagaggcccgggctcctccytacacccccgcggcccagccccgggtcccaggctccrgctccgggaccacrtccacctccggctcccggcaggccagcacctggacggtcaccgtggcctgcgccacgaagaagctcaccaggttggaggcgttcacctgcacgcggtagtccccaggcctcaggaagcgctgcacggcgggactgtccaccattgccagggyggccccggcccaggccygacactgctcctgcgcctgcagccaggccgccttctccaccaccaggcgragaggcctgggggcctcagccctctgcacccatctcagccctatgccgagtgccacmtggacctgtccacccagggycaggaagggcacggacccccaacccatcccacgcagggmcaaggccccccatcccctgtccacagtcccccacagagccaaggtctcccaaccctgtcyacagcccccacacagactcgaggggcccccatctcctgttctgaacccaacagggtggtcccactgtgggaccacaaccaggtatgactgtrtgagaagcaggctcactaccaggctaccagggagcacagsggagcaggcgccacctygaggcataaacccagagaaacaagacctccaagacggccaggcactggggcacacgccggtaacacagcaccgtgggagctgagacggaaggatcgcctgrgcccaggattttgaaaccaccctgggcaacacagtgagaccccgtatctacaaaaaaatacacattagccaggcatggcggcatgcgcctggggtcccaagtactcgggaggtagaggagagaaaaatcacttgagcccagagaggtcaaggctacagggagctgagatcgcatcactgtactccagctggggcaggagaatcgcttgaacccgggagatggaggctgcagtgagccgagatcacaccattgtcctccagcctgggtgacagagccagactccgtctcaaa

SEQ ID NO: 2619 - DNA, 6365 bp, Homo sapiens
gggactagcgcagaggccctgtccgtgtccctcactgctcactgcagtgcttggcccccagcaggtcctcaacggctgcaggataaatataataagtgccatgccctttcctgttttccctcagaggcaccctcccccgagctgggggagcaggcttctggctgcgtgtgtccttggcacccagcctctccgaggacagcaagttcactgcaggagggcggggatgggacccacagagcctggagtggagagtcccggacagagtggtgggaaaggaagcgttttcttgcttggggcgaaagggggcagcggagcggagcgcccgaaacccagcccctgcggaccgcaatctttgggaaaaaggcgcaaggtgggaacgcagggccgcacgtgggaaccgttcgcggctgccgggtttgcagcccctgcccgcgcagctgggagccgcaggaggcggcccgggactccagcctgcagcccctatcccgcctcctcccacgctccagccacggcgcggcgctacctgctgcagcctctcttctccggagaggcccgggctcctccytacacccccgcggcccagccccgggtcccaggctccrgctccgggtcagcatcctcgcgctcaaggcggtcatgccggactcctgcggactacacatcccggcggcccatgcggccccgtcacgtgatgcaaggatcgccggcctttccgccagagggcggcacagaactacaactcccagcaagctcccaaggcggccctccgcgcaatgccgctaccggaagtgcgggtcgcgcttccggcggcgtcccggggccaggggggtgcgcctttctccgcgtcggggcggcccggagcgcggtggcgcggcgcgggaggggttttctggtgcgtcctggtccaccatggccaaaccaacaagcaaagattcaggcttgwaggagaagtttaagattctgttgggactgggaacaccgaggccaaatcccaggtctgcagagggtaaacagacggagtttatcatcaccgcggaaatactgagagaactgagcatggaatgtggcctcaacaatcgcatccggatgatagggcagatttgtgaagtcgcaaaaaccaagaaatttgaagagcacgcagtggaagcactctggaaggyggtcgcggatctgttgyagccggagcggmcgctggaggcccggcacgcggtgctggctctgctgaaggccatcgtgcaggggcagggcgagcgtttgggggtcctcagagccctcttctttaaggtcatcaaggattacccttccaacgaagaccttcrcgaaaggctggaggttttcaaggccctcacagacaatgggagacacatcacctasttggaggaagagctggctgactttgtcctgyagtggatggatgttggcttgtcctcggaattccttctggtgctggtgaacttggtcaaattcaatagctgttacctcgacgagtacatcgcaaggatggttyagatgatctgtctgctgtgcgtccggaccgcgtcctctgtggacatagaggtctccctgcaggtgctggaygccgtggtctgctacaactgcctgccggctgagagcctcccgctgttcatcgttaccctctrtcgcaccatcaacgtcaaggagctctgmgagccttgmtggaasctgatgcsgaacctccttggcacccacctgggccacagcgccatctacaacatgtgccacctcatggaggacagagcctacrtggaggacgcgcccctgctgagaggagccgtgttttttgtgggcatggctctctgrggagcccaccggctctattctctcaggaactcgccgacatctgtgttgccatcattttascaggccatggcatgtccgaacgaggtggtgtcctatgagatcgtcctgtccatcaccaggctcatcaagaagtataggaaggagctccaggtggtggcgtgggacattctgctgaacatcatckaacrgctccttcarcagctccagaccttggacagcccggagctcaggaccatcgtccatgacctgttgaccacggtggaggagctgtgtgaccagaacgagttccacgggtctcaggagagakactttgaactggtggagagatgtgcggaccagaggyctgagtcctccctcctgaacctgatctcctatagagcgcagtccatccacccggccaaggacggctggattcagaacctgcaggcgctgatskagagattcttcaggagygagtccygaggcgccgtgcgcatcaaggtgctggacgtgctgtcctttgtgctgctcatcaacaggyagttctatgaggaggagctgattawctcagtggtcatctcgcagctctcccacatccccgaggataaagaccaccaggtcygaaagctggccacccagttgctggtggacytggcagagggctgccacacacaccacttcaacagyctgctggacatcatcgagaaggtgatggcccgctccctctccccacccccggagctggaagaaagggatgtggccgcatactmggcctccttggaggatgtgaagacagccgtcctggggcttctggtcatccttcagaccaagctgtacaccctgcctgcaagccacrccacgcgtgtgtatgagatgctggtcagccacattyagctccactasawgcacagctacaccctgccaatcgcgagcagcatcyrgctgcaggmctttgacttcctgttgctgctgcgggccgactcactgcaccgcctgggcctgcccaacaaggatggagtcgtgcggttcagcccctactgcgtctgcractacatggagccagagagaggctctgagaagaagaccagcggccccctttctcctcccacagggcctcctggcccggcgcctgcaggccccgccgtgcggctggggtccgtgccctactccctgctcttccgcgtcctgctgcagtrcttgaagcaggagtctgactgraaggtgctgaagctggttctgggcaggctgcctgagtccckgcgctataaagtgctcatctttacttccccttgcagtgtggaccagctgtgctctgctctctgctccatgctttsaggcccaaagacactggagcggctccgaggcgccccagaaggcttctccagaactgacttgcacctggccgtggttccagwgctgacagcattaatctcttaccataactacctggacaaaaccaaacagcgcgagatggtctastgcctggagcagggcctcatccaccgctgtgccagmcagtgcgtcgtggccttgtccatctgcagcgtgragatgcytgacatcatcatcaaggcgctgcctgttmtggtggtgaagctcacgcacatctcagccacagccagcatggccgtcccactgctggagttcctgtccactctggccaggctgccgcacctctacaggaacttygccgcggagyagtatgccagtgtgttcgccatctccctgccgtacaccaacccctccaagtttaatcagtacatcgtgtgwctggcccatcacgtcatagccrtgtgrttcatcaggtgccgcctgcccttccggaaggattttgtccctttcatcactaagggcctgcggtccaatgtcctcttgtcttttgatgacaccccckagaaggacagcttcagggcccggagtactagtctcaacgagagacccaagagtctgaggatagccagaccccccaaacaaggcttgaataactctccacccrtgaaagaattcaaggagagctctgcagccgaggccttccggtgccgcagcatcagtgtgtctgaacatgtggtccgcagcaggatayagacgtccctcaccagtgccagcttggggtctgcagatgagaactccgtggccyaggctgacgatagcctgaaaaacctccacctggagctcacggaaacctgtctggacatgatggctygatacgtcttctccaacttcacggctgtcccsaagaggtctcctgtgggcgagttcctcctagcgggtggcaggaccaaaaccyggctggttgggaacaagcttgtcactgtgacgasaagcgtgggaaccgggacccggtcgttactaggcctggactcgggggagctgyagtccggcccggagtcgagctccagccccggggtgcatgtgagacagaccaaggaggcgccggccaagctggagtcccaggctgggcagcaggtgtcccgtggggcccgggatcgggtccgttccatgtcggggggccatggtcttygagttggcgycctggacgtgccggcctccyagttcctgggcagtgccacttctccaggaccacggactgcaccagccgcgaaacctgagaaggcctcagctggcacccgggttcctgtgyaggagaagacgaacctggcggcctatgtgcccctgctgacccagggctgggcggagatcctggtcyggaggcccacagggaacaccagctggctgatgagcctggagaacccgctcagccctttctcctmggacatcaacaacatgcccctgyaggagctgtctaacgccctcatggcggctgagcgcttcaaggagcaccgggacacagccctgtasaagtcactgtcggtgccggcagccagcacggccaaaccccctcctctgcctcgctccaacacagwctccgccgtggtcatggaggagggaagtccgggcraggttcctgtgctggtggagcccccagggttggaggacgttgaggcagcgctaggcatggacaggcrcacggatgcctacagcaggtcgtcctcagtctccagccaggaggagaagtcgctccacgcggaggagctggttggcaggggcatccccatcgagcgagtcgtctcctcgkagggtggccggccctctgtggacctctccttccagccctcgcagcccctgagcaagtccagctcctctcccgagctgcagactctgcaggacatcctcggggaccctggggacaaggccgacgtgggccggctgagccctgaggttaaggcccggtcayagtcagggaccctggacggggaaagtgctgcctggtcggcctmgggcgaagacagtcggggccagcccgagggtcccttgccttccagctccccccgctcgcccagtggcctccggcccygaggttacaccatctccgactcggccccatcacgcaggggcaagagagtagagagggacgcctwaaagagcagagccacagcctccaatgcagagaaagtgccaggcatcaaccscartttcgtgttcctgymgctctaccattcccccttctttggcgaygagtcaaacaagccaatcctgctgcccaatgagtcacagtcctttgagcggtcggtgcagctcctcgaccagatcccatcatacgacacccacaagatcgccgtcctgwrtgttggagaaggccagagcaacagcragctcgccatcctgtccaatgagcatggctcctacaggtasacggagttcctgacgggcctgggccggctcatcgagctgaaggactgccagccggacaaggtgtacmtgggaggccyggacgtgtgtggtgaggacggccagttcacctactgctggcacgatgacatcatgcaagccgtcttcyacatcgccaccctgatgcccaccaaggacgtggacaagcaccgctgcgacaaraagcgccacctgggcmwsgactttgtgtccaytgtctrcaatgactccggtgaggacttcaagcttggcacyatcaagggcyagttcaactttgtccacgtgatcgtcaccccrctggactacgagtgcaacctggtgtccctgcagtgcaggaaakacatggagggccttgtggacaccagcgtggccaagatcgkgwctgaccgcaacctgcccttcgtggcccgccagatggccctgcacgcaaatatggccycayaggtgcatcatagccgctccaaccccaccgayatctacccctccaagtggattgcccggctccgccacatcaagcggytccgccagcggatctgcgaggaagccgcctactccaaccccagcctacctytggtgcaccctccgtcccmtascaaagcccctgcacagactccagccgagcccacacctggctatsaggtgggccagcggaagcgcctcatctcctcsgtggaggacttcaccgagtttgtgtgaggccggggccctccctcctgcactgrccttggacggtattgcctgtcagtgaaataaataaagtcctgaccccagtgcacagacatagaggcacagattgc

SEQ ID NO: 2620 - DNA, 6305 bp, Homo sapiens
gggactagcgcagaggccctgtccgtgtccctcactgctcactgcagtgcttggcccccagcaggtcctcaacggctgcaggataaatataataagtgccatgccctttcctgttttccctcagaggcaccctcccccgagctgggggagcaggcttctggctgcgtgtgtccttggcacccagcctctccgaggacagcaagttcactgcaggagggcggggatgggacccacagagcctggagtggagagtcccggacagagtggtgggaaaggaagcgttttcttgcttggggcgaaagggggcagcggagcggagcgcccgaaacccagcccctgcggaccgcaatctttgggaaaaaggcgcaaggtgggaacgcagggccgcacgtgggaaccgttcgcggctgccgggtttgcagcccctgcccgcgcagctgggagccgcaggaggcggcccgggactccagcctgcagcccctatcccgcctcctcccacgctccagccacggcgcggcgctacctgctgcagcctctcttctccggagaggcccgggctcctccytacacccccgcggcccagccccgggtcccaggctccrgctccgggtcagcatcctcgcgctcaaggcggtcatgccggactcctgcggactacacatcccggcggcccatgcggccccgtcacgtgatgcaaggatcgccggcctttccgccagagggcggcacagaactacaactcccagcaagctcccaaggcggccctccgcgcaatgccgctaccggaagtgcgggtcgcgcttccggcggcgtcccggggccaggggggtgcgcctttctccgcgtcggggcggcccggagcgcggtggcgcggcgcgggaggggttttctggtgcgtcctggtccaccatggccaaaccaacaagcaaagattcaggcttgwaggagaagtttaagattctgttgggactgggaacaccgaggccaaatcccaggtctgcagagggtaaacagacggagtttatcatcaccgcggaaatactgagagaactgagcatggaatgtggcctcaacaatcgcatccggatgatagggcagatttgtgaagtcgcaaaaaccaagaaatttgaagagcacgcagtggaagcactctggaaggyggtcgcggatctgttgyagccggagcggmcgctggaggcccggcacgcggtgctggctctgctgaaggccatcgtgcaggggcagggcgagcgtttgggggtcctcagagccctcttctttaaggtcatcaaggattacccttccaacgaagaccttcrcgaaaggctggaggttttcaaggccctcacagacaatgggagacacatcacctasttggaggaagagctggctgactttgtcctgyagtggatggatgttggcttgtcctcggaattccttctggtgctggtgaacttggtcaaattcaatagctgttacctcgacgagtacatcgcaaggatggttyagatgatctgtctgctgtgcgtccggaccgcgtcctctgtggacatagaggtctccctgcaggtgctggaygccgtggtctgctacaactgcctgccggctgagagcctcccgctgttcatcgttaccctctrtcgcaccatcaacgtcaaggagctctgmgagccttgmtggaasctgatgcsgaacctccttggcacccacctgggccacagcgccatctacaacatgtgccacctcatggaggacagagcctacrtggaggacgcgcccctgctgagaggagccgtgttttttgtgggcatggctctctgrggagcccaccggctctattctctcaggaactcgccgacatctgtgttgccatcattttascaggccatggcatgtccgaacgaggtggtgtcctatgagatcgtcctgtccatcaccaggctcatcaagaagtataggaaggagctccaggtggtggcgtgggacattctgctgaacatcatckaacrgctccttcarcagctccagaccttggacagcccggagctcaggaccatcgtccatgacctgttgaccacggtggaggagctgtgtgaccagaacgagttccacgggtctcaggagagakactttgaactggtggagagatgtgcggaccagaggyctgagtcctccctcctgaacctgatctcctatagagcgcagtccatccacccggccaaggacggctggattcagaacctgcaggcgctgatskagagattcttcaggagygagtccygaggcgccgtgcgcatcaaggtgctggacgtgctgtcctttgtgctgctcatcaacaggyagttctatgaggaggagctgattawctcagtggtcatctcgcagctctcccacatccccgaggataaagaccaccaggtcygaaagctggccacccagttgctggtggacytggcagagggctgccacacacaccacttcaacagyctgctggacatcatcgagaaggtgatggcccgctccctctccccacccccggagctggaagaaagggatgtggccgcatactmggcctccttggaggatgtgaagacagccgtcctggggcttctggtcatccttcagaccaagctgtacaccctgcctgcaagccacrccacgcgtgtgtatgagatgctggtcagccacattyagctccactasawgcacagctacaccctgccaatcgcgagcagcatcyrgctgcaggmctttgacttcctgttgctgctgcgggccgactcactgcaccgcctgggcctgcccaacaaggatggagtcgtgcggttcagcccctactgcgtctgcractacatggagccagagagaggctctgagaagaagaccagcggccccctttctcctcccacagggcctcctggcccggcgcctgcaggccccgccgtgcggctggggtccgtgccctactccctgctcttccgcgtcctgctgcagtrcttgaagcaggagtctgactgraaggtgctgaagctggttctgggcaggctgcctgagtccckgcgctataaagtgctcatctttacttccccttgcagtgtggaccagctgtgctctgctctctgctccatgctttsaggcccaaagacactggagcggctccgaggcgccccagaaggcttctccagaactgacttgcacctggccgtggttccagwgctgacagcattaatctcttaccataactacctggacaaaaccaaacagcgcgagatggtctastgcctggagcagggcctcatccaccgctgtgccagmcagtgcgtcgtggccttgtccatctgcagcgtgragatgcytgacatcatcatcaaggcgctgcctgttmtggtggtgaagctcacgcacatctcagccacagccagcatggccgtcccactgctggagttcctgtccactctggccaggctgccgcacctctacaggaacttygccgcggagyagtatgccagtgtgttcgccatctccctgccgtacaccaacccctccaagtttaatcagtacatcgtgtgwctggcccatcacgtcatagccrtgtgrttcatcaggtgccgcctgcccttccggaaggattttgtccctttcatcactaagggcctgcggtccaatgtcctcttgtcttttgatgacaccccckagaaggacagcttcagggcccggagtactagtctcaacgagagacccaagagcaggatayagacgtccctcaccagtgccagcttggggtctgcagatgagaactccgtggccyaggctgacgatagcctgaaaaacctccacctggagctcacggaaacctgtctggacatgatggctygatacgtcttctccaacttcacggctgtcccsaagaggtctcctgtgggcgagttcctcctagcgggtggcaggaccaaaaccyggctggttgggaacaagcttgtcactgtgacgasaagcgtgggaaccgggacccggtcgttactaggcctggactcgggggagctgyagtccggcccggagtcgagctccagccccggggtgcatgtgagacagaccaaggaggcgccggccaagctggagtcccaggctgggcagcaggtgtcccgtggggcccgggatcgggtccgttccatgtcggggggccatggtcttygagttggcgycctggacgtgccggcctccyagttcctgggcagtgccacttctccaggaccacggactgcaccagccgcgaaacctgagaaggcctcagctggcacccgggttcctgtgyaggagaagacgaacctggcggcctatgtgcccctgctgacccagggctgggcggagatcctggtcyggaggcccacagggaacaccagctggctgatgagcctggagaacccgctcagccctttctcctmggacatcaacaacatgcccctgyaggagctgtctaacgccctcatggcggctgagcgcttcaaggagcaccgggacacagccctgtasaagtcactgtcggtgccggcagccagcacggccaaaccccctcctctgcctcgctccaacacagtggcctctttctcctccctgtaccagtccagctgccaaggacagctgcacaggagcgtttcctgggcagwctccgccgtggtcatggaggagggaagtccgggcraggttcctgtgctggtggagcccccagggttggaggacgttgaggcagcgctaggcatggacaggcrcacggatgcctacagcaggtcgtcctcagtctccagccaggaggagaagtcgctccacgcggaggagctggttggcaggggcatccccatcgagcgagtcgtctcctcgkagggtggccggccctctgtggacctctccttccagccctcgcagcccctgagcaagtccagctcctctcccgagctgcagactctgcaggacatcctcggggaccctggggacaaggccgacgtgggccggctgagccctgaggttaaggcccggtcayagtcagggaccctggacggggaaagtgctgcctggtcggcctmgggcgaagacagtcggggccagcccgagggtcccttgccttccagctccccccgctcgcccagtggcctccggcccygaggttacaccatctccgactcggccccatcacgcaggggcaagagagtagagagggacgcctwaaagagcagagccacagcctccaatgcagagaaagtgccaggcatcaaccscartttcgtgttcctgymgctctaccattcccccttctttggcgaygagtcaaacaagccaatcctgctgcccaatgagtcacagtcctttgagcggtcggtgcagctcctcgaccagatcccatcatacgacacccacaagatcgccgtcctgwrtgttggagaaggccagagcaacagcragctcgccatcctgtccaatgagcatggctcctacaggtasacggagttcctgacgggcctgggccggctcatcgagctgaaggactgccagccggacaaggtgtacmtgggaggccyggacgtgtgtggtgaggacggccagttcacctactgctggcacgatgacatcatgcaagccgtcttcyacatcgccaccctgatgcccaccaaggacgtggacaagcaccgctgcgacaaraagcgccacctgggcmwsgactttgtgtccaytgtctrcaatgactccggtgaggacttcaagcttggcacyatcaagggcyagttcaactttgtccacgtgatcgtcaccccrctggactacgagtgcaacctggtgtccctgcagtgcaggaaakacatggagggccttgtggacaccagcgtggccaagatcgkgwctgaccgcaacctgcccttcgtggcccgccagatggccctgcacgcaaatatggccycayaggtgcatcatagccgctccaaccccaccgayatctacccctccaagtggattgcccggctccgccacatcaagcggytccgccagcggatctgcgaggaagccgcctactccaaccccagcctacctytggtgcaccctccgtcccmtascaaagcccctgcacagactccagccgagcccacacctggctatsaggtgggccagcggaagcgcctcatctcctcsgtggaggacttcaccgagtttgtgtgaggccggggccctccctcctgcactgrccttggacggtattgcctgtcagtgaaataaataaagtcctgaccccagtgcacagacatagaggcacagattgc

SEQ ID NO: 2621 - DNA, 6434 bp, Homo sapiens
gggactagcgcagaggccctgtccgtgtccctcactgctcactgcagtgcttggcccccagcaggtcctcaacggctgcaggataaatataataagtgccatgccctttcctgttttccctcagaggcaccctcccccgagctgggggagcaggcttctggctgcgtgtgtccttggcacccagcctctccgaggacagcaagttcactgcaggagggcggggatgggacccacagagcctggagtggagagtcccggacagagtggtgggaaaggaagcgttttcttgcttggggcgaaagggggcagcggagcggagcgcccgaaacccagcccctgcggaccgcaatctttgggaaaaaggcgcaaggtgggaacgcagggccgcacgtgggaaccgttcgcggctgccgggtttgcagcccctgcccgcgcagctgggagccgcaggaggcggcccgggactccagcctgcagcccctatcccgcctcctcccacgctccagccacggcgcggcgctacctgctgcagcctctcttctccggagaggcccgggctcctccytacacccccgcggcccagccccgggtcccaggctccrgctccgggtcagcatcctcgcgctcaaggcggtcatgccggactcctgcggactacacatcccggcggcccatgcggccccgtcacgtgatgcaaggatcgccggcctttccgccagagggcggcacagaactacaactcccagcaagctcccaaggcggccctccgcgcaatgccgctaccggaagtgcgggtcgcgcttccggcggcgtcccggggccaggggggtgcgcctttctccgcgtcggggcggcccggagcgcggtggcgcggcgcgggaggggttttctggtgcgtcctggtccaccatggccaaaccaacaagcaaagattcaggcttgwaggagaagtttaagattctgttgggactgggaacaccgaggccaaatcccaggtctgcagagggtaaacagacggagtttatcatcaccgcggaaatactgagagaactgagcatggaatgtggcctcaacaatcgcatccggatgatagggcagatttgtgaagtcgcaaaaaccaagaaatttgaagagcacgcagtggaagcactctggaaggyggtcgcggatctgttgyagccggagcggmcgctggaggcccggcacgcggtgctggctctgctgaaggccatcgtgcaggggcagggcgagcgtttgggggtcctcagagccctcttctttaaggtcatcaaggattacccttccaacgaagaccttcrcgaaaggctggaggttttcaaggccctcacagacaatgggagacacatcacctasttggaggaagagctggctgactttgtcctgyagtggatggatgttggcttgtcctcggaattccttctggtgctggtgaacttggtcaaattcaatagctgttacctcgacgagtacatcgcaaggatggttyagatgatctgtctgctgtgcgtccggaccgcgtcctctgtggacatagaggtctccctgcaggtgctggaygccgtggtctgctacaactgcctgccggctgagagcctcccgctgttcatcgttaccctctrtcgcaccatcaacgtcaaggagctctgmgagccttgmtggaasctgatgcsgaacctccttggcacccacctgggccacagcgccatctacaacatgtgccacctcatggaggacagagcctacrtggaggacgcgcccctgctgagaggagccgtgttttttgtgggcatggctctctgrggagcccaccggctctattctctcaggaactcgccgacatctgtgttgccatcattttascaggccatggcatgtccgaacgaggtggtgtcctatgagatcgtcctgtccatcaccaggctcatcaagaagtataggaaggagctccaggtggtggcgtgggacattctgctgaacatcatckaacrgctccttcarcagctccagaccttggacagcccggagctcaggaccatcgtccatgacctgttgaccacggtggaggagctgtgtgaccagaacgagttccacgggtctcaggagagakactttgaactggtggagagatgtgcggaccagaggyctgagtcctccctcctgaacctgatctcctatagagcgcagtccatccacccggccaaggacggctggattcagaacctgcaggcgctgatskagagattcttcaggagygagtccygaggcgccgtgcgcatcaaggtgctggacgtgctgtcctttgtgctgctcatcaacaggyagttctatgaggaggagctgattawctcagtggtcatctcgcagctctcccacatccccgaggataaagaccaccaggtcygaaagctggccacccagttgctggtggacytggcagagggctgccacacacaccacttcaacagyctgctggacatcatcgagaaggtgatggcccgctccctctccccacccccggagctggaagaaagggatgtggccgcatactmggcctccttggaggatgtgaagacagccgtcctggggcttctggtcatccttcagaccaagctgtacaccctgcctgcaagccacrccacgcgtgtgtatgagatgctggtcagccacattyagctccactasawgcacagctacaccctgccaatcgcgagcagcatcyrgctgcaggmctttgacttcctgttgctgctgcgggccgactcactgcaccgcctgggcctgcccaacaaggatggagtcgtgcggttcagcccctactgcgtctgcractacatggagccagagagaggctctgagaagaagaccagcggccccctttctcctcccacagggcctcctggcccggcgcctgcaggccccgccgtgcggctggggtccgtgccctactccctgctcttccgcgtcctgctgcagtrcttgaagcaggagtctgactgraaggtgctgaagctggttctgggcaggctgcctgagtccckgcgctataaagtgctcatctttacttccccttgcagtgtggaccagctgtgctctgctctctgctccatgctttsaggcccaaagacactggagcggctccgaggcgccccagaaggcttctccagaactgacttgcacctggccgtggttccagwgctgacagcattaatctcttaccataactacctggacaaaaccaaacagcgcgagatggtctastgcctggagcagggcctcatccaccgctgtgccagmcagtgcgtcgtggccttgtccatctgcagcgtgragatgcytgacatcatcatcaaggcgctgcctgttmtggtggtgaagctcacgcacatctcagccacagccagcatggccgtcccactgctggagttcctgtccactctggccaggctgccgcacctctacaggaacttygccgcggagyagtatgccagtgtgttcgccatctccctgccgtacaccaacccctccaagtttaatcagtacatcgtgtgwctggcccatcacgtcatagccrtgtgrttcatcaggtgccgcctgcccttccggaaggattttgtccctttcatcactaagggcctgcggtccaatgtcctcttgtcttttgatgacaccccckagaaggacagcttcagggcccggagtactagtctcaacgagagacccaagagtctgaggatagccagaccccccaaacaaggcttgaataactctccacccrtgaaagaattcaaggagagctctgcagccgaggccttccggtgccgcagcatcagtgtgtctgaacatgtggtccgcagcaggatayagacgtccctcaccagtgccagcttggggtctgcagatgagaactccgtggccyaggctgacgatagcctgaaaaacctccacctggagctcacggaaacctgtctggacatgatggctygatacgtcttctccaacttcacggctgtcccsaagaggtctcctgtgggcgagttcctcctagcgggtggcaggaccaaaaccyggctggttgggaacaagcttgtcactgtgacgasaagcgtgggaaccgggacccggtcgttactaggcctggactcgggggagctgyagtccggcccggagtcgagctccagccccggggtgcatgtgagacagaccaaggaggcgccggccaagctggagtcccaggctgggcagcaggtgtcccgtggggcccgggatcgggtccgttccatgtcggggggccatggtcttygagttggcgycctggacgtgccggcctccyagttcctgggcagtgccacttctccaggaccacggactgcaccagccgcgaaacctgagaaggcctcagctggcacccgggttcctgtgyaggagaagacgaacctggcggcctatgtgcccctgctgacccagggctgggcggagatcctggtcyggaggcccacagggaacaccagctggctgatgagcctggagaacccgctcagccctttctcctmggacatcaacaacatgcccctgyaggagctgtctaacgccctcatggcggctgagcgcttcaaggagcaccgggacacagccctgtasaagtcactgtcggtgccggcagccagcacggccaaaccccctcctctgcctcgctccaacacagtggcctctttctcctccctgtaccagtccagctgccaaggacagctgcacaggagcgtttcctgggcagwctccgccgtggtcatggaggagggaagtccgggcraggttcctgtgctggtggagcccccagggttggaggacgttgaggcagcgctaggcatggacaggcrcacggatgcctacagcaggtcgtcctcagtctccagccaggaggagaagtcgctccacgcggaggagctggttggcaggggcatccccatcgagcgagtcgtctcctcgkagggtggccggccctctgtggacctctccttccagccctcgcagcccctgagcaagtccagctcctctcccgagctgcagactctgcaggacatcctcggggaccctggggacaaggccgacgtgggccggctgagccctgaggttaaggcccggtcayagtcagggaccctggacggggaaagtgctgcctggtcggcctmgggcgaagacagtcggggccagcccgagggtcccttgccttccagctccccccgctcgcccagtggcctccggcccygaggttacaccatctccgactcggccccatcacgcaggggcaagagagtagagagggacgcctwaaagagcagagccacagcctccaatgcagagaaagtgccaggcatcaaccscartttcgtgttcctgymgctctaccattcccccttctttggcgaygagtcaaacaagccaatcctgctgcccaatgagtcacagtcctttgagcggtcggtgcagctcctcgaccagatcccatcatacgacacccacaagatcgccgtcctgwrtgttggagaaggccagagcaacagcragctcgccatcctgtccaatgagcatggctcctacaggtasacggagttcctgacgggcctgggccggctcatcgagctgaaggactgccagccggacaaggtgtacmtgggaggccyggacgtgtgtggtgaggacggccagttcacctactgctggcacgatgacatcatgcaagccgtcttcyacatcgccaccctgatgcccaccaaggacgtggacaagcaccgctgcgacaaraagcgccacctgggcmwsgactttgtgtccaytgtctrcaatgactccggtgaggacttcaagcttggcacyatcaagggcyagttcaactttgtccacgtgatcgtcaccccrctggactacgagtgcaacctggtgtccctgcagtgcaggaaakacatggagggccttgtggacaccagcgtggccaagatcgkgwctgaccgcaacctgcccttcgtggcccgccagatggccctgcacgcaaatatggccycayaggtgcatcatagccgctccaaccccaccgayatctacccctccaagtggattgcccggctccgccacatcaagcggytccgccagcggatctgcgaggaagccgcctactccaaccccagcctacctytggtgcaccctccgtcccmtascaaagcccctgcacagactccagccgagcccacacctggctatsaggtgggccagcggaagcgcctcatctcctcsgtggaggacttcaccgagtttgtgtgaggccggggccctccctcctgcactgrccttggacggtattgcctgtcagtgaaataaataaagtcctgaccccagtgcacagacatagaggcacagattgc

SEQ ID NO: 2622 - DNA, 1653 bp, Homo sapiens
  misc_feature (1)...(1653): n = A,T,C or G
aaggcgcggaagcggcggtagctgcagctggcgaagttgggcgactggcggatgcaggccttgcggcacgtcgtgtgcnccctgtccggcggcgtggacagcgccgtggccgcgctgctgctgagkcggagaggttaccaggtgacaggggtgtttatgaagaactgggactcactggatgaacatggggtctgtactgccgacaaagactgtgaagatgcttacagagtttgccagatcttagacatccctttccatcaagtgtcctacgtaaaggagtattggaatgatgtgttcagtgactttttgaatgagtatgaaaaaggaaggactcccaatcctgacatagtttgcaacaagcacatcaaatttagttgcttttttcattatgctgtggataatcttggggcagatgccattgccacaggtcactatgcaagaacttccctggaagatgaagaagtctttgagcagaagcacgttaagaagcccraagggcttttcagaaatcggtttgaagttagaaatgyggtaaaactcctccaggcagctgacagctttaaagaccagaccttctttctcagccaggtttcccaggatgcyctgaggagaaccatcttccctctggggggattaacgaaagagtttgtaaagaaaatcgctgctgagaatagacttcatcatgtgcttcagaagaaagagagcatgggcatgtgtttcatcgggaagaggaattttgaacatttccttcttcagtatctgcagcctcgacctggtcactttatttccatagaagacaataaggttctgggaacacataaaggttggttcctgtataccttgggccagagagcaaacataggtggcctgagagagccctggtacgtggtggagaaggacagcgtcaagggtgaygtgtttgtggccccccggacagaccacccagccctgtacagggacctgctgaggaccagccgygtgcactggattgcggaggagcctcccgcagcactggtccgggacaagatgatggagtgccacttccgattccgccaccagatggcactagtgccctgtgtgctgaccctcaatcaagatggcaccgtgtgggtgacagctgtgcaggctgtgcgtgcccttgccacaggacagtttgctgtgttctacaagggggacgagtgcctgggcagcgggaagatcctgcggctggggccgtctgcctacacrctccagaagggccagygcagagctgggatggccactgagagccccagtgacagcccagaagatggtccaggcctgagtcccttgctctgacagagatsgatctgctagaaggaacctggagagcaggacccakggctgggcggctggtgagcagtccaggtgcccaagggccagcttgctgctgcccaaagcagaggaagccgggctggctgasggtccgaaaagcctgcaggggcccggygagccccaggaagagcctcagctccaggctggggctctggctgctggagcatctgctggctggtggggtggcccgagttccccttcaccgcccccagggagggtttcccacctcagagtacaccraggggacctgcagagggggctgtcgggacagcgtggaataaacattatttcaaggacaca

SEQ ID NO: 2623 - DNA, 1598 bp, Homo sapiens
  misc_feature (1)...(1598): n = A,T,C or G
aaggcgcggaagcggcggtagctgcagctggcgaagttgggcgactggcggatgcaggccttgcggcacgtcgtgtgcnccctgtccggcggcgtggacagcgccgtggccgcgctgctgctgagkcggagaggttaccaggtgacaggggtgtttatgaagaactgggactcactggatgaacatggggtctgtactgccgacaaagactgtgaagatgcttacagagtttgccagatcttagacatccctttccatcaagtgtcctacgtaaaggagtattggaatgatgtgttcagtgactttttgaatgagtatgaaaaaggaaggactcccaatcctgacatagtttgcaacaagcacatcaaatttagttgcttttttcattatgctgtggataatcttggggcagatgccattgccacaggtcactatgcaagaacttccctggaagatgaagaagtctttgagcagaagcacgttaagaagcccraagggcttttcagaaatcggtttgaagttagaaatgccaggtttcccaggatgcyctgaggagaaccatcttccctctggggggattaacgaaagagtttgtaaagaaaatcgctgctgagaatagacttcatcatgtgcttcagaagaaagagagcatgggcatgtgtttcatcgggaagaggaattttgaacatttccttcttcagtatctgcagcctcgacctggtcactttatttccatagaagacaataaggttctgggaacacataaaggttggttcctgtataccttgggccagagagcaaacataggtggcctgagagagccctggtacgtggtggagaaggacagcgtcaagggtgaygtgtttgtggccccccggacagaccacccagccctgtacagggacctgctgaggaccagccgygtgcactggattgcggaggagcctcccgcagcactggtccgggacaagatgatggagtgccacttccgattccgccaccagatggcactagtgccctgtgtgctgaccctcaatcaagatggcaccgtgtgggtgacagctgtgcaggctgtgcgtgcccttgccacaggacagtttgctgtgttctacaagggggacgagtgcctgggcagcgggaagatcctgcggctggggccgtctgcctacacrctccagaagggccagygcagagctgggatggccactgagagccccagtgacagcccagaagatggtccaggcctgagtcccttgctctgacagagatsgatctgctagaaggaacctggagagcaggacccakggctgggcggctggtgagcagtccaggtgcccaagggccagcttgctgctgcccaaagcagaggaagccgggctggctgasggtccgaaaagcctgcaggggcccggygagccccaggaagagcctcagctccaggctggggctctggctgctggagcatctgctggctggtggggtggcccgagttccccttcaccgcccccagggagggtttcccacctcagagtacaccraggggacctgcagagggggctgtcgggacagcgtggaataaacattatttcaaggacaca

SEQ ID NO: 2624 - DNA, 824 bp, Homo sapiens
ctctgtgtttctttgttgaaaaatctgatactattcttagttctatgaaaacaattgaaaatttggttattatcaccttaaaagtacaaaacctatagatattgaaaatgtaattatttttctataggcatagttgaaatgattttgtaaatgttataaatcagtttctttataagcagttcatttacataaattttgttaaactgacatgattcactaattttctaaatataaatggttcagctctcagttatttttaaactaatgacctgtgttatacttactatttttaatgggcttttatgatgtttttaggtttctttggattcccatgtccttcaagtgctttgcaactttgagaaraagaaattgaccacytggactatggaactatgaagytctttctgttgcttttcaccattgggttctgctgggctcagtattccccaaatacacaacaaggacggacatctattgttcatctgtttgaatggcgatgggttgatattgctcttgaatgtgagcgatatttagctccgaagggatttggaggggttcaggtctctccaccaaatgaaaatgttgcaatttacaaccctttcagaccttggtgggaaagataccaaccagttagctataaattatgcacaagatctggaaatgaagatgaatttagaaacatggtgactagatgtaacaatgttggggtcagagattgtcgtctgactggtcttcttgatcttgcactggagaaggattacgtgcgttctaagattgccgaatatatgaaccatctcattgacattggtgttgcagggttcaga

SEQ ID NO: 2625 - DNA, 1052 bp, Homo sapiens
gtctggctcggtgagtctgtgcggccagcagtctctgatctgtacagggtattaatgtgtcagggctgagtgttctgggatttgtctagaggctggtaagggcttctggaccacttgtttctgtcctgtcagtctgtcagggttggaaagtccaagccataggacccagtttcctttcttagcttacgttatctaccagagcaccgtgggctgttacttaccttgagttggaaggggttcgcatttatacctgaatataaatagtttctggaaaggacactgacaacttcaaagcaaaatgaagttctttctgttgcttttcaccattgggttctgctgggctcagtattccccaaatacacaacaaggacggacatctattgttcatctgtttgaatggcgatgggttgatattgctcttgaatgtgagcgatatttagctccgaagggatttggaggggttcaggtctctccaccaaatgaaaatgttgcaatttacaaccctttcagaccttggtgggaaagataccaaccagttagctataaattatgcacaagatctggaaatgaagatgaatttagaaacatggtgactagatgtaacaatgttggggtkcgtatttatgtggatgctgtaattaatcatatgtgtggtaaygctgtgagtgcaggaacaagcagtacctgtggaagttacttcaaccctggaagtagggactttccagcagtcccatattctggatgggatttcaatgatggtaaatgtaaaactggaagtggagatatcgagaactacaatgatgctactcaggtcagagattgtcgtctgactggtcttcttgatcttgcactggagaargattacgtgcgttcyaagattgccgaatatatgaaycatctcattgacattggtgttgcagggttcagacttgatgcttccaagcwcatgtggcctggagacataaaggcaattttggacaaactgcataatctaaacagtaactggttccctgcaggaagtaaacctttcatttaccaggaggtacatcaat

SEQ ID NO: 2626 - DNA, 972 bp, Homo sapiens
gtctcctctcaatatcagcactggattgtagaatgtgttgctgattttgaccttgtattcaagttaactgttgcccttggtatctgtacatatctttgatttcagtctttactacacgtggcttggtcacttcatggctaaaaacatgcttgtggaagaccagtctggctcggaatataaatagtttctggaaaggacactgacaacttcaaagcaaaatgaagttctttctgttgcttttcaccattgggttctgctgggctcagtattccccaaatacacaacaaggacggacatctattgttcatctgtttgaatggcgatgggttgatattgctcttgaatgtgagcgatatttagctccgaagggatttggaggggttcaggtctctccaccaaatgaaaatgttgcaatttacaaccctttcagaccttggtgggaaagataccaaccagttagctataaattatgcacaagatctggaaatgaagatgaatttagaaacatggtgactagatgtaacaatgttggggtkcgtatttatgtggatgctgtaattaatcatatgtgtggtaaygctgtgagtgcaggaacaagcagtacctgtggaagttacttcaaccctggaagtagggactttccagcagtcccatattctggatgggatttcaatgatggtaaatgtaaaactggaagtggagatatcgagaactacaatgatgctactcaggtcagagattgtcgtctgactggtcttcttgatcttgcactggagaargattacgtgcgttcyaagattgccgaatatatgaaycatctcattgacattggtgttgcagggttcagacttgatgcttccaagcwcatgtggcctggagacataaaggcaattttggacaaactgcataatctaaacagtaactggttccctgcaggaagtaaacctttcatttaccaggaggtacatcaat

SEQ ID NO: 2627 - DNA, 1693 bp, Homo sapiens
tagcttgcacctctggtctcagctacttgggagactaaagcaaggggatcacttgagcccccgaggttgaggttgcagtgagccatgatcactccactgcattctagcttggttgacagagtragaacctctccctcctaaaaaartccttaagaaatgtgttgatgcctggttcccttggtcagaattttcatttgatgtgttgagagtgtagcacasatgttggaatgaacctctcaagctgattttaatgtgcaaccaagtttgagaaccaccaaggaagagtttttatgmattaagattcctatactctatcctagaactaatacaactgaatctctgggaatggagtatcagaatcagatttgaaaaggtttccttagtaattctaaggactgagcagtttggatactcgtttgttagagtaaaatggttaggtacctagtatcaacataggcacccaacctgatattaataactaggaaaataaagggttggcgcctctgtgtttctttgttgaaaaatctgatactattcttagttctatgaaaacaattgaaaatttggttattatcaccttaaaagtacaaaacctatagatattgaaaatgtaattatttttctataggcrtagttgaaatgattttgtaaatgttataaatcagtttctttataagcagttcatttacataaattttgttaaactgacatgattcactaattttctaaatataaatggttcagctctcagttatttttaaactaatgacctgtgttatacttactatttttaatgggcttttatgatgtttttaggtttctttggattcccatgtccttcaagtgctttgcaactttgagaagaagaaattgaccacctggactatggaactgaatataaatagtttctggaaaggacactgacaacttcaaagcaaaatgaagttctttctgttgcttttcaccattgggttctgctgggctcagtattccccaaatacacaacaaggacggacatctattgttcatctgtttgaatggcgatgggttgatattgctcttgaatgtgagcgatatttagctccgaagggatttggaggggttcaggtctctccaccaaatgaaaatgttgcaatttacaaccctttcagaccttggtgggaaagataccaaccagttagctataaattatgcacaagatctggaaatgaagatgaatttagaaacatggtgactagatgtaacaatgttggggtkcgtatttatgtggatgctgtaattaatcatatgtgtggtaaygctgtgagtgcaggaacaagcagtacctgtggaagttacttcaaccctggaagtagggactttccagcagtcccatattctggatgggatttcaatgatggtaaatgtaaaactggaagtggagatatcgagaactacaatgatgctactcaggtcagagattgtcgtctgactggtcttcttgatcttgcactggagaargattacgtgcgttcyaagattgccgaatatatgaaycatctcattgacattggtgttgcagggttcagacttgatgcttccaagcwcatgtggcctggagacataaaggcaattttggacaaactgcataatctaaacagtaactggttccctgcaggaagtaaacctttcatttaccaggaggtacatcaat

SEQ ID NO: 2628 - DNA, 1077 bp, Homo sapiens
cgggcgggccgcgcggtgggcgcggagaggagcggagcggcgcggcaggccgggcgggttgcggcagtagcggaggaggccgcagctgcgagtcccaggagcggaggcgacgcgggcggcggctgggggccgggtggccggggtcccgggccccgcggcggcagcggtaggatgatcaagctgttctcgctgaagcagcagaagaaggaggagtagtcggcgggcggcaccaagcgcagcagcaagaaggcgtcggcggcgcagctgcggatccagaaggacataaacgagctgaacctgcccaagacgtgtgatatcagcttctcagatccagacgacctcctcaacttcaagttggtcatctgtcctgatgagggcttctacaagagtgggaagtttgtgttcagttttaaggtgggccagggttacccgcatgatccccccaaggtgaagtgtgagacaatggtctatcaccccaacattgaaatcgagggcaacgtctgcctcaacatcctcagagagaactggaagccagtccttacgataaactccataatttatggcctgcagtatctctacttggagcccaaccccgaggacccactgaacaagaaggccgcagaggtcctgcagaacaaccggcagctgttggagcagaacgtgcagccatccatgcgggatggctacataggctccacctacttcgagcgctgcctgaaatagggttggcgcatacccacccccgccacggccgcaagccctggcatcccctgcaaatatttattgggggccatcrgtaggggtttggggggcggccggtgggggaatcccctgccttggccttgcctccccttcctgccacgtgcccctagttattttttattaacaccatgtgattaaggtcagcgctgcctcccccgacccactcagcgatgggaaatgaattggctgttctagcccccctgctgggtgcttgttcagccaaagggcctgggtagctgggcccagacaaaccacccctccacctctggaggtcccaccaggctattaaaggggaatgttactgcaaaaaaaaaa

SEQ ID NO: 2629 - DNA, 2159 bp, Homo sapiens
tagattctcgctgctgcgtgttcgcgcgcgtcccggagtgcgcatgcgcagcggcgggggttgttccggctgcctttcactgaggggacccgccagtttcaaactcagtggcgtttkccctgattcccggggcctggctttcagcgtagcaattctgccggcgaagaaggtgagcgcagtgctgtgtggcagcagagctccttaggacgaggagcagcgggacgaggaagggcagactggtgaaatcgcaaactgggcgtctgttccggcgccggacccctatttgcaaaggtccatggctaatgaaacacagaaggttggtgccatccattttccttttcccttcacaccctattccatccaggaagacttcatggcagagctgtaccgggttttggaggctggcaagattgggatatttgagagtccaactggcactgggaagtccttaagtcttatttgtggggccctctcttggctccgtgactttgaacagaagaagcgtgaagaagaggcacgaytccttgaaactggaactggccccttacatgatgagaaagatgaatccctgtgtctgtcttcttcctgcgaaggggctgcaggcaccccgaggcctgctggagaaccggcctgggttactcagtttgtgcagaagaaagaagagagggacctggtggaccgactaaaggcggagcaggccaggaggaagcagcgagaagaacgcctgcagcagctgcagcacagggtgcagctcaagtatgcagccaagcgcctgaggcaggaagaagaagaaagagagaatctcctccgcctcagcagggagatgctagagacaggcccggaggcygagcggctggagcagctggagtctggggaggaggagctggtcctcgccgaatacgagagtgatgaggagaaaaaggtggcgagcagggcgccttctgacgccacctccagccgccatccaccagacgccagcttccccgctgccctgaacttcctccagcgcaccaggccttcctctgtcctgtctgaggatttgctcatgcaacgtgctgtggccaaacaccctgccctcctcccttggcagatgtcttcctctcctttaaggcctggctcagagtggatgaggatgaggatgacctggaggaagaacacataactaagatttattactgtagtcggacacactcccagctggcccagtttgtgcatgaggtgaagaagagcccctttggcaaggatgttcggctggtctcyctyggctcccrgcagaacctttgtgtaaatgaagacrtgaraagcctaggttctgtgcagcttatcaacgaccgctgygtggacatgcagagaagcaggcacgaagaagaaaggagctgaggaggagaagccaaagaggaggaggcaggagaagcaggcagcctgccccttctacaaccacgagcagatgggccttctccgggatgaggccctggcagaggtgaaggacatggagcagctgctggcccttgggaaggaggcccgggcctgtccctattacgggagccgccttgccatccctgcagcccagctggtggtgctgccctatcagatgctgctgcatgcggccactcggcaggccgcgggcatccggctgcaggaccaggtggtgatcatcgacgaggcgcacaacctgatcgacaccatcacgggcatgcacagcgtggaggtcagcggctcccagctctgccaggcccattcccagctgctgcagtacgtggagcgatacgggaagcgtttgaaggccaagaacctgatgtacctgaagcagatcctgtatttgctggagaaattcgtggctgtgctagggggtgagagcctcgtccccctgctgaccccgggcctgcaaaactcgctgggctgctttttccttggatgcccatcaggacacctcagttctctgtgtttttaagaagggtcggccgggtgcggtggctcacgcctgtaatcccagcacttgggaggccgaggcaggtggttcacctgaggttaggagttttgagaccagcctggccaacatggtgaaatcccatctctactaaaaatacaaaaaaattagctgggagtgttgccgtggcctgtagtcccagctgctccagaggctgagacaagagaattgc

SEQ ID NO: 2630 - DNA, 2389 bp, Homo sapiens
gggcattaacagcagccgcgtgtctgggtcttagatttggcccagctgtgttgagcttttcatggattatcttacgtagataagacactgcaacagtgagtgagcgcttgtaacccacctgtctcttacggaaactgagccccagcgatgctaactttagcaaggatacagctgggatcctaaacttggcaatcagagcccagagccgataaagttagctgcatgagtctagcttcccccagggcgggaatcgaggcggagcagggtacagtacggaggccaggaatgagtgcagttgaccagattgttgacgtccatggctaatgaaacacagaaggttggtgccatccattttccttttcccttcacaccctattccatccaggaagacttcatggcagagctgtaccgggttttggaggctggcaagattgggatatttgagagtccaactggcactgggaagtccttaagtcttatttgtggggccctctcttggctccgtgactttgaacagaagaagcgtgaagaagaggcacgaytccttgaaactggaactggccccttacatgatgagaaagatgaatccctgtgtctgtcttcttcctgcgaaggggctgcaggcaccccgaggcctgctggagaaccggcctgggttactcagtttgtgcagaagaaagaagagagggacctggtggaccgactaaaggcggagcaggccaggaggaagcagcgagaagaacgcctgcagcagctgcagcacagggtgcagctcaagtatgcagccaagcgcctgaggcaggaagaagaagaaagagagaatctcctccgcctcagcagggagatgctagagacaggcccggaggcygagcggctggagcagctggagtctggggaggaggagctggtcctcgccgaatacgagagtgatgaggagaaaaaggtggcgagcagagtggatgaggatgaggatgacctggaggaagaacacataactaagatttattactgtagtcggacacactcccagctggcccagtttgtgcatgaggtgaagaagagcccctttggcaaggatgttcggctggtctcyctyggctcccrgcagaacctttgtgtaaatgaagacrtgaraagcctaggttctgtgcagcttatcaacgaccgctgygtggacatgcagagaagcaggcacggtagccactrggaccrtggtgtagccgcaggtggtctggagagagtgaggcaggggtggcagtgactgaagaccattaagtgtctttcatagaaagaatggcagaggagaccccagttccttcctgagtcccctctccttgggaaaaagtgttcctaytctctgggtsagygtctggtccgaatcsttggcttggagatgattttacgggctctttctggagaacaraagtaaaacsttacagtgttccgatgagaccacagtaggcagtacttgggagggtcttatagacccyacccyryggaagtgggtctcaacattacacaaccccctctygggcccgtggacagttgctgtcctctctgttttctctctttgtgcctgtgccmccctcagagaagaagaaaggagctgaggaggagaagccaaagaggaggaggcaggagaagcaggcagcctgccccttctacaaccacgagcagatgggccttctccgggatgaggccctggcagaggtgaaggacatggagcagctgctggcccttgggaaggaggcccgggcctgtccctattacgggagccgccttgccatccctgcagcccagctggtggtgctgccctatcagatgctgctgcatgcggccactcggcaggccgcgggcatccggctgcaggaccaggtggtgatcatcgacgaggcgcacaacctgatcgacaccatcacgggcatgcacagcgtggaggtcagcggctcccagctctgccaggcccattcccagctgctgcagtacgtggagcgatacgggaagcgtttgaaggccaagaacctgatgtacctgaagcagatcctgtatttgctggagaaattcgtggctgtgctagggggtgagagcctcgtccccctgctgaccccgggcctgcaaaactcgctgggctgctttttccttggatgcccatcaggacacctcagttctctgtgtttttaagaagggtcggccgggtgcggtggctcacgcctgtaatcccagcacttgggaggccgaggcaggtggttcacctgaggttaggagttttgagaccagcctggccaacatggtgaaatcccatctctactaaaaatacaaaaaaattagctgggagtgttgccgtggcctgtagtcccagctgctccagaggctgagacaagagaattgc

SEQ ID NO: 2631 - DNA, 1973 bp, Homo sapiens
tagattctcgctgctgcgtgttcgcgcgcgtcccggagtgcgcatgcgcagcggcgggggttgttccggctgcctttcactgaggggacccgccagtttcaaactcagtggcgtttkccctgattcccggggcctggctttcagcgtagcaattctgccggcgaagaaggtgagcgcagtgctgtgtggcagcagagctccttaggacgaggagcagcgggacgaggaagggcagactggtgaaatcgcaaactgggcgtctgttccggcgccggacccctatttgcaaaggtccatggctaatgaaacacagaaggttggtgccatccattttccttttcccttcacaccctattccatccaggaagacttcatggcagagctgtaccgggttttggaggctggcaagattgggatatttgagagtccaactggcactgggaagtccttaagtcttatttgtggggccctctcttggctccgtgactttgaacagaagaagcgtgaagaagaggcacgaytccttgaaactggaactggccccttacatgatgagaaagatgaatccctgtgtctgtcttcttcctgcgaaggggctgcaggcaccccgaggcctgctggagaaccggcctgggttactcagtttgtgcagaagaaagaagagagggacctggtggaccgactaaaggcggagcaggccaggaggaagcagcgagaagaacgcctgcagcagctgcagcacagggtgcagctcaagtatgcagccaagcgcctgaggcaggaagaagaagaaagagagaatctcctccgcctcagcagggagatgctagagacaggcccggaggcygagcggctggagcagctggagtctggggaggaggagctggtcctcgccgaatacgagagtgatgaggagaaaaaggtggcgagcagagtggatgaggatgaggatgacctggaggaagaacacataactaagatttattactgtagtcggacacactcccagctggcccagtttgtgcatgaggtgaagaagagcccctttggcaaggatgttcggctggtctcyctyggctcccrgcagaacctttgtgtaaatgaagacrtgaraagcctaggttctgtgcagcttatcaacgaccgctgygtggacatgcagagaagcaggcacgagaagaagaaaggagctgaggaggagaagccaaagaggaggaggcaggagaagcaggcagcctgccccttctacaaccacgagcagatgggccttctccgggatgaggccctggcagaggtgaaggacatggagcagctgctggcccttgggaaggaggcccgggcctgtccctattacgggagccgccttgccatccctgcagcccagctggtggtgctgccctatcagatgctgctgcatgcggccactcggcaggccgcgggcatccggctgcaggaccaggtggtgatcatcgacgaggcgcacaacctgatcgacaccatcacgggcatgcacagcgtggaggtcagcggctcccagctctgccaggcccattcccagctgctgcagtacgtggagcgatacgggaagcgtttgaaggccaagaacctgatgtacctgaagcagatcctgtatttgctggagaaattcgtggctgtgctagggggtgagagcctcgtccccctgctgaccccgggcctgcaaaactcgctgggctgctttttccttggatgcccatcaggacacctcagttctctgtgtttttaagaagggtcggccgggtgcggtggctcacgcctgtaatcccagcacttgggaggccgaggcaggtggttcacctgaggttaggagttttgagaccagcctggccaacatggtgaaatcccatctctactaaaaatacaaaaaaattagctgggagtgttgccgtggcctgtagtcccagctgctccagaggctgagacaagagaattgc

SEQ ID NO: 2632 - DNA, 2318 bp, Homo sapiens
ggtgttgggttcagaattttattttttggtttacaccattatatccgatcatatataaatacaaacaaaaacttcaccaaatattactttctttttctaatggtgtgtgtgttttgggacaggatctctgtccctcagactggagtgcagtggtgatttctgctcactgcagcctcaaactcccagctcaagcgatcctcccacttcagccttccgagtagctggaaccacaggcacccacatgatgcccagctaatttttgtatttttggtagagatggggtcgcattagattgcccaggctggtctcgacctccctggctcacatgatcctcccgccgcggcctccgagcggctgggatcaggcgttaatcaccgcgcccgggctttatatttcgttttgaaaatgctgagatggacgcaaagggctgagtgctcagtgtcccccagtcaccctcagttgcagcttccgtccaaagaaggaatcgccctctccctgctggggccactaacagcactaacacggtccgaatggcatyggcaaagctcgggaacggcgacagatgggaagacgcgtgggagcctgggggatctcgggagagccgcgcaaactcgcggcggacgcagccagcacccgcagccagcacccgcacactcccacccataccccggcagcccgccaagactctctggcccgcacctctatggtaggaaacccagaaaacaggaagtggcctcgagagggggaagggaggggcggggcctccgccaccacctcagctgcggaccgaggcgagatggcggccaccgagggggtcggggaggctgcgcaagggggcgagcccgggcagccggcgcaacccccgccccagccgcacccaccgccgccccagcagcagcacaaggaagagatggcggccgaggctggggaagccgtggcgtcccccatggacgacgggtttgtgagcctggactcgccctcctatgtcctgtacagggacagagcagaatgggctgatatagatccggtgccgcagaatgatggccccaatcccgtggtccagatcatttatagtgacaaatttagagatgtttatgattacttccgagctgtcctgcagcgtgatgaaagaagtgaacgagcttttaagctaacccgggatgctattgagttaaatgcagccaattatacagtgtggcatttccggagagttcttttgaagtcacttcagaaggatctacatgaggaaatgaactacatcactgcaataattgaggagcagcccaaaaactatcaagtttggcatcataggcgagtattagtggaatggctaagagatccatctcaggagcttgaatttattgctgatattcttaatcaggatgcaaagaattatcatgcctggcagcatcgacaatgggttattcaggaatttaaactttgggataatgagctgcagtatgtggaccaacttctgaaagaggatgtgagaaataactctgtctggaaccaaagatacttcgttatttctaacaccactggcwacaatgatcgtgctgtattggagagagaagtccaatacactctggaaatgattaaactagtaccacataatgaaagtgcatggaactatttgaaagggattttgcaggatcgtggtctttccaaatatcctaatctgttaaatcaattacttgatttacaaccaagtcatagttccccctacctaattgcctttcttgtggatatctatgaagacatgctagaaaatcagtgtgacaataaggaagacattcttaataaagcattagagttatgtgaaatcctagctaaagaaaaggacactataagaaaggaatattggagatacattggaagatcccttcaaagcaaacacagcacagaaaatgactcaccaacaaatgtacagcaataacaccatccagaagaacttgatggaatgcttttattttttattaagggaccctgcaggagtttcacacgagagtggtccttccctttgcctgtggtgtaaaagtgcatcacacaggtattgctttttaacaagaactgatgctccttgggtgctgctgctactcagactagctctaagtaatgtgattcttctaaagcaaagtcattggatgggaggaggaagaaaaagtcccataaaggaacttttgtagtcttatcaacatatataagcagggaatacagtcgttccatcagagctggtctgcacactcacattatcttgctatcmctgtaaccaactaatgccaaaagaacggttttgtaataaaattatagctgtatct

SEQ ID NO: 2633 - DNA, 2334 bp, Homo sapiens
ggtgttgggttcagaattttattttttggtttacaccattatatccgatcatatataaatacaaacaaaaacttcaccaaatattactttctttttctaatggtgtgtgtgttttgggacaggatctctgtccctcagactggagtgcagtggtgatttctgctcactgcagcctcaaactcccagctcaagcgatcctcccacttcagccttccgagtagctggaaccacaggcacccacatgatgcccagctaatttttgtatttttggtagagatggggtcgcattagattgcccaggctggtctcgacctccctggctcacatgatcctcccgccgcggcctccgagcggctgggatcaggcgttaatcaccgcgcccgggctttatatttcgttttgaaaatgctgagatggacgcaaagggctgagtgctcagtgtcccccagtcaccctcagttgcagcttccgtccaaagaaggaatcgccctctccctgctggggccactaacagcactaacacggtccgaatggcatyggcaaagctcgggaacggcgacagatgggaagacgcgtgggagcctgggggatctcgggagagccgcgcaaactcgcggcggacgcagccagcacccgcagccagcacccgcacactcccacccataccccggcagcccgccaagactctctggcccgcacctctatggtaggaaacccagaaaacaggaagtggcctcgagagggggaagggaggggcggggcctccgccaccacctcagctgcggaccgaggcgagatggcggccaccgagggggtcggggaggctgcgcaagggggcgagcccgggcagccggcgcaacccccgccccagccgcacccaccgccgccccagcagcagcacaaggaagagatggcggccgaggctggggaagccgtggcgtcccccatggacgacgggtttgtgagcctggactcgccctcctatgtcctgtacagggacagagcagaatgggctgatatagatccggtgccgcagaatgatggccccaatcccgtggtccagatcatttatagtgacaaatttagagatgtttatgattacttccgagctgtcctgcagcgtgatgaaagaagtgaacgagcttttaagctaacccgggatgctattgagttaaatgcagccaattatacagtgcatcataggcgagtattagtggaatggctaagagatccatctcaggagcttgaatttattgctgatattcttaatcaggatgcaaagaattatcatgcctggcagcatcgacaatgggttattcaggaatttaaactttgggataatgagctgcagtatgtggaccaacttctgaaagaggatgtgagaaataactctgtctggaaccaaagatacttcgttatttctaacaccactggcwacaatgatcgtgctgtattggagagagaagtccaatacactctggaaatgattaaactagtaccacataatgaaagtgcatggaactatttgaaagggattttgcaggatcgtggtctttccaaatatcctaatctgttaaatcaattacttgatttacaaccaagtcatagttccccctacctaattgcctttcttgtggatatctatgaagacatgctagaaaatcagtgtgacaataaggaagacattcttaataaagcattagagttatgtgaaatcctagctaaagaaaaggacactataagaaaggaatattggagatacattggaagatcccttcaaagcaaacacagcacagaaaatgactcaccaacaaatgtacagcaataacaccatccagaagaacttgatggaatgcttttattttttattaagggaccctgcaggagtttcacacgagagtggtccttccctttgcctgtggtgtaaaagtgcatcacacaggtattgctttttaacaagaactgatgctccttgggtgctgctgctactcagactagctctaagtaatgtgattcttctaaagcaaagtcattggatgggaggaggaagaaaaagtcccataaaggaacttttgtagtcttatcaacatataatctaatcccttagcatcagctcctccctcagtggtacatgcgtcaagatttgtagcagtaataactgcaggtcacttgtatgtaatggatgtgaggtagccgaagtttggttcagtaagcagggaatacagtcgttccatcagagctggtctgcacactcacattatcttgctatcmctgtaaccaactaatgccaaaagaacggttttgtaataaaattatagctgtatctaaaaacaa

SEQ ID NO: 2634 - DNA, 2442 bp, Homo sapiens
ggtgttgggttcagaattttattttttggtttacaccattatatccgatcatatataaatacaaacaaaaacttcaccaaatattactttctttttctaatggtgtgtgtgttttgggacaggatctctgtccctcagactggagtgcagtggtgatttctgctcactgcagcctcaaactcccagctcaagcgatcctcccacttcagccttccgagtagctggaaccacaggcacccacatgatgcccagctaatttttgtatttttggtagagatggggtcgcattagattgcccaggctggtctcgacctccctggctcacatgatcctcccgccgcggcctccgagcggctgggatcaggcgttaatcaccgcgcccgggctttatatttcgttttgaaaatgctgagatggacgcaaagggctgagtgctcagtgtcccccagtcaccctcagttgcagcttccgtccaaagaaggaatcgccctctccctgctggggccactaacagcactaacacggtccgaatggcatyggcaaagctcgggaacggcgacagatgggaagacgcgtgggagcctgggggatctcgggagagccgcgcaaactcgcggcggacgcagccagcacccgcagccagcacccgcacactcccacccataccccggcagcccgccaagactctctggcccgcacctctatggtaggaaacccagaaaacaggaagtggcctcgagagggggaagggaggggcggggcctccgccaccacctcagctgcggaccgaggcgagatggcggccaccgagggggtcggggaggctgcgcaagggggcgagcccgggcagccggcgcaacccccgccccagccgcacccaccgccgccccagcagcagcacaaggaagagatggcggccgaggctggggaagccgtggcgtcccccatggacgacgggtttgtgagcctggactcgccctcctatgtcctgtacagggacagagcagaatgggctgatatagatccggtgccgcagaatgatggccccaatcccgtggtccagatcatttatagtgacaaatttagagatgtttatgattacttccgagctgtcctgcagcgtgatgaaagaagtgaacgagcttttaagctaacccgggatgctattgagttaaatgcagccaattatacagtgtggcatttccggagagttcttttgaagtcacttcagaaggatctacatgaggaaatgaactacatcactgcaataattgaggagcagcccaaaaactatcaagtttggcatcataggcgagtattagtggaatggctaagagatccatctcaggagcttgaatttattgctgatattcttaatcaggatgcaaagaattatcatgcctggcagcatcgacaatgggttattcaggaatttaaactttgggataatgagctgcagtatgtggaccaacttctgaaagaggatgtgagaaataactctgtctggaaccaaagatacttcgttatttctaacaccactggcwacaatgatcgtgctgtattggagagagaagtccaatacactctggaaatgattaaactagtaccacataatgaaagtgcatggaactatttgaaagggattttgcaggatcgtggtctttccaaatatcctaatctgttaaatcaattacttgatttacaaccaagtcatagttccccctacctaattgcctttcttgtggatatctatgaagacatgctagaaaatcagtgtgacaataaggaagacattcttaataaagcattagagttatgtgaaatcctagctaaagaaaaggacactataagaaaggaatattggagatacattggaagatcccttcaaagcaaacacagcacagaaaatgactcaccaacaaatgtacagcaataacaccatccagaagaacttgatggaatgcttttattttttattaagggaccctgcaggagtttcacacgagagtggtccttccctttgcctgtggtgtaaaagtgcatcacacaggtattgctttttaacaagaactgatgctccttgggtgctgctgctactcagactagctctaagtaatgtgattcttctaaagcaaagtcattggatgggaggaggaagaaaaagtcccataaaggaacttttgtagtcttatcaacatataatctaatcccttagcatcagctcctccctcagtggtacatgcgtcaagatttgtagcagtaataactgcaggtcacttgtatgtaatggatgtgaggtagccgaagtttggttcagtaagcagggaatacagtcgttccatcagagctggtctgcacactcacattatcttgctatcmctgtaaccaactaatgccaaaagaacggttttgtaataaaattatagctgtatctaaaaacaa

SEQ ID NO: 2635 - DNA, 2614 bp, Homo sapiens
tctaggtcgaggccgacgtcgcttccggagcagcatggcggccactgaggaggagagrctagcagggagcggtgagggagagcggckggatttcttgcgggatctgcacgtgcgatttttccmgcgctgcctcgaggwtttgccggagcgctgttcttcactygagacaagcaggtctttcccacagaagrcagatsaaatctaaatcgctgtggtttccgaggctcttcatacctgggtattcykttcaatccatcaaaggctcctggaacagstcatccttatgatagtggccacatygcaatgacctacactggcctttcatgcttasttattcttggagacgacttaagccgagtaaataaagragcttgcttagcaggcttgagagcccttcagctggaagatgggagtttttgtgcagtacctgaaggcagtgaaaatgayatgcgatttttgtactgtrcttcctgtatttgctatatgctcaataaccagtcaggcatggatatgaaaaaagccatctcctatattaaaagaagtatgtcctatgacaatggactggcacagggagctggacttgaatctcatggaggrtctactttttgtggcattgcctcactatgtctgatgggtaaactagaagttttttcagaaaaagaattgaacacgataaagaggtggtgtataatggggcaayaaaatagttatcatggaagacctaataagcctgtagacacccgttattctttttgggtgggagcaactctaaagcttctaaaaattttccaatacactaactttgagaaaaatagaaattccatcttatcaactcaagatcgcctcgtagggggatttgccaagtggccagtaatccaggtgctttgcatgcayactttgggatctgtggcctgtcactaatggaggaaagtggaatttgttaagttcatcttgctctgaatgtaagcacacagacttctgaacgccttctagatctccatcaaagctggaaaaccaaggactcttaaacaatgctcagagaatgtacatatctctacaygactgactttagattgggarggtggggggatttgtagcataactgtagctcaagtttaaaagccatgtataaccaagtgtgctctttttttaaaaggtagagtcttacaatcaaatctcctgctgatgtcactttggggtatggtcttgagccagtaatctttgtactgggtttcaagaaaatctttgttgaagtttgaaccacaactttgtcatggttcttaaatgtttatactgtatttcaaagaagttgtttgaggcaaattaagtgtatgtgtgtaggttatctttttaaaaactcttcagtgcaaattgtatcttgttataaaatggacacaaatctgcaaaacaaatttacacttcatatagcattgataatcttcaggtgaacagttagtaatcatttaaaaagctcactgctgatggtagaaaatttgctttaatgaattaagtatctgggattattctttgaaaacagatgaccataatttttttaaagaagagtgatttattttgtcttatttttaagtaaagtgtgccaattaaacctgtgtggcctatataaatgaaattaataacttcatagtaagaataaataggtttaactaatgtgatagttttctaaaaggagattgtttgaagacaactattatgtarctgagggaaaagcaactaactatatgtgattgtgaatgaggaagttttgtgttatgtgggtcatttatttagacattgctgtggtgaataccagttatgtttgattttattctcaaatcattagttgccttatttttggctttctagaaagaaaacaatcttttctatctacaaggaaagatacttcgtgtttttatttttagccatttgaattttttaatttgttgcccccagtgtgttagctgctttaatttcaaactaatasttttctaatttttttcaaattaaataagtaaaaaaatgcaaaaacagaaccattcaaatagattcagtggtgcaactctatacatggtcatttttattctcatattctcaggtaagtgagagggaaatgtaagcatttagagggtaagaaccagggttttgtttttgttcattgttttgttttcttaagtctatgaactagctaattatgaaggagatagtataaaaactcttcattcgtaattaatttccattacttgctcagtgacattcagaactatgagtctagtactgaaatagggaaagaaatctcttcactaaaggagttgggtttaagttagtcttggtgataataaatgttgaaatacaaacctcagtataaaaactagattactggtatcactgtttaggcattgtaatattttaaatgttatctttttttctaaattagagaaaaaaatgttgtaaaataacagtctttcccaagggaaacactatgtacttggagaaatgattcatttattactggcatgcttagttttaaacctgagtttgccaaagtcaactgtatgttgtttaattagaaataaaataaatcttctgatggtgggggaaaaaataagcctaataacag

SEQ ID NO: 2636 - DNA, 715 bp, Homo sapiens
caaagcmgagctccacaaacgtgactctgtgaatgaggcctcccgcggggagccacacaggtgaagttaaacaagtgctcatttcagcgccgggcccgaggaatgctaagcacccgtggggctccgtttagatgccggaagaaatgcaaatgctcctggagaaaactttgtcctccagcgagcggagaacacaggagacgctgaacaagcagacccgccgcgcggcagttgtccagtctgctgagtggggaggacaaggacctcccaccgggcggccacagcgtgtgcagaggtcaggcccccggcccggcgatcccagctcccctcaccagtgtccacggtctcacaggtgaatgtggacgccgcagatccgtgagaaacccttccctccccaccccaccccggcccgccggcttctcactgtgggtgggcgcgcgtgggtggagaggggcgcggaactgctcccaggtagtcggagctgcagtcgcgcacacctccgactacacaggtggagggcgaggagcctccgaaccaaagtcagaggacggggtatcctcctgccgacccgcgcgcaaccagcggcccagggagggaggagacgtgcacaacgccacgacggacggggacaggtttycggggacacattcgctcggsggggggcgggagcctcggacgcctcacctctccgmctcagcagcagcgcggccacggcgct

SEQ ID NO: 2637 - DNA, 1743 bp, Homo sapiens
cagggctgtgaccgtctatgacaagccagcatctttctttcaagagacctctggacctgcagcaccaactcttcatgaagctgggcggcacgcactctccgttcagggcctgctcagaacctgaggacccagacacggagcggtcggccttcatggagcgggatgctgggagcgggctggtgatgcgcctccgygagcggccagccctgctggtcagcagcacaggctggacaggtctgcacgacccctagaacacytgggcttgaggacgaagacttctccatctgctggcagctttagaaaagtttgaacaactgactcttgatggacacaaccttccttctctcgtctgtgtgataacaggcaaagggcctccgagggagtattacagccgcctcatccaccagaagcatttccagcacatccaggtcwgcaccccytggctggaggccgaggactacccccgcttctagggtcggtggatctgggtgtctgtctgcacacgtcctgcagtggcctggacctgcccatgaaggtggtggacatgttcgggtgctgtttgcctgtgtgtgccgtgaacttcaagtgtttacatgagctggtgaaacatgaagaaaatggcctggtctttgaggactcagaggaactggcagctcagctgcaggtgcttttctcaaactttcctgatcctgcgggcaagctaaaccagttccggaagaacctgcgggartcgcagcagctccgatgggattagagctgggtgcagactgtgctccctttggttatggacacataactcctgggccagaggctaaaaccccgggacccctgctgtccttcccacagcttcttctcagagtctcagggcaaatcctttcgagcagcgcctcccagtggccagaagctgaaatgatggcagtagtgccacctggtgaatgaattggttctgtgacccgggaagctgtgcttggctctgatttcttttctggaggctcggaaacacttcctctcttcttctgttcttcacgccccatgcycctgctagcgtattactgttctgtgacttccctgtracctctgcagtactcctcatcctgcgtttggtctccaggtgtcacctttctgccgtgttcctaacattttgattcctgtcttgaaaaaagcacctgctgcaccataagcccagggatgtggcagctgcagcgggcttggctttgtgaagaaccgagtgtgtccagggatgtggcagctgcagcgggcttggctttgtgaagaaccgagtgtgtccagggatgtggcagctgcagtgggcttggctttgtgaggaatcgagtgtgtccaccgatgtggcagctgcagcgggcttggctttgtgaagaaccgagtgtgtccaccgatgtgacagctgcagcgggcttggctttgtgaagaaccgagtgtgtccaccgatgtggcagctgcagcgggcttggctttgtgaggaaccgagtgtgtccagggatgtggcagctgcagcgggcttggctttgtgaggaaccgagtgtgtccagggatgtggcagctgcagcgggcttggctttgtgaagaaccgagtgtgtccagggatgtggcagctgcagcgggcttggctttgtgaagaaccgagtgtgtccagggatgtggcagctgcagtgggcttggctttgtgaggaatcgagtgtgtccaccgatgtggcagctgcagcgggcttggctttgtgaaga

SEQ ID NO: 2638 - DNA, 1715 bp, Homo sapiens
ttctgcaaaggttacttgtttcttattgctaaaagtaatacatcattcttgccaacagaatgattggcaggattttcagtaaaggtccaggtcagaagtcatttagactgggtcccccagtctctgtcagaaccatggtactctgttgtggtgtgaaagtagccacagatcatctgtcgattaaggggtgtggctttgttcgaataaaactttatttacaaacacaggctgtgggctggatttggcctgcaggctgtagtttgtgatccttgattcagacagtttagcaaggctgaaaagaacaccgacacccccttgttacccacagatgggtgggacttggccggaggccaagaggagggtgctcgcaggggaacatacagcatgtagaggccaggaggtgctccagggcaccaagtgtgggaaagtgggacatacggggaagtttccagaaagcatgatgtcaagttggaggcagagcgctgctggggcatgaagagtctcgagtccaagtgagggagttaggaacttgggaggggttgttgttgggtaggggacctggggtcagccaggtggtgacatgggatggggtggggacaggcaatgaggtaagctctgctctttatttttttgcaggtgcttttctcaaactttcctgatcctgcgggcaagctaaaccagttccggaagaacctgcgggartcgcagcagctccgatgggattagagctgggtgcagactgtgctccctttggttatggacacataactcctgggccagaggctaaaaccccgggacccctgctgtccttcccacagcttcttctcagagtctcagggcaaatcctttcgagcagcgcctcccagtggccagaagctgaaatgatggcagtagtgccacctggtgaatgaattggttctgtgacccgggaagctgtgcttggctctgatttcttttctggaggctcggaaacacttcctctcttcttctgttcttcacgccccatgcycctgctagcgtattactgttctgtgacttccctgtracctctgcagtactcctcatcctgcgtttggtctccaggtgtcacctttctgccgtgttcctaacattttgattcctgtcttgaaaaaagcacctgctgcaccataagcccagggatgtggcagctgcagcgggcttggctttgtgaagaaccgagtgtgtccagggatgtggcagctgcagcgggcttggctttgtgaagaaccgagtgtgtccagggatgtggcagctgcagtgggcttggctttgtgaggaatcgagtgtgtccaccgatgtggcagctgcagcgggcttggctttgtgaagaaccgagtgtgtccaccgatgtgacagctgcagcgggcttggctttgtgaagaaccgagtgtgtccaccgatgtggcagctgcagcgggcttggctttgtgaggaaccgagtgtgtccagggatgtggcagctgcagcgggcttggctttgtgaggaaccgagtgtgtccagggatgtggcagctgcagcgggcttggctttgtgaagaaccgagtgtgtccagggatgtggcagctgcagcgggcttggctttgtgaagaaccgagtgtgtccagggatgtggcagctgcagtgggcttggctttgtgaggaatcgagtgtgtccaccgatgtggcagctgcagcgggcttggctttgtgaaga

SEQ ID NO: 2639 - DNA, 1712 bp, Homo sapiens
cagggctgtgaccgtctatgacaagccagcatctttctttcaagagacctctggacctgcagcaccaactcttcatgaagctgggcggcacgcactctccgttcagggcctgctcagaacctgaggacccagacacggagcggtcggccttcatggagcgggatgctgggagcgggctggtgatgcgcctccgygagcggccagccctgctggtcagcagcacaggctggacagaggacgaagacttctccatctgctggcagctttagaaaagtttgaacaactgactcttgatggacacaaccttccttctctcgtctgtgtgataacaggcaaagggcctccgagggagtattacagccgcctcatccaccagaagcatttccagcacatccaggtcwgcaccccytggctggaggccgaggactacccccgcttctagggtcggtggatctgggtgtctgtctgcacacgtcctgcagtggcctggacctgcccatgaaggtggtggacatgttcgggtgctgtttgcctgtgtgtgccgtgaacttcaagtgtttacatgagctggtgaaacatgaagaaaatggcctggtctttgaggactcagaggaactggcagctcagctgcaggtgcttttctcaaactttcctgatcctgcgggcaagctaaaccagttccggaagaacctgcgggartcgcagcagctccgatgggattagagctgggtgcagactgtgctccctttggttatggacacataactcctgggccagaggctaaaaccccgggacccctgctgtccttcccacagcttcttctcagagtctcagggcaaatcctttcgagcagcgcctcccagtggccagaagctgaaatgatggcagtagtgccacctggtgaatgaattggttctgtgacccgggaagctgtgcttggctctgatttcttttctggaggctcggaaacacttcctctcttcttctgttcttcacgccccatgcycctgctagcgtattactgttctgtgacttccctgtracctctgcagtactcctcatcctgcgtttggtctccaggtgtcacctttctgccgtgttcctaacattttgattcctgtcttgaaaaaagcacctgctgcaccataagcccagggatgtggcagctgcagcgggcttggctttgtgaagaaccgagtgtgtccagggatgtggcagctgcagcgggcttggctttgtgaagaaccgagtgtgtccagggatgtggcagctgcagtgggcttggctttgtgaggaatcgagtgtgtccaccgatgtggcagctgcagcgggcttggctttgtgaagaaccgagtgtgtccaccgatgtgacagctgcagcgggcttggctttgtgaagaaccgagtgtgtccaccgatgtggcagctgcagcgggcttggctttgtgaggaaccgagtgtgtccagggatgtggcagctgcagcgggcttggctttgtgaggaaccgagtgtgtccagggatgtggcagctgcagcgggcttggctttgtgaagaaccgagtgtgtccagggatgtggcagctgcagcgggcttggctttgtgaagaaccgagtgtgtccagggatgtggcagctgcagtgggcttggctttgtgaggaatcgagtgtgtccaccgatgtggcagctgcagcgggcttggctttgtgaaga

SEQ ID NO: 2640 - DNA, 3214 bp, Homo sapiens
gacgccccgccggcgcgcgctgccgccagcgaggcccggggaggccgcggcggaggcggaggcccggcgccctgggcggcgccctgtccccgaagtccgtcctccccgttaggtggcgagcgcccgaggggaggggacagccgggcaagcaggaagctgcggcttaaaagggcaacccgcgcgggacccttcctccctagtcgcggggagtctgagaaagcgcgcctgtttcgcgaccatcacgcacctcccctccgcttgtggccatgtaccgctacctgggcgaagcgctgttgctgtcccgggccgggcccgctgccctgggctcggcgtccrccgactcggccgcgttgctgggctgggcccggggacagcccgccgccgccccgcagccggggctsgcattggccgcccggcgccactacagcgaggyggtggccgaccgcgaggacgaccccaacttcttcaagatggtggagggcttcttcgatcgcggcgccagcatcgtggaggacaagctggtggaggacctgaggacccrggagagcgaggagcagaagcggaaccgggtgcgcggcatcctgcggatcatcaagccctgcaaccatgtgctgagtctctccttccccatccggcgcgacgacggctcctgggaggtcatcgaaggctaccgggcccagcacagccagcaccgcacgccctgcaagggaggtatccgttacagcactgatgtgagtgtagatgaagtaaaagctttggcttctctgatgacatacaagtgtgcagtggttgatgtgccgtttgggggtgctaaagctggtgttaagatcaatcccaagaactatactgataatgaattggaaaagatcacaaggaggttcaccatggagctagcaaaaaagggctttattggtcctggcattgatgtgcctgctccagacatgagcacaggtgagcgggagatgtcctggatcgctgatacctatgccagcaccatagggcactatgatattaatgcacacgcctgtgttactggtaaacccatcagccaagggggaatccatggacgcatctctgctactggccgtggtgtcttccatgggattgaaaatttcatcaatgaagcttcttacatgagcattttaggaatgacaccagggtttggagataaaacatttgttgttcagggatttggtaatgtgggcctacactctatgagatatttacatcgttttggtgctaaatgtattgctgttggtgagtctgatgggagtatatggaatccagatggtattgacccaaaggaactggaagacttcaaattgcaacatgggtccattctgggcttccccaaggcaaagccctatgaaggaagcatcttggaggccgactgtgacatactgatcccagctgccagtgagaagcagttgaccaaatccaacgcacccagagtcaaagccaagatcattgctgaaggtgccaatgggccaacaactccagaagctgacaagatcttcctggagagaaacattatggttattccagatctctacttgaatgctggaggagtgacagtatcttactttgagtggctgaagaatctaaatcatgtcagctatggccgtttgaccttcaaatatgaaagggattctaactaccacttgctcatgtctgttcaagagagtttagaaagaaaatttggaaagcatggtggaactattcccattgtacccacggcagagttccaagacaggatatcgggtgcatctgagaaagacatcgtgcactctggcttggcatacacaatggagcgttctgccaggcaaattatgcgcacagccatgaagtataacctgggattggacctgagaacagctgcctatgttaatgccattgagaaagtcttcaaagtgtacaatgaagctggtgtgaccttcacatagatggatcatggctgacttcctcactatcctcttcacatgtaacttctgcagacctatcacaagtttacatgtaaccacagaaatccctttctctcctgactcattaataatggataccattctcaacaagtcaatccaagtcagcccgttaaggagaaagaaattaaggttagcggatcatgtacaagctgagtgtgaaagtagaaatcacctacaccagagagccattttggtattttgcctttaaataaaaagcctcctttatctggctgtgcagccttgctctgtggcttttcccaacacaatcagtgctagtgctggggaggaacagtcaagagcagtcagttgcttgcttattttttctggatgagtctgggacacactktaactttaacacatttaagaagtaggtgtgtggccttttcagaaggtggcatggtcctcaagtgagttcttagtattttatatcagcaaaataattcaattttgcaggttgcaaacaaatataaaacctgtttctgtttatgaatattattcttttagaatagaawaagtacatgctgctgtaataaaattgcctttaatcacttaacaagcctaaccttgactcaaacagtgaatgcctatagaaataataaatgaaaaaaactagtatttttatatcataaaacaatgtcatttatagcttatcattcatgtattgtccagcagacattaaaagccctgtggataattaagttatcttcatacctgcaaaatggtggaggctattttcattaaaactgtcagaatttgcttactataattatgatacagtccaaagaatgcagtcactttttatcatgttaactaattgttctcttttgaagatctatggttgactaattaaacaataattcaagtagagtgtcccagaaaaaaaccacttgggctccctgtttggagtctggctggctytgagcattgccaatrgcccctactcacctgactttgtatcctctccttttaraggctttgcattytgcacccagcttcactaacagtgggctgaaaacatccttgggttgagtgtttcatttgggagttrtttggccagggccttttgaacagtagtgtccccatgaagtgctagataatatatgtgtaaragtcagctttttttttttttttaactctaacacccttcagaaatttctaactactttgtaactgcatggcttaacctggtgataaaagcagttattaaaagtctacgttttccaaaacttacg

SEQ ID NO: 2641 - DNA, 2760 bp, Homo sapiens
agaaagcgcgcctgtttcgcgaccatcacgcacctcccctccgcttgtggccatgtaccgctacctggtggaggacctgaggacccrggagagcgaggagcagaagcggaaccgggtgcgcggcatcctgcggatcatcaagccctgcaaccatgtgctgagtctctccttccccatccggcgcgacgacggctcctgggaggtcatcgaaggctaccgggcccagcacagccagcaccgcacgccctgcaagggaggtatccgttacagcactgatgtgagtgtagatgaagtaaaagctttggcttctctgatgacatacaagtgtgcagtggttgatgtgccgtttgggggtgctaaagctggtgttaagatcaatcccaagaactatactgataatgaattggaaaagatcacaaggaggttcaccatggagctagcaaaaaagggctttattggtcctggcattgatgtgcctgctccagacatgagcacaggtgagcgggagatgtcctggatcgctgatacctatgccagcaccatagggcactatgatattaatgcacacgcctgtgttactggtaaacccatcagccaagggggaatccatggacgcatctctgctactggccgtggtgtcttccatgggattgaaaatttcatcaatgaagcttcttacatgagcattttaggaatgacaccagggtttggagataaaacatttgttgttcagggatttggtaatgtgggcctacactctatgagatatttacatcgttttggtgctaaatgtattgctgttggtgagtctgatgggagtatatggaatccagatggtattgacccaaaggaactggaagacttcaaattgcaacatgggtccattctgggcttccccaaggcaaagccctatgaaggaagcatcttggaggccgactgtgacatactgatcccagctgccagtgagaagcagttgaccaaatccaacgcacccagagtcaaagccaagatcattgctgaaggtgccaatgggccaacaactccagaagctgacaagatcttcctggagagaaacattatggttattccagatctctacttgaatgctggaggagtgacagtatcttactttgagtggctgaagaatctaaatcatgtcagctatggccgtttgaccttcaaatatgaaagggattctaactaccacttgctcatgtctgttcaagagagtttagaaagaaaatttggaaagcatggtggaactattcccattgtacccacggcagagttccaagacaggatatcgggtgcatctgagaaagacatcgtgcactctggcttggcatacacaatggagcgttctgccaggcaaattatgcgcacagccatgaagtataacctgggattggacctgagaacagctgcctatgttaatgccattgagaaagtcttcaaagtgtacaatgaagctggtgtgaccttcacatagatggatcatggctgacttcctcactatcctcttcacatgtaacttctgcagacctatcacaagtttacatgtaaccacagaaatccctttctctcctgactcattaataatggataccattctcaacaagtcaatccaagtcagcccgttaaggagaaagaaattaaggttagcggatcatgtacaagctgagtgtgaaagtagaaatcacctacaccagagagccattttggtattttgcctttaaataaaaagcctcctttatctggctgtgcagccttgctctgtggcttttcccaacacaatcagtgctagtgctggggaggaacagtcaagagcagtcagttgcttgcttattttttctggatgagtctgggacacactktaactttaacacatttaagaagtaggtgtgtggccttttcagaaggtggcatggtcctcaagtgagttcttagtattttatatcagcaaaataattcaattttgcaggttgcaaacaaatataaaacctgtttctgtttatgaatattattcttttagaatagaawaagtacatgctgctgtaataaaattgcctttaatcacttaacaagcctaaccttgactcaaacagtgaatgcctatagaaataataaatgaaaaaaactagtatttttatatcataaaacaatgtcatttatagcttatcattcatgtattgtccagcagacattaaaagccctgtggataattaagttatcttcatacctgcaaaatggtggaggctattttcattaaaactgtcagaatttgcttactataattatgatacagtccaaagaatgcagtcactttttatcatgttaactaattgttctcttttgaagatctatggttgactaattaaacaataattcaagtagagtgtcccagaaaaaaaccacttgggctccctgtttggagtctggctggctytgagcattgccaatrgcccctactcacctgactttgtatcctctccttttaraggctttgcattytgcacccagcttcactaacagtgggctgaaaacatccttgggttgagtgtttcatttgggagttrtttggccagggccttttgaacagtagtgtccccatgaagtgctagataatatatgtgtaaragtcagctttttttttttttttaactctaacacccttcagaaatttctaactactttgtaactgcatggcttaacctggtgataaaagcagttattaaaagtctacgttttccaaaacttacg

SEQ ID NO: 2642 - DNA, 2758 bp, Homo sapiens
aggcggaggcccggcgccctgggcggcgccctgtccccgaagtccgtcctccccgttaggtggcgagcgcccgaggggaggggacagccgggcaagagcagaagcggaaccgggtgcgcggcatcctgcggatcatcaagccctgcaaccatgtgctgagtctctccttccccatccggcgcgacgacggctcctgggaggtcatcgaaggctaccgggcccagcacagccagcaccgcacgccctgcaagggaggtatccgttacagcactgatgtgagtgtagatgaagtaaaagctttggcttctctgatgacatacaagtgtgcagtggttgatgtgccgtttgggggtgctaaagctggtgttaagatcaatcccaagaactatactgataatgaattggaaaagatcacaaggaggttcaccatggagctagcaaaaaagggctttattggtcctggcattgatgtgcctgctccagacatgagcacaggtgagcgggagatgtcctggatcgctgatacctatgccagcaccatagggcactatgatattaatgcacacgcctgtgttactggtaaacccatcagccaagggggaatccatggacgcatctctgctactggccgtggtgtcttccatgggattgaaaatttcatcaatgaagcttcttacatgagcattttaggaatgacaccagggtttggagataaaacatttgttgttcagggatttggtaatgtgggcctacactctatgagatatttacatcgttttggtgctaaatgtattgctgttggtgagtctgatgggagtatatggaatccagatggtattgacccaaaggaactggaagacttcaaattgcaacatgggtccattctgggcttccccaaggcaaagccctatgaaggaagcatcttggaggccgactgtgacatactgatcccagctgccagtgagaagcagttgaccaaatccaacgcacccagagtcaaagccaagatcattgctgaaggtgccaatgggccaacaactccagaagctgacaagatcttcctggagagaaacattatggttattccagatctctacttgaatgctggaggagtgacagtatcttactttgagtggctgaagaatctaaatcatgtcagctatggccgtttgaccttcaaatatgaaagggattctaactaccacttgctcatgtctgttcaagagagtttagaaagaaaatttggaaagcatggtggaactattcccattgtacccacggcagagttccaagacaggatatcgggtgcatctgagaaagacatcgtgcactctggcttggcatacacaatggagcgttctgccaggcaaattatgcgcacagccatgaagtataacctgggattggacctgagaacagctgcctatgttaatgccattgagaaagtcttcaaagtgtacaatgaagctggtgtgaccttcacatagatggatcatggctgacttcctcactatcctcttcacatgtaacttctgcagacctatcacaagtttacatgtaaccacagaaatccctttctctcctgactcattaataatggataccattctcaacaagtcaatccaagtcagcccgttaaggagaaagaaattaaggttagcggatcatgtacaagctgagtgtgaaagtagaaatcacctacaccagagagccattttggtattttgcctttaaataaaaagcctcctttatctggctgtgcagccttgctctgtggcttttcccaacacaatcagtgctagtgctggggaggaacagtcaagagcagtcagttgcttgcttattttttctggatgagtctgggacacactktaactttaacacatttaagaagtaggtgtgtggccttttcagaaggtggcatggtcctcaagtgagttcttagtattttatatcagcaaaataattcaattttgcaggttgcaaacaaatataaaacctgtttctgtttatgaatattattcttttagaatagaawaagtacatgctgctgtaataaaattgcctttaatcacttaacaagcctaaccttgactcaaacagtgaatgcctatagaaataataaatgaaaaaaactagtatttttatatcataaaacaatgtcatttatagcttatcattcatgtattgtccagcagacattaaaagccctgtggataattaagttatcttcatacctgcaaaatggtggaggctattttcattaaaactgtcagaatttgcttactataattatgatacagtccaaagaatgcagtcactttttatcatgttaactaattgttctcttttgaagatctatggttgactaattaaacaataattcaagtagagtgtcccagaaaaaaaccacttgggctccctgtttggagtctggctggctytgagcattgccaatrgcccctactcacctgactttgtatcctctccttttaraggctttgcattytgcacccagcttcactaacagtgggctgaaaacatccttgggttgagtgtttcatttgggagttrtttggccagggccttttgaacagtagtgtccccatgaagtgctagataatatatgtgtaaragtcagctttttttttttttttaactctaacacccttcagaaatttctaactactttgtaactgcatggcttaacctggtgataaaagcagttattaaaagtctacgttttccaaaacttacg

SEQ ID NO: 2643 - DNA, 3025 bp, Homo sapiens
gacgccccgccggcgcgcgctgccgccagcgaggcccggggaggccgcggcggaggcggaggcccggcgccctgggcggcgccctgtccccgaagtccgtcctccccgttaggtggcgagcgcccgaggggaggggacagccgggcaagcaggaagctgcggcttaaaagggcaacccgcgcgggacccttcctccctagtcgcggggagtctgagaaagcgcgcctgtttcgcgaccatcacgcacctcccctccgcttgtggccatgtaccgctacctgggcgaagcgctgttgctgtcccgggccgggcccgctgccctgggctcggcgtccrccgactcggccgcgttgctgggctgggcccggggacagcccgccgccgccccgcagccggggctsgcattggccgcccggcgccactacagcgaggyggtggccgaccgcgaggacgaccccaacttcttcaagatggtggagggcttcttcgatcgcggcgccagcatcgtggaggacaagctggtggaggacctgaggacccrggagagcgaggagcagaagcggaaccgggtgcgcggcatcctgcggatcatcaagccctgcaaccatgtgctgagtctctccttccccatccggcgcgacgacggctcctgggaggtcatcgaaggctaccgggcccagcacagccagcaccgcacgccctgcaagggaggtatccgttacagcactgatgtgagtgtagatgaagtaaaagctttggcttctctgatgacatacaagtgtgcagtggttgatgtgccgtttgggggtgctaaagctggtgttaagatcaatcccaagaactatactgataatgaattggaaaagatcacaaggaggttcaccatggagctagcaaaaaagggctttattggtcctggcattgatgtgcctgctccagacatgagcacaggtgagcgggagatgtcctggatcgctgatacctatgccagcaccatagggcactatgatattaatgcacacgcctgtgttactggtaaacccatcagccaagggggaatccatggacgcatctctgctactggccgtggtgtcttccatgggattgaaaatttcatcaatgaagcttcttacatgagcattttaggaatgacaccagggtttggagataaaacatttgttgttcagggatttggtaatgtgggcctacactctatgagatatttacatcgttttggtgctaaatgtattgctgttggtgagtctgatgggagtatatggaatccagatggtattgacccaaaggaactggaagacttcaaattgcaacatgggtccattctgggcttccccaaggcaaagccctatgaaggaagcatcttggaggccgactgtgacatactgatcccagctgccagtgagaagcagttgaccaaatccaacgcacccagagtcaaagccaagatcattgctgaaggtgccaatgggccaacaactccagaagctgacaagatcttcctggagagaaacattatggttattccagatctctacttgaatgctggaggagtgacagtatcttactttgagtggctgaagaatctaaatcatgtcagctatggccgtttgaccttcaaatatgaaagggattctaactaccacttgctcatgtctgttcaagagagtttagaaagaaaatttggaaagcatggtggaactattcccattgtacccacggcagagttccaagacaggatatcgggtgcatctgagaaagacatcgtgcactctggcttggcatacacaatggagcgttctgccaggcaaattatgcgcacagccatgaagtataacctgggattggacctgagaacagctgcctatgttaatgccattgagaaagtcttcaaagtgtacaatgaagctggtgtgaccttcacatagatggatcatggctgacttcctcactatcctcttcacatgtaacttctgcagacctatcacaagtttacatgtaaccacagaaatccctttctctcctgactcattaataatggataccattctcaacaagtcaatccaagtcagcccgttaaggagaaagaaattaaggttagcggatcatgtacaagctgagtgtgaaagtagaaatcacctacaccagagagccattttggtattttgcctttaaataaaaagcctcctttatctggctagcagtcagttgcttgcttattttttctggatgagtctgggacacactktaactttaacactttctgtttatgaatattattcttttagaatagaawaagtacatgctgctgtaataaaattgcctttaatcacttaacaagcctaaccttgactcaaacagtgaatgcctatagaaataataaatgaaaaaaactagtatttttatatcataaaacaatgtcatttatagcttatcattcatgtattgtccagcagacattaaaagccctgtggataattaagttatcttcatacctgcaaaatggtggaggctattttcattaaaactgtcagaatttgcttactataattatgatacagtccaaagaatgcagtcactttttatcatgttaactaattgttctcttttgaagatctatggttgactaattaaacaataattcaagtagagtgtcccagaaaaaaaccacttgggctccctgtttggagtctggctggctytgagcattgccaatrgcccctactcacctgactttgtatcctctccttttaraggctttgcattytgcacccagcttcactaacagtgggctgaaaacatccttgggttgagtgtttcatttgggagttrtttggccagggccttttgaacagtagtgtccccatgaagtgctagataatatatgtgtaaragtcagctttttttttttttttaactctaacacccttcagaaatttctaactactttgtaactgcatggcttaacctggtgataaaagcagttattaaaagtctacgttttccaaaa

SEQ ID NO: 2644 - DNA, 1922 bp, Homo sapiens
tttccacatgtgaggggctgaggggctcaaggaggggagcatctccactgggtggaggctgggggtcccagcaggaartggtgagacaaagggcgctggctggcagggagacagcacaggaaggtcctagagsttcctcagtgcagctggactctcctggagaccttcacacaccctgacatctgggccttgcccgacgagggtgctttcactggtctgcaccatggcccaggccctgggattttgaacagctccgcaggtgaatgaaaggtgaggccaggctggggaaccaccrcattagagcccgacctggttttcagccccagccccgccactgastggcyttgtgagtgcgggcaagtcactcagcctccctaggcctcagtgacttccctgaaagcaagaattccactttcttgctgttgtgatggtggtaagggaacgggcctggctctggcccctgacgcaggaacatggagctgatccaggacayctcycgcccgccactggagtacgtgaagggggtcccgctcatcaagtactttgcagaggcactggggcccctgcagagcttccaggcccggcctgatgacctgctcatcagcacctaccccaagtccggcacyacctgggtragccagattctggacatgatctaccagggyggtgacctggaraagtgtcaccgagctcccatcttcatgcgggtgcccttccttgagttcaaagycccagggattccctcagggatggagactctgaaagacacaccggccccacgactcctgaagacacacctgcccctggctctgctcccccagactctgttggatcagaaggtcaaggtggtctatgttgcccgcaacgcaaaggatgtggcrgtttcctactaccacttctaccacatggccaargtgyaccctsascctgggacctgggacagcttcctggagaagttcatggtcggagaagtgtcctacggatcctggtaccagcacgtgcargagtggtgggagctgagccgcacccaccctgttctctacctcttctatgaagacatgaaggagaacccgaaaagggagattcaaaagatcctggagtttgtggggcrctccctgccagaggagacygtggacttcrtggttsagcacacgtcgttcaaggagatgaagaagamccctatgaccaactacaccmccgtcccccaggagttcatggaccacagcatctcccccttcatgaggaaaggcatggctggggactggaaraccaccttcaccgtggcgcagaatgagcgcttcgatgcggactatgcgragaagatggcaggctgcagcctcascttccgctctgagctgtgagaggggytcctggrgtcactgcagagggagtgtgcgaatcaaacctgaccaagcggctcaagaataaaatatgaattgagggccygggacggtaggtcatgtctgtaatcccagcaatttggaggctgaggtgggaggatcatttgagcccaggagttcgagaccaacctgggcaacatagtgagattctgttaaaaaaataaaataaaataaaaccaatttttaaaaagagaataaaatatgattgtgggccaggcakagtggctcatgcctgtaatcccagcaatttgagaagttgaggctagaggatcactggaggacaggagtttgggaccagcctgttcaacattacaagacatcatccctacaaaaatttgagaaaattatctgtacgtgatggtgggcacctgtagtcccarctacttgacaagtgaaggcagkaggatcgcctgagccagggaggttatggctgcagtgggctgactgggctaatccactcaagcctgagggacagagcaaatcttgcttgagaaataaataaaatacaatttacttaacata

SEQ ID NO: 2645 - DNA, 2180 bp, Homo sapiens
cgagctgggtgtgcgcggggcgcccaaccgctcaggagctcctggaggaggcaggtgcaggtgccggctgctgcagcgcagtagctgctggaggctggcgaggcccggaggcggtgcaggaagcctccgaccacgcgggctcctgatcgcgggcgcccacagcgcggacatggcgggctggtggccggcgttgtcgcgcacggcccggcgccacccgtggcccaccaacgtgctgctctacgttgctcgagcaacgtagctctacgctctacgagcgtgccgtagctcgctcgtctccgccggggacgtgctgcagcaacggctgcagggccgctaggccgactggcgccagacgcggcgcgtggccacgttggtggtgaccttccacgccaacttcaactacgtgtggctgggcctgctggagcgcgcgctcccgggccgagcgccgcgcgccatgctggccaagttgctgtgcgaccaggtggtcggtgcgcccatcgcggtctcggccttctacgccggtatgagcattctccagggaaaggatgacatatttttggacctgaaacagaaattctggaacacctatatgcacccacaatcagccactgcgggcgaggagggcacraggccaggttcccaagagctcagcagctctggcccctagtagcagctcagttcctcaatgggccgtgtttgtcctggagcccagatggactgtggccaggaacrtggagctgatccaggacayctcycgcccgccactggagtacgtgaagggggtcccgctcatcaagtactttgcagaggcactggggcccctgcagagcttccaggcccggcctgatgacctgctcatcagcacctaccccaagtccggcacyacctgggtragccagattctggacatgatctaccagggyggtgacctggaraagtgtcaccgagctcccatcttcatgcgggtgcccttccttgagttcaaagycccagggattccctcagggatggagactctgaaagacacaccggccccacgactcctgaagacacacctgcccctggctctgctcccccagactctgttggatcagaaggtcaaggtggtctatgttgcccgcaacgcaaaggatgtggcrgtttcctactaccacttctaccacatggccaargtgyaccctsascctgggacctgggacagcttcctggagaagttcatggtcggagaagtgtcctacggatcctggtaccagcacgtgcargagtggtgggagctgagccgcacccaccctgttctctacctcttctatgaagacatgaaggagaacccgaaaagggagattcaaaagatcctggagtttgtggggcrctccctgccagaggagacygtggacttcrtggttsagcacacgtcgttcaaggagatgaagaagamccctatgaccaactacaccmccgtcccccaggagttcatggaccacagcatctcccccttcatgaggaaaggcatggctggggactggaaraccaccttcaccgtggcgcagaatgagcgcttcgatgcggactatgcgragaagatggcaggctgcagcctcascttccgctctgagctgtgagaggggytcctggrgtcactgcagagggagtgtgcgaatcaaacctgaccaagcggctcaagaataaaatatgaattgagggccygggacggtaggtcatgtctgtaatcccagcaatttggaggctgaggtgggaggatcatttgagcccaggagttcgagaccaacctgggcaacatagtgagattctgttaaaaaaataaaataaaataaaaccaatttttaaaaagagaataaaatatgattgtgggccaggcakagtggctcatgcctgtaatcccagcaatttgagaagttgaggctagaggatcactggaggacaggagtttgggaccagcctgttcaacattacaagacatcatccctacaaaaatttgagaaaattatctgtacgtgatggtgggcacctgtagtcccarctacttgacaagtgaaggcagkaggatcgcctgagccagggaggttatggctgcagtgggctgactgggctaatccactcaagcctgagggacagagcaaatcttgcttgagaaataaataaaatacaatttacttaacata

SEQ ID NO: 2646 - DNA, 2306 bp, Homo sapiens
cgagctgggtgtgcgcggggcgcccaaccgctcaggagctcctggaggaggcaggtgcaggtgccggctgctgcagcgcagtagctgctggaggctggcgaggcccggaggcggtgcaggaagcctccgaccacgcgggctcctgatcgcgggcgcccacagcgcggacatggcgggctggtggccggcgttgtcgcgcacggcccggcgccacccgtggcccaccaacgtgctgctctacgttgctcgagcaacgtagctctacgctctacgagcgtgccgtagctcgctcgtctccgccggggacgtgctgcagcaacggctgcagggccgctaggccgactggcgccagacgcggcgcgtggccacgttggtggtgaccttccacgccaacttcaactacgtgtggctgggcctgctggagcgcgcgctcccgggccgagcgccgcgcgccatgctggccaagttgctgtgcgaccaggtggtcggtgcgcccatcgcggtctcggccttctacgccggtatgagcattctccagggaaaggatgacatatttttggacctgaaacagaaattctggaacacctatatgcaaactcagtcgtggctttggagatcactttaagcttgtctccagctggcacactaaggagggtaatggagaagctcccccacccccaaccccaccccttccttccggaagcaaatctaagtccagccccggctccagatccctcccacagtggacctaggaaaccctcagctcagagaacaaccctgcattccccacacarcacccacaatcagccactgcgggcgaggagggcacraggccaggttcccaagagctcaggaacatggagctgatccaggacayctcycgcccgccactggagtacgtgaagggggtcccgctcatcaagtactttgcagaggcactggggcccctgcagagcttccaggcccggcctgatgacctgctcatcagcacctaccccaagtccggcacyacctgggtragccagattctggacatgatctaccagggyggtgacctggaraagtgtcaccgagctcccatcttcatgcgggtgcccttccttgagttcaaagycccagggattccctcagggatggagactctgaaagacacaccggccccacgactcctgaagacacacctgcccctggctctgctcccccagactctgttggatcagaaggtcaaggtggtctatgttgcccgcaacgcaaaggatgtggcrgtttcctactaccacttctaccacatggccaargtgyaccctsascctgggacctgggacagcttcctggagaagttcatggtcggagaagtgtcctacggatcctggtaccagcacgtgcargagtggtgggagctgagccgcacccaccctgttctctacctcttctatgaagacatgaaggagaacccgaaaagggagattcaaaagatcctggagtttgtggggcrctccctgccagaggagacygtggacttcrtggttsagcacacgtcgttcaaggagatgaagaagamccctatgaccaactacaccmccgtcccccaggagttcatggaccacagcatctcccccttcatgaggaaaggcatggctggggactggaaraccaccttcaccgtggcgcagaatgagcgcttcgatgcggactatgcgragaagatggcaggctgcagcctcascttccgctctgagctgtgagaggggytcctggrgtcactgcagagggagtgtgcgaatcaaacctgaccaagcggctcaagaataaaatatgaattgagggccygggacggtaggtcatgtctgtaatcccagcaatttggaggctgaggtgggaggatcatttgagcccaggagttcgagaccaacctgggcaacatagtgagattctgttaaaaaaataaaataaaataaaaccaatttttaaaaagagaataaaatatgattgtgggccaggcakagtggctcatgcctgtaatcccagcaatttgagaagttgaggctagaggatcactggaggacaggagtttgggaccagcctgttcaacattacaagacatcatccctacaaaaatttgagaaaattatctgtacgtgatggtgggcacctgtagtcccarctacttgacaagtgaaggcagkaggatcgcctgagccagggaggttatggctgcagtgggctgactgggctaatccactcaagcctgagggacagagcaaatcttgcttgagaaataaataaaatacaatttacttaacata

SEQ ID NO: 2647 - DNA, 2180 bp, Homo sapiens
cgagctgggtgtgcgcggggcgcccaaccgctcaggagctcctggaggaggcaggtgcaggtgccggctgctgcagcgcagtagctgctggaggctggcgaggcccggaggcggtgcaggaagcctccgaccacgcgggctcctgatcgcgggcgcccacagcgcggacatggcgggctggtggccggcgttgtcgcgcacggcccggcgccacccgtggcccaccaacgtgctgctctacgttgctcgagcaacgtagctctacgctctacgagcgtgccgtagctcgctcgtctccgccggggacgtgctgcagcaacggctgcagggccgctaggccgactggcgccagacgcggcgcgtggccacgttggtggtgaccttccacgccaacttcaactacgtgtggctgggcctgctggagcgcgcgctcccgggccgagcgccgcgcgccatgctggccaagttgctgtgcgaccaggtggtcggtgcgcccatcgcggtctcggccttctacgccggtatgagcattctccagggaaaggatgacatatttttggacctgaaacagaaattctggaacacctatatgcaaactcagtcgtggctttggagatcactttaagcttgtctccagctggcacactaaggagggtaatggagaagctcccccacccccaaccccaccccttccttccggaagcaaatctaagtccagccccggctccagatccctcccacagtggacctaggaaaccctcagctcagagaacaaccctgcattccccacacarcacccacaatcagccactgcgggcgaggagggcacraggccaggttcccaagagctcaggaacatggagctgatccaggacayctcycgcccgccactggagtacgtgaagggggtcccgctcatcaagtactttgcagaggcactggggcccctgcagagcttccaggcccggcctgatgacctgctcatcagcacctaccccaagtccgggatggagactctgaaagacacaccggccccacgactcctgaagacacacctgcccctggctctgctcccccagactctgttggatcagaaggtcaaggtggtctatgttgcccgcaacgcaaaggatgtggcrgtttcctactaccacttctaccacatggccaargtgyaccctsascctgggacctgggacagcttcctggagaagttcatggtcggagaagtgtcctacggatcctggtaccagcacgtgcargagtggtgggagctgagccgcacccaccctgttctctacctcttctatgaagacatgaaggagaacccgaaaagggagattcaaaagatcctggagtttgtggggcrctccctgccagaggagacygtggacttcrtggttsagcacacgtcgttcaaggagatgaagaagamccctatgaccaactacaccmccgtcccccaggagttcatggaccacagcatctcccccttcatgaggaaaggcatggctggggactggaaraccaccttcaccgtggcgcagaatgagcgcttcgatgcggactatgcgragaagatggcaggctgcagcctcascttccgctctgagctgtgagaggggytcctggrgtcactgcagagggagtgtgcgaatcaaacctgaccaagcggctcaagaataaaatatgaattgagggccygggacggtaggtcatgtctgtaatcccagcaatttggaggctgaggtgggaggatcatttgagcccaggagttcgagaccaacctgggcaacatagtgagattctgttaaaaaaataaaataaaataaaaccaatttttaaaaagagaataaaatatgattgtgggccaggcakagtggctcatgcctgtaatcccagcaatttgagaagttgaggctagaggatcactggaggacaggagtttgggaccagcctgttcaacattacaagacatcatccctacaaaaatttgagaaaattatctgtacgtgatggtgggcacctgtagtcccarctacttgacaagtgaaggcagkaggatcgcctgagccagggaggttatggctgcagtgggctgactgggctaatccactcaagcctgagggacagagcaaatcttgcttgagaaataaataaaatacaatttacttaacata

SEQ ID NO: 2648 - DNA, 2166 bp, Homo sapiens
cgagctgggtgtgcgcggggcgcccaaccgctcaggagctcctggaggaggcaggtgcaggtgccggctgctgcagcgcagtagctgctggaggctggcgaggcccggaggcggtgcaggaagcctccgaccacgcgggctcctgatcgcgggcgcccacagcgcggacatggcgggctggtggccggcgttgtcgcgcacggcccggcgccacccgtggcccaccaacgtgctgctctacgttgctcgagcaacgtagctctacgctctacgagcgtgccgtagctcgctcgtctccgccggggacgtgctgcagcaacggctgcagggccgctaggccgactggcgccagacgcggcgcgtggccacgttggtggtgaccttccacgccaacttcaactacgtgtggctgggcctgctggagcgcgcgctcccgggccgagcgccgcgcgccatgctggccaagttgctgtgcgaccaggtggtcggtgcgcccatcgcggtctcggccttctacgccggtatgagcattctccagggaaaggatgacatatttttggacctgaaacagaaattctggaacacctatatgcaaactcagtcgtggctttggagatcactttaagcttgtctccagctggcacactaaggaggcacccacaatcagccactgcgggcgaggagggcacraggccaggttcccaagagctcaggaacrtggagctgatccaggacayctcycgcccgccactggagtacgtgaagggggtcccgctcatcaagtactttgcagaggcactggggcccctgcagagcttccaggcccggcctgatgacctgctcatcagcacctaccccaagtccggcacyacctgggtragccagattctggacatgatctaccagggyggtgacctggaraagtgtcaccgagctcccatcttcatgcgggtgcccttccttgagttcaaagycccagggattccctcagggatggagactctgaaagacacaccggccccacgactcctgaagacacacctgcccctggctctgctcccccagactctgttggatcagaaggtcaaggtggtctatgttgcccgcaacgcaaaggatgtggcrgtttcctactaccacttctaccacatggccaargtgyaccctsascctgggacctgggacagcttcctggagaagttcatggtcggagaagtgtcctacggatcctggtaccagcacgtgcargagtggtgggagctgagccgcacccaccctgttctctacctcttctatgaagacatgaaggagaacccgaaaagggagattcaaaagatcctggagtttgtggggcrctccctgccagaggagacygtggacttcrtggttsagcacacgtcgttcaaggagatgaagaagamccctatgaccaactacaccmccgtcccccaggagttcatggaccacagcatctcccccttcatgaggaaaggcatggctggggactggaaraccaccttcaccgtggcgcagaatgagcgcttcgatgcggactatgcgragaagatggcaggctgcagcctcascttccgctctgagctgtgagaggggytcctggrgtcactgcagagggagtgtgcgaatcaaacctgaccaagcggctcaagaataaaatatgaattgagggccygggacggtaggtcatgtctgtaatcccagcaatttggaggctgaggtgggaggatcatttgagcccaggagttcgagaccaacctgggcaacatagtgagattctgttaaaaaaataaaataaaataaaaccaatttttaaaaagagaataaaatatgattgtgggccaggcakagtggctcatgcctgtaatcccagcaatttgagaagttgaggctagaggatcactggaggacaggagtttgggaccagcctgttcaacattacaagacatcatccctacaaaaatttgagaaaattatctgtacgtgatggtgggcacctgtagtcccarctacttgacaagtgaaggcagkaggatcgcctgagccagggaggttatggctgcagtgggctgactgggctaatccactcaagcctgagggacagagcaaatcttgcttgagaaataaataaaatacaatttacttaacata

SEQ ID NO: 2649 - DNA, 1669 bp, Homo sapiens
cgagctgggtgtgcgcggggcgcccaaccgctcaggagctcctggaggaggcaggtgcaggtgccggctgctgcagcgcagtagctgctggaggctggcgaggcccggaggcggtgcaggaagcctccgaccacgcgggctcctgatcgcgggcgcccacagcgcggacatggcgggctggtggccggcgttgtcgcgcacggcccggcgccacccgtggcccaccaacgtgctgctctacgttgctcgagcaacgtagctctacgctctacgagcgtgccgtagctcgctcgtctccgccggggacgtgctgcagcaacggctgcagggccgctaggccgactggcgccagacgcggcgcgtggccacgttggtggtgaccttccacgccaacttcaactacgtgtggctgggcctgctggagcgcgcgctcccgggccgagcgccgcgcgccatgctggccaagttgctgtgcgaccaggtggtcggtgcgcccatcgcggtctcggccttctacgccggtatgagcattctccagggaaaggatgacatatttttggacctgaaacagaaattctggaacacctatatggtggtctatgttgcccgcaacgcaaaggatgtggcrgtttcctactaccacttctaccacatggccaargtgyaccctsascctgggacctgggacagcttcctggagaagttcatggtcggagaagtgtcctacggatcctggtaccagcacgtgcargagtggtgggagctgagccgcacccaccctgttctctacctcttctatgaagacatgaaggagaacccgaaaagggagattcaaaagatcctggagtttgtggggcrctccctgccagaggagacygtggacttcrtggttsagcacacgtcgttcaaggagatgaagaagamccctatgaccaactacaccmccgtcccccaggagttcatggaccacagcatctcccccttcatgaggaaaggcatggctggggactggaaraccaccttcaccgtggcgcagaatgagcgcttcgatgcggactatgcgragaagatggcaggctgcagcctcascttccgctctgagctgtgagaggggytcctggrgtcactgcagagggagtgtgcgaatcaaacctgaccaagcggctcaagaataaaatatgaattgagggccygggacggtaggtcatgtctgtaatcccagcaatttggaggctgaggtgggaggatcatttgagcccaggagttcgagaccaacctgggcaacatagtgagattctgttaaaaaaataaaataaaataaaaccaatttttaaaaagagaataaaatatgattgtgggccaggcakagtggctcatgcctgtaatcccagcaatttgagaagttgaggctagaggatcactggaggacaggagtttgggaccagcctgttcaacattacaagacatcatccctacaaaaatttgagaaaattatctgtacgtgatggtgggcacctgtagtcccarctacttgacaagtgaaggcagkaggatcgcctgagccagggaggttatggctgcagtgggctgactgggctaatccactcaagcctgagggacagagcaaatcttgcttgagaaataaataaaatacaatttacttaacata

SEQ ID NO: 2650 - DNA, 3203 bp, Homo sapiens
ccatcccgcgcctttccaggtcttctcccggtgaaccggatgctctgtcagtctcctcctctgcgtcctcggccgcggcccgggtccctcgcaaagccgctgccatcccggagggcccagccagcgggctcccggaggctggccgggcaggcgtggtgcgcggtaggagctgggcgcgcacggctaccgcgcgtggaggagacactgccctgccgcgatgggggcccggggcgctccttcacgccgtaggcaagcggggcggcggctgcggtacctgcccaccgggagctttcccttccttctcctgctgctgctgctctgcatccagctcgggggaggacagaagaaaaaggagaatcttttagctgaaaaagtagagcagctgatggaatggagttccagacgctcaatcttccgaatgaatggtgataaattccgaaaatttataaaggcaccacctcgaaactattccatgattgttatgttcactgctcttcagcctcagcggcagtgttctgtgtgcaggcaagctaatgaagaatatcaaatactggcgaactcctggcgctattcatctgctttttgtaacaagctcttcttcagtatggtggactatgatgaggggacagacgtttttcagcagctcaacatgaactctgctcctacattcatgcattttcctccaaaaggcagacctaagagagctgatacttttgacctccaaagaattggatttgcagctgagcaactagcaaagtggattgctgacagaacggatgttcatattcgggttttcagaccacccaactactctggtaccattgctttggccctgttagtgtcgcttgttggaggtttgctttatttgagaaggaacaacttggagttcatctataacaagactggttgggccatggtgtctctgtgtatagtctttgctatgacttctggccagatgtggaaccatatccgtggacctccatatgctcataagaacccacacaatggacaagtgagctacattcatgggagcagccaggctcagtttgtggcagaatcacacattattctggtactgaatgccgctatcaccatggggatggttcttctaaatgaagcagcaacttcraaaggcgatgttggaaaaagacggataatttgcctagtgggattgggcctggtggtcttcttcttcagttttctactttcaatatttcgttccaagtaccacggctatccttatagtgatctggactttgagtgagaagatgtgatttggaccatggcacttaaaaactctataacctcaggcaactttttaattaaatgaagccaagtgggatttgcataaagtgaatgtttaccatgaagataaactgttcctgactttatactattttgaattcattcatttcattgtgatcagctagcttattcttgtgtactttttttaaactgtgggttttcctagtaaatttaatttacagaaatcaatggtagcatttagtaatctacaaaggaaatatcaaagtgtttttcaagcctgttatattsagtgtgtgccacaggattgaaataaatgacaatgtaattatgaattcatgttttagagctgtttactcattagtaaaggaccgcaatgttagtaaagaaaacctatgaaatgtatgttaaagattyttagtattgtacagggataaagcaaatgcatgaaaatatgtcatgtactgaaaattaaacttacttcagtttcagttataaaggacgtgcactgttacgaatagtgttttgttattaattataactagataaaggtatataggacagggaactggatgaatggtacctacaatttggatgcctaaccaaggactagagctccttcttgagatctaaatctaaagtaaatgtgcattaaagcagtgtgcttcaaaggcatcagacgatgaaagcaacataccacaactaggagttatttctcaaacttaaatgtcctctgggaatccagacttaaaaataagagcaaacttaacacactatccattttcgagcaaacytaacccactatatccattttgctcatgtgttttatgcaaccagctttccatcaaatcctcaatcyttgaatccaggtaaaaggttaattwtcctaggattagtgaatgattcaatgaagctttcttgaaaacaaacataggagtgtaatgtactattatgtttgtatcctgttttagtttataaagcactttcacatacattayggtatttcttcctcacaataaccttgtaaattagtcaggaaatgtaaattttatctgactcatagaactaatggaagctgaaagccaaaaataaagtttataaccaggccttcaaactctcaaacatggatttttatattctgtggagttatccaaattaattagggtttaggaaagcagttcttcttgagtcagttcartaagtgtttgctttttgtttttaaggtttgttatctaattttcattaagatttgagtaacagaccatggagaattgttttcattgggagttccagctatatagcctcaaacaagaaacgggtgtacaaccattgagtttacttacttaaatctgtgaatttcaatgaagaatgggaatataaaggcctactggggcatgtttatcaagttatatcccagggcaatgtgtatgctagcaggatgaatgctatcttttcaaaacataatattcagtgaaaattacgtaataattgtaagtttataatcatactcccaaatctgttactaaaaataacataaattctcctagttcatgtacttagatgaataaatttagttttggaatgacgtttatggaaaagcaatagatgaacttaatcatttgatcactgcctatcactaggcagaacttgacctgtaattcttaatccattgtagattttttacattttactcaaaacttcatacatagagactctcaggtcaaattttacaagtattaaacatttgttaattataatcacttttgtttgtatccttaaatctcagaattatcttgcagttaatatgcagctgattaaatgatattacaaattatctctaatctcactgtaaatcttttaatcatatcaaagtcaggtcatcctcagacactataactaagatagataaggagtactttactataccatattagtaaagg

SEQ ID NO: 2651 - DNA, 3199 bp, Homo sapiens
ccatcccgcgcctttccaggtcttctcccggtgaaccggatgctctgtcagtctcctcctctgcgtcctcggccgcggcccgggtccctcgcaaagccgctgccatcccggagggcccagccagcgggctcccggaggctggccgggcaggcgtggtgcgcggtaggagctgggcgcgcacggctaccgcgcgtggaggagacactgccctgccgcgatgggggcccggggcgctccttcacgccgtaggcaagcggggcggcggctgcggtacctgcccaccgggagctttcccttccttctcctgctgctgctgctctgcatccagctcgggggaggacagaagaaaaaggagaatcttttagctgaaaaagtagagcagctgatggaatggagttccagacgctcaatcttccgaatgaatggtgataaattccgaaaatttataaaggcaccacctcgaaactattccatgattgttatgttcactgctcttcagcctcagcggcagtgttctgtgtgcaggcaagctaatgaagaatatcaaatactggcgaactcctggcgctattcatctgctttttgtaacaagctcttcttcagtatggtggactatgatgaggggacagacgtttttcagcagctcaacatgaactctgctcctacattcatgcattttcctccaaaaggcagacctaagagagctgatacttttgacctccaaagaattggatttgcagctgagcaactagcaaagtggattgctgacagaacggatgttcatattcgggttttcagaccacccaactactctggtaccattgctttggccctgttagtgtcgcttgttggaggtttgctttatttgagaaggaacaacttggagttcatctataacaagactggttgggccatggtgtctctgtgtatagtctttgctatgacttctggccagatgtggaaccatatccgtggacctccatatgctcataagaacccacacaatggacaagtgagctacattcatgggagcagccaggctcagtttgtggcagaatcacacattattctggtactgaatgccgctatcaccatggggatggttcttctaaatgaagcagcaacttcraaaggcgatgttggaaaaagacggataatttgcctagtgggattgggcctggtggtcttcttcttcagttttctactttcaatatttcgttccaagtaccacggctatccttatagtgatctggactttgagtgagaagatgtgatttggaccatggcacttaaaaactctataacctcagctttttaattaaatgaagccaagtgggatttgcataaagtgaatgtttaccatgaagataaactgttcctgactttatactattttgaattcattcatttcattgtgatcagctagcttattcttgtgtactttttttaaactgtgggttttcctagtaaatttaatttacagaaatcaatggtagcatttagtaatctacaaaggaaatatcaaagtgtttttcaagcctgttatattsagtgtgtgccacaggattgaaataaatgacaatgtaattatgaattcatgttttagagctgtttactcattagtaaaggaccgcaatgttagtaaagaaaacctatgaaatgtatgttaaagattyttagtattgtacagggataaagcaaatgcatgaaaatatgtcatgtactgaaaattaaacttacttcagtttcagttataaaggacgtgcactgttacgaatagtgttttgttattaattataactagataaaggtatataggacagggaactggatgaatggtacctacaatttggatgcctaaccaaggactagagctccttcttgagatctaaatctaaagtaaatgtgcattaaagcagtgtgcttcaaaggcatcagacgatgaaagcaacataccacaactaggagttatttctcaaacttaaatgtcctctgggaatccagacttaaaaataagagcaaacttaacacactatccattttcgagcaaacytaacccactatatccattttgctcatgtgttttatgcaaccagctttccatcaaatcctcaatcyttgaatccaggtaaaaggttaattwtcctaggattagtgaatgattcaatgaagctttcttgaaaacaaacataggagtgtaatgtactattatgtttgtatcctgttttagtttataaagcactttcacatacattayggtatttcttcctcacaataaccttgtaaattagtcaggaaatgtaaattttatctgactcatagaactaatggaagctgaaagccaaaaataaagtttataaccaggccttcaaactctcaaacatggatttttatattctgtggagttatccaaattaattagggtttaggaaagcagttcttcttgagtcagttcartaagtgtttgctttttgtttttaaggtttgttatctaattttcattaagatttgagtaacagaccatggagaattgttttcattgggagttccagctatatagcctcaaacaagaaacgggtgtacaaccattgagtttacttacttaaatctgtgaatttcaatgaagaatgggaatataaaggcctactggggcatgtttatcaagttatatcccagggcaatgtgtatgctagcaggatgaatgctatcttttcaaaacataatattcagtgaaaattacgtaataattgtaagtttataatcatactcccaaatctgttactaaaaataacataaattctcctagttcatgtacttagatgaataaatttagttttggaatgacgtttatggaaaagcaatagatgaacttaatcatttgatcactgcctatcactaggcagaacttgacctgtaattcttaatccattgtagattttttacattttactcaaaacttcatacatagagactctcaggtcaaattttacaagtattaaacatttgttaattataatcacttttgtttgtatccttaaatctcagaattatcttgcagttaatatgcagctgattaaatgatattacaaattatctctaatctcactgtaaatcttttaatcatatcaaagtcaggtcatcctcagacactataactaagatagataaggagtactttactataccatattagtaaagg

SEQ ID NO: 2652 - DNA, 1375 bp, Homo sapiens
agggagcggcgtgccgtccgggtcgcctaggcctggggtcgggagcgcgcacgctgtgcgccctgggcgcgctcgggattctcgcctggcgcggctggggaaggtgaacagtgtggcccgccatgttcttctccgcggcgctccgggcccgggcggctggcctcaccgcccactggggaagacatgtaaggaatttgcataagacagytatgcaaaatggagctggaggagctttatttgtgcacagagatactcctgagaataaccctgatactccatttgatttcacaccagaaaactataagaggatagaggcaattgtwaaaaactatccagaaggccataaagcagcagctgttcttccagtcctggatttagcccaaaggcagaatgggtggttgcccatctctgctatgaacaaggttgcagaagttttacaagtacctccaatgagagtatatgaagtagcaactttttatacaatgtataatcgaaagccagttggaaagtatcacattcaggtctgcactactacaccctgcatgcttcgaaactctgacagcatactggaggccattcagaaaaagcttggaataaaggttggggagactacacctgacaaacttttcactcttatagaagtggaatgtttaggggcctgtgtgaacgcaccaatggttcaaataaatgacaattactatgaggatttgacagctaaggatattgaagaaattattgatgagctcaaggctggcaaaatcccaaaaccagggccaaggagtggacgcttctcttgtgagccagctggaggtcttacctctttgactgaaccacccaagggacctggatttggtgtacaagcaggcctttaatttatattgaactgtaaatatgtcactagagaaataaaatatggacttccaatctacgtaaacttatttgtttattstgctctgtgtacatcctcatgctaaccgtagcaacttgcagctctaagtattatgtcataatgacagaggaccattttaaagtsttctatctatggctgtgaagacatcattatataatctagttaacagttactctagtgtcacccattttcaatttccagatcgcttttatcaagatcaggttactgkgaagtaaaaatttggttaaattacaaatgttttgctttcccatctttagccacagccaagttttaagttaacatgatctttctataaactttgtcagtgctccctttaaacattatttaaaacacataattgttactgtatttccaactggtaagacctcaagcacactgtaggtttaaggaggatatggtagttgtctctagaagccttttttttttttttttttttttgagacg

SEQ ID NO: 2653 - DNA, 948 bp, Homo sapiens
cctagcagccccacacaatacgctcatgtcctgtccccaaacactgccatcttcaaacacatgtcctctgtttccaggccgggcygggatcagatgggaagtggaacctcgtcatgaccagaaactgtttccctacgaagagcacttggagatggcaatgctgaacctcacactgtaggactcacacacgactccaacgggattgtkagratcaagtcactctcrtgggaagartttttatatgggaaagcggataaaactttcattggactggaatgtttggagaatgttaatttccaaatcaggaaccacaaactgccctctrataagacatcggctatctaagcttgtgggtgctccctttctgccagcagttctggttcttaagaaaatcrccatcaatcagacatgaaaactctggctccaaaaatagcattttctttgtgcaaataaaaacgtgtgtatcaagtatgatgacacactcggttcttcacaaagccaagcccgctgcagctgccacatccctggacacactcggttcttcacaaagccaagcccgctgcagctgccacatccctgggcttatggtgcagcaggtgcttttttcaagacaggaatcaaaatgttaggaacacggcagaaaggtgacacctggagaccaaacgcaggatgaggagtactgcagaggtyacagggaagtcacagaacagtaatacgctagcaggrgcatggggcgtgaagaacagaagaagagaggaagtgtttccgagcctccagaaaagaaatcagagccaagcacagcttcccgggtcacagaaccaattcattcaccaggtggcactactgccatcatttcagcttctggccactgggaggcgctgctcgaaaggatttgccctgagactctgagaagaagctgtgggaaggacagcaggggtcccggggttt

SEQ ID NO: 2654 - DNA, 911 bp, Homo sapiens
cctagcagccccacacaatacgctcatgtcctgtccccaaacactgccatcttcaaacacatgtcctctgtttccaggccgggcygggatcagatgggaagtggaacctcgtcatgaccagaaactgtttccctacgaagagcacttggagatggcaatgctgaacctcacactgtaggactcacacacgactccaacgggattgtkagratcaagtcactctcrtgggaagartttttatatgggaaagcggataaaactttcattggactggaatgtttggagaatgttaatttccaaatcaggaaccacaaactgccctctrataagacatcggctatctaagcttgtgggtgctccctttctgccagcagttctggttcttaagaaaatcrccatcaatcagacatgaaaactctggctccaaaaatagcattttctttgtgcaaataaaaacgtgtgtatcaagtatgatgttcccccatccctggacacactcggttcttcacaaagccaagcccgctgcagctgccacatccctgggcttatggtgcagcaggtgcttttttcaagacaggaatcaaaatgttaggaacacggcagaaaggtgacacctggagaccaaacgcaggatgaggagtactgcagaggtyacagggaagtcacagaacagtaatacgctagcaggrgcatggggcgtgaagaacagaagaagagaggaagtgtttccgagcctccagaaaagaaatcagagccaagcacagcttcccgggtcacagaaccaattcattcaccaggtggcactactgccatcatttcagcttctggccactgggaggcgctgctcgaaaggatttgccctgagactctgagaagaagctgtgggaaggacagcaggggtcccggggttt

SEQ ID NO: 2655 - DNA, 832 bp, Homo sapiens
  misc_feature (1)...(832): n = A,T,C or G
tccacctgtctgccctccaggctggtgctggcctctgggatggaggagcttcaggtatacttggagaaagaaccccagaacagatccctgtttcaggctgacttcatcccgctggatggaattccagccaatgtgatccaaagagggaagcagtaccaggctgcagccctcgtcatgctgaagatggagcctcctgggaagctgctacccatggtcatccagcttcaccctcccagcttcagctctcccaccccaatactgttcctgccctcaaatcctttgcttgcctggctcctggctaaatcctggatctgaaactccgattccaactgcacaagctccgatactatttgctgaacactcatctcgtagctgaagtcattgctattgtcaccataatgtgcctcccacgtttgcgccctgtcttcaaggtacaagctccaccactctccgtgtcccaaagcaacaacccaacagctgcctactgtgctcccatccctcaagacctgtcatctctcttgtcccaggcagtgagcacaggtgtgtggagatcgtccacctcytccaccaaagggatgacacggtgagggtggaccctgagctgcaggcctgggatcaggagatcntggaggtggggctgtgccaggcccaggaccgaggccctgagcccaaagctgtgctgagacaatttcaaacagatctggacaacctggaaagggaaattgtggcccgaaatgagaaactagaccttccctatgactatctgaagcccagctacatagagaacatatcactatctgagatcaaatattctggtcctcaaagaccttag

SEQ ID NO: 2656 - DNA, 480 bp, Homo sapiens
atgctgaagatggagcctcctgggaagctgctacccatggtcatccagctccgatactatttgctgaacactcatctcgtagctgaagtcattgctattgtcaccataatgtgcctcccacgtttgcgccctgtcttcaagccaactcactccatgttgttgttattagttgcttatcctgggtatctacccacttcatctggactttgggttttctatgacattcaccatctttccatggagttttccaggttcaagccaacatatactgaaagcattgggcagatgtcacagaaagaggaggagaggtgtgtggagatcgtccacctcytccaccaaagggatgacacggtgagggtggaccctgagctgcaggcctgggatcaggagatcatggaggtggggctgtgccaggcccaggaccgaggtttccctgtctccttccagtctcgagctcagctctgccgtttcctcgccatg

SEQ ID NO: 2657 - DNA, 2172 bp, Homo sapiens
cggagggtggggagcggaaagcaggacgcacggctcccgcggcccgctggctgcccttcccgccagcgcaggtgtgggacgggcggcggactaggcacagagctgcgggagcaggcacagggagtgtggagcctggcggcgggacggcgggatccggtgggagccggagtcccgccgaggggggctggaggtggaggggcccggcgaggccgcgatgaagccgagcggcgaggaccaggcggcgctggcggccggcccctgggaggagtgcttccaggcggccgtgcagctggcgctgcgggcaggacagatcatcagaaaagcccttactgaggaaaaacgtgtctcaacaaaaacatcagctgcagatcttgtgacagaaacagatcaccttgtggaagatttaattatttctgagttgcgagagaggtttccttcacacaggttcattgcagaagaggccgcrgcttctgggrccaagtgtgtgctcacccacagcccgacgtggatcatcgaccccatcgacggcacctgcaattttgtgcacagcttgaattcggagtgatttaccactgcacagaggagcggctgtacacgggccggcggggtcrgggcgccttctgcaatggccagcggctccgggtctccggggagacagatctctcaaaggccttggttctgacagaaattggccccaaacgtgaccctgcgaccctgaagctgttyctgagtaacatggagcggctgctgcatgccaaggcgcatgggtaggaggttcagttcrgggaacaccctgcagcccgaggaggaagaacggaacacggacttgctaaaactcccctgggatttgaggaggaagcctgrcrtggaaagagtgggaggggcacatgaacatcagactcagggaagcccygtgaggggcccgcctgcagtagatactcctatagccaggcctctggagatgcgtgggcacctgtgttgcttctgatcagaatccatggaactgacctcatgctgctcaaccagcgaatggtgcaaatacttacagtccttcccgagggggcctggcgtcagacaggtttatcaaagcccagtgaatcctctttgtctcttgccttcccagtagggctgtgctgtgagccctagccatgtgagaccactgacacttaatgtcacgttcagtagaggaggattcarttctctggttgctgcatctcaggtgctcagtagctaggtcagctgggagctgtcatggcacaaggcatttgcgtctggcggaggcctgttggttggtggctccaggccctatattcagcctccagagctttggcagaagtgctgtgcttcatttttcactagggaaaatgcccagccggggtacctggctgaagtcggcttgcacaccacagaaaaggctccactcccrcctgcatctgtcctcccttccctctccccagggtccgagtgattggaagctccacattggcactctgccacctggcctcaggggccgcggatgcctattaccagtttggcctgcactgctgggatctggcggctgccacagtcatcatcagagaagcaggcggcatcgtgatagacacttcgggtggacccctcgacctcatggcttgcagagtggttgcggccagcacccgggagatggcgatgctcatagctcaggccttacagacgattaactatgggcgggatgatgagaagtgactgcggctgaggcaaagctgctcccaaggcctccctgggctgctgtgggctcctggggaggtggccctcgtggcccacgctccatgccagtggctcacgctctgctcctggctaccccagagggagttgtcacgctacagtgagtggctggccttttaaatcgacgtctctctcaccaggatttggtgtttagctgtttctctctttaatctcacgtagcctttttcaggttagtacgtgttcttctgtcagggccaaaactcaaatctcctgtgaaatacgtattgataatccaatcttgatttttccccccagaatataaatctcaggtaataaggctttagaactgctgataaagcggatcgttctcaggccctccccccggagtacttcagaatgcaataaatcaaaataatggccctgtgtgtatctgtttcctctataagc

SEQ ID NO: 2658 - DNA, 1528 bp, Homo sapiens
cggagggtggggagcggaaagcaggacgcacggctcccgcggcccgctggctgcccttcccgccagcgcaggtgtgggacgggcggcggactaggcacagagctgcgggagcaggcacagggagtgtggagcctggcggcgggacggcgggatccggtgggagccggagtcccgccgaggggggctggaggtggaggggcccggcgaggccgcgatgaagccgagcggcgaggaccaggcggcgctggcggccggcccctgggaggagtgcttccaggcggccgtgcagctggcgctgcgggcaggacagatcatcagaaaagcccttactgaggaaaaacgtgtctcaacaaaaacatcagctgcagatcttgtgacagaaacagatcaccttgtggaagatttaattatttctgagttgcgagagaggtttccttcacacaggttcattgcagaagaggccgcrgcttctgggrccaagtgtgtgctcacccacagcccgacgtggatcatcgaccccatcgacggcacctgcaattttgtgcacagattcccgactgtggcggttagcattggatttgctgttcgacaagagcttgaattcggagtgatttaccactgcacagaggagcggctgtacacgggccggcggggtcrgggcgccttctgcaatggccagcggctccgggtctccggggagacagatctctcaaaggccttggttctgacagaaattggccccaaacgtgaccctgcgaccctgaagctgttyctgagtaacatggagcggctgctgcatgccaaggcgcatggggtccgagtgattggaagctccacattggcactctgccacctggcctcaggggccgcggatgcctattaccagtttggcctgcactgctgggatctggcggctgccacagtcatcatcagagaagcaggcggcatcgtgatagacacttcgggtggacccctcgacctcatggcttgcagagtggttgcggccagcacccgggagatggcgatgctcatagctcaggccttacagacgattaactatgggcgggatgatgagaagtgactgcggctgaggcaaagctgctcccaaggcctccctgggctgctgtgggctcctggggaggtggccctcgtggcccacgctccatgccagtggctcacgctctgctcctggctaccccagagggagttgtcacgctacagtgagtggctggccttttaaatcgacgtctctctcaccaggatttggtgtttagctgtttctctctttaatctcacgtagcctttttcaggttagtacgtgttcttctgtcagggccaaaactcaaatctcctgtgaaatacgtattgataatccaatcttgatttttccccccagaatataaatctcaggtaataaggctttagaactgctgataaagcggatcgttctcaggccctccccccggagtacttcagaatgcaataaatcaaaataatggccctgtgtgtatctgtttcctctataagc

SEQ ID NO: 2659 - DNA, 1532 bp, Homo sapiens
cggagggtggggagcggaaagcaggacgcacggctcccgcggcccgctggctgcccttcccgccagcgcaggtgtgggacgggcggcggactaggcacagagctgcgggagcaggcacagggagtgtggagcctggcggcgggacggcgggatccggtgggagccggagtcccgccgaggggggctggaggtggaggggcccggcgaggccgcgatgaagccgagcggcgaggaccaggcggcgctggcggccggcccctgggaggagtgcttccaggcggccgtgcagctggcgctgcgggcaggacagatcatcagaaaagcccttactgaggaaaaacgtgtctcaacaaaaacatcagctgcagatcttgtgacagaaacagatcaccttgtggaagatttaattatttctgagttgcgagagaggtttccttcacacaggtaggttcattgcagaagaggccgcrgcttctgggrccaagtgtgtgctcacccacagcccgacgtggatcatcgaccccatcgacggcacctgcaattttgtgcacagattcccgactgtggcggttagcattggatttgctgttcgacaagagcttgaattcggagtgatttaccactgcacagaggagcggctgtacacgggccggcggggtcrgggcgccttctgcaatggccagcggctccgggtctccggggagacagatctctcaaaggccttggttctgacagaaattggccccaaacgtgaccctgcgaccctgaagctgttyctgagtaacatggagcggctgctgcatgccaaggcgcatggggtccgagtgattggaagctccacattggcactctgccacctggcctcaggggccgcggatgcctattaccagtttggcctgcactgctgggatctggcggctgccacagtcatcatcagagaagcaggcggcatcgtgatagacacttcgggtggacccctcgacctcatggcttgcagagtggttgcggccagcacccgggagatggcgatgctcatagctcaggccttacagacgattaactatgggcgggatgatgagaagtgactgcggctgaggcaaagctgctcccaaggcctccctgggctgctgtgggctcctggggaggtggccctcgtggcccacgctccatgccagtggctcacgctctgctcctggctaccccagagggagttgtcacgctacagtgagtggctggccttttaaatcgacgtctctctcaccaggatttggtgtttagctgtttctctctttaatctcacgtagcctttttcaggttagtacgtgttcttctgtcagggccaaaactcaaatctcctgtgaaatacgtattgataatccaatcttgatttttccccccagaatataaatctcaggtaataaggctttagaactgctgataaagcggatcgttctcaggccctccccccggagtacttcagaatgcaataaatcaaaataatggccctgtgtgtatctgtttcctctataagc

SEQ ID NO: 2660 - DNA, 1864 bp, Homo sapiens
accagcccggaagtgcgcgtggcggcggtggcggctgcggcaacagcggggccgatgtgtagttggtgactgcctctccagatgctgaggtgcctgtatcattggcacaggccagtgctgaaccgtaggtggagtaggctgtgccttcygaagcagtatctattcacaatgaagttgcagtctcccgaattccagtcacttttcacagaaggactgaagagtctgacagaattatttgtcaaagagaatcacgaattaagaatagcaggaggagcagtgagggatttattaaatggagtaaagcctcaggatatagattttgccaccactgctacccctactcaaatgaaggagatgtttcagtcggctgggattcggatgataaacaacagaggagaaaagcacggaacaattactgccaggcttcatgaagaaaattttgagattactacactacggattgatgtcaccactgatggaagacatgctgaggtagaatttacaactgactggcagaaagatgcggaacgcagagatctcactataaattctatgtttttaggttttgatggcactttatttgactactttaatggttatgaagatttaaaaaataagaaagttagatttgttggacatgctaaacagagaatacaagaggattatcttagaattttaagatacttcaggttttatgggagaattgtagacaaacctggtgaccatgatcctgagactttggaagcaattgcagaaaatgcaaaaggcttggctggaatatcaggagaaaggatttgggtggaactgaaaaaaattcttgttggtaaccatgtaaatcatttgattcaccttatctatgatcttgatgtggctccttatataggtttacctgctaatgcaagtttagaagaatttgacaaagtcagtaaaaatgttgatggtttttcaccaaagccagtgactcttttggcctcattattcaaagtacaagatgatgtcacaaaattggatttgaggttgaagatcgcraaagaggagaaaaaccttggcttatttatagttaaaaataggaaagatttaattaaagcaacagatagttcagacccattgaaaccctatcaagacttcattatagattctagggaacctgatgcaactactcgtgtatgtgaactactgaagtaccaaggagagcactgtctcctaaaggaaatgcagcagtggtccattcctccatttcctgtaagtggccatgacatcagaaaagtgggcatttcttcaggaaaagaaattggggctctattacaacagttgcgagaacagtggaaaaaaagtggttaccaaatggaaaaagatgaacttctgagttacataaagaagacctaaaactgatggctactaaaaagcagagcatttctgccagtcataacatctttgtactctatgagcaaatagtaattttggaccttgataaaacaattttgtagagtgtaatatttctaagaggaaatgtyacaggggctatgatgcaagaaagcctcagaaatgactgcatacaggaaataatctcatcatttccaaagatgtcttcatgtcccatcaatgacatgctaccagacatatcagattccacaggataatggcaccaagctacccaagtagatgtttctggtattctagactgccgttcatgcttgtttcctaaagtatacttaaaagtttcaaatacagtttcacttagaaactgcaaccctccaagtaatgttatgtttacttaggtattaatgttatgtttacttaggtatgtatcagaggcaataatttccaaagcagatcttagaatataaccaatttgttagataac

SEQ ID NO: 2661 - DNA, 2484 bp, Homo sapiens
accagcccggaagtgcgcgtggcggcggtggcggctgcggcaacagcggggccgatgtgtagttggtgactgcctctccagatgctgaggtgcctgtatcattggcacaggccagtgctgaaccgtaggtggagtaggctgtgccttcygaagcagtatctattcacaatgaagttgcagtctcccgaattccagtcacttttcacagaaggactgaagagtctgacagaattatttgtcaaagagaatcacgaattaagaatagcaggaggagcagtgagggatttattaaatggagtaaagcctcaggatatagattttgccaccactgctacccctactcaaatgaaggagatgtttcagtcggctgggattcggatgataaacaacagaggagaaaagcacggaacaattactgccaggcttcatgaagaaaattttgagattactacactacggattgatgtcaccactgatggaagacatgctgaggtagaatttacaactgactggcagaaagatgcggaacgcagagatctcactataaattctatgtttttaggttttgatggcactttatttgactactttaatggttatgaagatttaaaaaataagaaagttagatttgttggacatgctaaacagagaatacaagaggattatcttagaattttaagatacttcaggttttatgggagaattgtagacaaacctggtgaccatgatcctgagactttggaagcaattgcagaaaatgcaaaaggcttggctggaatatcaggagaaaggatttgggtggaactgaaaaaaattcttgttggtaaccatgtaaatcatttgattcaccttatctatgatcttgatgtggctccttatataggtttacctgctaatgcaagtttagaagaatttgacaaagtcagtaaaaatgttgatggtttttcaccaaagccagtgactcttttggcctcattattcaaagtacaagatgatgtcacaaaattggatttgaggttgaagatcgcraaagaggagaaaaaccttggcttatttatagttaaaaataggaaagatttaattaaagcaacagatagttcagacccattgaaaccctatcaagacttcattatagattctagggaacctgatgcaactactcgtgtatgtgaactactgaagtaccaaggagagcactgtctcctaaaggaaatgcagcagtggtccattcctccatttcctgtaagtggccatgacatcagaaaagtgggcatttcttcaggaaaagaaattggggctctattacaacagttgcgagaacagtggaaaaaaagtggttaccaaatggaaaaagatgaacttctgagttacataaagaagacctaaaactgatggctactaaaaagcagagcatttctggtaagactaaattttctcccctccctcttaatgaggttttagagactacaccagaataaaagacagtttaggggacctctgtagaacaacaagggtcttattttgtgaattatatatttcaagaactaaacagagatccacctttctggatctgatttatatcactgaaatgtacagttcttttggaatagtttcacctgagaaaacatagttggctattatctatcttaacctgttcaggcttttaaaaaaaactgtttttgcatagggtagtactaagatcttaaaaagtggtaactgtcttgaagaaaaaacgtttattgtttgtttgcaattgaaataacagggttaccttaacaatgactgtctatgatgtgtcagttcttatctgaattccaaaataaacctgtgcttaaaaaagaaataattgaccaagtaagtttgcataaaatgtgaatactaaatgtgtccccagttgctggcattcatatgtacaggatttgttctagcaagctatgcttcagtatgtggttgatatttttctgtcacaatgatttctttatgcatgcagagcctgggraagtcatgggattaacttgagggtcactattgagcctattaattaattaattattgttttaataaaacaaacattggtattggaagataaatatgtttatgtggtatctgacaatgtgtattaggtgtcatatacaatggtaatatgcctgtctttaaagtgttattttattaattaaaaggatatggctattattatatattctctaaagatttattctctaaagatttgagtcctaaatgctttcatcaggtaaataaaatgtataatacaaactgtttatttcagctgctataatttcagctgctatactgacatttcataatttatttcctttctgtgtagccagtcataacatctttgtactctatgagcaaatagtaattttggaccttgataaaacaattttgtagagtgtaatatttctaagaggaaatgtyacaggggctatgatgcaagaaagcctcagaaatgactgcatacag

SEQ ID NO: 2662 - DNA, 1810 bp, Homo sapiens
atgtgtagttggtgactgcctctccagatgctgaggtgcctgtatcattggcacaggccagtgctgaaccgtaggtggagtaggctgtgccttcygaagcagtatctattcacaatgaagttgcagtctcccgaattccagtcacttttcacagaaggactgaagagtctgacagaattatttgtcaaagagaatcacgaattaagaatagcaggaggagcagtgagggatttattaaatggagtaaagcctcaggatatagattttgccaccactgctacccctactcaaatgaaggagatgtttcagtcggctgggattcggatgataaacaacagaggagaaaagcacggaacaattactgccaggcttcatgaagaaaattttgagattactacactacggattgatgtcaccactgatggaagacatgctgaggtagaatttacaactgactggcagaaagatgcggaacgcagagatctcactataaattctatgtttttaggttttgatggcactttatttgactactttaatggttatgaagatttaaaaaataagaaagttagatttgttggacatgctaaacagagaatacaagaggattatcttagaattttaagatacttcaggttttatgggagaattgtagacaaacctggtgaccatgatcctgagactttggaagcaattgcagaaaatgcaaaaggcttggctggaatatcaggagaaaggatttgggtggaactgaaaaaaattcttgttggtaaccatgtaaatcatttgattcaccttatctatgatcttgatgtggctccttatataggtttacctgctaatgcaagtttagaagaatttgacaaagtcagtaaaaatgttgatggtttttcaccaaagccagtgactcttttggcctcattattcaaagtacaagatgatgtcacaaaattggatttgaggttgaagatcgcraaagaggagaaaaaccttggcttatttatagttaaaaataggaaagatttaattaaagcaacagatagttcagacccattgaaaccctatcaagacttcattatagattctagggaacctgatgcaactactcgtgtatgtgaactactgaagtaccaaggagagcactgtctcctaaaggaaatgcagcagtggtccattcctccatttcctgtaagtggccatgacatcagaaaagtgggcatttcttcaggaaaagaaattggggctctattacaacagttgcgagaacagtggaaaaaaagtggttaccaaatggaaaaagatgaacttctgagttacataaagaagacctaaaactgatggctactaaaaagcagagcatttctgccagtcataacatctttgtactctatgagcaaatagtaattttggaccttgataaaacaattttgtagagtgtaatatttctaagaggaaatgtyacaggggctatgatgcaagaaagcctcagaaatgactgcatacaggaaataatctcatcatttccaaagatgtcttcatgtcccatcaatgacatgctaccagacatatcagattccacaggataatggcaccaagctacccaagtagatgtttctggtattctagactgccgttcatgcttgtttcctaaagtatacttaaaagtttcaaatacagtttcacttagaaactgcaaccctccaagtaatgttatgtttacttaggtattaatgttatgtttacttaggtatgtatcagaggcaataatttccaaagcagatcttagaatataaccaatttgttagataac

SEQ ID NO: 2663 - DNA, 2789 bp, Homo sapiens
accagcccggaagtgcgcgtggcggcggtggcggctgcggcaacagcggggccgatgtgtagttggtgactgcctctccagatgctgaggtgcctgtatcattggcacaggccagtgctgaaccgtaggtggagtaggctgtgccttcygaagcagtatctattcacaatgaagttgcagtctcccgaattccagtcacttttcacagaaggactgaagagtctgacagaattatttgtcaaagagaatcacgaattaagaatagcaggaggagcagtgagggatttattaaatggagtaaagcctcaggatatagattttgccaccactgctacccctactcaaatgaaggagatgtttcagtcggctgggattcggatgataaacaacagaggagaaaagcacggaacaattactgccaggcttcatgaagaaaattttgagattactacactacggattgatgtcaccactgatggaagacatgctgaggtagaatttacaactgactggcagaaagatgcggaacgcagagatctcactataaattctatgtttttaggttttgatggcactttatttgactactttaatggttatgaagatttaaaaaataagaaagttagatttgttggacatgctaaacagagaatacaagaggattatcttagaattttaagatacttcaggttttatgggagaattgtagacaaacctggtgaccatgatcctgagactttggaagcaattgcagaaaatgcaaaaggcttggctggaatatcaggagaaaggatttgggtggaactgaaaaaaattcttgttggtaaccatgtaaatcatttgattcaccttatctatgatcttgatgtggctccttatataggtttacctgctaatgcaagtttagaagaatttgacaaagtcagtaaaaatgttgatggtttttcaccaaagccagtgactcttttggcctcattattcaaagtacaagatgatgtcacaaaattggatttgaggttgaagatcgcraaagaggagaaaaaccttggcttatttatagttaaaaataggaaagatttaattaaagcaacagatagttcagacccattgaaaccctatcaagacttcattatagattctagggaacctgatgcaactactcgtgtatgtgaactactgaagtaccaaggagagcactgtctcctaaaggaaatgcagcagtggtccattcctccatttcctgtaagtggccatgacatcagaaaagtgggcatttcttcaggaaaagaaattggggctctattacaacagttgcgagaacagtggaaaaaaagtggttaccaaatggaaaaagatgaacttctgagttacataaagaagacctaaaactgatggctactaaaaagcagagcatttctggtaagactaaattttctcccctccctcttaatgaggttttagagactacaccagaataaaagacagtttaggggacctctgtagaacaacaagggtcttattttgtgaattatatatttcaagaactaaacagagatccacctttctggatctgatttatatcactgaaatgtacagttcttttggaatagtttcacctgagaaaacatagttggctattatctatcttaacctgttcaggcttttaaaaaaaactgtttttgcatagggtagtactaagatcttaaaaagtggtaactgtcttgaagaaaaaacgtttattgtttgtttgcaattgaaataacagggttaccttaacaatgactgtctatgatgtgtcagttcttatctgaattccaaaataaacctgtgcttaaaaaagaaataattgaccaagtaagtttgcataaaatgtgaatactaaatgtgtccccagttgctggcattcatatgtacaggatttgttctagcaagctatgcttcagtatgtggttgatatttttctgtcacaatgatttctttatgcatgcagagcctgggraagtcatgggattaacttgagggtcactattgagcctattaattaattaattattgttttaataaaacaaacattggtattggaagataaatatgtttatgtggtatctgacaatgtgtattaggtgtcatatacaatggtaatatgcctgtctttaaagtgttattttattaattaaaaggatatggctattattatatattctctaaagatttattctctaaagatttgagtcctaaatgctttcatcaggtaaataaaatgtataatacaaactgtttatttcagctgctataatttcagctgctatactgacatttcataatttatttcctttctgtgtagccagtcataacatctttgtactctatgagcaaatagtaattttggaccttgataaaacaattttgtagagtgtaatatttctaagaggaaatgtyacaggggctatgatgcaagaaagcctcagaaatgactgcatacaggaaataatctcatcatttccaaagatgtcttcatgtcccatcaatgacatgctaccagacatatcagattccacaggataatggcaccaagctacccaagtagatgtttctggtattctagactgccgttcatgcttgtttcctaaagtatacttaaaagtttcaaatacagtttcacttagaaactgcaaccctccaagtaatgttatgtttacttaggtattaatgttatgtttacttaggtatgtatcagaggcaataatttccaaagcagatcttagaatataaccaatttgttagataac

SEQ ID NO: 2664 - DNA, 9023 bp, Homo sapiens
ataaaccccagggctcattcttgagctgctcctgcatagatctcgtcctgttcaacacaccaaagattgacagctgaactgagagaccatcacccacagacacaactggccactgggtggtgcacaagtcagacagaactgaatagtcctgtgaagactytggacactgaactgactttggaaccagactgcagaatggaggggtgggaacttgtggcttgaacctaatcaggtttcattagggttttctgtatataagatcatgtcatctagaacaccctcagagcacgcggcgctgccaagagcctggccgagtgcagctcgagcgccgacgtcgccaacgtggcgcacactgctgacgcagtacgcaagttcgtcacagtggtcctccgccggctgcgccgcaagttcgtcacagtggtcctccgccggctacggcgctgcgtcactggtttgcaggcgctttcctcttggaagtggcgactgctgcgggcctgagcgctggtctcacgcgcctcgggagccaggttggcggcgcgatgaggcgcagcaaggctgacgtggagcggtacatcgcctcggtgcagggctccaccccgtcgcctcgacagaagtcaatgaaaggattctattttgcaaagctgtattatgaagctaaagaatatgatcttgctaaaaaatacatatgtacttacattaatgtgcaagagagggatcccaaagctcacagatttctgggtcttctttatgaattggaagaaaacacagacaaagccgttgaatgttacaggcgttcagtggaattaaacccaacacaaaaagatctkgtgttgaagattgcagaattgctttgtaaaaatgatgttactgatggaagagcaaaatactggctsgaaagagcagccaaacttttcccaggaagtcctgcaatttataaactaaaggaacakcttctagattgtgaaggtgaagatggatggaataaactttttgactkgattcagtcagaactttatgtaagacctgatgacgtccatrtgaacatccggctagtggagktgtatcgctcaamtaaaagattgaaggatgctgtggcccrctgccatgaggcagagaggaacatagctttgcgttcaagtttagartggaattcgtgtgttgtacagacccttaaggaatatctggagtctttacagtgtttggagtctgataaaagtgactggcragcaaccaatacagacttactgctggcctatgctaatcttatgcttcttacgctttccactagagatgtgcaggaaagtagagaattactgcaaagttttgatagtgctcttcagtctgtraaatctttgggtggaaatgatgaactgtcagctactttcttagaaatgaaaggacatttctayatgyatgctggttctctgcttttgaagatgggtcagcatagtagtaatgttcaatggcragctctttctgagctggctgcrttgtgctatstcatagcatttcaggttccaagaccaaagattaaattaakaraaggtraagctggacaaaatctgctggaaatgatggcctgtgaccgactgagccaatcagggcayatgttgctaaacttaagtcgtggcaagcaagattttttaaaagwgrttgttgaaacttttgccaacaaaagcgggcagtctgcattatatgatgctctgttttctagtcagtcayctaaggatacatcttttcttggtagcgatgatattggaaacattgatgtacragaaccagagcttgaagatttgrctagatacgatgttggtgctattcragcacataatggtagtcttcagcaycttacttggcttggcttacagtggaattcattgcctgctttacctggaatccgaaaatggctaaaacagcttttccatcrtttgccccakgaaacctcaaggcttgaaacaaatgcrcctgaatcaatatgtattttagatcttgaagtatttctccttggagtagtatataccagccacttacaattaaaggagaaatgtaattctcaccayagctcctatcagccgttatgcctgcccyttcctgtrtgtaaacrgctttgtacagaragacaaaaatcttggtgggatgcggtttgtactctgattcacagaaaagcagtacctggaaackyrgcaaaattgagacttytagttcagcatgaaataaacactctaagagcccaggaaaaacatggccttcaacctgctctgcttgtacattgggcaraatrccttcagaaaacgggcagyggtcttaattcttyttatgrtcaackagaatacatagggagaagtgttcattattggaagaaagttttgccattgttgaagataataaaaaagaagaacagtattcctgaacctattgatcctctgtttaaacattttcatagtgtagacattcaggcatcagaaattgttgartatgaagaagaygcacacrtaacttttgctatrttggatgcagtamatggaaatatagaagatgctrtgactgcttttgaatctataaaaagtgttgtttcttattggaatcttgcactgatttttcacaggaaggcagaagacattgaaaatgatgccctttctcctgaagaacaagaagaatgcaraaattatctgasaaagaccagggrctacctaataaagattwtagatgacrgtgattcaaatctttcagtggtcaagaaattgcctgtgcccctggagtctgtaaaasagakgcttaaktcagycatgcaggaactcgaaractatagtgaaggagrtcctctctataaaaatggttctttgcgaaatgcrgattcagaaataaaacattctacaccrtctcctaccaratattcactatcaccaagtaaaagttacaagtattctcccraaacaccacctcgatggrcagaagatcrgaattctttackgaawatgattygccaacaagtagaggccattahgttgaaactaaatagcagtaastcagcatcccrtcatcgttggcccacagagaattatggaccagactcrgtgcctgatggatatcaggggtcacagacatttcatggggctccactaacagttgcaactactggcccttcagtatattatagtcagtcaccagcatataattccccagtatcttctcagaccagcagctaatgttactcccacaaagggttcttctaatacagaatttaagtcaaccaaagaaggattttccatcsctgtgtctgctgatggatttaaatttggcatttyggaaccaggaaatcaagaaaagaaaagkgaaaagcctcttgaaaatgrtactggcttccaggctcaggatattagtggccrgaagaakggccgtggtgtgatttttggccaaacaagtagcacttttacatttgcagatsttgcaaaatcaacttcaggagaaggatttcagtttggcaaaaaagaccycaatttcaagggattttcaggtgctggagaaaaattattctcatcacratrcggtaaaatggccaataaagcaaacacttccggtgactttgagaaagatgatgatgcctrtaagactgaggacagcgatgacatccattttgaaccagtagttcaaatgcscgaaaaagtagaacttgtaayaggagaagaagatgaaaaagttctgtattcacagcgggtaaaactatttagatttgatgctgagrtaagkcagtggaaagaaaggggcttggggaacttaaaaattctcaaaaacgaggtcaatggcaaacyaagaatgctgatgcgaagagamcaagtactaaaagtgtgtgctaatcattggataacgactacratgaacctgaagccyctstctggatcagatagagcatggatgtggtyagccagtgatttctctgayggtgatgccaaactagagcrgttrgcagcaaaatttaaaacaccagagctggctgaagaattcaagcagaaatttgaggaatgccagcrgcttctgttagacataccacttcaaactccccataaacttgtagatactggcagagctgccaagttaatacagagagctgaagaaatgaagagtggactgaaagatttcaaaacatttttgacaaatgatcaaacaaaagtcrctgaggaagaaaataagggttcaggtacaggtgcggccggtgcctcagacacaacaataaaacccaatsctgaaaacactgggcccacattagaatgggataactrtgayttaagggaagatgctttggatgatagtgtcagtagtagctcagtacatgcttctccattggcaagtagccctgtgagaaaaaatcttttccrytttgrtragtcaacaacaggatytaacttcagttttaaatctgctttgagtcyatctaagtctcctgccaagttgaatcagagtgggacttcagttggcactgatgaagaatctgwtgttactcaagaagaagagagagatggacagtactttgaacctgttgttcctttacctgatctagttgaagtatccagtggtsaggaaaataagcaagttcgtatagtgatgagaagggaccaagtattaaaactttgtgccaatcacasaataactccagacatgastttgcaaaatatgaaagggacagaaagagtatggktgtggactgcatgtgattttgcagatggagaaagaaaagtagagcatttagctgttcgttttaaactacaggatgttgcagactcrtttaagaaaatttttgatgaagcaaaaacagcccaggaaaaagattctttgataacacctcatgtttctcggtcaagcactcccagagagtcaccatgtggcaaaattgctgtagctrtattagaagaaaycacaagagagaggacagatgttattcagggtgatgatgtagcagatgcarcttcagaagttgaagtgtctagcacatctgaaacaacamcaaaagcagtggtttctcctccaaagtttgtatttgkttcagagtctgttaaaagmatttttagtagtgaaaaatcaaamccatttgcattcggcaacagttcagccactgggtctttgtttrgatttagttttaatgcayctttgaaaagtaacrayagtgaaactagttcagtagcccagagtggatctgaaagcaaagtggaacctaaaaaatgtgaactgtcaaagaactctgatatcgaacagtcttcagatagcaaagtcaaaaatctctytgcttcctttccaayggaagaatcttcaatcaactayacatttaaaacaccagaaaaggcaaaagagaagaaaaaacctgaagattctccctcagatgatgatgttctcattgtatatgaactaactccaaccgctgagcagaaagcccttgcaaccaaacttaaacttcctccaactttcttctgctacaagaatagaccagattatgttagtgaagaagaggaggatgatgaagatttcgaaacagctgtcaagaaacttaatggaaaaytatatttggatggctcagaaaaatgtagacccttggaagaaaatacagcagataatgagaaagaatgtattattgtttgggaaaagaaaccaacagttgaagagaaggcaaaagcagatacgttaaaacttccacctacatttttttgtggagtctgtagtgatactgatgaagacaatggaaatggggargactttcaatcagagcttcaaaaagttcaggaagctcaaaaatctcagacagaagaaataactagcacaactgacagtgtatatacaggtgggactgaagtgatggtaccttctttctgtaaatctgaagaacctgattctattaccaaatccattagttcaccatctgtttcctctgaaactatggacaaacctgtagatttgtcaactagaaaggaaattgatacagattctacaagccaaggggaaagcaagatagtttcatttggatttggaagtagcacagggctctcatttgcagacttggcttccagtaattctggagattttgcttttggttctaaagataaaaatttccaatgggcaaatactggagcagctgtgtttggaacacagtcagtcggaacccagtcagccggtaaagttggtgaagatgaagatggtagtgatgaagaagtagttcataatgaagatatccattttgaaccaatagtgtcactaccagaggtagaagtaaaatctggagaagaagatgaagaaattttgtttaaagagagagccaaactttatagatgggatcgggatgtcagtcagtggaaggagcgcggtgttggagatataaagattctttggcatacaatgaagaattattaccggatcctaatgagaagagaccaggtttttaaagtgtgtgcaaaccacgttattactaaaacaatggaattaaagcccttaaatgtttcaaataatgctttagtttggactgcctcagattatgctgatggagaagcaaaagtagaacagcttgcagtgagatttaaaactaaagaagtagctgattgtttcaagaaaacatttgaagaatgtcagcagaatttaatgaaactccagaaaggacatgtatcactggcagcagaattatcaaaggagaccaatcctgtggtgttttttgatgtttgtgcggacggtgaacctctagggcggataactatggaattattttcaaacattgttcctcggactgctgagaacttcagagcactatgcactggagagaaaggctttggtttcaagaattccatttttcacagagtaattccagattttgtttgccaaggaggagatatcaccaaacatgatggaacaggcggacagtccatttatggagacaaatttgaagatgaaaattttgatgtgaaacatactggtcctggtttactatccatggccaatcaaggccagaataccaataattctcaatttgttataacactgaagaaagcagaacatttggactttaagcatgtagtatttgggtttgttaaggatggcatggatactgtgaaaaagattgaatcatttggttctcccaaagggtctgtttgtcgaagaataactatcacagaatgtggacagatataaaatcattgttgttcatagaaaatttcatctgtataagcagttggattgaagcttagctattacaatttgatagttatgttcagcttttgaaaatggacgtttccgatttacaaatgtaaaattgcagcttatagctgttgtcactttttaatgtgttataattgaccttgcatggtgtgaaataaaagtttaaacactggtgtatttcaggtgtacttgtgtttatgtactcctgacgtattaaaatggaataatactaatcttgttaaaagcaatagacctcaaactattgaaggaatatgatatatgcaatttaattttaattccttttaagatatttggacttcctgcatggatatacttaccatttgaataaagggaccacaacttggataatttaattttaggtttgaaatatatttggtaatcttaactattggtgtactcatttatgcatagagactcgtttatgaatgggtagagccacagaacgtatagagttaaccaaagtgctcttctctagaatctttacacctcctgtgtggttacaagttaactttgtaagtagcgtaccttccttccttaaaatatctagcttcctgtgccctttcatagatattcgattaatttttacattttaaacaagttgactatttcctttaggggttttgtttcaaacttttctgtcatctgtctctactacctcagaaactgcagcttggttctgatgatagaaattgaatttttccttgtagttattgtgataaagtatgaatatttttagaaagtctataccatgttctttcgttaaagatttgctttatacaagattgttgcagtacctttttctggtaaattttgtagcagaaataaaatgacaattcctaagagccactgacatycaaaaaattcattacttacgcttcgggttcattctaaagtaaggaagacaatttaaaggcagtaaattcaaactgctgcataatttccagagctcctagtttctcaagtttgatacacaccaaaaacgtatttggaaatggcttgtatcaaatgttaggcaaattgctaaagaaaagaggatgttcttattggcctactcaatatggaactacaaagaatccaggtagaacacaaaattttgtatattgcaattatgaatattgactgtcttccacccatctgtgttctttcgggtgaaattacctcattttatttagtgaggaaagacaggtttattccctgttacatggggatttggaaattgggtatcctaaagcaagtaactgttcaaccaccagtcaaaagaggggagggatgttgtgcgagtaatgagtgatggtataccatcaccattccactcggccacaaagccagatacttgaaataaacctactccaaatgtatcagttcagtcttgaaccatggattacatatgtttacactaaatatttcaaattggcttatttggaaatctatgtaatataaactgatgtaaagtgtgttgtaacttttcagctgagacagttgatgccttcgtcatgattttagaataaattcttaagttaatgcaagtgctttttaagagactttttacagatttgtatgctttcctaaagcactaaagttacaaattaaaaagctttaaaaactttgaccaaaaatttgacaaaatgacatgtaaactgacttttcccgtattagtattccaaagatgcttaaaagtggcttgtggcatttatgagaaagtctttgtgtcacatttcaggaaaggactttgatttctctttgttatttaatcactgatgtggtctaaacccacgataatatgtatctttccttttaaactggattttatgttg

SEQ ID NO: 2665 - DNA, 3308 bp, Homo sapiens
ataaaccccagggctcattcttgagctgctcctgcatagatctcgtcctgttcaacacaccaaagattgacagctgaactgagagaccatcacccacagacacaactggccactgggtggtgcacaagtcagacagaactgaatagtcctgtgaagactytggacactgaactgactttggaaccagactgcagaatggaggggtgggaacttgtggcttgaacctaatcaggtttcattagggttttctgtatataagatcatgtcatctagaacaccctcagagcacgcggcgctgccaagagcctggccgagtgcagctcgagcgccgacgtcgccaacgtggcgcacactgctgacgcagtacgcaagttcgtcacagtggtcctccgccggctgcgccgcaagttcgtcacagtggtcctccgccggctacggcgctgcgtcactggtttgcaggcgctttcctcttggaagtggcgactgctgcgggcctgagcgctggtctcacgcgcctcgggagccaggttggcggcgcgatgaggcgcagcaaggctgacgtggagcggtacatcgcctcggtgcagggctccaccccgtcgcctcgacagaagtcaatgaaaggattctattttgcaaagctgtattatgaagctaaagaatatgatcttgctaaaaaatacatatgtacttacattaatgtgcaagagagggatcccaaagctcacagatttctgggtcttctttatgaattggaagaaaacacagacaaagccgttgaatgttacaggcgttcagtggaattaaacccaacacaaaaagatctkgtgttgaagattgcagaattgctttgtaaaaatgatgttactgatggaagagcaaaatactggctsgaaagagcagccaaacttttcccaggaagtcctgcaatttataaactaaaggaacakcttctagattgtgaaggtgaagatggatggaataaactttttgactkgattcagtcagaactttatgtaagacctgatgacgtccatrtgaacatccggctagtggagktgtatcgctcaamtaaaagattgaaggatgctgtggcccrctgccatgaggcagagaggaacatagctttgcgttcaagtttagartggaattcgtgtgttgtacagacccttaaggaatatctggagtctttacagtgtttggagtctgataaaagtgactggcragcaaccaatacagacttactgctggcctatgctaatcttatgcttcttacgctttccactagagatgtgcaggaaagtagagaattactgcaaagttttgatagtgctcttcagtctgtraaatctttgggtggaaatgatgaactgtcagctactttcttagaaatgaaaggacatttctayatgyatgctggttctctgcttttgaagatgggtcagcatagtagtaatgttcaatggcragctctttctgagctggctgcrttgtgctatstcatagcatttcaggttccaagaccaaagattaaattaakaraaggtraagctggacaaaatctgctggaaatgatggcctgtgaccgactgagccaatcagggcayatgttgctaaacttaagtcgtggcaagcaagattttttaaaagwgrttgttgaaacttttgccaacaaaagcgggcagtctgcattatatgatgctctgttttctagtcagtcayctaaggatacatcttttcttggtagcgatgatattggaaacattgatgtacragaaccagagcttgaagatttgrctagatacgatgttggtgctattcragcacataatggtagtcttcagcaycttacttggcttggcttacagtggaattcattgcctgctttacctggaatccgaaaatggctaaaacagcttttccatcrtttgccccakgaaacctcaaggcttgaaacaaatgcrcctgaatcaatatgtattttagatcttgaagtatttctccttggagtagtatataccagccacttacaattaaaggagaaatgtaattctcaccayagctcctatcagccgttatgcctgcccyttcctgtrtgtaaacrgctttgtacagaragacaaaaatcttggtgggatgcggtttgtactctgattcacagaaaagcagtacctggaaackyrgcaaaattgagacttytagttcagcatgaaataaacactctaagagcccaggaaaaacatggccttcaacctgctctgcttgtacattgggcaraatrccttcagaaaacgggcagyggtcttaattcttyttatgrtcaackagaatacatagggagaagtgttcattattggaagaaagttttgccattgttgaagataataaaaaagaagaacagtattcctgaacctattgatcctctgtttaaacattttcatagtgtagacattcaggcatcagaaattgttgartatgaagaagaygcacacrtaacttttgctatrttggatgcagtamatggaaatatagaagatgctrtgactgcttttgaatctataaaaagtgttgtttcttattggaatcttgcactgatttttcacaggaaggcagaagacattgaaaatgatgccctttctcctgaagaacaagaagaatgcaraaattatctgasaaagaccagggrctacctaataaagattwtagatgacrgtgattcaaatctttcagtggtcaagaaattgcctgtgcccctggagtctgtaaaasagakgcttaaktcagycatgcaggaactcgaaractatagtgaaggagrtcctctctataaaaatggttctttgcgaaatgcrgattcagaaataaaacattctacaccrtctcctaccaratattcactatcaccaagtaaaagttacaagtattctcccraaacaccacctcgatggrcagaagatcrgaattctttackgaawatgattygccaacaagtagaggccattahgraagaaatgcaggagttgaaactaaatagcagtaastcagcatcccrtcatcgttggcccacagagaattatggaccagactcrgtgcctgatggatatcaggggtcacagacatttcatggggctccactaacagaagcagcayatcstcattttacaattgagaaacatggagactccaaatggattatttacaggttcacaaaacagctttgtggcactgaaagggcgagagcyaagatctcctgatttctgttcctgtgttcatagattctttttccttaataaaagtaaacatatatc

SEQ ID NO: 2666 - DNA, 10756 bp, Homo sapiens
ttttgatagtgctcttcagtctgtraaatctttgggtggaaatgatgaactgtcagctactttcttagaaatgaaaggacatttctayatgyatgctggttctctgcttttgaagatgggtcagcatagtagtaatgttcaatggcragctctttctgagctggctgcrttgtgctatstcatagcatttcaggttccaagaccaaagattaaattaakaraaggtraagctggacaaaatctgctggaaatgatggcctgtgaccgactgagccaatcagggcayatgttgctaaacttaagtcgtggcaagcaagattttttaaaagwgrttgttgaaacttttgccaacaaaagcgggcagtctgcattatatgatgctctgttttctagtcagtcayctaaggatacatcttttcttggtagcgatgatattggaaacattgatgtacragaaccagagcttgaagatttgrctagatacgatgttggtgctattcragcacataatggtagtcttcagcaycttacttggcttggcttacagtggaattcattgcctgctttacctggaatccgaaaatggctaaaacagcttttccatcrtttgccccakgaaacctcaaggcttgaaacaaatgcrcctgaatcaatatgtattttagatcttgaagtatttctccttggagtagtatataccagccacttacaattaaaggagaaatgtaattctcaccayagctcctatcagccgttatgcctgcccyttcctgtrtgtaaacrgctttgtacagaragacaaaaatcttggtgggatgcggtttgtactctgattcacagaaaagcagtacctggaaackyrgcaaaattgagacttytagttcagcatgaaataaacactctaagagcccaggaaaaacatggccttcaacctgctctgcttgtacattgggcaraatrccttcagaaaacgggcagyggtcttaattcttyttatgrtcaackagaatacatagggagaagtgttcattattggaagaaagttttgccattgttgaagataataaaaaagaagaacagtattcctgaacctattgatcctctgtttaaacattttcatagtgtagacattcaggcatcagaaattgttgartatgaagaagaygcacacrtaacttttgctatrttggatgcagtamatggaaatatagaagatgctrtgactgcttttgaatctataaaaagtgttgtttcttattggaatcttgcactgatttttcacaggaaggcagaagacattgaaaatgatgccctttctcctgaagaacaagaagaatgcaraaattatctgasaaagaccagggrctacctaataaagattwtagatgacrgtgattcaaatctttcagtggtcaagaaattgcctgtgcccctggagtctgtaaaasagakgcttaaktcagycatgcaggaactcgaaractatagtgaaggagrtcctctctataaaaatggttctttgcgaaatgcrgattcagaaataaaacattctacaccrtctcctaccaratattcactatcaccaagtaaaagttacaagtattctcccraaacaccacctcgatggrcagaagatcrgaattctttackgaawatgattygccaacaagtagaggccattahgraagaaatgcaggagttgaaactaaatagcagtaastcagcatcccrtcatcgttggcccacagagaattatggaccagactcrgtgcctgatggatatcaggggtcacagacatttcatggggctccactaacagttgcaactactggcccttcagtatattatagtcagtcaccagcatataattccccagtatcttctcagaccagcagctaatgttactcccacaaagggcccagtctatggcatgaataggcttccaccccaacagcatatttatgcctatccgcaacagatgcacacaccgccagtgcaaagctcatctgcttgtatgttctctcaggagatgtatggtcctcctgcattgcgttttgagtctcctgcaacgggaattctatcgcccaggggtgatgattactttaattacaatgttcaacagacaagcacaaatccacctttgccagaaccaggatatttcacaaaacctccgattgcagctcatgcttcaagatctgcagaatctaagactatagaatttgggaaaactaattttgttcagcccatgccgggtgaaggattaaggccatctttgccaacacaagcacacacaacacagccaactccttttaaatttaactcaaatttcaaatcaaatgatggkgacttcacgttttcctcaccacaggttgtgacacagccccctcctgcagcttacagtaacagtgaaagccttttaggtctcctgacttcagataaacccttgcaaggagatggctatagtggagccaaaccaattcctggtggtcaaaccattgggcctcgaaatacattcaattttggaagcaaaaatgtgtctggaatttcatttacagaaaacatggggtcgagtcagcaaaagaattctggttttcggcgaagtgatgatatgtttactttccatggtccagggaaatcagtatttggaacacccactttagagacagcaaacaagaatcatgagacagatggaggaagtgcccatggggatgatgatgatgacggtcctcactttgagcctgtagtacctcttcctgataagattgaagtaaaaactggtgaggaagatgaagaagaattcttttgcaaccgcgcgaaattgtttcgtttcgatgtagaatccaaagaatggaaagaacgtgggattggcaatgtaaaaatactgaggcataaaacatctggtaaaattcgccttctaatgagacgagagcaagtattgaaaatctgtgcaaatcattacatcagtccagatatgaaattgacaccaaatgctggatcagacagatcttttgtatggcatgcccttgattatgcagatgagttgccaaaaccagaacaacttgctattaggttcaaaactcctgaggaagcagcactttttaaatgcaagtttgaagaagcccagagcattttaaaagccccaggaacaaatgtagccatggcgtcaaatcaggctgtcagaattgtaaaagaacccacaagtcatgataacaaggatatttgcaaatctgatgctggaaacctgaattttgaatttcaggttgcaaagaaagaagggtcttggtggcattgtaacagctgctcattaaagaatgcttcaactgctaagaaatgtgtatcatgccaaaatctaaacccaagcaataaagagctcgttggcccaccattagctgaaactgtttttactcctaaaaccagcccagagaatgttcaagatcgatttgcattggtgactccaaagaaagaaggtcactgggattgtagtatttgtttagtaagaaatgaacctactgtatctaggtgcattgcgtgtcagaatacaaaatctgctaacaaaagtggatcttcatttgttcatcaagcttcatttaaatttggccagggagatcttcctaaacctattaacagtgatttcagatctgttttttctacaaaggaaggacagtgggattgcagtgcatgtttggtacaaaatgaggggagctctacaaaatgtgctgcttgtcagaatccgagaaaacagagtctacctgctacttctattccaacacctgcctcttttaagtttggtacttcagagacaagtaaaactctaaaaagtggatttgaagacatgtttgctaagaaggaaggacagtgggattgcagttcatgcttagtgcgaaatgaagcaaatgctacaagatgtgttgcttgtcagaatccggataaaccaagtccatctacttctgttccagctcctgcctcttttaagtttggtacttcagagacaagcaaggctccaaagagcggatttgagggaatgttcactaagaaggagggacagtgggattgcagtgtgtgcttagtaagaaatgaagccagtgctaccaaatgtattgcttgtcagaatccaggtaaacaaaatcaaactacttctgcagtttcaacacctgcctcttcagagacaagcaaggctccaaagagcggatttgagggaatgttcactaagaaggagggacagtgggattgcagtgtgtgcttagtaagaaatgaagccagtgctaccaaatgtattgcttgtcagaatccaggtaaacaaaatcaaactacttctgcagtttcaacacctgcctcttcagagacaagcaaggctccaaagagcggatttgagggaatgttcactaagaaggaaggacagtgggattgcagtgtgtgcttagtaagaaatgaagccagtgctaccaaatgtattgcttgtcagtgtccaagtaaacaaaatcaaacaactgcaatttcaacacctgcctcttcggagataagcaaggctccaaagagtggatttgaaggaatgttcatcaggaaaggacagtgggattgtagtgtttgctgtgtacaaaatgagagttcttccttaaaatgtgtggcttgtgatgcctctaaaccaactcataaacctattgcagaagctccttcagctttcacactgggctcagaaatgaagttgcatgactcttctggaagtcaggtgggaacaggatttaaaagtaatttctcagaaaaagcttctaagtttggcaatacagagcaaggattcaaatttgggcatgtggatcaagaaaattcacyttcatttatgtttcagggttcttctaatacagaatttaagtcaaccaaagaaggattttccatcsctgtgtctgctgatggatttaaatttggcatttyggaaccaggaaatcaagaaaagaaaagkgaaaagcctcttgaaaatgrtactggcttccaggctcaggatattagtggccrgaagaakggccgtggtgtgatttttggccaaacaagtagcacttttacatttgcagatsttgcaaaatcaacttcaggagaaggatttcagtttggcaaaaaagaccycaatttcaagggattttcaggtgctggagaaaaattattctcatcacratrcggtaaaatggccaataaagcaaacacttccggtgactttgagaaagatgatgatgcctrtaagactgaggacagcgatgacatccattttgaaccagtagttcaaatgcscgaaaaagtagaacttgtaayaggagaagaagatgaaaaagttctgtattcacagcgggtaaaactatttagatttgatgctgagrtaagkcagtggaaagaaaggggcttggggaacttaaaaattctcaaaaacgaggtcaatggcaaacyaagaatgctgatgcgaagagamcaagtactaaaagtgtgtgctaatcattggataacgactacratgaacctgaagccyctstctggatcagatagagcatggatgtggtyagccagtgatttctctgayggtgatgccaaactagagcrgttrgcagcaaaatttaaaacaccagagctggctgaagaattcaagcagaaatttgaggaatgccagcrgcttctgttagacataccacttcaaactccccataaacttgtagatactggcagagctgccaagttaatacagagagctgaagaaatgaagagtggactgaaagatttcaaaacatttttgacaaatgatcaaacaaaagtcrctgaggaagaaaataagggttcaggtacaggtgcggccggtgcctcagacacaacaataaaacccaatsctgaaaacactgggcccacattagaatgggataactrtgayttaagggaagatgctttggatgatagtgtcagtagtagctcagtacatgcttctccattggcaagtagccctgtgagaaaaaatcttttccrytttgrtragtcaacaacaggatytaacttcagttttaaatctgctttgagtcyatctaagtctcctgccaagttgaatcagagtgggacttcagttggcactgatgaagaatctgwtgttactcaagaagaagagagagatggacagtactttgaacctgttgttcctttacctgatctagttgaagtatccagtggtsaggaaaatgaamaagttgtttttagtcacakggcaraamtctacagatatgataaagatgttggtcaatggaaagaaaggggcattggtgatataaagattttacagaattatgataataagcaagttcgtatagtgatgagaagggaccaagtattaaaactttgtgccaatcacasaataactccagacatgastttgcaaaatatgaaagggacagaaagagtatggktgtggactgcatgtgattttgcagatggagaaagaaaagtagagcatttagctgttcgttttaaactacaggatgttgcagactcrtttaagaaaatttttgatgaagcaaaaacagcccaggaaaaagattctttgataacacctcatgtttctcggtcaagcactcccagagagtcaccatgtggcaaaattgctgtagctrtattagaagaaaycacaagagagaggacagatgttattcagggtgatgatgtagcagatgcarcttcagaagttgaagtgtctagcacatctgaaacaacamcaaaagcagtggtttctcctccaaagtttgtatttgkttcagagtctgttaaaagmatttttagtagtgaaaaatcaaamccatttgcattcggcaacagttcagccactgggtctttgtttrgatttagttttaatgcayctttgaaaagtaacrayagtgaaactagttcagtagcccagagtggatctgaaagcaaagtggaacctaaaaaatgtgaactgtcaaagaactctgatatcgaacagtcttcagatagcaaagtcaaaaatctctytgcttcctttccaayggaagaatcttcaatcaactayacatttaaaacaccagaaaaggcaaaagagaagaaaaaacctgaagattctccctcagatgatgatgttctcattgtatatgaactaactccaaccgctgagcagaaagcccttgcaaccaaacttaaacttcctccaactttcttctgctacaagaatagaccagattatgttagtgaagaagaggaggatgatgaagatttcgaaacagctgtcaagaaacttaatggaaaaytatatttggatggctcagaaaaatgtagacccttggaagaaaatacagcagataatgagaaagaatgtattattgtttgggaaaagaaaccaacagttgaagagaaggcaaaagcagatacgttaaaacttccacctacatttttttgtggagtctgtagtgatactgatgaagacaatggaaatggggargactttcaatcagagcttcaaaaagttcaggaagctcaaaaatctcagacagaagaaataactagcacaactgacagtgtatatacaggtgggactgaagtgatggtaccttctttctgtaaatctgaagaacctgattctattaccaaatccattagttcaccatctgtttcctctgaaactatggacaaacctgtagatttgtcaactagaaaggaaattgatacagattctacaagccaaggggaaagcaagatagtttcatttggatttggaagtagcacagggctctcatttgcagacttggcttccagtaattctggagattttgcttttggttctaaagataaaaatttccaatgggcaaatactggagcagctgtgtttggaacacagtcagtcggaacccagtcagccggtaaagttggtgaagatgaagatggtagtgatgaagaagtagttcataatgaagatatccattttgaaccaatagtgtcactaccagaggtagaagtaaaatctggagaagaagatgaagaaattttgtttaaagagagagccaaactttatagatgggatcgggatgtcagtcagtggaaggagcgcggtgttggagatataaagattctttggcatacaatgaagaattattaccggatcctaatgagaagagaccaggtttttaaagtgtgtgcaaaccacgttattactaaaacaatggaattaaagcccttaaatgtttcaaataatgctttagtttggactgcctcagattatgctgatggagaagcaaaagtagaacagcttgcagtgagatttaaaactaaagaagtagctgattgtttcaagaaaacatttgaagaatgtcagcagaatttaatgaaactccagaaaggacatgtatcactggcagcagaattatcaaaggagaccaatcctgtggtgttttttgatgtttgtgcggacggtgaacctctagggcggataactatggaattattttcaaacattgttcctcggactgctgagaacttcagagcactatgcactggagagaaaggctttggtttcaagaattccatttttcacagagtaattccagattttgtttgccaaggaggagatatcaccaaacatgatggaacaggcggacagtccatttatggagacaaatttgaagatgaaaattttgatgtgaaacatactggtcctggtttactatccatggccaatcaaggccagaataccaataattctcaatttgttataacactgaagaaagcagaacatttggactttaagcatgtagtatttgggtttgttaaggatggcatggatactgtgaaaaagattgaatcatttggttctcccaaagggtctgtttgtcgaagaataactatcacagaatgtggacagatataaaatcattgttgttcatagaaaatttcatctgtataagcagttggattgaagcttagctattacaatttgatagttatgttcagcttttgaaaatggacgtttccgatttacaaatgtaaaattgcagcttatagctgttgtcactttttaatgtgttataattgaccttgcatggtgtgaaataaaagtttaaacactggtgtatttcaggtgtacttgtgtttatgtactcctgacgtattaaaatggaataatactaatcttgttaaaagcaatagacctcaaactattgaaggaatatgatatatgcaatttaattttaattccttttaagatatttggacttcctgcatggatatacttaccatttgaataaagggaccacaacttggataatttaattttaggtttgaaatatatttggtaatcttaactattggtgtactcatttatgcatagagactcgtttatgaatgggtagagccacagaacgtatagagttaaccaaagtgctcttctctagaatctttacacctcctgtgtggttacaagttaactttgtaagtagcgtaccttccttccttaaaatatctagcttcctgtgccctttcatagatattcgattaatttttacattttaaacaagttgactatttcctttaggggttttgtttcaaacttttctgtcatctgtctctactacctcagaaactgcagcttggttctgatgatagaaattgaatttttccttgtagttattgtgataaagtatgaatatttttagaaagtctataccatgttctttcgttaaagatttgctttatacaagattgttgcagtacctttttctggtaaattttgtagcagaaataaaatgacaattcctaagagccactgacatycaaaaaattcattacttacgcttcgggttcattctaaagtaaggaagacaatttaaaggcagtaaattcaaactgctgcataatttccagagctcctagtttctcaagtttgatacacaccaaaaacgtatttggaaatggcttgtatcaaatgttaggcaaattgctaaagaaaagaggatgttcttattggcctactcaatatggaactacaaagaatccaggtagaacacaaaattttgtatattgcaattatgaatattgactgtcttccacccatctgtgttctttcgggtgaaattacctcattttatttagtgaggaaagacaggtttattccctgttacatggggatttggaaattgggtatcctaaagcaagtaactgttcaaccaccagtcaaaagaggggagggatgttgtgcgagtaatgagtgatggtataccatcaccattccactcggccacaaagccagatacttgaaataaacctactccaaatgtatcagttcagtcttgaaccatggattacatatgtttacactaaatatttcaaattggcttatttggaaatctatgtaatataaactgatgtaaagtgtgttgtaacttttcagctgagacagttgatgccttcgtcatgattttagaataaattcttaagttaatgcaagtgctttttaagagactttttacagatttgtatgctttcctaaagcactaaagttacaaattaaaaagctttaaaaactttgaccaaaaatttgacaaaatgacatgtaaactgacttttcccgtattagtattccaaagatgcttaaaagtggcttgtggcatttatgagaaagtctttgtgtcacatttcaggaaaggactttgatttctctttgttatttaatcactgatgtggtctaaacccacgataatatgtatctttccttttaaactggattttatgttg

SEQ ID NO: 2667 - DNA, 5612 bp, Homo sapiens
acaccctcagagcacgcggcgctgccaagagcctggccgagtgcagctcgagcgccgacgtcgccaacgtggcgcacactgctgacgcagtacgcaagttcgtcacagtggtcctccgccggctgcgccgcaagttcgtcacagtggtcctccgccggctacggcgctgcgtcactggtttgcaggcgctttcctcttggaagtggcgactgctgcgggcctgagcgctggtctcacgcgcctcgggagccaggttggcggcgcgatgaggcgcagcaaggctgacgtggagcggtacatcgcctcggtgcagggctccaccccgtcgcctcgacagaagtcaatgaaaggattctattttgcaaagctgtattatgaagctaaagaatatgatcttgctaaaaaatacatatgtacttacattaatgtgcaagagagggatcccaaagctcacagatttctgggtcttctttatgaattggaagaaaacacagacaaagccgttgaatgttacaggcgttcagtggaattaaacccaacacaaaaagatctkgtgttgaagattgcagaattgctttgtaaaaatgatgttactgatggaagagcaaaatactggctsgaaagagcagccaaacttttcccaggaagtcctgcaatttataaactaaaggaacakcttctagattgtgaaggtgaagatggatggaataaactttttgactkgattcagtcagaactttatgtaagacctgatgacgtccatrtgaacatccggctagtggagktgtatcgctcaamtaaaagattgaaggatgctgtggcccrctgccatgaggcagagaggaacatagctttgcgttcaagtttagartggaattcgtgtgttgtacagacccttaaggaatatctggagtctttacagtgtttggagtctgataaaagtgactggcragcaaccaatacagacttactgctggcctatgctaatcttatgcttcttacgctttccactagagatgtgcaggaaagtagagaattactgcaaagttttgatagtgctcttcagtctgtraaatctttgggtggaaatgatgaactgtcagctactttcttagaaatgaaaggacatttctayatgyatgctggttctctgcttttgaagatgggtcagcatagtagtaatgttcaatggcragctctttctgagctggctgcrttgtgctatstcatagcatttcaggttccaagaccaaagattaaattaakaraaggtraagctggacaaaatctgctggaaatgatggcctgtgaccgactgagccaatcagggcayatgttgctaaacttaagtcgtggcaagcaagattttttaaaagwgrttgttgaaacttttgccaacaaaagcgggcagtctgcattatatgatgctctgttttctagtcagtcayctaaggatacatcttttcttggtagcgatgatattggaaacattgatgtacragaaccagagcttgaagatttgrctagatacgatgttggtgctattcragcacataatggtagtcttcagcaycttacttggcttggcttacagtggaattcattgcctgctttacctggaatccgaaaatggctaaaacagcttttccatcrtttgccccakgaaacctcaaggcttgaaacaaatgcrcctgaatcaatatgtattttagatcttgaagtatttctccttggagtagtatataccagccacttacaattaaaggagaaatgtaattctcaccayagctcctatcagccgttatgcctgcccyttcctgtrtgtaaacrgctttgtacagaragacaaaaatcttggtgggatgcggtttgtactctgattcacagaaaagcagtacctggaaackyrgcaaaattgagacttytagttcagcatgaaataaacactctaagagcccaggaaaaacatggccttcaacctgctctgcttgtacattgggcaraatrccttcagaaaacgggcagyggtcttaattcttyttatgrtcaackagaatacatagggagaagtgttcattattggaagaaagttttgccattgttgaagataataaaaaagaagaacagtattcctgaacctattgatcctctgtttaaacattttcatagtgtagacattcaggcatcagaaattgttgartatgaagaagaygcacacrtaacttttgctatrttggatgcagtamatggaaatatagaagatgctrtgactgcttttgaatctataaaaagtgttgtttcttattggaatcttgcactgatttttcacaggaaggcagaagacattgaaaatgatgccctttctcctgaagaacaagaagaatgcaraaattatctgasaaagaccagggrctacctaataaagattwtagatgacrgtgattcaaatctttcagtggtcaagaaattgcctgtgcccctggagtctgtaaaasagakgcttaaktcagycatgcaggaactcgaaractatagtgaaggagrtcctctctataaaaatggttctttgcgaaatgcrgattcagaaataaaacattctacaccrtctcctaccaratattcactatcaccaagtaaaagttacaagtattctcccraaacaccacctcgatggrcagaagatcrgaattctttackgaawatgattygccaacaagtagaggccattahgraagaaatgcaggagttgaaactaaatagcagtaastcagcatcccrtcatcgttggcccacagagaattatggaccagactcrgtgcctgatggatatcaggggtcacagacatttcatggggctccactaacagttgcaactactggcccttcagtatattatagtcagtcaccagcatataattccccagtatcttctcagaccagcagctaatgttactcccacaaagggttcttctaatacagaatttaagtcaaccaaagaaggattttccatcsctgtgtctgctgatggatttaaatttggcatttyggaaccaggaaatcaagaaaagaaaagkgaaaagcctcttgaaaatgrtactggcttccaggctcaggatattagtggccrgaagaakggccgtggtgtgatttttggccaaacaagtagcacttttacatttgcagatsttgcaaaatcaacttcaggagaaggatttcagtttggcaaaaaagaccycaatttcaagggattttcaggtgctggagaaaaattattctcatcacratrcggtaaaatggccaataaagcaaacacttccggtgactttgagaaagatgatgatgcctrtaagactgaggacagcgatgacatccattttgaaccagtagttcaaatgcscgaaaaagtagaacttgtaayaggagaagaagatgaaaaagttctgtattcacagcgggtaaaactatttagatttgatgctgagrtaagkcagtggaaagaaaggggcttggggaacttaaaaattctcaaaaacgaggtcaatggcaaacyaagaatgctgatgcgaagagamcaagtactaaaagtgtgtgctaatcattggataacgactacratgaacctgaagccyctstctggatcagatagagcatggatgtggtyagccagtgatttctctgayggtgatgccaaactagagcrgttrgcagcaaaatttaaaacaccagagctggctgaagaattcaagcagaaatttgaggaatgccagcrgcttctgttagacataccacttcaaactccccataaacttgtagatactggcagagctgccaagttaatacagagagctgaagaaatgaagagtggactgaaagatttcaaaacatttttgacaaatgatcaaacaaaagtcrctgaggaagaaaataagggttcaggtacaggtgcggccggtgcctcagacacaacaataaaacccaatsctgaaaacactgggcccacattagaatgggataactrtgayttaagggaagatgctttggatgatagtgtcagtagtagctcagtacatgcttctccattggcaagtagccctgtgagaaaaaatcttttccrytttgrtragtcaacaacaggatytaacttcagttttaaatctgctttgagtcyatctaagtctcctgccaagttgaatcagagtgggacttcagttggcactgatgaagaatctgwtgttactcaagaagaagagagagatggacagtactttgaacctgttgttcctttacctgatctagttgaagtatccagtggtsaggaaaatgaamaagttgtttttagtcacakggcaraamtctacagatatgataaagatgttggtcaatggaaagaaaggggcattggtgatataaagattttacagaattatgataataagcaagttcgtatagtgatgagaagggaccaagtattaaaactttgtgccaatcacasaataactccagacatgastttgcaaaatatgaaagggacagaaagagtatggktgtggactgcatgtgattttgcagatggagaaagaaaagtagagcatttagctgttcgttttaaactacaggatgttgcagactcrtttaagaaaatttttgatgaagcaaaaacagcccaggaaaaagattctttgataacacctcatgtttctcggtcaagcactcccagagagtcaccatgtggcaaaattgctgtagctrtattagaagaaaycacaagagagaggacagatgttattcagggtgatgatgtagcagatgcarcttcagaagttgaagtgtctagcacatctgaaacaacamcaaaagcagtggtttctcctccaaagtttgtatttgkttcagagtctgttaaaagmatttttagtagtgaaaaatcaaamccatttgcattcggcaacagttcagccactgggtctttgtttrgatttagttttaatgcayctttgaaaagtaacrayagtgaaactagttcagtagcccagagtggatctgaaagcaaagtggaacctaaaaaatgtgaactgtcaaagaactctgatatcgaacagtcttcagatagcaaagtcaaaaatctctytgcttcctttccaayggaagaatcttcaatcaactayacatttaaaacaccagaaaagggtargtactttgttgttaaagttaagcacaatttttctttcttttaatgtttagcttgatgcagactctttgtrggatactaatgttgggatataaaygatgctttgtgaacacccccaaaatatttgagcaattttttttctcccttaataagttcacggtgaggtttcaaagagcaagagaacttagttwaagacatttcagtaactggaagatacttttatcatgctagggcagagcaaaagaactcggtacggtatacggactcatgcttgaatcatgcrcattaacgtgagtctttttttaaagtgttcattttcatttgttcagtttcttttgtcactcagaaaacatgatattgaggctgggcacggtggctcactcctagaatgccagcactttgggaggttgaggtgggcagatca

SEQ ID NO: 2668 - DNA, 5886 bp, Homo sapiens
ataaaccccagggctcattcttgagctgctcctgcatagatctcgtcctgttcaacacaccaaagattgacagctgaactgagagaccatcacccacagacacaactggccactgggtggtgcacaagtcagacagaactgaatagtcctgtgaagactytggacactgaactgactttggaaccagactgcagaatggaggggtgggaacttgtggcttgaacctaatcaggtttcattagggttttctgtatataagatcatgtcatctagaacaccctcagagcacgcggcgctgccaagagcctggccgagtgcagctcgagcgccgacgtcgccaacgtggcgcacactgctgacgcagtacgcaagttcgtcacagtggtcctccgccggctgcgccgcaagttcgtcacagtggtcctccgccggctacggcgctgcgtcactggtttgcaggcgctttcctcttggaagtggcgactgctgcgggcctgagcgctggtctcacgcgcctcgggagccaggttggcggcgcgatgaggcgcagcaaggctgacgtggagcggtacatcgcctcggtgcagggctccaccccgtcgcctcgacagaagtcaatgaaaggattctattttgcaaagctgtattatgaagctaaagaatatgatcttgctaaaaaatacatatgtacttacattaatgtgcaagagagggatcccaaagctcacagatttctgggtcttctttatgaattggaagaaaacacagacaaagccgttgaatgttacaggcgttcagtggaattaaacccaacacaaaaagatctkgtgttgaagattgcagaattgctttgtaaaaatgatgttactgatggaagagcaaaatactggctsgaaagagcagccaaacttttcccaggaagtcctgcaatttataaactaaaggaacakcttctagattgtgaaggtgaagatggatggaataaactttttgactkgattcagtcagaactttatgtaagacctgatgacgtccatrtgaacatccggctagtggagktgtatcgctcaamtaaaagattgaaggatgctgtggcccrctgccatgaggcagagaggaacatagctttgcgttcaagtttagartggaattcgtgtgttgtacagacccttaaggaatatctggagtctttacagtgtttggagtctgataaaagtgactggcragcaaccaatacagacttactgctggcctatgctaatcttatgcttcttacgctttccactagagatgtgcaggaaagtagagaattactgcaaagttttgatagtgctcttcagtctgtraaatctttgggtggaaatgatgaactgtcagctactttcttagaaatgaaaggacatttctayatgyatgctggttctctgcttttgaagatgggtcagcatagtagtaatgttcaatggcragctctttctgagctggctgcrttgtgctatstcatagcatttcaggttccaagaccaaagattaaattaakaraaggtraagctggacaaaatctgctggaaatgatggcctgtgaccgactgagccaatcagggcayatgttgctaaacttaagtcgtggcaagcaagattttttaaaagwgrttgttgaaacttttgccaacaaaagcgggcagtctgcattatatgatgctctgttttctagtcagtcayctaaggatacatcttttcttggtagcgatgatattggaaacattgatgtacragaaccagagcttgaagatttgrctagatacgatgttggtgctattcragcacataatggtagtcttcagcaycttacttggcttggcttacagtggaattcattgcctgctttacctggaatccgaaaatggctaaaacagcttttccatcrtttgccccakgaaacctcaaggcttgaaacaaatgcrcctgaatcaatatgtattttagatcttgaagtatttctccttggagtagtatataccagccacttacaattaaaggagaaatgtaattctcaccayagctcctatcagccgttatgcctgcccyttcctgtrtgtaaacrgctttgtacagaragacaaaaatcttggtgggatgcggtttgtactctgattcacagaaaagcagtacctggaaackyrgcaaaattgagacttytagttcagcatgaaataaacactctaagagcccaggaaaaacatggccttcaacctgctctgcttgtacattgggcaraatrccttcagaaaacgggcagyggtcttaattcttyttatgrtcaackagaatacatagggagaagtgttcattattggaagaaagttttgccattgttgaagataataaaaaagaagaacagtattcctgaacctattgatcctctgtttaaacattttcatagtgtagacattcaggcatcagaaattgttgartatgaagaagaygcacacrtaacttttgctatrttggatgcagtamatggaaatatagaagatgctrtgactgcttttgaatctataaaaagtgttgtttcttattggaatcttgcactgatttttcacaggaaggcagaagacattgaaaatgatgccctttctcctgaagaacaagaagaatgcaraaattatctgasaaagaccagggrctacctaataaagattwtagatgacrgtgattcaaatctttcagtggtcaagaaattgcctgtgcccctggagtctgtaaaasagakgcttaaktcagycatgcaggaactcgaaractatagtgaaggagrtcctctctataaaaatggttctttgcgaaatgcrgattcagaaataaaacattctacaccrtctcctaccaratattcactatcaccaagtaaaagttacaagtattctcccraaacaccacctcgatggrcagaagatcrgaattctttackgaawatgattygccaacaagtagaggccattahgraagaaatgcaggagttgaaactaaatagcagtaastcagcatcccrtcatcgttggcccacagagaattatggaccagactcrgtgcctgatggatatcaggggtcacagacatttcatggggctccactaacagttgcaactactggcccttcagtatattatagtcagtcaccagcatataattccccagtatcttctcagaccagcagctaatgttactcccacaaagggttcttctaatacagaatttaagtcaaccaaagaaggattttccatcsctgtgtctgctgatggatttaaatttggcatttyggaaccaggaaatcaagaaaagaaaagkgaaaagcctcttgaaaatgrtactggcttccaggctcaggatattagtggccrgaagaakggccgtggtgtgatttttggccaaacaagtagcacttttacatttgcagatsttgcaaaatcaacttcaggagaaggatttcagtttggcaaaaaagaccycaatttcaagggattttcaggtgctggagaaaaattattctcatcacratrcggtaaaatggccaataaagcaaacacttccggtgactttgagaaagatgatgatgcctrtaagactgaggacagcgatgacatccattttgaaccagtagttcaaatgcscgaaaaagtagaacttgtaayaggagaagaagatgaaaaagttctgtattcacagcgggtaaaactatttagatttgatgctgagrtaagkcagtggaaagaaaggggcttggggaacttaaaaattctcaaaaacgaggtcaatggcaaacyaagaatgctgatgcgaagagamcaagtactaaaagtgtgtgctaatcattggataacgactacratgaacctgaagccyctstctggatcagatagagcatggatgtggtyagccagtgatttctctgayggtgatgccaaactagagcrgttrgcagcaaaatttaaaacaccagagctggctgaagaattcaagcagaaatttgaggaatgccagcrgcttctgttagacataccacttcaaactccccataaacttgtagatactggcagagctgccaagttaatacagagagctgaagaaatgaagagtggactgaaagatttcaaaacatttttgacaaatgatcaaacaaaagtcrctgaggaagaaaataagggttcaggtacaggtgcggccggtgcctcagacacaacaataaaacccaatsctgaaaacactgggcccacattagaatgggataactrtgayttaagggaagatgctttggatgatagtgtcagtagtagctcagtacatgcttctccattggcaagtagccctgtgagaaaaaatcttttccrytttgrtragtcaacaacaggatytaacttcagttttaaatctgctttgagtcyatctaagtctcctgccaagttgaatcagagtgggacttcagttggcactgatgaagaatctgwtgttactcaagaagaagagagagatggacagtactttgaacctgttgttcctttacctgatctagttgaagtatccagtggtsaggaaaatgaamaagttgtttttagtcacakggcaraamtctacagatatgataaagatgttggtcaatggaaagaaaggggcattggtgatataaagattttacagaattatgataataagcaagttcgtatagtgatgagaagggaccaagtattaaaactttgtgccaatcacasaataactccagacatgastttgcaaaatatgaaagggacagaaagagtatggktgtggactgcatgtgattttgcagatggagaaagaaaagtagagcatttagctgttcgttttaaactacaggatgttgcagactcrtttaagaaaatttttgatgaagcaaaaacagcccaggaaaaagattctttgataacacctcatgtttctcggtcaagcactcccagagagtcaccatgtggcaaaattgctgtagctrtattagaagaaaycacaagagagaggacagatgttattcagggtgatgatgtagcagatgcarcttcagaagttgaagtgtctagcacatctgaaacaacamcaaaagcagtggtttctcctccaaagtttgtatttgkttcagagtctgttaaaagmatttttagtagtgaaaaatcaaamccatttgcattcggcaacagttcagccactgggtctttgtttrgatttagttttaatgcayctttgaaaagtaacrayagtgaaactagttcagtagcccagagtggatctgaaagcaaagtggaacctaaaaaatgtgaactgtcaaagaactctgatatcgaacagtcttcagatagcaaagtcaaaaatctctytgcttcctttccaayggaagaatcttcaatcaactayacatttaaaacaccagaaaagggtargtactttgttgttaaagttaagcacaatttttctttcttttaatgtttagcttgatgcagactctttgtrggatactaatgttgggatataaaygatgctttgtgaacacccccaaaatatttgagcaattttttttctcccttaataagttcacggtgaggtttcaaagagcaagagaacttagttwaagacatttcagtaactggaagatacttttatcatgctagggcagagcaaaagaactcggtacggtatacggactcatgcttgaatcatgcrcattaacgtgagtctttttttaaagtgttcattttcatttgttcagtttcttttgtcactcagaaaacatgatattgaggctgggcacggtggctcactcctagaatgccagcactttgggaggttgaggtgggcagatca

SEQ ID NO: 2669 - DNA, 12077 bp, Homo sapiens
ataaaccccagggctcattcttgagctgctcctgcatagatctcgtcctgttcaacacaccaaagattgacagctgaactgagagaccatcacccacagacacaactggccactgggtggtgcacaagtcagacagaactgaatagtcctgtgaagactytggacactgaactgactttggaaccagactgcagaatggaggggtgggaacttgtggcttgaacctaatcaggtttcattagggttttctgtatataagatcatgtcatctagaacaccctcagagcacgcggcgctgccaagagcctggccgagtgcagctcgagcgccgacgtcgccaacgtggcgcacactgctgacgcagtacgcaagttcgtcacagtggtcctccgccggctgcgccgcaagttcgtcacagtggtcctccgccggctacggcgctgcgtcactggtttgcaggcgctttcctcttggaagtggcgactgctgcgggcctgagcgctggtctcacgcgcctcgggagccaggttggcggcgcgatgaggcgcagcaaggctgacgtggagcggtacatcgcctcggtgcagggctccaccccgtcgcctcgacagaagtcaatgaaaggattctattttgcaaagctgtattatgaagctaaagaatatgatcttgctaaaaaatacatatgtacttacattaatgtgcaagagagggatcccaaagctcacagatttctgggtcttctttatgaattggaagaaaacacagacaaagccgttgaatgttacaggcgttcagtggaattaaacccaacacaaaaagatctkgtgttgaagattgcagaattgctttgtaaaaatgatgttactgatggaagagcaaaatactggctsgaaagagcagccaaacttttcccaggaagtcctgcaatttataaactaaaggaacakcttctagattgtgaaggtgaagatggatggaataaactttttgactkgattcagtcagaactttatgtaagacctgatgacgtccatrtgaacatccggctagtggagktgtatcgctcaamtaaaagattgaaggatgctgtggcccrctgccatgaggcagagaggaacatagctttgcgttcaagtttagartggaattcgtgtgttgtacagacccttaaggaatatctggagtctttacagtgtttggagtctgataaaagtgactggcragcaaccaatacagacttactgctggcctatgctaatcttatgcttcttacgctttccactagagatgtgcaggaaagtagagaattactgcaaagttttgatagtgctcttcagtctgtraaatctttgggtggaaatgatgaactgtcagctactttcttagaaatgaaaggacatttctayatgyatgctggttctctgcttttgaagatgggtcagcatagtagtaatgttcaatggcragctctttctgagctggctgcrttgtgctatstcatagcatttcaggttccaagaccaaagattaaattaakaraaggtraagctggacaaaatctgctggaaatgatggcctgtgaccgactgagccaatcagggcayatgttgctaaacttaagtcgtggcaagcaagattttttaaaagwgrttgttgaaacttttgccaacaaaagcgggcagtctgcattatatgatgctctgttttctagtcagtcayctaaggatacatcttttcttggtagcgatgatattggaaacattgatgtacragaaccagagcttgaagatttgrctagatacgatgttggtgctattcragcacataatggtagtcttcagcaycttacttggcttggcttacagtggaattcattgcctgctttacctggaatccgaaaatggctaaaacagcttttccatcrtttgccccakgaaacctcaaggcttgaaacaaatgcrcctgaatcaatatgtattttagatcttgaagtatttctccttggagtagtatataccagccacttacaattaaaggagaaatgtaattctcaccayagctcctatcagccgttatgcctgcccyttcctgtrtgtaaacrgctttgtacagaragacaaaaatcttggtgggatgcggtttgtactctgattcacagaaaagcagtacctggaaackyrgcaaaattgagacttytagttcagcatgaaataaacactctaagagcccaggaaaaacatggccttcaacctgctctgcttgtacattgggcaraatrccttcagaaaacgggcagyggtcttaattcttyttatgrtcaackagaatacatagggagaagtgttcattattggaagaaagttttgccattgttgaagataataaaaaagaagaacagtattcctgaacctattgatcctctgtttaaacattttcatagtgtagacattcaggcatcagaaattgttgartatgaagaagaygcacacrtaacttttgctatrttggatgcagtamatggaaatatagaagatgctrtgactgcttttgaatctataaaaagtgttgtttcttattggaatcttgcactgatttttcacaggaaggcagaagacattgaaaatgatgccctttctcctgaagaacaagaagaatgcaraaattatctgasaaagaccagggrctacctaataaagattwtagatgacrgtgattcaaatctttcagtggtcaagaaattgcctgtgcccctggagtctgtaaaasagakgcttaaktcagycatgcaggaactcgaaractatagtgaaggagrtcctctctataaaaatggttctttgcgaaatgcrgattcagaaataaaacattctacaccrtctcctaccaratattcactatcaccaagtaaaagttacaagtattctcccraaacaccacctcgatggrcagaagatcrgaattctttackgaawatgattygccaacaagtagaggccattahgraagaaatgcaggagttgaaactaaatagcagtaastcagcatcccrtcatcgttggcccacagagaattatggaccagactcrgtgcctgatggatatcaggggtcacagacatttcatggggctccactaacagttgcaactactggcccttcagtatattatagtcagtcaccagcatataattccccagtatcttctcagaccagcagctaatgttactcccacaaagggcccagtctatggcatgaataggcttccaccccaacagcatatttatgcctatccgcaacagatgcacacaccgccagtgcaaagctcatctgcttgtatgttctctcaggagatgtatggtcctcctgcattgcgttttgagtctcctgcaacgggaattctatcgcccaggggtgatgattactttaattacaatgttcaacagacaagcacaaatccacctttgccagaaccaggatatttcacaaaacctccgattgcagctcatgcttcaagatctgcagaatctaagactatagaatttgggaaaactaattttgttcagcccatgccgggtgaaggattaaggccatctttgccaacacaagcacacacaacacagccaactccttttaaatttaactcaaatttcaaatcaaatgatggkgacttcacgttttcctcaccacaggttgtgacacagccccctcctgcagcttacagtaacagtgaaagccttttaggtctcctgacttcagataaacccttgcaaggagatggctatagtggagccaaaccaattcctggtggtcaaaccattgggcctcgaaatacattcaattttggaagcaaaaatgtgtctggaatttcatttacagaaaacatggggtcgagtcagcaaaagaattctggttttcggcgaagtgatgatatgtttactttccatggtccagggaaatcagtatttggaacacccactttagagacagcaaacaagaatcatgagacagatggaggaagtgcccatggggatgatgatgatgacggtcctcactttgagcctgtagtacctcttcctgataagattgaagtaaaaactggtgaggaagatgaagaagaattcttttgcaaccgcgcgaaattgtttcgtttcgatgtagaatccaaagaatggaaagaacgtgggattggcaatgtaaaaatactgaggcataaaacatctggtaaaattcgccttctaatgagacgagagcaagtattgaaaatctgtgcaaatcattacatcagtccagatatgaaattgacaccaaatgctggatcagacagatcttttgtatggcatgcccttgattatgcagatgagttgccaaaaccagaacaacttgctattaggttcaaaactcctgaggaagcagcactttttaaatgcaagtttgaagaagcccagagcattttaaaagccccaggaacaaatgtagccatggcgtcaaatcaggctgtcagaattgtaaaagaacccacaagtcatgataacaaggatatttgcaaatctgatgctggaaacctgaattttgaatttcaggttgcaaagaaagaagggtcttggtggcattgtaacagctgctcattaaagaatgcttcaactgctaagaaatgtgtatcatgccaaaatctaaacccaagcaataaagagctcgttggcccaccattagctgaaactgtttttactcctaaaaccagcccagagaatgttcaagatcgatttgcattggtgactccaaagaaagaaggtcactgggattgtagtatttgtttagtaagaaatgaacctactgtatctaggtgcattgcgtgtcagaatacaaaatctgctaacaaaagtggatcttcatttgttcatcaagcttcatttaaatttggccagggagatcttcctaaacctattaacagtgatttcagatctgttttttctacaaaggaaggacagtgggattgcagtgcatgtttggtacaaaatgaggggagctctacaaaatgtgctgcttgtcagaatccgagaaaacagagtctacctgctacttctattccaacacctgcctcttttaagtttggtacttcagagacaagtaaaactctaaaaagtggatttgaagacatgtttgctaagaaggaaggacagtgggattgcagttcatgcttagtgcgaaatgaagcaaatgctacaagatgtgttgcttgtcagaatccggataaaccaagtccatctacttctgttccagctcctgcctcttttaagtttggtacttcagagacaagcaaggctccaaagagcggatttgagggaatgttcactaagaaggagggacagtgggattgcagtgtgtgcttagtaagaaatgaagccagtgctaccaaatgtattgcttgtcagaatccaggtaaacaaaatcaaactacttctgcagtttcaacacctgcctcttcagagacaagcaaggctccaaagagcggatttgagggaatgttcactaagaaggagggacagtgggattgcagtgtgtgcttagtaagaaatgaagccagtgctaccaaatgtattgcttgtcagaatccaggtaaacaaaatcaaactacttctgcagtttcaacacctgcctcttcagagacaagcaaggctccaaagagcggatttgagggaatgttcactaagaaggaaggacagtgggattgcagtgtgtgcttagtaagaaatgaagccagtgctaccaaatgtattgcttgtcagtgtccaagtaaacaaaatcaaacaactgcaatttcaacacctgcctcttcggagataagcaaggctccaaagagtggatttgaaggaatgttcatcaggaaaggacagtgggattgtagtgtttgctgtgtacaaaatgagagttcttccttaaaatgtgtggcttgtgatgcctctaaaccaactcataaacctattgcagaagctccttcagctttcacactgggctcagaaatgaagttgcatgactcttctggaagtcaggtgggaacaggatttaaaagtaatttctcagaaaaagcttctaagtttggcaatacagagcaaggattcaaatttgggcatgtggatcaagaaaattcacyttcatttatgtttcagggttcttctaatacagaatttaagtcaaccaaagaaggattttccatcsctgtgtctgctgatggatttaaatttggcatttyggaaccaggaaatcaagaaaagaaaagkgaaaagcctcttgaaaatgrtactggcttccaggctcaggatattagtggccrgaagaakggccgtggtgtgatttttggccaaacaagtagcacttttacatttgcagatsttgcaaaatcaacttcaggagaaggatttcagtttggcaaaaaagaccycaatttcaagggattttcaggtgctggagaaaaattattctcatcacratrcggtaaaatggccaataaagcaaacacttccggtgactttgagaaagatgatgatgcctrtaagactgaggacagcgatgacatccattttgaaccagtagttcaaatgcscgaaaaagtagaacttgtaayaggagaagaagatgaaaaagttctgtattcacagcgggtaaaactatttagatttgatgctgagrtaagkcagtggaaagaaaggggcttggggaacttaaaaattctcaaaaacgaggtcaatggcaaacyaagaatgctgatgcgaagagamcaagtactaaaagtgtgtgctaatcattggataacgactacratgaacctgaagccyctstctggatcagatagagcatggatgtggtyagccagtgatttctctgayggtgatgccaaactagagcrgttrgcagcaaaatttaaaacaccagagctggctgaagaattcaagcagaaatttgaggaatgccagcrgcttctgttagacataccacttcaaactccccataaacttgtagatactggcagagctgccaagttaatacagagagctgaagaaatgaagagtggactgaaagatttcaaaacatttttgacaaatgatcaaacaaaagtcrctgaggaagaaaataagggttcaggtacaggtgcggccggtgcctcagacacaacaataaaacccaatsctgaaaacactgggcccacattagaatgggataactrtgayttaagggaagatgctttggatgatagtgtcagtagtagctcagtacatgcttctccattggcaagtagccctgtgagaaaaaatcttttccrytttgrtragtcaacaacaggatytaacttcagttttaaatctgctttgagtcyatctaagtctcctgccaagttgaatcagagtgggacttcagttggcactgatgaagaatctgwtgttactcaagaagaagagagagatggacagtactttgaacctgttgttcctttacctgatctagttgaagtatccagtggtsaggaaaatgaamaagttgtttttagtcacakggcaraamtctacagatatgataaagatgttggtcaatggaaagaaaggggcattggtgatataaagattttacagaattatgataataagcaagttcgtatagtgatgagaagggaccaagtattaaaactttgtgccaatcacasaataactccagacatgastttgcaaaatatgaaagggacagaaagagtatggktgtggactgcatgtgattttgcagatggagaaagaaaagtagagcatttagctgttcgttttaaactacaggatgttgcagactcrtttaagaaaatttttgatgaagcaaaaacagcccaggaaaaagattctttgataacacctcatgtttctcggtcaagcactcccagagagtcaccatgtggcaaaattgctgtagctrtattagaagaaaycacaagagagaggacagatgttattcagggtgatgatgtagcagatgcarcttcagaagttgaagtgtctagcacatctgaaacaacamcaaaagcagtggtttctcctccaaagtttgtatttgkttcagagtctgttaaaagmatttttagtagtgaaaaatcaaamccatttgcattcggcaacagttcagccactgggtctttgtttrgatttagttttaatgcayctttgaaaagtaacrayagtgaaactagttcagtagcccagagtggatctgaaagcaaagtggaacctaaaaaatgtgaactgtcaaagaactctgatatcgaacagtcttcagatagcaaagtcaaaaatctctytgcttcctttccaayggaagaatcttcaatcaactayacatttaaaacaccagaaaaggcaaaagagaagaaaaaacctgaagattctccctcagatgatgatgttctcattgtatatgaactaactccaaccgctgagcagaaagcccttgcaaccaaacttaaacttcctccaactttcttctgctacaagaatagaccagattatgttagtgaagaagaggaggatgatgaagatttcgaaacagctgtcaagaaacttaatggaaaaytatatttggatggctcagaaaaatgtagacccttggaagaaaatacagcagataatgagaaagaatgtattattgtttgggaaaagaaaccaacagttgaagagaaggcaaaagcagatacgttaaaacttccacctacatttttttgtggagtctgtagtgatactgatgaagacaatggaaatggggargactttcaatcagagcttcaaaaagttcaggaagctcaaaaatctcagacagaagaaataactagcacaactgacagtgtatatacaggtgggactgaagtgatggtaccttctttctgtaaatctgaagaacctgattctattaccaaatccattagttcaccatctgtttcctctgaaactatggacaaacctgtagatttgtcaactagaaaggaaattgatacagattctacaagccaaggggaaagcaagatagtttcatttggatttggaagtagcacagggctctcatttgcagacttggcttccagtaattctggagattttgcttttggttctaaagataaaaatttccaatgggcaaatactggagcagctgtgtttggaacacagtcagtcggaacccagtcagccggtaaagttggtgaagatgaagatggtagtgatgaagaagtagttcataatgaagatatccattttgaaccaatagtgtcactaccagaggtagaagtaaaatctggagaagaagatgaagaaattttgtttaaagagagagccaaactttatagatgggatcgggatgtcagtcagtggaaggagcgcggtgttggagatataaagattctttggcatacaatgaagaattattaccggatcctaatgagaagagaccaggtttttaaagtgtgtgcaaaccacgttattactaaaacaatggaattaaagcccttaaatgtttcaaataatgctttagtttggactgcctcagattatgctgatggagaagcaaaagtagaacagcttgcagtgagatttaaaactaaagaagtagctgattgtttcaagaaaacatttgaagaatgtcagcagaatttaatgaaactccagaaaggacatgtatcactggcagcagaattatcaaaggagaccaatcctgtggtgttttttgatgtttgtgcggacggtgaacctctagggcggataactatggaattattttcaaacattgttcctcggactgctgagaacttcagagcactatgcactggagagaaaggctttggtttcaagaattccatttttcacagagtaattccagattttgtttgccaaggaggagatatcaccaaacatgatggaacaggcggacagtccatttatggagacaaatttgaagatgaaaattttgatgtgaaacatactggtcctggtttactatccatggccaatcaaggccagaataccaataattctcaatttgttataacactgaagaaagcagaacatttggactttaagcatgtagtatttgggtttgttaaggatggcatggatactgtgaaaaagattgaatcatttggttctcccaaagggtctgtttgtcgaagaataactatcacagaatgtggacagatataaaatcattgttgttcatagaaaatttcatctgtataagcagttggattgaagcttagctattacaatttgatagttatgttcagcttttgaaaatggacgtttccgatttacaaatgtaaaattgcagcttatagctgttgtcactttttaatgtgttataattgaccttgcatggtgtgaaataaaagtttaaacactggtgtatttcaggtgtacttgtgtttatgtactcctgacgtattaaaatggaataatactaatcttgttaaaagcaatagacctcaaactattgaaggaatatgatatatgcaatttaattttaattccttttaagatatttggacttcctgcatggatatacttaccatttgaataaagggaccacaacttggataatttaattttaggtttgaaatatatttggtaatcttaactattggtgtactcatttatgcatagagactcgtttatgaatgggtagagccacagaacgtatagagttaaccaaagtgctcttctctagaatctttacacctcctgtgtggttacaagttaactttgtaagtagcgtaccttccttccttaaaatatctagcttcctgtgccctttcatagatattcgattaatttttacattttaaacaagttgactatttcctttaggggttttgtttcaaacttttctgtcatctgtctctactacctcagaaactgcagcttggttctgatgatagaaattgaatttttccttgtagttattgtgataaagtatgaatatttttagaaagtctataccatgttctttcgttaaagatttgctttatacaagattgttgcagtacctttttctggtaaattttgtagcagaaataaaatgacaattcctaagagccactgacatycaaaaaattcattacttacgcttcgggttcattctaaagtaaggaagacaatttaaaggcagtaaattcaaactgctgcataatttccagagctcctagtttctcaagtttgatacacaccaaaaacgtatttggaaatggcttgtatcaaatgttaggcaaattgctaaagaaaagaggatgttcttattggcctactcaatatggaactacaaagaatccaggtagaacacaaaattttgtatattgcaattatgaatattgactgtcttccacccatctgtgttctttcgggtgaaattacctcattttatttagtgaggaaagacaggtttattccctgttacatggggatttggaaattgggtatcctaaagcaagtaactgttcaaccaccagtcaaaagaggggagggatgttgtgcgagtaatgagtgatggtataccatcaccattccactcggccacaaagccagatacttgaaataaacctactccaaatgtatcagttcagtcttgaaccatggattacatatgtttacactaaatatttcaaattggcttatttggaaatctatgtaatataaactgatgtaaagtgtgttgtaacttttcagctgagacagttgatgccttcgtcatgattttagaataaattcttaagttaatgcaagtgctttttaagagactttttacagatttgtatgctttcctaaagcactaaagttacaaattaaaaagctttaaaaactttgaccaaaaatttgacaaaatgacatgtaaactgacttttcccgtattagtattccaaagatgcttaaaagtggcttgtggcatttatgagaaagtctttgtgtcacatttcaggaaaggactttgatttctctttgttatttaatcactgatgtggtctaaacccacgataatatgtatctttccttttaaactggattttatgttg

SEQ ID NO: 2670 - DNA, 956 bp, Homo sapiens
attgcagcccaccgccatggccgcctacaaactggtgctgatccggcacggcragagcacatggaacctggagaaccgcttcagctgctggtacgacgccgatctgagcccggcgggccacgaggaggcgaagcgcggcgggcaggcgctacgagatgctggctatgagtttgacatctgcctcacctcagtgcagaagagagtgatccggaccctctggacagtgctagatgccattgatcagatgtggctgccagtggtgaggacttggcrcctcaatgagcrgcactatgggggtctaaccggtctcaataaagcagaaactgctgcaaagcatggtgaggcccaggtgaagatctggaggcgctcctatgatgtcccaccacctccgatggagcccgaccatcctttctacagcaacatcagtaaggatactattgccagagctctgcccttctggaatgaagaaatagttccccagatcaaggaggggaaacgtgtactgattgcagcccatggcaacagcctccagggcattgccaagcatgtggagggtctctctgaagaggctatcatggagctgaacctgccgactggtattcccatcgtctatgaattggacaagaacttgaagcctatcaagcccatgcagtttctgggggatgaagagacggtgtgcaaagccatagaagctgtggctgcccagggcaaggccaagaagtgaaggccagcggggaggatactgtccccaggagtgcttcctggtgtgtgtattagaatcccttcctgccttgtttcatggcagtgaaatgcctcttggtcctgtccaagtgtgtctttcactgatttctgaatcatgttctagttgcttgaccctgccacatgggcccagtgttcatctgagcataactgtactaaatccttttaccagatcagtataataaaggagtgatgtg

SEQ ID NO: 2671 - DNA, 1707 bp, Homo sapiens
tattgcagcccaccgccatggccgcctacaaactggtgctgatccggcacggcragagcacatggaacctggagaaccgcttcagctgctggtacgacgccgatctgagcccggcgggccacgaggaggcgaagcgcggcgggcaggcgctacgagatgctggctatgagtttgacatctgcctcacctcagtgcagaagagagtgatccggaccctctggacagtgctagatgccattgatcagatgtggctgccagtggtgaggacttggcrcctcaatgagcrgcactatgggggtctaaccggtctcaataaagcagaaactgctgcaaagcatggtgaggcccaggtgaagatctggaggcgctcctatgatgtcccaccacctccgatggagcccgaccatcctttctacagcaacatcagtaaggatcgcaggtatgcagacctcacagaagatcagctaccctcctatgagagtccgaaggatactattgccagagctctgcccttctggaatgaagaaatagttccccagatcaaggaggggaaacgtgtactgattgcagcccatggcaacagcctccagggcattgccaagcatgtggagggtctctctgaagaggctatcatggagctgaacctgccgactggtattcccatcgtctatgaattggacaagaacttgaagcctatcaagcccatgcagtttctgggggatgaagagacggtgtgcaaagccatagaagctgtggctgcccagggcaaggccaagaagtgaaggccagcggggaggatactgtccccaggagcaccctccctgctggtcttgtccctctgcccctcccacctgcacatgtcacactgaccacatctgtagacatcttgagttgtagctgcagatggggaccagtggctcccattttcattttagccattttgtcgcctgcacccactcccttcatacaatctagtcagaatagcagttctagagcacaggttctcagtctaagctgtggaaaagctccccttatccaacagagtttaaaagtagtgacttgggtttttgtgagtgctttgtttactaaggactttggggaggaacatgctaagccacgaccaatgaggagaagcaacagagcctgtctgtccccatgagcagagtctgtcctctgctcttctgcagtcaggccactgcctgggggctctagtcattccagtggaagatgaatgtaatctgcatggtgatgtgacaactgtttcctccttgaccccagaggatctggctctaggttgggatcaatcctgaatttcgttatgtgttatatttacttttattaaaaaagtatagtatatattaataatacaaaacaataacccttctggggtttcttgtggcggttgaaatagtcccacatgtggtcatcagaaaataagccattcctcataccaatataggatcagctccttgacctctgaggggcaggagtgcttcctggtgtgtgtattagaatcccttcctgccttgtttcatggcagtgaaatgcctcttggtcctgtccaagtgtgtctttcactgatttctgaatcatgttctagttgcttgaccctgccacatgggcccagtgttcatctgagcataactgtactaaatccttttaccagatcagtataataaaggagtgatgtgcaattaaaaaaaaaaa

SEQ ID NO: 2672 - DNA, 1281 bp, Homo sapiens
tattgcagcccaccgccatggccgcctacaaactggtgctgatccggcacggcragagcacatggaacctggagaaccgcttcagctgctggtacgacgccgatctgagcccggcgggccacgaggaggcgaagcgcggcgggcaggcgctacgagatgctggctatgagtttgacatctgcctcacctcagtgcagaagagagtgatccggaccctctggacagtgctagatgccattgatcagatgtggctgccagtggtgaggacttggcrcctcaatgagcrgcactatgggggtctaaccggtctcaataaagcagaaactgctgcaaagcatggtgaggcccaggtgaagatctggaggcgctcctatgatgtcccaccacctccgatggagcccgaccatcctttctacagcaacatcagtaaggatcgcaggtatgcagacctcacagaagatcagctaccctcctatgagagtccgaaggatactattgccagagctctgcccttctggaatgaagaaatagttccccagatcaaggaggggaaacgtgtactgattgcagcccatggcaacagcctccagggcattgccaagcatgtggagggtctctctgaagaggctatcatggagctgaacctgccgactggtattcccatcgtctatgaattggacaagaacttgaagcctatcaagcccatgcagtttctgggggatgaagagacggtgtgcaaagccatagaagctgtggctgcccagggcaaggccaagaagtgaaggccagcggggaggatactgtccccaggagcaccctccctgctggtcttgtccctctgcccctcccacctgcacatgtcacactgaccacatctgtagacatcttgagttgtagctgcagatggggaccagtggctcccattttcattttagccattttgtcgcctgcacccactcccttcatacaatctagtcagaatagcagttctagagcacaggttctcagtctaagctgtggaaaagctccccttatccaacagagtttaaaagtagtgacttgggtttttgagtgcttcctggtgtgtgtattagaatcccttcctgccttgtttcatggcagtgaaatgcctcttggtcctgtccaagtgtgtctttcactgatttctgaatcatgttctagttgcttgaccctgccacatgggcccagtgttcatctgagcataactgtactaaatccttttaccagatcagtataataaaggagtgatgtgcaattaaa

SEQ ID NO: 2673 - DNA, 892 bp, Homo sapiens
attgcagcccaccgccatggccgcctacaaactggtgctgatccggcacggcragagcacatggaacctggagaaccgcttcagctgctggtacgacgccgatctgagcccggcgggccacgaggaggcgaagcgcggcgggcaggcgctacgagatgctggctatgagtttgacatctgcctcacctcagtgcagaagagagtgatccggaccctctggacagtgctagatgccattgatcagatgtggctgccagtggtgaggacttgtgtcccaccacctccgatggagcccgaccatcctttctacagcaacatcagtaaggatcgcaggtatgcagacctcacagaagatcagctaccctcctatgagagtccgaaggatactattgccagagctctgcccttctggaatgaagaaatagttccccagatcaaggaggggaaacgtgtactgattgcagcccatggcaacagcctccagggcattgccaagcatgtggagggtctctctgaagaggctatcatggagctgaacctgccgactggtattcccatcgtctatgaattggacaagaacttgaagcctatcaagcccatgcagtttctgggggatgaagagacggtgtgcaaagccatagaagctgtggctgcccagggcaaggccaagaagtgaaggccagggcaggagtgcttcctggtgtgtgtattagaatcccttcctgccttgtttcatggcagtgaaatgcctcttggtcctgtccaagtgtgtctttcactgatttctgaatcatgttctagttgcttgaccctgccacatgggcccagtgttcatctgagcataactgtactaaatccttttaccagatcagtataataaaggagtgatgtg

SEQ ID NO: 2674 - DNA, 1724 bp, Homo sapiens
ctttcccggaggctggcagatgcgcgtggtgcggctgctgcggctccgggcggctctgacgctgctcggggaggtcccccgccgcccggcctcccggggtgtcccgggctcgcgcaggacgcagaagggcagtggagccaggtgggagaaggagaagcacgaagacggggtgaagtggagacagctggagcacaagggcccgtacttcgcacccccatacgagccccttcccgayggagtgcgtttcttctatgaaggaaggcctgtgagattgagcgtggcagcggaggaggtcgccactttttatgggaggatgttagatcatgaatacacaacaaaggaggttttccggaagaacttcttcaatgactggcgaaaggaaatggcggtggaagagagggaagtcatcaagagcctggacaagtgtgacttcacggagatccacagatactttgtggacaaggccgcagcccggaaagtcctgagcagggaggagaagcagaagctaaaagaagaggcagaaaaacttcagcaagagttcggctactgtattttagatggtcaccaagaaaaaataggcaacttcaagattgagccgcctggcttgttccgtggccgtggcgaccatcccaagatggggatgctgaagagaaggatcacgccagaggatgtggttatcaactgcagcagggactcgaagatccccgagccgccggcggggcaccagtggaaggaggtgcgctccgataacaccgtcacgtggctggcagcttggaccgagagcrttcagaactccatcaagtacatcatgctgaacccttgctcgaagctgaagggggagacagcttggcagaagtttgaaacagctcgacgcctgcggggatttgtggacgagatccgctcccagtaccgggctgactggaagtctcgggaaatgaagacgagacagcgggcggtggccctgtatttcatcgataaggtaggtgtacaagaacttacagctctttatggagaacaaggacccccgggaygacctcttcgacaggctgaccacgaccagcctgaacaagcacctccaggagctgatggacgggctgacggccaaggtgttccggacctacaacgcctccatcactctgcaggagcagctgcgggccctgacgcgcgccgaggacagcatagcagctaagatcttatcctacaaccgagccaaccgagtcgtggccattctctgcaaccatcagcgagcaacccccagtacgttcgagaagtcgatgcagaatctccagacgaagatccaggcaaagaaggagcaggtggctgaggccagggcagagctgaggagggcgagggctgagcacaaagcccaaggggatggcaagtccaggagtgtcctggagaagaagaggyggctcctggagaagctgcaggagcagctggcgcagctgagtgtgcaggccacggacaaggaggagaacaagcaggtggccctgggcacgtccaagctcaactacctggaccccaggatcagcattgcctggtgcaagcggttcagggtgccagtggagaagatctacagcaaaacacagcgggagaggttcgcctgggctctcgccatggcaggagaagactttgaattctaacgacgagccgtgttgaaacttcttttgtatgtgtgtgtgtttttttcactattaaagcagtactggggaattttgtacaat

SEQ ID NO: 2675 - DNA, 2158 bp, Homo sapiens
ctttcccggaggctggcagatgcgcgtggtgcggctgctgcggctccgggcggctctgacgctgctcggggaggtcccccgccgcccggcctcccggggtgtcccgggctcgcgcaggacgcagaagggcagtggagccaggtgggagaaggagaagcacgaagacggggtgaagtggagacagctggagcacaagggcccgtacttcgcacccccatacgagccccttcccgayggagtgcgtttcttctatgaaggaaggcctgtgagattgagcgtggcagcggaggaggtcgccactttttatgggaggatgttagatcatgaatacacaacaaaggaggttttccggaagaacttcttcaatgactggcgaaaggaaatggcggtggaagagagggaagtcatcaagagcctggacaagtgtgacttcacggagatccacagatactttgtggacaaggccgcagcccggaaagtcctgagcagggaggagaagcagaagctaaaagaagaggcagaaaaacttcagcaagagttcggctactgtattttagatggtcaccaagaaaaaataggcaacttcaagattgagccgcctggcttgttccgtggccgtggcgaccatcccaagatggggatgctgaagagaaggatcacgccagaggatgtggttatcaactgcagcagggactcgaagatccccgagccgccggcggggcaccagtggaaggaggtgcgctccgataacaccgtcacgtggctggcagcttggaccgagagcrttcagaactccatcaagtacatcatgctgaacccttgctcgaagctgaagggggagacagcttggcagaagtttgaaacagctcgacgcctgcggggatttgtggacgagatccgctcccagtaccgggctgactggaagtctcgggaaatgaagacgagacagcgggcggtggccctgtatttcatcgataaggtagtgtacaagaacttacagctctttatggagaacaaggacccccgggaygacctcttcgacaggctgaccacgaccagcctgaacaagcacctccaggagctgatggacgggctgacggccaaggtgttccggacctacaacgcctccatcactctgcaggagcagctgcgggccctgacgcgcgccgaggacagcatagcagctaagatcttatcctacaaccgagccaaccgagtcgtggccattctctgcaaccatcagcgagcaacccccagtacgttcgagaagtcgatgcagaatctccagacgaagatccaggcaaagaaggagcaggtggctgaggccagggcagagctgaggagggcgagggctgagcacaaagcccaaggggatggcaagtccaggagtgtcctggagaagaagaggyggctcctggagaagctgcaggagcagctggcgcagctgagtgtgcaggccacggacaaggaggagaacaagcaggtggccctgggcacgtccaagctcaactacctggaccccaggatcagcattgcctggtgcaagcggttcagggtgccagtggagaagatctacagcaaaacacagcgggagaggttcgcctgggctctcgccatggcaggagaagactttgaattctaacgacgagccgtgttgaaacttcttttatgctttaggtactgattttctcctctcygcctggctggaacatccgtctgcatcggacgggcttccttctgcacctgtgacctcacaagggctctccttggggaggcaggaccagagcagccctgagtaaccgggcacagccgaggaacaggccccagggaggccaggacccgggtcctcacgcctgcggccacagaagcaccgtgtccctgcagctgtgagccaccaggcgtctgggtgggtggttactcagcaagtgccagtagagaaactgggtcccagagttggggttgctgtggactggatacttgtccctcacctccagttcacatgttaaagtcctcacccccagcaagacagtgttggaggtggggcctttgggaggggagcaggtttagagaagatcctgggggaccctcacgatgagatgagtgccctcatgggaagagacaccggagcctcctctccaggagcacacacgggacggtc

SEQ ID NO: 2676 - DNA, 1904 bp, Homo sapiens
cyctttcccggaggctggcagatgcgcgtggtgcggctgctgcggctccgggcggctctgacgctgctcggggaggtcccccgccgcccggcctcccggggtgtcccgggctcgcgcaggacgcagaagggcagtggagccaggcacaagccrcatggatccagtggccctggtggccgttggtggtcccaggcgctttcctggaggacatgtgagaagccctgccggcgcatactgggcctggggtagccgcatggggatgggtctctgcgcatgaaatgctggagtttccgaagagctggagagttgacagcctcactggtgggagaaggagaagcacgaagacggggtgaagtggagacagctggagcacaagggcccgtacttcgcacccccatacgagccccttcccgayggagtgcgtttcttctatgaaggaaggcctgtgagattgagcgtggcagcggaggaggtcgccactttttatgggaggatgttagatcatgaatacacaacaaaggaggttttccggaagaacttcttcaatgactggcgaaaggaaatggcggtggaagagagggaagtcatcaagagcctggacaagtgtgacttcacggagatccacagatactttgtggacaaggccgcagcccggaaagtcctgagcagggaggagaagcagaagctaaaagaagaggcagaaaaacttcagcaagagttcggctactgtattttagatggtcaccaagaaaaaataggcaacttcaagattgagccgcctggcttgttccgtggccgtggcgaccatcccaagatggggatgctgaagagaaggatcacgccagaggatgtggttatcaactgcagcagggactcgaagatccccgagccgccggcggggcaccagtggaaggaggtgcgctccgataacaccgtcacgtggctggcagcttggaccgagagcrttcagaactccatcaagtacatcatgctgaacccttgctcgaagctgaagggggagacagcttggcagaagtttgaaacagctcgacgcctgcggggatttgtggacgagatccgctcccagtaccgggctgactggaagtctcgggaaatgaagacgagacagcgggcggtggccctgtatttcatcgataaggtaggtgtacaagaacttacagctctttatggagaacaaggacccccgggaygacctcttcgacaggctgaccacgaccagcctgaacaagcacctccaggagctgatggacgggctgacggccaaggtgttccggacctacaacgcctccatcactctgcaggagcagctgcgggccctgacgcgcgccgaggacagcatagcagctaagatcttatcctacaaccgagccaaccgagtcgtggccattctctgcaaccatcagcgagcaacccccagtacgttcgagaagtcgatgcagaatctccagacgaagatccaggcaaagaaggagcaggtggctgaggccagggcagagctgaggagggcgagggctgagcacaaagcccaaggggatggcaagtccaggagtgtcctggagaagaagaggyggctcctggagaagctgcaggagcagctggcgcagctgagtgtgcaggccacggacaaggaggagaacaagcaggtggccctgggcacgtccaagctcaactacctggaccccaggatcagcattgcctggtgcaagcggttcagggtgccagtggagaagatctacagcaaaacacagcgggagaggttcgcctgggctctcgccatggcaggagaagactttgaattctaacgacgagccgtgttgaaacttcttttgtatgtgtgtgtgtttttttcactattaaagcagtactggggaattttgtacaat

SEQ ID NO: 2677 - DNA, 1635 bp, Homo sapiens
ctggctgcactgctggacccccttccacccagctcctcggaggcagggctctctcataagcagccaggtgggagaaggagaagcacgaagacggggtgaagtggagacagctggagcacaagggcccgtacttcgcacccccatacgagccccttcccgayggagtgcgtttcttctatgaaggaaggcctgtgagattgagcgtggcagcggaggaggtcgccactttttatgggaggatgttagatcatgaatacacaacaaaggaggttttccggaagaacttcttcaatgactggcgaaaggaaatggcggtggaagagagggaagtcatcaagagcctggacaagtgtgacttcacggagatccacagatactttgtggacaaggccgcagcccggaaagtcctgagcagggaggagaagcagaagctaaaagaagaggcagaaaaacttcagcaagagttcggctactgtattttagatggtcaccaagaaaaaataggcaacttcaagattgagccgcctggcttgttccgtggccgtggcgaccatcccaagatggggatgctgaagagaaggatcacgccagaggatgtggttatcaactgcagcagggactcgaagatccccgagccgccggcggggcaccagtggaaggaggtgcgctccgataacaccgtcacgtggctggcagcttggaccgagagcrttcagaactccatcaagtacatcatgctgaacccttgctcgaagctgaagggggagacagcttggcagaagtttgaaacagctcgacgcctgcggggatttgtggacgagatccgctcccagtaccgggctgactggaagtctcgggaaatgaagacgagacagcgggcggtggccctgtatttcatcgataagggtgtacaagaacttacagctctttatggagaacaaggacccccgggaygacctcttcgacaggctgaccacgaccagcctgaacaagcacctccaggagctgatggacgggctgacggccaaggtgttccggacctacaacgcctccatcactctgcaggagcagctgcgggccctgacgcgcgccgaggacagcatagcagctaagatcttatcctacaaccgagccaaccgagtcgtggccattctctgcaaccatcagcgagcaacccccagtacgttcgagaagtcgatgcagaatctccagacgaagatccaggcaaagaaggagcaggtggctgaggccagggcagagctgaggagggcgagggctgagcacaaagcccaaggggatggcaagtccaggagtgtcctggagaagaagaggyggctcctggagaagctgcaggagcagctggcgcagctgagtgtgcaggccacggacaaggaggagaacaagcaggtggccctgggcacgtccaagctcaactacctggaccccaggatcagcattgcctggtgcaagcggttcagggtgccagtggagaagatctacagcaaaacacagcgggagaggttcgcctgggctctcgccatggcaggagaagactttgaattctaacgacgagccgtgttgaaacttcttttgtatgtgtgtgtgtttttttcactattaaagcagtactgggga

SEQ ID NO: 2678 - DNA, 1813 bp, Homo sapiens
tggtgcggctgctgcggctccgggcggctctgacgctgctcggggaggtcccccgccgcccggcctcccggggtgtcccgggctcgcgcaggacgcagaagggcagtggagccagacccttcagagacttcctgttgctctgaggacactcatcccagccgaccaggcccaccaggcccccaacagcactacctggctggggtcacrtgcaggtctcctggctctggcaggtgggagaaggagaagcacgaagacggggtgaagtggagacagctggagcacaagggcccgtacttcgcacccccatacgagccccttcccgayggagtgcgtttcttctatgaaggaaggcctgtgagattgagcgtggcagcggaggaggtcgccactttttatgggaggatgttagatcatgaatacacaacaaaggaggttttccggaagaacttcttcaatgactggcgaaaggaaatggcggtggaagagagggaagtcatcaagagcctggacaagtgtgacttcacggagatccacagatactttgtggacaaggccgcagcccggaaagtcctgagcagggaggagaagcagaagctaaaagaagaggcagaaaaacttcagcaagagttcggctactgtattttagatggtcaccaagaaaaaataggcaacttcaagattgagccgcctggcttgttccgtggccgtggcgaccatcccaagatggggatgctgaagagaaggatcacgccagaggatgtggttatcaactgcagcagggactcgaagatccccgagccgccggcggggcaccagtggaaggaggtgcgctccgataacaccgtcacgtggctggcagcttggaccgagagcrttcagaactccatcaagtacatcatgctgaacccttgctcgaagctgaagggggagacagcttggcagaagtttgaaacagctcgacgcctgcggggatttgtggacgagatccgctcccagtaccgggctgactggaagtctcgggaaatgaagacgagacagcgggcggtggccctgtatttcatcgataaggtaggtgtacaagaacttacagctctttatggagaacaaggacccccgggaygacctcttcgacaggctgaccacgaccagcctgaacaagcacctccaggagctgatggacgggctgacggccaaggtgttccggacctacaacgcctccatcactctgcaggagcagctgcgggccctgacgcgcgccgaggacagcatagcagctaagatcttatcctacaaccgagccaaccgagtcgtggccattctctgcaaccatcagcgagcaacccccagtacgttcgagaagtcgatgcagaatctccagacgaagatccaggcaaagaaggagcaggtggctgaggccagggcagagctgaggagggcgagggctgagcacaaagcccaaggggatggcaagtccaggagtgtcctggagaagaagaggyggctcctggagaagctgcaggagcagctggcgcagctgagtgtgcaggccacggacaaggaggagaacaagcaggtggccctgggcacgtccaagctcaactacctggaccccaggatcagcattgcctggtgcaagcggttcagggtgccagtggagaagatctacagcaaaacacagcgggagaggttcgcctgggctctcgccatggcaggagaagactttgaattctaacgacgagccgtgttgaaacttcttttgtatgtgtgtgtgtttttttcactattaaagcagtactggggaattttgtacaat

SEQ ID NO: 2679 - DNA, 2213 bp, Homo sapiens
ctttcccggaggctggcagatgcgcgtggtgcggctgctgcggctccgggcggctctgacgctgctcggggaggtcccccgccgcccggcctcccggggtgtcccgggctcgcgcaggacgcagaagggcagtggagccaggtgggagaaggagaagcacgaagacggggtgaagtggagacagctggagcacaagggcccgtacttcgcacccccatacgagccccttcccgayggagtgcgtttcttctatgaaggaaggcctgtgagattgagcgtggcagcggaggaggtcgccactttttatgggaggatgttagatcatgaatacacaacaaaggaggttttccggaagaacttcttcaatgactggcgaaaggctccgcttctggaccctcttcctttgtcctgatgccacccctctgcctttcacgacagctttgtgaggtggcaccagctgcccggcatcctcattctccctctggtcagcacttcttccagtcactagcagagctaggaagggaggcagtgtcacaaagcagcagaacaggagtgggtggcacatccggcggccccgggagacacagggacggaccctgagcccgtggttgtggccgagcagggctccatcctggcacagatggtgtcgtacctgagctcctcggaagaggcggatcatccccatcccacagcgagacacgtttgacagcagctcctgaggtctcacaggcctaagtggccgagcctggactgggaccgtgagctggtgcccgcaagcctgggcttttgtccatgggctgtgcagagtttttgttgtgtaggaaacgaaaggagaaacagttgcctgtgatctgcggctctccctcaggaaatggcggtggaagagagggaagtcatcaagagcctggacaagtgtgacttcacggagatccacagatactttgtggacaaggccgcagcccggaaagtcctgagcagggaggagaagcagaagctaaaagaagaggcagaaaaacttcagcaagagttcggctactgtattttagatggtcaccaagaaaaaataggcaacttcaagattgagccgcctggcttgttccgtggccgtggcgaccatcccaagatggggatgctgaagagaaggatcacgccagaggatgtggttatcaactgcagcagggactcgaagatccccgagccgccggcggggcaccagtggaaggaggtgcgctccgataacaccgtcacgtggctggcagcttggaccgagagcrttcagaactccatcaagtacatcatgctgaacccttgctcgaagctgaagggggagacagcttggcagaagtttgaaacagctcgacgcctgcggggatttgtggacgagatccgctcccagtaccgggctgactggaagtctcgggaaatgaagacgagacagcgggcggtggccctgtatttcatcgataaggtaggtgtacaagaacttacagctctttatggagaacaaggacccccgggaygacctcttcgacaggctgaccacgaccagcctgaacaagcacctccaggagctgatggacgggctgacggccaaggtgttccggacctacaacgcctccatcactctgcaggagcagctgcgggccctgacgcgcgccgaggacagcatagcagctaagatcttatcctacaaccgagccaaccgagtcgtggccattctctgcaaccatcagcgagcaacccccagtacgttcgagaagtcgatgcagaatctccagacgaagatccaggcaaagaaggagcaggtggctgaggccagggcagagctgaggagggcgagggctgagcacaaagcccaaggggatggcaagtccaggagtgtcctggagaagaagaggyggctcctggagaagctgcaggagcagctggcgcagctgagtgtgcaggccacggacaaggaggagaacaagcaggtggccctgggcacgtccaagctcaactacctggaccccaggatcagcattgcctggtgcaagcggttcagggtgccagtggagaagatctacagcaaaacacagcgggagaggttcgcctgggctctcgccatggcaggagaagactttgaattctaacgacgagccgtgttgaaacttcttttgtatgtgtgtgtgtttttttcactattaaagcagtactggggaattttgtacaat

SEQ ID NO: 2680 - DNA, 1917 bp, Homo sapiens
tctgacgctgctcggggaggtcccccgccgcccggcctcccggggtgtcccgggctcgcgcaggacgcagaagggcagtggagccaggagcttgggacccaaagagagccccagatggggcagggtgtcttgggaggagggagttctggcctgygcttggagctggggctggctgtgggccctgcattgaggcacatctctccgagggtgcacaggcagacccttcagagacttcctgttgctctgaggacactcatcccagccgaccaggcccaccaggcccccaacagcactacctggctggggtcacrtgcaggtctcctggctctggcaggtgggagaaggagaagcacgaagacggggtgaagtggagacagctggagcacaagggcccgtacttcgcacccccatacgagccccttcccgayggagtgcgtttcttctatgaaggaaggcctgtgagattgagcgtggcagcggaggaggtcgccactttttatgggaggatgttagatcatgaatacacaacaaaggaggttttccggaagaacttcttcaatgactggcgaaaggaaatggcggtggaagagagggaagtcatcaagagcctggacaagtgtgacttcacggagatccacagatactttgtggacaaggccgcagcccggaaagtcctgagcagggaggagaagcagaagctaaaagaagaggcagaaaaacttcagcaagagttcggctactgtattttagatggtcaccaagaaaaaataggcaacttcaagattgagccgcctggcttgttccgtggccgtggcgaccatcccaagatggggatgctgaagagaaggatcacgccagaggatgtggttatcaactgcagcagggactcgaagatccccgagccgccggcggggcaccagtggaaggaggtgcgctccgataacaccgtcacgtggctggcagcttggaccgagagcrttcagaactccatcaagtacatcatgctgaacccttgctcgaagctgaagggggagacagcttggcagaagtttgaaacagctcgacgcctgcggggatttgtggacgagatccgctcccagtaccgggctgactggaagtctcgggaaatgaagacgagacagcgggcggtggccctgtatttcatcgataaggtaggtgtacaagaacttacagctctttatggagaacaaggacccccgggaygacctcttcgacaggctgaccacgaccagcctgaacaagcacctccaggagctgatggacgggctgacggccaaggtgttccggacctacaacgcctccatcactctgcaggagcagctgcgggccctgacgcgcgccgaggacagcatagcagctaagatcttatcctacaaccgagccaaccgagtcgtggccattctctgcaaccatcagcgagcaacccccagtacgttcgagaagtcgatgcagaatctccagacgaagatccaggcaaagaaggagcaggtggctgaggccagggcagagctgaggagggcgagggctgagcacaaagcccaaggggatggcaagtccaggagtgtcctggagaagaagaggyggctcctggagaagctgcaggagcagctggcgcagctgagtgtgcaggccacggacaaggaggagaacaagcaggtggccctgggcacgtccaagctcaactacctggaccccaggatcagcattgcctggtgcaagcggttcagggtgccagtggagaagatctacagcaaaacacagcgggagaggttcgcctgggctctcgccatggcaggagaagactttgaattctaacgacgagccgtgttgaaacttcttttgtatgtgtgtgtgtttttttcactattaaagcagtactggggaattttgtacaat

SEQ ID NO: 2681 - DNA, 1967 bp, Homo sapiens
tgctgcggctccgggcggctctgacgctgctcggggaggtcccccgccgcccggcctcccggggtgtcccgggctcgcgcaggacgcagaagggcagtggagccaggtgggagaaggagaagcacgaagacggggtgaagtggagacagctggagcacaagggcccgtacttcgcacccccatacgagccccttcccgayggagtgcgtttcttctatgaaggaaggcctgtgagattgagcgtggcagcggaggaggtcgccactttttatgggaggatgttagatcatgaatacacaacaaaggaggttttccggaagaacttcttcaatgactggcgaaaggaaatggcggtggaagagagggaagtcatcaagagcctggacaagtgtgacttcacggagatccacagatactttgtggacaaggccgcagcccggaaagtcctgagcagggaggagaagcagaagctaaaagaagaggcagaaaaacttcagcaagagttcggctactgtattttagatggtcaccaagaaaaaataggcaacttcaagattgagccgcctggcttgttccgtggccgtggcgaccatcccaagatggggatgctgaagagaaggatcacgccagaggatgtggttatcaactgcagcagggactcgaagatccccgagccgccggcggggcaccagtggaaggaggtgcgctccgataacaccgtcacgtggctggcagcttggaccgagagcrttcagaactccatcaagtacatcatgctgaacccttgctcgaagctgaagggggagacagcttggcagaagtttgaaacagctcgacgcctgcggggatttgtggacgagatccgctcccagtaccgggctgactggaagtctcgggaaatgaagacgagacagcgggcggtggccctgtatttcatcgataaggtaggtgtacaagaacttacagctctttatggagaacaaggacccccgggaygacctcttcgacaggctgaccacgaccagcctgaacaagcacctccaggagctgatggacgggctgacggccaaggtgttccggacctacaacgcctccatcactctgcaggagcagctgcgggccctgacgcgcgccgaggacagcatagcagctaagatcttatcctacaaccgagccaaccgagtcgtggccattctctgcaaccatcagcgagcaacccccagtacgttcgagaagtcgatgcagaatctccagacgaagatccaggcaaagaaggagcaggtggctgaggccagggcagagctgaggagggcgagggctgagcacaaagcccaaggggatggcaagtccaggagtgtcctggagaagaagaggyggctcctggagaagctgcaggagcagctggcgcagctgagtgtgcaggccacggacaaggaggagaacaagcaggtggccctgggcacgtccaagctcaactacctggaccccaggatcagcattgcctggtgcgtgtgcctggggtctcagttcccacctgtggcctatggggggcctgggttttccaggaggcctctgttcagtcccagcattgcccttgtcccgtgtcccctggggtcagcacaggccctccctgtgacmrggacccatgatgctgagtcctgtgtcatcagctctccctgccctgaacgttcggatggacagggtgaagtgggggtgctgacagtggcctgggactcggaggcatcaggagggcctgtggagctcagcctgcccacagggagtgggaggtggctgagcgccctgctcggtggayacctrrgccacagcaggttgtctttgacacctcgctgatgctccagggtggcggcaygcgtggggtggggttggcctagaggagcaggtcccagctacaccaggcggctctggtgtctctgctgcatggaggaygctcgcccttgccgagcacc

SEQ ID NO: 2682 - DNA, 939 bp, Homo sapiens
ggcgcgcggaaggggtcctgccaccgcgccacttggcctgcctccgtcccgccgcgccacttcgcctgcctccgtcccccgcccgccgcgccatgcctgtggccggctcggagctgccgcgccggcccttgccccccgccgcacaggagcgggacgccgagccgcgtccgccgcacggggagctgcagtacctggggcagatccaacacatcctccgctgcggcgtcaggaaggacgaccgcacgggcaccggcaccctgtcggtattcggcatgcaggcgcgctacagcctgagagatgaattccctctgctgacaaccaaacgtgtgttctggaagggtgttttggaggagttgctgtggtttatcaagggatccacaaatgctaaasagctgtcttccaagggagtgaaaatctgggatgccaatggatcccgagactttttggacagcctgggattctccaccagagargaaggggacttgggcccagtttatggcttccagtggaggcattttggggcagaatacagagatatggaatcagattattcaggacaggkagttgaccaactgcaaagagtgattgacaccatcaaaaccaaccctgacgacagaagaatcatcatgtgcgcttggaatccaagaggttgaaagaaccccgtcgtcttcatttatactaaccatactcttagagggaagcaatctggttttgtgcagaggcacctgagggaggcaggaccctgggaacttcccccagccacatggttgattgtgtgacgttgggcaagtcacattttgctgcactttcaccttcagatcatgaggttgggcccagaggattttttttttttttttttttttttgagacagagttttgctctgttgcccaggctggaatgcaacggcgtgatcttggctcactgtaacctctgcctcc

SEQ ID NO: 2683 - DNA, 1539 bp, Homo sapiens
cggagcgcgggacggccgcgggaaaaggcgcgcggaaggggtcctgccaccgcgccacttggcctgcctccgtcccgccgcgccacttcgcctgcctccgtcccccgcccgccgcgccatgcctgtggccggctcggagctgccgcgccggcccttgccccccgccgcacaggagcgggacgccgagccgcgtccgccgcacggggagctgcagtacctggggcagatccaacacatcctccgctgcggcgtcaggaaggacgaccgcacgggcaccggcaccctgtcggtattcggcatgcaggcgcgctacagcctgagagatgaattccctctgctgacaaccaaacgtgtgttctggaagggtgttttggaggagttgctgtggtttatcaagggatccacaaatgctaaasagctgtcttccaagggagtgaaaatctgggatgccaatggatcccgagactttttggacagcctgggattctccaccagagargaaggggacttgggcccagtttatggcttccagtggaggcattttggggcagaatacagagatatggaatcagatcttcctctgatggcgctgcctccatgccatgccctctgccagttctatgtggtgaacagtgagctgtcctgccagctgtaccagagatcgggagacatgggcctcggtgtgcctttcaacatcgccagctacgccctgctcacgtacatgattgcgcacatcacgggcctgaagccaggtgactttatacacactttgggagatgcacatatttacctgaatcacatcgagccactgaaaattcagcttcagcgagaacccagacctttcccaaagctcaggattcttcgaaaagttgagaaaattgatgacttcaaagctgaagactttcagattgaagggtacaatccgcatccaactattaaaatggaaatggctgtttagggtgctttcaaaggagctygaaggatattgtcagtctttaggggttgggctggatgccgaggtaaaagttctttttgctctaaaagaaraaggaactaggtcaaaaatctgtccgtgacctatcagttattaatttttaaggatgttgccactggcaaatgtaactgtgccagttctttccataataaaaggctttgagttaactcactgagggtatctgacaatgctgaggttatgaacaaagtgaggagaatgaaatgtatgtgctcttagcaaaaacatgtatgtgcatttcaatcccacgtacttataaagaaggttggtgaatttcacaagctatttttggaatatttttagaatattttaagaatttcacaagctattccctcaaatctgagggagctgagtaacaccatcgatcatgatgtagagtgtggttatgaactttaaagttatagttgttttatatgttgctataataaagaagtgttctgcattcgtccacgctttgttcattctgtactgccacttatctgctcagttccttcctaaaatagattaaagaactctccttaagtaaa

SEQ ID NO: 2684 - DNA, 1392 bp, Homo sapiens
cggagcgcgggacggccgcgggaaaaggcgcgcggaaggggtcctgccaccgcgccacttggcctgcctccgtcccgccgcgccacttcgcctgcctccgtcccccgcccgccgcgccatgcctgtggccggctcggagctgccgcgccggcccttgccccccgccgcacaggagcgggacgccgagccgcgtccgccgcacggggagctgcagtacctggggcagatccaacacatcctccgctgcggcgtcaggaaggacgaccgcacgggcaccggcaccctgtcggtattcggcatgcaggcgcgctacagcctgagagattattcaggacaggkagttgaccaactgcaaagagtgattgacaccatcaaaaccaaccctgacgacagaagaatcatcatgtgcgcttggaatccaagagatcttcctctgatggcgctgcctccatgccatgccctctgccagttctatgtggtgaacagtgagctgtcctgccagctgtaccagagatcgggagacatgggcctcggtgtgcctttcaacatcgccagctacgccctgctcacgtacatgattgcgcacatcacgggcctgaagccaggtgactttatacacactttgggagatgcacatatttacctgaatcacatcgagccactgaaaattcagcttcagcgagaacccagacctttcccaaagctcaggattcttcgaaaagttgagaaaattgatgacttcaaagctgaagactttcagattgaagggtacaatccgcatccaactattaaaatggaaatggctgtttagggtgctttcaaaggagctygaaggatattgtcagtctttaggggttgggctggatgccgaggtaaaagttctttttgctctaaaagaaraaggaactaggtcaaaaatctgtccgtgacctatcagttattaatttttaaggatgttgccactggcaaatgtaactgtgccagttctttccataataaaaggctttgagttaactcactgagggtatctgacaatgctgaggttatgaacaaagtgaggagaatgaaatgtatgtgctcttagcaaaaacatgtatgtgcatttcaatcccacgtacttataaagaaggttggtgaatttcacaagctatttttggaatatttttagaatattttaagaatttcacaagctattccctcaaatctgagggagctgagtaacaccatcgatcatgatgtagagtgtggttatgaactttaaagttatagttgttttatatgttgctataataaagaagtgttctgcattcgtccacgctttgttcattctgtactgccacttatctgctcagttccttcctaaaatagattaaagaactctccttaagtaaa

SEQ ID NO: 2685 - DNA, 1641 bp, Homo sapiens
cggagcgcgggacggccgcgggaaaaggcgcgcggaaggggtcctgccaccgcgccacttggcctgcctccgtcccgccgcgccacttcgcctgcctccgtcccccgcccgccgcgccatgcctgtggccggctcggagctgccgcgccggcccttgccccccgccgcacaggagcgggacgccgagccgcgtccgccgcacggggagctgcagtacctggggcagatccaacacatcctccgctgcggcgtcaggaaggacgaccgcacgggcaccggcaccctgtcggtattcggcatgcaggcgcgctacagcctgagagatgaattccctctgctgacaaccaaacgtgtgttctggaagggtgttttggaggagttgctgtggtttatcaagggatccacaaatgctaaasagctgtcttccaagggagtgaaaatctgggatgccaatggatcccgagactttttggacagcctgggattctccaccagagargaaggggacttgggcccagtttatggcttccagtggaggcattttggggcagaatacagagatatggaatcagattattcaggacaggkagttgaccaactgcaaagagtgattgacaccatcaaaaccaaccctgacgacagaagaatcatcatgtgcgcttggaatccaagagatcttcctctgatggcgctgcctccatgccatgccctctgccagttctatgtggtgaacagtgagctgtcctgccagctgtaccagagatcgggagacatgggcctcggtgtgcctttcaacatcgccagctacgccctgctcacgtacatgattgcgcacatcacgggcctgaagccaggtgactttatacacactttgggagatgcacatatttacctgaatcacatcgagccactgaaaattcagcttcagcgagaacccagacctttcccaaagctcaggattcttcgaaaagttgagaaaattgatgacttcaaagctgaagactttcagattgaagggtacaatccgcatccaactattaaaatggaaatggctgtttagggtgctttcaaaggagctygaaggatattgtcagtctttaggggttgggctggatgccgaggtaaaagttctttttgctctaaaagaaraaggaactaggtcaaaaatctgtccgtgacctatcagttattaatttttaaggatgttgccactggcaaatgtaactgtgccagttctttccataataaaaggctttgagttaactcactgagggtatctgacaatgctgaggttatgaacaaagtgaggagaatgaaatgtatgtgctcttagcaaaaacatgtatgtgcatttcaatcccacgtacttataaagaaggttggtgaatttcacaagctatttttggaatatttttagaatattttaagaatttcacaagctattccctcaaatctgagggagctgagtaacaccatcgatcatgatgtagagtgtggttatgaactttaaagttatagttgttttatatgttgctataataaagaagtgttctgcattcgtccacgctttgttcattctgtactgccacttatctgctcagttccttcctaaaatagattaaagaactctccttaagtaaa

SEQ ID NO: 2686 - DNA, 1362 bp, Homo sapiens
agacggggtttcactatgttggccaggctagtctcraactcaagttggcctcaagtgatctgcccaccctggcgtcccagtgttgggatttcaggcatgagccactgtgcctggccatgtaatagagacttttaatataggagggtgtaccagaagcaccagtttcctgtggcaaacagaattattcctgctgtatttgtaatytggtgccacgaggtagcccagatcccttcagctctgatggaagagcattgcttcagccgtaaatggacacctgcagaaaccttgcaccgatggatagtctccctcagctccgtgccatcgctgcagrggctgttatggacatcactgcagcccagtggctctctctcctggtctccaccatatgagttggcttctgtttctctcctgttttactttgcctttagctgtggtctttcaaaccaccatccctccttatcttcctctgctggttcctcagatcttcctctgatggcgctgcctccatgccatgccctctgccagttctatgtggtgaacagtgagctgtcctgccagctgtaccagagatcgggagacatgggcctcggtgtgcctttcaacatcgccagctacgccctgctcacgtacatgattgcgcacatcacgggcctgaagccaggtgactttatacacactttgggagatgcacatatttacctgaatcacatcgagccactgaaaattcagcttcagcgagaacccagacctttcccaaagctcaggattcttcgaaaagttgagaaaattgatgacttcaaagctgaagactttcagattgaagggtacaatccgcatccaactattaaaatggaaatggctgtttagggtgctttcaaaggagctygaaggatattgtcagtctttaggggttgggctggatgccgaggtaaaagttctttttgctctaaaagaaraaggaactaggtcaaaaatctgtccgtgacctatcagttattaatttttaaggatgttgccactggcaaatgtaactgtgccagttctttccataataaaaggctttgagttaactcactgagggtatctgacaatgctgaggttatgaacaaagtgaggagaatgaaatgtatgtgctcttagcaaaaacatgtatgtgcatttcaatcccacgtacttataaagaaggttggtgaatttcacaagctatttttggaatatttttagaatattttaagaatttcacaagctattccctcaaatctgagggagctgagtaacaccatcgatcatgatgtagagtgtggttatgaactttaaagttatagttgttttatatgttgctataataaagaagtgttctgc

SEQ ID NO: 2687 - DNA, 1988 bp, Homo sapiens
accgtcctgccgtcctggatcctgcgccagctgcgcgggggaggggactcgaaggtgtgtgagccaggggctgaccttgaccgctcagataaatggagcgcagccttgacacaggggtggaggtggttttgaatggggaaacccattcgtggtgaagcagattcactgtagctagcggaaaagccctccggcccacggacccatctagagacgaatacatagcagctgctgtggctgattggcgtgggacagcgtggggagttttgtctgaggagagggatccacttttctgcagctccaagcccaggggcctttgatgagccatagacctcatttttaacccacctttctgcttagacattgagcaagttacttctcatatagcttccctatatgttaaaaatggagaaaataatgcttagtaggcaattctgataaaagcaggtgcttgcaaaaatctctctgttgtctgaatataaactgtaccacaagcgagtgcggatgaacgaggactgcatttaaagataatgtttttcagatgaattccctctgctgacaaccaaacgtgtgttctggaagggtgttttggaggagttgctgtggtttatcaagggatccacaaatgctaaasagctgtcttccaagggagtgaaaatctgggatgccaatggatcccgagactttttggacagcctgggattctccaccagagargaaggggacttgggcccagtttatggcttccagtggaggcattttggggcagaatacagagatatggaatcagattattcaggacaggkagttgaccaactgcaaagagtgattgacaccatcaaaaccaaccctgacgacagaagaatcatcatgtgcgcttggaatccaagagatcttcctctgatggcgctgcctccatgccatgccctctgccagttctatgtggtgaacagtgagctgtcctgccagctgtaccagagatcgggagacatgggcctcggtgtgcctttcaacatcgccagctacgccctgctcacgtacatgattgcgcacatcacgggcctgaagccaggtgactttatacacactttgggagatgcacatatttacctgaatcacatcgagccactgaaaattcagcttcagcgagaacccagacctttcccaaagctcaggattcttcgaaaagttgagaaaattgatgacttcaaagctgaagactttcagattgaagggtacaatccgcatccaactattaaaatggaaatggctgtttagggtgctttcaaaggagctygaaggatattgtcagtctttaggggttgggctggatgccgaggtaaaagttctttttgctctaaaagaaraaggaactaggtcaaaaatctgtccgtgacctatcagttattaatttttaaggatgttgccactggcaaatgtaactgtgccagttctttccataataaaaggctttgagttaactcactgagggtatctgacaatgctgaggttatgaacaaagtgaggagaatgaaatgtatgtgctcttagcaaaaacatgtatgtgcatttcaatcccacgtacttataaagaaggttggtgaatttcacaagctatttttggaatatttttagaatattttaagaatttcacaagctattccctcaaatctgagggagctgagtaacaccatcgatcatgatgtagagtgtggttatgaactttaaagttatagttgttttatatgttgctataataaagaagtgttctgcattcgtccacgctttgttcattctgtactgccacttatctgctcagttccttcctaaaatagattaaagaactctccttaagtaaacatgtgctgtattctggtttggatgctacttaaaagagtatattttagaaataatagtgaatatattttgccctatttttctcattttaactgcatcttatcctcaaaatataatgaccatttaggatagag

SEQ ID NO: 2688 - DNA, 1015 bp, Homo sapiens
aagctgctgcgtgggccaagttacttgtgcagattattcaggacaggkagttgaccaactgcaaagagtgattgacaccatcaaaaccaaccctgacgacagaagaatcatcatgtgcgcttggaatccaagagatcttcctctgatggcgctgcctccatgccatgccctctgccagttctatgtggtgaacagtgagctgtcctgccagctgtaccagagatcgggagacatgggcctcggtgtgcctttcaacatcgccagctacgccctgctcacgtacatgattgcgcacatcacgggcctgaagccaggtgactttatacacactttgggagatgcacatatttacctgaatcacatcgagccactgaaaattcagcttcagcgagaacccagacctttcccaaagctcaggattcttcgaaaagttgagaaaattgatgacttcaaagctgaagactttcagattgaagggtacaatccgcatccaactattaaaatggaaatggctgtttagggtgctttcaaaggagctygaaggatattgtcagtctttaggggttgggctggatgccgaggtaaaagttctttttgctctaaaagaaraaggaactaggtcaaaaatctgtccgtgacctatcagttattaatttttaaggatgttgccactggcaaatgtaactgtgccagttctttccataataaaaggctttgagttaactcactgagggtatctgacaatgctgaggttatgaacaaagtgaggagaatgaaatgtatgtgctcttagcaaaaacatgtatgtgcatttcaatcccacgtacttataaagaaggttggtgaatttcacaagctatttttggaatatttttagaatattttaagaatttcacaagctattccctcaaatctgagggagctgagtaacaccatcgatcatgatgtagagtgtggttatgaactttaaagttatagttgttttatatgttgctataataaagaagtgttctgc

SEQ ID NO: 2689 - DNA, 5113 bp, Homo sapiens
attgtgattttgtttgcagttactgtaaaatggggaaaggagaaatttgaaggtgtagaattgaatacagatgaacctccaatggtattcaaggctcagctgtttgcgttgactggagtccagcctgccagacagaaagttatggtgaaaggaggaacgctaaaggatgatgattggggaaacatcaaaataaaaaayggaatgactctactaatgatggggtcagcagatgctcttccagaagaaccctcagccaaaactgtcttcgtagaagacatgacagaagaacagttagcatctgctatggagttaccatgtggattgacaaaccttggtaacacttgttacatgaatgccacagttcagtgtattcgttctgtgcctgaactcaaagatgcccttaaaagcccttagagatttgtttgatyccatggataaaacttcttccagtattccacctattattctactgcagtttttgcacatggctttcccacagtttgccgagaaaggtgaacaaggacagtatcttcaacaggatgctaatgaatgttggatacaaatgatgcgagtattgcaacagaaattggaagcmatagaggatgattctgttaaagagacagactcctcatctgcatcggcagcgacaccttctaaaaagaaaagtttaatcgatcagttcttcggtgttgagtttgaaactaccatgaaatgtacagaatctgaagaagaagaagtcaccaaaggaaaggaaaatcaacttcagcttagctgttttatcaatcaggaagtcaagtatctttttacaggacttaaattgcgacttcaggaagaaatcaccaaacagtctccaacgttgcaaagaaatgccttgtatatcaaatcttccaagatcagccggctgcctgcttacttgaccattcagatggttcgatttttttataaagagaaggaatctgtgaatgccaaagttcttaaggatgttaaatttcctcttatgttggatatgtatgaactgtgtacaccagaacttcaagagaaaatggtgtcttttcgatccaaattcaaggatctagaagataaaaaagtgaatcagcagccaaatacaagtgacaaaaagagtagtccccagaaagaagttaagtatgaacccttttcttttgctgatggtaagtaacattctcattttaattgagttattgtatgtgggtctttttaaggtaaaatttacatcttaccccatatttacttattctgatgtgcttttcaaacaaaatgtcaggtttcttgaacaatttaccttaatgacatatagtaaatttactcattggcatacagttctatgagtaagttacttattaaaacatcaatcatgaagccttaactatgattggacagtagtatcttattggattctgataatactttcgtaatgtgaactttrgagttattcttgttacttagcttgagaaggcacatgtctattcattgtctaatattaatggatttacatctttctttagatattggctccartaattgtggatactatgacttacaagcagtactaacacaccagggaaggtctagttcttcaggtcattatgtatcatgggtgaaaaggaaacaagatgaatggattaagtttgatgatgacaaagtcagcatcgtaacaccagaagatatcttacggctttctggtggtggagactggcatatcgcttacgttctactctatgggcctcgcagagttgaaataatggaagaggaaagtgaacagtaatcttcattttagtatttatgcttagatgtgaaaataaatgttatttgttgatcatttctataatccagagctttagaggaagacacataggtgggtttatgtttcacctcatttggaacaaaagaggacagaagcagaccactctgtgcaccaacctaaaaaattacagagaagagaaaattatctttggattgtgctgccctatataaaggtggcagaaagacatttttaaaaagcttattatttcttgcattattttaaaaagttcagagttgaaatgcctttcaaccatttccttctgtggtcatttttcttgctgcctttttcacccaagattcagcagtcagatgtttactgcacacctattacctattatttgctgttcttgcatggttcaaaccaccattctgtagccacccatcctttgccttatctaacaaacatttttccaggaaggtggaaaaggaagtgttgctctcattgtgtgactcagtgctgctgtccatcccatggaaacatgggcacaatcaagtatttgtccagcctattgcaggcttttcctgactttaaaataaattgtratcaataatagtacctttgattatacatttattattgtgtctctctctgatgtactgtggattgtacatttaactttggaatggctttgtaataatcagtcttaagaaaatgttgacaagctctggttgcttatttttagaaaatgaggacatttaataataataaaaaaaaagggattaatagcttttgacctcaagtcttttgtcttctgagtgttggagcttggctgaagacatgtttaatactgtacaatttctgaagatggttattaacactgtgctgttaagcatccatttaaaaatatttgttatcttctttgcctgcctgtattttaaaaagaaatacaaagttgtaaaagtaatggatttctttggatgctgaatgcagtgatgttatcagtcagattctttccttggctcagttgtgtttgtatttcctttcttaattccccaaatcttggctgggcacggtggctcacgcctgtaatcccagcactttgggaggctgaggcaggtggttcactggaggttgagttcgagaccagcctggccacatggtgaaaccctgtctctactaaagatataaaaattagctggatgtggtggtgcacacctgtgatcccagctacttgggaggctgaggtgggagaattgcttgaacctggaaggcagaagttgcagtgagctgagatcacaccactgcactccagcctgggtgacagagagactctgtctcaaaaaaaaaaagaaaaaattcccaaatcttaatgtctgtttcagaattttagtgattttaaagtgatagtagaaaataccaagcatatgaggtatttcaatatgataggcttcttacattttaatagttactcatctttgttccaggacccttgmctgatgctagggaaaggataaagcatagaataccagccagtttggctctgattttgagttatttataataaagtttggggattatcataacatctcatatctttgtgtatgttgttttaatgctcggcagagcacaacactgatgataactattaaaaatagaaaataacagccattttactttcaaatctgatgtgatgcaatctgtgaacactaggaggggataaaataagcattgcagggaaacttatttgtaaatagcttcctcacctaaactttgacttggcaatcaatactttctactttgtggaggggattaagaatagaatgggcaggatgagaccatgaaaattataatgattcatgtatwtttgtatgatgcttgtaactttgcaaagtcttttttattcattgtctcatttggtcagaacaattttattgaggacatgaatttaacaattagaatttagattttctgactgtagctactaaatgttgtagctactagaccaggtgagctaggtttagagcaaagtatataagccttgtatggactatattagaattttaaaaattgtaattaattccttatcatcattataaaaagcttgatttttttatttgatctaaaaaagcattattccaaagaattttttcaagtagaaatgggagttagttataccagtgttgtttttaactaataaggctattttagaattcagccttgcctgtaaggtctttgagaagggagaggagtaggccaaaaaaaaaaaagtcttgattcctgaatgtgccttatatgctgtgccactcacaccgaggccatcatctcaacattagagttgtgctagattactgcttgactgactagctaggttaggcctaagagtgtttaccgaataatctgcactcactcagtagcccttcttcaggattaaaaacgatgatgacctcatcttagagccctaaagggaaatgcttatgtgggaacaagaaaagtcggtggtactgtcttctgctactactacytagtgctttgctgtgtatagggtgtgttcacatatatctcarttgaatgtcacaagaatccctgaagtgattaaaagtcttgagaggtcaggcaatttttgtaaggctagaaggaaaagtgaggttttagacttcatttcttttaaagttggcaaacaaacattttctgtaatggacaagatagatagattagatagatagatagatagatagatgatgattgattgadgattgatwgtaaattatttcaggctttgcaggctataaagtgctgcagctccttagctttgctgttgttatagtgtagctggagccatagacagttagttagttagttatgagtgagcacagctgggtgccagtacaattttaatgatcaagactcgtggcaggcagaacaaaccatcatttgttgatcctctgcttgaaagcacgaataagtgagaacagagcagtcatatggtttcagaaagtgttattctgggatttcaggataaattttgtaaaactastaacaaacaacacacaggaaactaatttggtataagaaacgacatatccctaaatagtgcttatttaacttcattataaatacatctacttaacaaaaaaatatattttgtgatcttgaggtcacttcgtttaggtcattatctcaacccaacctccccaaactctggtttgagccaatatgtgttctrttgttctcagagcaccagccgactgtacaacaattgttataaaaatgtttattgtttaccaaaaccagtggacctcttatcaaatgctgcttggtaacaaaatctatcacagttttaataaaaagaaa

SEQ ID NO: 2690 - DNA, 4765 bp, Homo sapiens
ttgtttgcagttactgtaaaatggggaaaggagaaatttgaaggtgtagaattgaatacagatgaacctccaatggtattcaaggctcagctgtttgcgttgactggagtccagcctgccagacagaaagttatggtgaaaggaggaacgctaaaggatgatgattggggaaacatcaaaataaaaaayggaatgactctactaatgatggggtcagcagatgctcttccagaagaaccctcagccaaaactgtcttcgtagaagacatgacagaagaacagttagcatctgctatggagttaccatgtggattgacaaaccttggtaacacttgttacatgaatgccacagttcagtgtattcgttctgtgcctgaactcaaagatgcccttaaaaggtatgcaggtgccttgagagcttcaggggaaatggcttcagcgcagtatattactgcagcccttagagatttgtttgatyccatggataaaacttcttccagtattccacctattattctactgcagtttttgcacatggctttcccacagtttgccgagaaaggtgaacaaggacagtatcttcaacaggatgctaatgaatgttggatacaaatgatgcgagtattgcaacagaaattggaagcmatagaggatgattctgttaaagagacagactcctcatctgcatcggcagcgacaccttctaaaaagaaaagtttaatcgatcagttcttcggtgttgagtttgaaactaccatgaaatgtacagaatctgaagaagaagaagtcaccaaaggaaaggaaaatcaacttcagcttagctgttttatcaatcaggaagtcaagtatctttttacaggacttaaattgcgacttcaggaagaaatcaccaaacagtctccaacgttgcaaagaaatgccttgtatatcaaatcttccaagatcagccggctgcctgcttacttgaccattcagatggttcgatttttttataaagagaaggaatctgtgaatgccaaagttcttaaggatgttaaatttcctcttatgttggatatgtatgaactgtgtacaccagaacttcaagagaaaatggtgtcttttcgatccaaattcaaggatctagaagataaaaaagtgaatcagcagccaaatacaagtgacaaaaagagtagtccccagaaagaagttaagtatgaacccttttcttttgctgatgatattggctccartaattgtggatactatgacttacaagcagtactaacacaccagggaaggtctagttcttcaggtcattatgtatcatgggtgaaaaggaaacaagatgaatggattaagtttgatgatgacaaagtcagcatcgtaacaccagaagatatcttacggctttctggtggtggagactggcatatcgcttacgttctactctatgggcctcgcagagttgaaataatggaagaggaaagtgaacagtaatcttcattttagtatttatgcttagatgtgaaaataaatgttatttgttgatcatttctataatccagagctttagaggaagacacataggtgggtttatgtttcacctcatttggaacaaaagaggacagaagcagaccactctgtgcaccaacctaaaaaattacagagaagagaaaattatctttggattgtgctgccctatataaaggtggcagaaagacatttttaaaaagcttattatttcttgcattattttaaaaagttcagagttgaaatgcctttcaaccatttccttctgtggtcatttttcttgctgcctttttcacccaagattcagcagtcagatgtttactgcacacctattacctattatttgctgttcttgcatggttcaaaccaccattctgtagccacccatcctttgccttatctaacaaacatttttccaggaaggtggaaaaggaagtgttgctctcattgtgtgactcagtgctgctgtccatcccatggaaacatgggcacaatcaagtatttgtccagcctattgcaggcttttcctgactttaaaataaattgtratcaataatagtacctttgattatacatttattattgtgtctctctctgatgtactgtggattgtacatttaactttggaatggctttgtaataatcagtcttaagaaaatgttgacaagctctggttgcttatttttagaaaatgaggacatttaataataataaaaaaaaagggattaatagcttttgacctcaagtcttttgtcttctgagtgttggagcttggctgaagacatgtttaatactgtacaatttctgaagatggttattaacactgtgctgttaagcatccatttaaaaatatttgttatcttctttgcctgcctgtattttaaaaagaaatacaaagttgtaaaagtaatggatttctttggatgctgaatgcagtgatgttatcagtcagattctttccttggctcagttgtgtttgtatttcctttcttaattccccaaatcttggctgggcacggtggctcacgcctgtaatcccagcactttgggaggctgaggcaggtggttcactggaggttgagttcgagaccagcctggccacatggtgaaaccctgtctctactaaagatataaaaattagctggatgtggtggtgcacacctgtgatcccagctacttgggaggctgaggtgggagaattgcttgaacctggaaggcagaagttgcagtgagctgagatcacaccactgcactccagcctgggtgacagagagactctgtctcaaaaaaaaaaagaaaaaattcccaaatcttaatgtctgtttcagaattttagtgattttaaagtgatagtagaaaataccaagcatatgaggtatttcaatatgataggcttcttacattttaatagttactcatctttgttccaggacccttgmctgatgctagggaaaggataaagcatagaataccagccagtttggctctgattttgagttatttataataaagtttggggattatcataacatctcatatctttgtgtatgttgttttaatgctcggcagagcacaacactgatgataactattaaaaatagaaaataacagccattttactttcaaatctgatgtgatgcaatctgtgaacactaggaggggataaaataagcattgcagggaaacttatttgtaaatagcttcctcacctaaactttgacttggcaatcaatactttctactttgtggaggggattaagaatagaatgggcaggatgagaccatgaaaattataatgattcatgtatwtttgtatgatgcttgtaactttgcaaagtcttttttattcattgtctcatttggtcagaacaattttattgaggacatgaatttaacaattagaatttagattttctgactgtagctactaaatgttgtagctactagaccaggtgagctaggtttagagcaaagtatataagccttgtatggactatattagaattttaaaaattgtaattaattccttatcatcattataaaaagcttgatttttttatttgatctaaaaaagcattattccaaagaattttttcaaaggctattttagaattcagccttgcctgtaaggtctttgagaagggagaggagtaggccaaaaaaaaaaaagtcttgattcctgaatgtgccttatatgctgtgccactcacaccgaggccatcatctcaacattagagttgtgctagattactgcttgactgactagctaggttaggcctaagagtgtttaccgaataatctgcactcactcagtagcccttcttcaggattaaaaacgatgatgacctcatcttagagccctaaagggaaatgcttatgtgggaacaagaaaagtcggtggtactgtcttctgctactactacytagtgctttgctgtgtatagggtgtgttcacatatatctcarttgaatgtcacaagaatccctgaagtgattaaaagtcttgagaggtcaggcaatttttgtaaggctagaaggaaaagtgaggttttagacttcatttcttttaaagttggcaaacaaacattttctgtaatggacaagatagatagattagatagatagatagatagatagatgatgattgattgadgattgatwgtaaattatttcaggctttgcaggctataaagtgctgcagctccttagctttgctgttgttatagtgtagctggagccatagacagttagttagttagttatgagtgagcacagctgggtgccagtacaattttaatgatcaagactcgtggcaggcagaacaaaccatcatttgttgatcctctgcttgaaagcacgaataagtgagaacagagcagtcatatggtttcagaaagtgttattctgggatttcaggataaattttgtaaaactastaacaaacaacacacaggaaactaatttggtataagaaacgacatatccctaaatagtgcttatttaacttcattataaatacatctacttaacaaaaaaatatattttgtgatcttgaggtcacttcgtttaggtcattatctcaacccaacctccccaaactctggtttgagccaatatgtgttctrttgttctcagagcaccagccgactgtacaacaattgttataaaaatgtttattgtttaccaaaaccagtggacctcttatcaaatgctgcttggtaacaaaatctatcacagttttaataaaaagaaa

SEQ ID NO: 2691 - DNA, 4818 bp, Homo sapiens
attgtgattttgtttgcagttactgtaaaatggggaaaggagaaatttgaaggtgtagaattgaatacagatgaacctccaatggtattcaaggctcagctgtttgcgttgactggagtccagcctgccagacagaaagttatggtgaaaggaggaacgctaaaggatgatgattggggaaacatcaaaataaaaaayggaatgactctactaatgatggggtcagcagatgctcttccagaagaaccctcagccaaaactgtcttcgtagaagacatgacagaagaacagttagcatctgctatggagttaccatgtggattgacaaaccttggtaacacttgttacatgaatgccacagttcagtgtattcgttctgtgcctgaactcaaagatgcccttaaaaggtatgcaggtgccttgagagcttcaggggaaatggcttcagcgcagtatattactgcagcccttagagatttgtttgatyccatggataaaacttcttccagtattccacctattattctactgcagtttttgcacatggctttcccacagtttgccgagaaaggtgaacaaggacagtatcttcaacaggatgctaatgaatgttggatacaaatgatgcgagtattgcaacagaaattggaagcmatagaggatgattctgttaaagagacagactcctcatctgcatcggcagcgacaccttctaaaaagaaaagtttaatcgatcagttcttcggtgttgagtttgaaactaccatgaaatgtacagaatctgaagaagaagaagtcaccaaaggaaaggaaaatcaacttcagcttagctgttttatcaatcaggaagtcaagtatctttttacaggacttaaattgcgacttcaggaagaaatcaccaaacagtctccaacgttgcaaagaaatgccttgtatatcaaatcttccaagatcagccggctgcctgcttacttgaccattcagatggttcgatttttttataaagagaaggaatctgtgaatgccaaagttcttaaggatgttaaatttcctcttatgttggatatgtatgaactgtgtacaccagaacttcaagagaaaatggtgtcttttcgatccaaattcaaggatctagaagataaaaaagtgaatcagcagccaaatacaagtgacaaaaagagtagtccccagaaagaagttaagtatgaacccttttcttttgctgatgatattggctccartaattgtggatactatgacttacaagcagtactaacacaccagggaaggtctagttcttcaggtcattatgtatcatgggtgaaaaggaaacaagatgaatggattaagtttgatgatgacaaagtcagcatcgtaacaccagaagatatcttacggctttctggtggtggagactggcatatcgcttacgttctactctatgggcctcgcagagttgaaataatggaagaggaaagtgaacagtaatcttcattttagtatttatgcttagatgtgaaaataaatgttatttgttgatcatttctataatccagagctttagaggaagacacataggtgggtttatgtttcacctcatttggaacaaaagaggacagaagcagaccactctgtgcaccaacctaaaaaattacagagaagagaaaattatctttggattgtgctgccctatataaaggtggcagaaagacatttttaaaaagcttattatttcttgcattattttaaaaagttcagagttgaaatgcctttcaaccatttccttctgtggtcatttttcttgctgcctttttcacccaagattcagcagtcagatgtttactgcacacctattacctattatttgctgttcttgcatggttcaaaccaccattctgtagccacccatcctttgccttatctaacaaacatttttccaggaaggtggaaaaggaagtgttgctctcattgtgtgactcagtgctgctgtccatcccatggaaacatgggcacaatcaagtatttgtccagcctattgcaggcttttcctgactttaaaataaattgtratcaataatagtacctttgattatacatttattattgtgtctctctctgatgtactgtggattgtacatttaactttggaatggctttgtaataatcagtcttaagaaaatgttgacaagctctggttgcttatttttagaaaatgaggacatttaataataataaaaaaaaagggattaatagcttttgacctcaagtcttttgtcttctgagtgttggagcttggctgaagacatgtttaatactgtacaatttctgaagatggttattaacactgtgctgttaagcatccatttaaaaatatttgttatcttctttgcctgcctgtattttaaaaagaaatacaaagttgtaaaagtaatggatttctttggatgctgaatgcagtgatgttatcagtcagattctttccttggctcagttgtgtttgtatttcctttcttaattccccaaatcttggctgggcacggtggctcacgcctgtaatcccagcactttgggaggctgaggcaggtggttcactggaggttgagttcgagaccagcctggccacatggtgaaaccctgtctctactaaagatataaaaattagctggatgtggtggtgcacacctgtgatcccagctacttgggaggctgaggtgggagaattgcttgaacctggaaggcagaagttgcagtgagctgagatcacaccactgcactccagcctgggtgacagagagactctgtctcaaaaaaaaaaagaaaaaattcccaaatcttaatgtctgtttcagaattttagtgattttaaagtgatagtagaaaataccaagcatatgaggtatttcaatatgataggcttcttacattttaatagttactcatctttgttccaggacccttgmctgatgctagggaaaggataaagcatagaataccagccagtttggctctgattttgagttatttataataaagtttggggattatcataacatctcatatctttgtgtatgttgttttaatgctcggcagagcacaacactgatgataactattaaaaatagaaaataacagccattttactttcaaatctgatgtgatgcaatctgtgaacactaggaggggataaaataagcattgcagggaaacttatttgtaaatagcttcctcacctaaactttgacttggcaatcaatactttctactttgtggaggggattaagaatagaatgggcaggatgagaccatgaaaattataatgattcatgtatwtttgtatgatgcttgtaactttgcaaagtcttttttattcattgtctcatttggtcagaacaattttattgaggacatgaatttaacaattagaatttagattttctgactgtagctactaaatgttgtagctactagaccaggtgagctaggtttagagcaaagtatataagccttgtatggactatattagaattttaaaaattgtaattaattccttatcatcattataaaaagcttgatttttttatttgatctaaaaaagcattattccaaagaattttttcaagtagaaatgggagttagttataccagtgttgtttttaactaataaggctattttagaattcagccttgcctgtaaggtctttgagaagggagaggagtaggccaaaaaaaaaaaagtcttgattcctgaatgtgccttatatgctgtgccactcacaccgaggccatcatctcaacattagagttgtgctagattactgcttgactgactagctaggttaggcctaagagtgtttaccgaataatctgcactcactcagtagcccttcttcaggattaaaaacgatgatgacctcatcttagagccctaaagggaaatgcttatgtgggaacaagaaaagtcggtggtactgtcttctgctactactacytagtgctttgctgtgtatagggtgtgttcacatatatctcarttgaatgtcacaagaatccctgaagtgattaaaagtcttgagaggtcaggcaatttttgtaaggctagaaggaaaagtgaggttttagacttcatttcttttaaagttggcaaacaaacattttctgtaatggacaagatagatagattagatagatagatagatagatagatgatgattgattgadgattgatwgtaaattatttcaggctttgcaggctataaagtgctgcagctccttagctttgctgttgttatagtgtagctggagccatagacagttagttagttagttatgagtgagcacagctgggtgccagtacaattttaatgatcaagactcgtggcaggcagaacaaaccatcatttgttgatcctctgcttgaaagcacgaataagtgagaacagagcagtcatatggtttcagaaagtgttattctgggatttcaggataaattttgtaaaactastaacaaacaacacacaggaaactaatttggtataagaaacgacatatccctaaatagtgcttatttaacttcattataaatacatctacttaacaaaaaaatatattttgtgatcttgaggtcacttcgtttaggtcattatctcaacccaacctccccaaactctggtttgagccaatatgtgttctrttgttctcagagcaccagccgactgtacaacaattgttataaaaatgtttattgtttaccaaaaccagtggacctcttatcaaatgctgcttggtaacaaaatctatcacagttttaataaaaagaaa

SEQ ID NO: 2692 - DNA, 5010 bp, Homo sapiens
  misc_feature (1)...(5010): n = A,T,C or G
cctcgcctccgttacaacrgcctacggtgctggaggatccttctgcgcacgcgcacagcctccggccggctatttccgcgagcgcgttccatcctctaccgagcgcgcgcgaagactacggaggtcgactcgggagygcgcacgcagctccgccccgcgtccgacccgcggatcccgcggcgtccggcccgggtggtctggatcgcggagggaatgccccggagggcggagaactgggacgaggccgaggtaggcgcggaggaggcaggcgtcgaagagtacggccytgaagaagacggcggsgaggagtcgggcgccgaggagycsggcccggaagagtccggcccgkaggaactgggcgccgaggaggagatggaggccgggcggccgcggcccgtgcygcscknggtgaactvgcgckagccctccyaggkcatcwystgcmntcscrdkycgsgcgtcktgcygbbcgtawsvcycwwcttcgacnrckagccgymgccsyrcccaacgctgccgcctggcacgggcssccgcatccacadshamygabgtvykstttyhcvctrsygagytgcagggacacacgatgggrttctgsttabcrkaactgaatwatvtgtgccatctctcaatgttgacggacagcctayttttdccaataycacactgcyagtgwrkaytsygraagagbvaygcctccaggttgtccggagccyakdcaagcctkagaatkasaggwgacnggacrtcgtcaggtmgcbctasdaagatshggaagaccacccaaatgtgyagaaagaccdggagyggctgacacaggagcgcattgcacatcaacggatgggagattgaagatttctgttgaaacttacactgtttcatctcagcttttgatggtactgatgagtcttgatctagatacaggactggttccttccttagtttcaaagtgtctcattctcagagtaaaataggcaccattgcttaaaagaaagttaactgacttcactaggcattgtgatgtttaggggcaaacatcacaaaatgtaatttaatgcctgcccattagagaagtatttatcaggagaaggtggtggcatttttgcttcctagtaagtcaggacagcttgtatgtaaggaggtttrtataagtaattcagtgggaattgcagcatatcgtttaattttaagaaggcattggcatctgcttttaatggatgtataatacatccattctacatccgtagcggttggtgacttgtctgcctcctgctttgggaagactgaggcatccgtgaggcagggacaagtctttctcctctttgagaccccagtgcctgcacatcatgagccttcagtcagggtttgtcagaggaacaaaccaggggacactttgttagaaagtgcttagaggttctgcctctatttttgttggggggtgggagaggggaccttaaaatgtgtacagtgaacaaatgtcttaaagggaatcatttttgtaggaagcattttttataattttctaagtcgtgcactttctcggtccactcttgttgaagtgctgttttattactgtttctaaactaggattgacattctacagttgtgataatagcatttttgtaacttgccatccgcacagaaaatacgagaaaatctgcatgtttgattatagtattaatggacaaataagtttttgctaaatgtgagtatttctgttcctttttgtaaatatgtgacattcctgattgatttgggtttttttgttgttgttgttttgttttgttttgtttttttgagatggagtctcactcttgtcacccaggctggagtgcagtggcgccatctcggctcactgcaacctctgcctcctgrgttcacgtaatcctcctgagtagctgggattacaggygcctgccaccacgctggccaatttttgtacttttagtagagacagtgtttcgycatgttggccaggctggtttcaaactcctgacctcaggtgatccgcccacctcagcctcccaaartggtgggattacaggtgtgtgggccaccgtgcctggctgattcagcattttttatcaggcaggaccaggtggcacttccacctccagcctctggtcctaccaatggattcatggagtagcctggactgtttcatagttttctaaatgtacaaattcttataggctagacttagattcattaactcaaattcaatgcttctatcagactcagttttttgtaactaatagatttttttttccacttttgttctactccttccctaatagctttttaaaaaaatctccccagtagagaaacatttggaaaagacagaaaactaaaaaggaagaaaaaagatccctattagatacacttcttaaatacaatcacattaacattttgagctatttccttccagcctttttagggcagattttggttggtttttacatagttgagattgtactgttcatacagttttataccctttttcatttaactttataacttaaatattgctctatgttagtataagcttttcacaaacattagtatagtctcccttttataattaatgtttgtgggtatttcttggcatgcatctttaattccttatcctagcctttgggcacaattcctgtgctcaaaaatgagagtgacggctggcatggtggctcccgcctgtaatcccagtactttggraagccaaggtaagaggattgcttgagcccagaacttcaagatgagcctgggctcatagtgagaacccatctatacaaaaaatttttaaaaattagcatggcggcacacatctgtaatcctagctacttggcaggctgaggtgagaagatcattggagtttaggaattggaggctgcagtgagccatgagtatgccactgcactccagcctgggggacagagcaagaccctgcctcaaaaaaaaaaaaaaaaaaaaaatcaggccgggmatggtggctcacgcctgtaatcccagcactttgggaggtcgaggtgggcagatcacctgaggtcaggagttcgagaccagcctggccaacatggtaaaaccccatttctactaaaaaatacaagaattagctgggtgtggtggcgcatgcctgtaatcctagctactcaggaggctgaggcaggagaatcacttgaacccaggaggcgaagattgcagtgagctgatatcgcaccattgtactccagcctgtgtgacagagcaatactcttgtctcaaaaaaaaaaaaaaattcaaatcagagtgaagtgaatgagacactccagttttccttctactccgaattttagctcctcctttcaacattcaacaaatagtcttttttttttttttttttttttggggatggagtctccctctgttgcccaggctggagtgcagaggtgcgatctctgctcactacaagctctgcctcccgagttcaagtgattctcctggctcaccctcctgagtagctgggattacaggcgcctgccaccatgcctggctaattttgtgtttttagtggagacggggtttcaccatgttgtccaggatggtcttgatctcctgaccttgtgatccacccacctcagcctcccaaagysctgggattacaggtgtgagccaccgcgtccagccagctttattattttttttaagctgtctttgtgtcaaaatgatagttcatgctcctcttgttaaaacctgcaggccgagcacagtggctcatgcctgtartcccagcattttgggagaccaaggcggatggatcacctgaggtcaggagctsaagaccagcctggctaacatggtgaaacctcatctccacttaaaatacaaaaattgccggccgcggcggctcatgcctgtaatcccagcactttgggaggcctaggcgggtggatcacgaggtcaggaaatcgagaccatcctggctaacacgggtgaaaccccgtctctattaaaaaatagaaaaaattaggcgggcgtggtggtgagcgcctgtagtcccagctactcgagagcctgaggcaggagaatggcatgaacctggaaggcggagcttgcagtgagctgagatggtgccactgcactctaacctgggcgacagagtgagacaccgtctcaaaaaaaaaaacaaaaaacaaaaattatccaggtgtggcggtgggcgcctgtgaggcaggcgaatctcttgaacccgggaggcggaggttgcagtgagccragatcacaccattgcactccagcctgggaaacaagagtgaaattccatctcaaaaccaaattttcaaaaaaaaaacatgccgcttgagtactgtgtttttggtgttgtccaaggaaaattaaaacctgtagcatgaataatgtttgtttttcatttcgaatcttgtgaatgtattaaatatatcgctcttaagagacggtgaagttcctatttcaagttttttttkttttktttktttttaaagctgttttttaatacattaaatggtgctgagtaaaggaaataggcagggtgtgttgtgtggtgttttaactaggcgcttctctctcagagagttttgaaacctgtttacataaaggcccaggatgggaaggagatccaaacataagccaccagcctcattccaagtctcttctmtttccaaccctggattttttttttttatttaacattgtttcttttagctttatttttcttataaaagaaatgtatcactataaaaaattacacactacagaaaaatattaagaagaaaaacattcacatcggaaacaaagttttttcccatgaaaacagaacccaaaagggtaagtggttagtatttcaccagcaattatgttgagaataaggccaggcgaggtggctcacgcctgtaatctcagcactttgggaggccagggcaggcagatcatctgaggtcaggagtttgagaccagcctggccaacatggtgaaaccctatctctactaaaaattaaa

SEQ ID NO: 2693 - DNA, 1383 bp, Homo sapiens
  misc_feature (1)...(1383): n = A,T,C or G
ggagycsggcccggaagagtccggcccgkaggaactgggcgccgaggaggagatggaggccgggcggccgcggcccgtgcygcscknggtgaactvgcgckagccctccyaggkcatcwystgcmntcscrdkycgsgcgtcktgcygbbcgtawsvcycwwcttcgacnrckagccgymgccsyrcccaacgctgccgcctggcacgggcssccgcatccacadshamygabtcctcatgactccagtgggccagttctgcgtagtccctgccctcgtggagaacacattcctcctggggagactgacagatgcaaagacaggaacaagccagggtcatgttggcgccggaagagccgaccgtgtgtggcgtgggaaattgacttacctgcctgctgggagatggaggggttgcggttgtgtgtgggccaccgtgcctggctgattcagcattttttatcaggcaggaccaggtggcacttccacctccagcctctggtcctaccaatggattcatggagtagcctggactgtttcatagttttctaaatgtacaaattcttataggctagacttagattcattaactcaaattcaatgcttctatcagactcagttttttgtaactaatagatttttttttccacttttgttctactccttccctaatagctttttaaaaaaatctccccagtagagaaacatttggaaaagacagaaaactaaaaaggaagaaaaaagatccctattagatacacttcttaaatacaatcacattaacattttgagctatttccttccagcctttttagggcagattttggttggtttttacatagttgagattgtactgttcatacagttttataccctttttcatttaactttataacttaaatattgctctatgttagtataagcttttcacaaacattagtatagtctcccttttataattaatgtttgtgggtatttcttggcatgcatctttaattccttatcctagcctttgggcacaattcctgtgctcaaaaatgagagtgacggctggcatggtggctcccgcctgtaatcccagtactttggraagccaaggtaagaggattgcttgagcccagaacttcaagatgagcctgggctcatagtgagaacccatctatacaaaaaatttttaaaaattagcatggcggcacacatctgtaatcctagctacttggcaggctgaggtgagaagatcattggagtttaggaattggaggctgcagtgagccatgagtatgccactgcactccagcctgggggacagagcaagaccctgcctcaaaaaaaaaaaaaaaaaaaaaatcaggccgggmatggtggctcacgcctgtaatcccagca

SEQ ID NO: 2694 - DNA, 1354 bp, Homo sapiens
  misc_feature (1)...(1354): n = A,T,C or G
cctcgcctccgttacaacrgcctacggtgctggaggatccttctgcgcacgcgcacagcctccggccggctatttccgcgagcgcgttccatcctctaccgagcgcgcgcgaagactacggaggtcgactcgggagygcgcacgcagctccgccccgcgtccgacccgcggatcccgcggcgtccggcccgggtggtctggatcgcggagggaatgccccggagggcggagaactgggacgaggccgaggtaggcgcggaggaggcaggcgtcgaagagtacggccytgaagaagacggcggsgaggagtcgggcgccgaggagycsggcccggaagagtccggcccgkaggaactgggcgccgaggaggagatggaggccgggcggccgcggcccgtgcygcscknggtgaactvgcgckagccctccyaggkcatcwystgcmntcscrdkycgsgcgtcktgcygbbcgtawsvcycwwcttcgacnrckagccgymgccsyrcccaacgctgccgcctggcacgggcssccgcatccacadshamygabgtbrmstttrdcbctysrgagrtgcagggacacacgatgggyttctgsttavcymaactgaatwatbtgtgccatctctcaatgttgacggacagcctayttttdccaataycacactgcyagtgwrkaytsygraagagbvaygcctccaggttgtccggagccyakdcaagcctkagaatkasaggwgacnggacrtcgtcaggtmgcbctasdaagatshggaagaccacccaaatgtgyagaaagaccdggagyggctgacacaggagcgcattgcacatcaacggatgggagattgaagatttctgttgaaacttacactgtttcatctcagcttttgatggattgacattctacagttgtgataatagcatttttgtaacttgccatccgcacagaaaatacgagaaaatctgcatgtttgattatagtattaatggacaaataagtttttgctaaatgtgagtatttctgttcctttttgtaaatatgtgacattcctgattgatttgggtttttttgttgttgttgttttgttttgttttgtttttttgagatggagtctcactcttgtcacccaggctggagttgcagtgagccragatcacaccattgcactccagcctgggaaacaagagtgaaattccatctcaaaaccaaattttcaaaaaaaaaacatgccgcttgagtactgtgtttttggtgttgtccaaggaaaattaaaacctgtagcatgaataatgtttgtttttcatttcgaatcttgtgaatgtattaaatatatcgctcttaagagac

SEQ ID NO: 2695 - DNA, 590 bp, Homo sapiens
  misc_feature (1)...(590): n = A,T,C or G
gcggccgcggcccgtgcygcscknggtgaactvgcgckagccctccyaggkcatcwystgcmntcscrdkycgsgcgtcktgcygbbcgtawsvcycwwcttcgacnrckagccgymgccsyrcccaacgctgccgcctggcacgggcssccgcatccacadshamygabgtacgggcccggcgcttaggcccgacccagcagggacgatagcacggtctgaagcccctctaccgccccggggtccattttgcagacggggaactgaggccccttgaggcaggacacatccagggtgacgctgctcgtaagcgtcagagcatttgcatctcaaaaaaaaaaaaaagaaaaagaaaagaaaattctggtataatttacatacagtaaaatgcacagatcttagggtttgatgagttttctctcgacatgtttttgcatccagcctgggaaacaagagtgaaattccatctcaaaaccaaattttcaaaaaaaaaacatgccgcttgagtactgtgtttttggtgttgtccaaggaaaattaaaacctgtagcatgaataatgtttgtttttcatttcgaatcttgtgaatg

SEQ ID NO: 2696 - DNA, 1657 bp, Homo sapiens
cgcggcgccgcatggccgacgtggggctcgctctcgcggtctctcccgggcgggcgcgcaggcacgcatctgcgggtgcgcgcgcggacggccgggcggcggcggctcccggaggtggtggcttcactttccaggactcaggggcagccacagcgacaccgcggcagcagcctcaggagccggagctggaacggccgggggcggcggcagcggcggcgctgagggatctaaaatgtccactgaggcacaaagagttgatgacagtccaagcactagtggaggaagttccgatggagatcaacgtgaaagtgttcagcaagaaccagaaagagaacaagttcagcccaagaaaaaggagggaaaaatatccagcaaaaccgctgctaaattgtcaactagtgctaaaagaattcagaaggaacttgcagaaatcacattggaccctcctcccaactgtagcaccaacataacactgaaaggaaatgctcattcaattctcaattggatttttggattttggatgcccactagtgctggacccaaaggagacaacatttatgaatggaggtcaactatattgggacccccaggatctgtctatgaaggaggggtgttctttcttgacattaccttttcaccagactatccgtttaaaccccctaaggttaccttccgaacaagaatctatcactgtaatattaacagccaaggtgtgatctgtctggacatcttaaaggacaactggagtccggctttaactatttctaaagttctcctctccatctgctcacttcttacagattgcaaccctgctgaccctctggtgggcagcatcgccacacagtacatgaccaacagagcagagcatgaccggatggccagacagtggaccaagcggtacgccacataggggcctgctgcctgccgccccgcgggacctgtgcaagcacattcaccaagtgcatcggtagccctgcccacccctccagacctcggttcttattttcctatttttattaaatttggaaccattttgtgatggtatgttgtccatcttcccatcccagttcttcctgccccccttcctctctcccacgctctcttttatctctcattttattcccttgttgatttctgttaacttgaaagatttgggattttttcccacctcatcatagatgggaacttttgttttcagtgcaaacaatgttggagctgtaatagtaagagctttcttacaaagctttgtattactgtgtggttttgttttttttgttgttgtttatttgattttgatttttttttcttttatgtgatctttgggaaaacacattcagaattatatctcgtttctacttaaatgtagtgcttagggttaattttttgtactgaagtctttattggtgggtgcatgctactgggaacaagtttttgtacaaaagcttcaatcagaatcactgtgcattactgagactctgtttatcactagccttctgtccctcccgcagaagactgttggattgaacaaaataatatgtattttgatttacttaaagtgcttgtaaatttcttagggacctgccacttttgactgtggatcagttgatgtacacttgtattattaaagcactcaataaatcactgtggctgataactg

SEQ ID NO: 2697 - DNA, 1585 bp, Homo sapiens
cgcggcgccgcatggccgacgtggggctcgctctcgcggtctctcccgggcgggcgcgcaggcacgcatctgcgggtgcgcgcgcggacggccgggcggcggcggctcccggaggtggtggcttcactttccaggactcaggggcagccacagcgacaccgcggcagcagcctcaggagccggagctggaacggccgggggcggcggcagcggcggcgctgagggatctaaaatgtccactgaggcacaaagagttgatgacagtccaagcactagtggaggaagttccgatggagatcaacgtgaaagtgttcagcaagaaccagaaagagaacaagttcagcccaagaaaaaggagggaaaaatatccagcaaaaccgctgctaaattgtcaactagtgctaaaagaattcagaaggaacttgcagaaatcacattggaccctcctcccaactgtagtgctggacccaaaggagacaacatttatgaatggaggtcaactatattgggacccccaggatctgtctatgaaggaggggtgttctttcttgacattaccttttcaccagactatccgtttaaaccccctaaggttaccttccgaacaagaatctatcactgtaatattaacagccaaggtgtgatctgtctggacatcttaaaggacaactggagtccggctttaactatttctaaagttctcctctccatctgctcacttcttacagattgcaaccctgctgaccctctggtgggcagcatcgccacacagtacatgaccaacagagcagagcatgaccggatggccagacagtggaccaagcggtacgccacataggggcctgctgcctgccgccccgcgggacctgtgcaagcacattcaccaagtgcatcggtagccctgcccacccctccagacctcggttcttattttcctatttttattaaatttggaaccattttgtgatggtatgttgtccatcttcccatcccagttcttcctgccccccttcctctctcccacgctctcttttatctctcattttattcccttgttgatttctgttaacttgaaagatttgggattttttcccacctcatcatagatgggaacttttgttttcagtgcaaacaatgttggagctgtaatagtaagagctttcttacaaagctttgtattactgtgtggttttgttttttttgttgttgtttatttgattttgatttttttttcttttatgtgatctttgggaaaacacattcagaattatatctcgtttctacttaaatgtagtgcttagggttaattttttgtactgaagtctttattggtgggtgcatgctactgggaacaagtttttgtacaaaagcttcaatcagaatcactgtgcattactgagactctgtttatcactagccttctgtccctcccgcagaagactgttggattgaacaaaataatatgtattttgatttacttaaagtgcttgtaaatttcttagggacctgccacttttgactgtggatcagttgatgtacacttgtattattaaagcactcaataaatcactgtggctgataactg

SEQ ID NO: 2698 - DNA, 1239 bp, Homo sapiens
atgacccctggacagttatgttccgacacttttaaccatgtaaccctttcttcacacaaaaatatttcattgaagtacaatatctacagtgagccccctctgtttgaagtgggtgctggacccaaaggagacaacatttatgaatggaggtcaactatattgggacccccaggatctgtctatgaaggaggggtgttctttcttgacattaccttttcaccagactatccgtttaaaccccctaaggttaccttccgaacaagaatctatcactgtaatattaacagccaaggtgtgatctgtctggacatcttaaaggacaactggagtccggctttaactatttctaaagttctcctctccatctgctcacttcttacagattgcaaccctgctgaccctctggtgggcagcatcgccacacagtacatgaccaacagagcagagcatgaccggatggccagacagtggaccaagcggtacgccacataggggcctgctgcctgccgccccgcgggacctgtgcaagcacattcaccaagtgcatcggtagccctgcccacccctccagacctcggttcttattttcctatttttattaaatttggaaccattttgtgatggtatgttgtccatcttcccatcccagttcttcctgccccccttcctctctcccacgctctcttttatctctcattttattcccttgttgatttctgttaacttgaaagatttgggattttttcccacctcatcatagatgggaacttttgttttcagtgcaaacaatgttggagctgtaatagtaagagctttcttacaaagctttgtattactgtgtggttttgttttttttgttgttgtttatttgattttgatttttttttcttttatgtgatctttgggaaaacacattcagaattatatctcgtttctacttaaatgtagtgcttagggttaattttttgtactgaagtctttattggtgggtgcatgctactgggaacaagtttttgtacaaaagcttcaatcagaatcactgtgcattactgagactctgtttatcactagccttctgtccctcccgcagaagactgttggattgaacaaaataatatgtattttgatttacttaaagtgcttgtaaatttcttagggacctgccacttttgactgtggatcagttgatgtacacttgtattattaaagcactcaataaatcactgtggctgataactg

SEQ ID NO: 2699 - DNA, 3051 bp, Homo sapiens
caggaccatggaactcagcgtcctcctcttccttgcactcctcacaggactcttgctactcctggttcwgygccaccctaacacccatgacmgcctcccaccagggccccgccctctgccccttttgggaaaccttctgcagatggatagaagaggcctactcaaatcctttctgaggttccgagagaaatatggggacgtcttcacggtacacctgggaccsaggcccgtggtcatgctgtgtggagtagaggccatacgggaggcccttgtggacaaggctgaggccttctctggccggggaaaaatcgccatggtcgacccattcttccggggatatggtgtgatctttgccaatggaaaccgctggaaggtgcttcggcgattctctgtgaccactatgagggacttcgggatgggaaagcggagtgtggaggagcggattcaggaggaggctcagtgtctgatagaggagcttcggaaatccaagggggccctcatggacsccaccttcctcttccaktccattaccgccaacatcatctgctccatcrtctttggaaaacgattccactaccaagatcaagagttcctgaagatgctgaacttgttctaccagactttttcactcatcagctctgtattcggccagctgtttgagctcttctctggcttcttgaaatactttcctggggcacacaggcaagtttacaaaaacctgcaggaaatcaatgcttacattggccacagtgtggagaagcaccgtgaaaccctggaccccagcgcccccaaggacctcatcgacacctacctgctccacatggaaaaagagaaatccaacgcacacagtgaattcagccaccagaacctcaacctcaacacgctctcgctcttctttgctggcactgagaccaccagcaccactctccgctacggcttcctgctcatgctcaaataccctcatgttgcagagagagtctacagggagattgaacaggtgattggcccacatcgccctccagagcttcatgaccgagccaaaatgccatacacagaggcagtcatctatgagattcagagattttccgaccttctccccatgggtgtgccccacattgtcacccaacacaccagcttccgagggtacatcatccccaaggacacagaagtatttctcatcctgagcactgctctccatgacccacactactttgaaaaaccagacgccttcaatcctgaccactttctggatgccaatggggcactgaaaaagactgaagcttttatccccttctccttagggaagcggatttgtcttggtgaaggcatcgcccgtgcggaattgttcctcttcttcaccaccatcctccagaacttctccrtggccagccccgtggccccwgaagacatcgatctgacaccccaggagtgtggtgtgggcaaaatacccccaacataccagatccgcttcctgccccgctgaaggggctgagggaagggggtcaaaggattccagggtcattcagtgtccccrcctctgtagayaatggctctgactccccgcaacttcctgcctctgagagacctgctrcaagccagcttccttcccctccatggcaccagttgtctgaggtcrcaktgcaartgagtgcaggagtgagattatcgaaaattataatatacaaaatcatatatatatatatgttcttgttttttgagacagagtctcacactgttgcccaggctggagtgcagtggcgtgatctyggctcactgcaacctccacccccggggatcaagcaactctcctgcctcagcctccctagtagctgggattacaggcatgcactaccacgcttggctaatttttgtatttttagtagagatggggtttcactgtgtaggccaggctggtctcgaactcctgaactcaagtgattcacccaccttagcctcccaaagtgctgggattacaggcgtgagtcaccgtgcccagccatgtatatatataattttaaaaattaagctgaaattcacataacataaaattagctgttttaaagtgtaaaatttagtggcgtgtggttcattcacaaagctgtacaaccaccaccatctagttccaaacattttctttttttctgagatggagtctcactctgtcacccaggttcgagttcagtggtgccatctctgtccactgcaacctccacatcctgggttcaagtgattctcctgcctcagcctctggaggagctggtatcacaggcgtcccccaccacgcctggctaaattttgtatttttaggtggtcttgaactcctgatgtcaggtgattctcctagctccaaatgttttcattatctctcccccaacaaaacccatacctatcaagctgtcactccccataccccattctctttttcatctcggcccctgtcaatctggtttttgtcactatggacttaccaattctgaatatttcccataaacagaatcatacaatatttgatttttttttttttttgaaactaagccttgctctgtctcccaggctggagtgctatggtgcaatttttgttcactgcaacctctgccttccaagatcaagagattctccagtctcagctcccaagtagctgggattacaggcatgtactaccatgcctggctaattttcttgtakttttagtagggacatgttggccaggctggtkgtgagctcctggcctcaggtgatccacccacctcagtgttccwaagtgctgatattacaggcataatatgtgatcttttgtgtctggttsctttcaygttgaaygctatttttgaggttcrtgcctgttgtagaccacagtcacacactgctgtagtcttccccagtcctcattcccagctgcctcytcctactgcttccgtctatcaaaaagccyccttggcscaggttccctgagctgtgggattctgcactggtgctttggattccctgatatgttccttcaaatctgctgagaattaaataaacatctctaaagcctgacctccccacgtc

SEQ ID NO: 2700 - DNA, 1665 bp, Homo sapiens
gcaggctctagcgcatcccagccagtgtctcctgcagctcagcagctgccttcaccatggacagcataagcacagccatcttactcctgctcctggctctcgtctgtctgctcctgaccctaagctcaagagataagggaaagctgcctccrggacccagacccctcycaatcctgggaaacctgctgctgctttgctcccaagacatgctgacttctctcactaagctgagcaaggagtatggctccatgtacacagtgcacctgggacccaggcgggtggtggtcctcagcgggtaccaagctgtgaaggaggccctggtggaccagggagaggagtttagtggccscggtgactaccctgcctttttcaactttaccaagggcaatggcatcgccttctccagtggggatcgatggaaggtcctgagacagttctctatccagattctacggaatttcgggatggggaagagaagcattgaggagcgaatcctagaggagggcagcttcctgctggcggagctgcggaaaactgaagttgtacracatcttcccgagcctcctggactgggtgcctgggccgcaccaacgcatcttccagaacttcaagtgcctgagagacctcatcgcccacagcgtccacgaccaccaggcctcgctagaccccagatctccccgggacttcatccactgcttcctcaccaagatggcagaggagaaggaggacccactgagccacttccacatggataccctgctgatgaccacacataacctgctctttggcggcaccaagacggtgagcaccacgctgcaccacgccttcctggcactcatgaagtacccaaaagttcaagcccgcgtgcaggaggagatcgacctcgtggtgggacgcgcgcggctgccggcgctgaaggaccgcgcggccatgccttacacagacgcggtgatccacgaggtgcagcgctttgcagacatcatccccatgaacttgccgcaccgcgtcactagggacacggcctttcgcggcttcctgatacccaagggcaccgatgtcatcacmctccttaacaccgtccactacgaccccagccagttcctgacgccccaggagttcaaccccgagcattttttggatgccaatcagtccttcaagaagagtccagccttcatgcccttctcagctgggcgccgtctgtgcctgggagagtcgctggcgcgcatggagctctttctgtacctcacygccatcctgcagagcttttcgctgcagccgctgggtgcgcccgaggacatcgacctgacccyactcagctcaggtcttggcaatttgccgcggcctttccagctgtgcctgcgcccgcgctaacgccccggcccttccagattcgcctgtgagcgatgaggcccrcccatgcgggttgctacgtccccttcttggtccacagtctgccctcatccctctggcagtcacgctgtcttccctgcatgctgtgcctgccgcgtgcccttcccccatccctccaatctgtrccctgtctgcagggcagaggcagatgtggcatgtctttttgtacccacagagcttgttctatggcacgcccttttctrggctttttgtatcatttcttagtacattgtaatagattcaaaccagtcttgg

SEQ ID NO: 2701 - DNA, 1826 bp, Homo sapiens
gcaggctctagcgcatcccagccagtgtctcctgcagctcagcagctgccttcaccatggacagcataagcacagccatcttactcctgctcctggctctcgtctgtctgctcctgaccctaagctcaagagataagggaaagctgcctccrggacccagacccctcycaatcctgggaaacctgctgctgctttgctcccaagacatgctgacttctctcactaagctgagcaaggagtatggctccatgtacacagtgcacctgggacccaggcgggtggtggtcctcagcgggtaccaagctgtgaaggaggccctggtggaccagggagaggagtttagtggccscggtgactaccctgcctttttcaactttaccaagggcaatggcatcgccttctccagtggggatcgatggaaggtcctgagacagttctctatccagattctacggaatttcgggatggggaagagaagcattgaggagcgaatcctagaggagggcagcttcctgctggcggagctgcggaaaactgaaggcgagccctttgaccccacgtttgtgctgagtcgctcaskgtccaacattatctgttccgtgctcttcggcagccgcttcgactatgatgatgagcgtctgctcaccattatccgccttatcaatgacaacttccaaatcatgagcagcccctggggcgagttgtacracatcttcccgagcctcctggactgggtgcctgggccgcaccaacgcatcttccagaacttcaagtgcctgagagacctcatcgcccacagcgtccacgaccaccaggcctcgctagaccccagatctccccgggacttcatccactgcttcctcaccaagatggcagaggagaaggaggacccactgagccacttccacatggataccctgctgatgaccacacataacctgctctttggcggcaccaagacggtgagcaccacgctgcaccacgccttcctggcactcatgaagtacccaaaagttcaagcccgcgtgcaggaggagatcgacctcgtggtgggacgcgcgcggctgccggcgctgaaggaccgcgcggccatgccttacacagacgcggtgatccacgaggtgcagcgctttgcagacatcatccccatgaacttgccgcaccgcgtcactagggacacggcctttcgcggcttcctgatacccaagggcaccgatgtcatcacmctccttaacaccgtccactacgaccccagccagttcctgacgccccaggagttcaaccccgagcattttttggatgccaatcagtccttcaagaagagtccagccttcatgcccttctcagctgggcgccgtctgtgcctgggagagtcgctggcgcgcatggagctctttctgtacctcacygccatcctgcagagcttttcgctgcagccgctgggtgcgcccgaggacatcgacctgacccyactcagctcaggtcttggcaatttgccgcggcctttccagctgtgcctgcgcccgcgctaacgccccggcccttccagattcgcctgtgagcgatgaggcccrcccatgcgggttgctacgtccccttcttggtccacagtctgccctcatccctctggcagtcacgctgtcttccctgcatgctgtgcctgccgcgtgcccttcccccatccctccaatctgtrccctgtctgcagggcagaggcagatgtggcatgtctttttgtacccacagagcttgttctatggcacgcccttttctrggctttttgtatcatttcttagtacattgtaatagattcaaaccagtcttgg

SEQ ID NO: 2702 - DNA, 2907 bp, Homo sapiens
tggaaccatggagctcagcgtcctcctcttccttgcactcctcacaggcctcttgctactcctggttcagcgtcaccctaactcccatggcaccctcccaccagggccccgccctctgccccttttggggaaccttctgcagatggacagaagaggcctactcaaatcctttctgaggttccgagagaaatatggggacgtcttcacggtacacctgggaccgaggcccgtggtcatgctgtgtggagtagaggccatacgggaggccctggtggacaacgctgaggccttctctggccggggaaaaatcgtcatcatggacccagtctaccagggatatrgcatgctctttgccaatggaaaccgctggaaggtgcttcggcgattctctgtgacyaccatgagggacttcgggatgggaaagcggagtgtggaggagcggattcaggaygaggctcagtgtctgatagaggaacttcggaaatccaagggrgccctcgtggaccccaccttcctcttccattccattaccgccaasatcatctgctccatcatctttggaaaacgcttccactaccaagatcaagagttcctgaagacgctgaacttgttctgccagagtttcttactcatcagctctatatccagccagctgtttgagctcttctctggcttcttgaaatactttcctggggcacacaggcaagtttacaaaaacctacaggaaatcaatgcttacattggccacagtgtggagaagcaccgtgaaaccctggaccccagcgcccccagggacctcatcgacacctacctgctccacatggaaaaagagaaatccaacccacacagtgaattcagccaccagaacctcatcatcaacacgctctcgctcttctttgctggcactgagaccaccagcaccactctccgctacggcttcctgctcatgctcaaataccctcatgtcgcagagagagtctacaaggagattgaacaggtggttggcccacatcgccctccagcgcttgatgaccgagccaaaatgccatacacagaggcagtcatccgtgagattcagagatttgctgaccttctccccatgggtgtgccccacattgtcacccaacacaccagcttcygagggtacaccatccccaaggacacggaagtatttctcatcctgagcactgctctccgtgacccacactactttgaaaaaccagacgccttcaatcctgaccactttctggatgccaatggggcactgaaaaagaatgaagcttttatccccttctccttagggaagcggatttgtcttggtgaaggcattgcccgtgcggaattgttcctcttcttcaccaccatcctccagaacttctccgtggccagccccgtggctcctgaagacatcgatctgacaccccaggagtgtggtgtgggcaaaatacccccaacataccagatctgcttcctgccccgctgaaggggctgagggaagggggtcaaaggattccagggtcattcagtgtccccacctctgtagataatggctctgactccctgcaacttcctgcctctgagagacctgctgcaagccagcttccttcccttccatggcaccagttgtctgaggtcgcagtgcaaatgagtggaggagtgagattattgaaaattataatatacaaaattatatatatatattttgagacagagtctcactcagttgcccaggctggagtgcagtggcgtgatctcggctcactgcaacctccacccccggggttcaagaaattctcctgcctcagcctccctagtagctgggattacaggtgtgtgctaccatgcctggctaatttttgtatttttagtagagatggggtttcaccgtgttggccaggctgatctcaaactcctgaactcaagtgattcacccaccttagcctcccaaagtgctgggattacaggtgtgagtcaccatgcccggccatgtatatatataattttaaaaattaagatgaaattcacataaaataaaattagccattttaaagtgtacaatttagtggtgtgtggttcattcacaaagctgtacaaccaccaccatctagttccaaacattttctttttttctgagacggagtctcactctgtcacccaggctcgagttcagtggtcttgaactcctgatgtcaggtgattctcctagttccaaatgttttcattatctccccccaacaaaacccatacctatcaagctgtcactccccataccccattctctttttcatctcagcccctgtcaatctggtttttgtccttatggacttaccaattctgaatatttcctataaacagaatcacacaatatttgattttttttttaaaactaagccttgctctgtctcccaggctggagtgctgtggcgtgattttkgttcactgcaacctcygccttccaagwtcaagagattctccwgyctcagctyccaagtagctgggattacaggcatgtggtaccaygcctggctaattttcttgtatttttagtagggacatgttggccaggctggttgtgagctcctggcctcaggtgatccacacgcctcagtgtcccagagtgctgatattacaggcgtaatatgtgatcttttgtgtctggttcctttcacgttgaacgctatttttgaggttcgtgcctgttgtagaccacagtcacacactgctgtagtcttcccccatcctcattcccagctgcctcctcctactgtttccctctatcaaaaagcctccttggcgcaggttccctgagctgtgggattctgcactggtgctttggattccctgatatgttccttcaaatccactgagaattaaataaacatcgctaaagcatgacctccccacgtc

SEQ ID NO: 2703 - DNA, 2016 bp, Homo sapiens
aaatgtgttgttcagtatttactatggtctgttcagctgttggacggccagatgctacgtgttgtgttgagatatttctgggtgagattgtagagttgtcaggcactgcatgtgattttgcrttgtgtcatctgctggctgccaacgttgttgcrttgctgcatagtgtgtcctttgttctgctgccttgactgtatgtgttgtgatgccacatcgtgtgttctgtgctgtctgctgggttgctgtgtactagygtgtgttgtgtggcaggattatgtagcggtatgctggcattacgtgttggtgtgtggttaccgtgtcttgggatgtttccgggctggctattaggtcactgcgtgtcgtgtgttggcatgtactgtgatcgtatttgctgggtgttctgttgccctgtgttgttgtgttccgtgatgcctgatgattgccttgtgctatgtcgcgtgctgtgtgtgtgttgccaacctgttctgtggttgggcgttgttgctgtcgatgtgctgcaggaagctgtgggttcggtgctgtctgtggcattgacagatgcttttggggtgtygttaagcagcatgttgtgaccaygtgcccgtgtttgcaccgtaagacacgttgccatggttgagtcggatgttgtgcaaattaatggtgttgctgcatgaggtctggtgtgctgcacatcgcgtcttcctgacccattccattcttcaccctcaggcgagccctttgaccccacgtttgtgctgagtcgctcacggtccaacattatctgttccgtgctcttcggcagccgcttcgactatgatgatgagcgtctgctcaccattatccgccttatcaatgacaactttcaaatcatgagcagcccctggggcgaggtcagccaactgattgtacgacatcttcccgagcctcctggactgggtgcctgggccgcaccaacgcatcttccagaacttcaagtgcctgagagacctcatcgcccacagcgtccacgaccaccaggcctcgctagaccccagatctccccgggacttcatccactgcttcctcaccaagatggcagagaagaaggaggacccgctragccacttccacatggataccctgctgatgaccacacataacctgctctttggcggcaccgagacggtgggcaccacgctgcgccacgccttcctggcattcatgaagtacccgaaagttcaagcccacgtgcaggaggagatcaaccttgtggtgggacacgtgcggctgccagcgctgaaggaccgcgcggccatgccttacacagacatggtgatccacgaggtgcagcrctttgcagacatcatccccatgaacttgccgcaccgcatcactagggacacggcctttcacggcttcctgatacccaagggcaccgatgtcatcaccctccttaacaccgtccactacgaccccagccagttcctgacgccccaggagttcaaccccgagcattttttggatgccaatcagtccttcaagaagagtccagccttcatgcccttctcagctgggcaccgtctgtgcctgggagagtcgctggcgcgcatggagctctttctgtacctcaccgccatcctgcagagcttttcgctgcagccgctgggtgcgcccgaggacatcgacctgaccccgctcagctcaggtcttggcaatttgccgcggcctttccagctgtgcctgcrcccgcgctaacgccccggcccttccagattcgcctgtgagcgatgaggcccacccatgtgggttgctacgtccccttcttggtccacggtctgcctycatccctctggcagtcacgctgtcttccctgcatgctgtgcctgccgcgtgcccttcccccatccctccaatctgtrccccgtctgcagggcagaggcagatgtggcatgtctttttgtacccacagagcttgttctatggcacgcccttttctrggctttttgtatcatttcttagtacaytgtaatagattca

SEQ ID NO: 2704 - DNA, 2382 bp, Homo sapiens
gcagggccgcgcggcggcagcaggcgggggcgcgtggcgcgggccgcgctcggggaggcgcctgggcccgccctcctccggggcgccgcgggaggggcccgggttggcgcggggcggggagagccgcctggcccctcccctccgccgccctccccaaagttgccgtctcccccggggccggccggtcttatgatccggcggatcctcctggggaggccgggccggggagagggcgcgggcgccgagtggcgggggcagcgggcgggcgcggcgaccggggccggggcggggatccgggcggcgaccgcggcggcggcagcgccccgggcccgccgccccctcccctcctgcgaggggagccgctgcatggggccgggggggcggccctgcggcgcggagcggcggcgacggcggcggaccccccaggcgggctggggctgagcccggggccggggcgggggctccggggggaccatgcccggaggccggccggcagcagcatggctcacgggcccggcgcgctgatgctcaagtgcgtggtggtcggcgacggggcggtgggcaagacgtgcctactcatgagctatgccaacgacgccttcccggaggagtacgtgcccaccgtcttcgaccactacgcagtcagcgtcaccgtggggggcaagcagtacctcctaggactctatgacacggccggacaggaagactatgaccgtctgaggcctttatcttacccaatgaccgatgtcttccttatatgcttctcggtggtaaatccagcctcatttcaaaatgtgaaagaggagtgggtaccggaacttaaggaataygcaccaaatgtaccctttttattaataggaactcagattgatctccgagatgaccccaaaactttagcaagactgaatgatatgaaagaaaaacctatatgtgtggaacaaggacagaaactagcaaaagagataggagcatgctgctatgtggaatgttcagctttaacccagaagggattgaagactgtttttgatgaggctatcatagccattttaactccaaagaaacayactgtaaaaaaaagaataggatcaagatgtataaactgttgtttaattacrtgagaaacatcttcagtggccaaggaaactgtccatttctctcagaaagcaaatgaaatgctacagctatacccagaccttttataggtaatgaagcagttcaaaacttgaaagaaaacaaaacctgtcctcagaattctataaagtgtattaagaatgttccttaaaggtttaagaagcagtaagcagcatctgaagccacaatctattataaatactttatttcaactagaaggtacaatctctcaggggtttcatagtttaaaaagctacaatcacatcatgttgtaactacgtaaaaaacagagctgtaaatggaactgcttggctttgaccatacmcatttctgcccagcccttacagaatctgcacaaagaaatatctccctttgctccrgttaattgttctkgtatgtaagttgctttctattccagtatatccagagtggtgaaataacaaggccagccacgtagccaaaggtcgctccaagcgtacaggagatgggccatacctgaggagagaatgtatgagatcaaaaaagaacaaatgttttattattacttgagcacaagtgtaacctaaatatttctatattaaagcttaatgtgctttcttaaagaatgccaaaagtgtaataaggtcataactgcatttatcatgaacactaaaaatgtacacattttagttartgtgyattaaactgtaacaaggcttctggcaattgtagatttagtttgacgctccccaaagtgcatgagacacatgctaaaattacaaattaaaattttgggtcagactttgccataatgatagactcaatttagctctctgaactagttggtaattttttttttttaattcccactttggctgtgtacatcaaatgaaatgagaagtgtgtatgctgaccaaaccacaagaaactttctttaagttgtgttaaagaggaaagacctagaatccaagcgtgttacatgaaaattgtaacagagcagctgcttccacctttcagatatrgatgytggraccacagcagaagttatagagcgasaacttayatacacacctagaatgtaagttaaacaaaataccggcttcsagagaccccttttctccagccatattacatcaggctagaagtaattaatgttgatttatttcatctacaagcagttggtccctaagtgaaaggctctgcttgaaaaaaaaaaaatctttctctggggggaacaggccacagaactgtgttagaggtgaaccatcttaa

SEQ ID NO: 2705 - DNA, 2642 bp, Homo sapiens
gcagggccgcgcggcggcagcaggcgggggcgcgtggcgcgggccgcgctcggggaggcgcctgggcccgccctcctccggggcgccgcgggaggggcccgggttggcgcggggcggggagagccgcctggcccctcccctccgccgccctccccaaagttgccgtctcccccggggccggccggtcttatgatccggcggatcctcctggggaggccgggccggggagagggcgcgggcgccgagtggcgggggcagcgggcgggcgcggcgaccggggccggggcggggatccgggcggcgaccgcggcggcggcagcgccccgggcccgccgccccctcccctcctgcgaggggagccgctgcatggggccgggggggcggccctgcggcgcggagcggcggcgacggcggcggaccccccaggcgggctggggctgagcccggggccggggcgggggctccggggggaccatgcccggaggccggccggcagcagcatggctcacgggcccggcgcgctgatgctcaagtgcgtggtggtcggcgacggggcggtgggcaagacgtgcctactcatgagctatgccaacgacgccttcccggaggagtacgtgcccaccgtcttcgaccactacgcaggaagactatgaccgtctgaggcctttatcttacccaatgaccgatgtcttccttatatgcttctcggtggtaaatccagcctcatttcaaaatgtgaaagaggagtgggtaccggaacttaaggaataygcaccaaatgtaccctttttattaataggaactcagattgatctccgagatgaccccaaaactttagcaagactgaatgatatgaaagaaaaacctatatgtgtggaacaaggacagaaactagcaaaagagataggagcatgctgctatgtggaatgttcagctttaacccagaagggattgaagactgtttttgatgaggctatcatagccattttaactccaaagaaacayactgtaaaaaaaagaataggatcaagatgtataaactgttgtttaattacgtgagaaacatcttcagtggccaaggaaactgtccatttctctcagaaagcaaatgaaatgctacagctatacccagaccttttataggtaatgaagcagttcaaaacttgaaagaaaacaaaacctgtcctcagaattctataaagtgtattaagaatgttccttaaaggtttaagaagcagtaagcagcatctgaagccacaatctattataaatactttatttcaactagaaggtacaatctctcaggggtttcatagtttaaaaagctacaatcacatcatgttgtaactacgtaaaaaacagagctgtaaatggaactgcttggctttgaccatacmcatttctgcccagcccttacagaatctgcacaaagaaatatctccctttgctccrgttaattgttctkgtatgtaagttgctttctattccagtatatccagagtggtgaaataacaaggccagccacgtagccaaaggtcgctccaagcgtacaggagatgggccatacctgaggagagaatgtatgagatcaaaaaagaacaaatgttttattattacttgagcacaagtgtaacctaaatatttctatattaaagcttaatgtgctttcttaaagaatgccaaaagtgtaataaggtcataactgcatttatcatgaacactaaaaatgtacacattttagttartgtgyattaaactgtaacaaggcttctggcaattgtagatttagtttgacgctccccaaagtgcatgagacacatgctaaaattacaaattaaaattttgggtcagactttgccataatgatagactcaatttagctctctgaactagttggtaattttttttttttaattcccactttggctgtgtacatcaaatgaaatgagaagtgtgtatgctgaccaaaccacaagaaactttctttaagttgtgttaaagaggaaagacctagaatccaagcgtgttacatgaaaattgtaacagagcagctgcttccacctttcagatatrgatgytggraccacagcagaagttatagagcgasaacttayatacacacctagaatgtaagttaaacaaaataccggcttcsagagaccccttttctccagccatattacatcaggctagaagtaattaatgttgatttatttcatctacaagcagttggtccctaagtgaaaggctctgcttgaaaaaaaaaaraaaaaaaagttggaggaaaattttcatgttcttctgtgaagcttatttggtacactggagccatttctaatctttctctggggggaacaggccacagaactgtgttagaggtgaaccatcttaattactagttctattacctaattcagcttccttgtttggtctgctgtggatctgccttattgcataygccatgcatcagataatggatgcatcagataatggtgttagacaaagcttcattgtgaacaacctaatgcattttagagaaacaatctcatcacattttttctagcctttcctacatttaaacttgctgttgcccaaattataattttttaaatgtctttggtgggcttctgttaattcacatg

SEQ ID NO: 2706 - DNA, 2701 bp, Homo sapiens
gcagggccgcgcggcggcagcaggcgggggcgcgtggcgcgggccgcgctcggggaggcgcctgggcccgccctcctccggggcgccgcgggaggggcccgggttggcgcggggcggggagagccgcctggcccctcccctccgccgccctccccaaagttgccgtctcccccggggccggccggtcttatgatccggcggatcctcctggggaggccgggccggggagagggcgcgggcgccgagtggcgggggcagcgggcgggcgcggcgaccggggccggggcggggatccgggcggcgaccgcggcggcggcagcgccccgggcccgccgccccctcccctcctgcgaggggagccgctgcatggggccgggggggcggccctgcggcgcggagcggcggcgacggcggcggaccccccaggcgggctggggctgagcccggggccggggcgggggctccggggggaccatgcccggaggccggccggcagcagcatggctcacgggcccggcgcgctgatgctcaagtgcgtggtggtcggcgacggggcggtgggcaagacgtgcctactcatgagctatgccaacgacgccttcccggaggagtacgtgcccaccgtcttcgaccactacgcagtcagcgtcaccgtggggggcaagcagtacctcctaggactctatgacacggccggacaggaagactatgaccgtctgaggcctttatcttacccaatgaccgatgtcttccttatatgcttctcggtggtaaatccagcctcatttcaaaatgtgaaagaggagtgggtaccggaacttaaggaataygcaccaaatgtaccctttttattaataggaactcagattgatctccgagatgaccccaaaactttagcaagactgaatgatatgaaagaaaaacctatatgtgtggaacaaggacagaaactagcaaaagagataggagcatgctgctatgtggaatgttcagctttaacccagaagggattgaagactgtttttgatgaggctatcatagccattttaactccaaagaaacayactgtaaaaaaaagaataggatcaagatgtataaactgttgtttaattacgtgagaaacatcttcagtggccaaggaaactgtccatttctctcagaaagcaaatgaaatgctacagctatacccagaccttttataggtaatgaagcagttcaaaacttgaaagaaaacaaaacctgtcctcagaattctataaagtgtattaagaatgttccttaaaggtttaagaagcagtaagcagcatctgaagccacaatctattataaatactttatttcaactagaaggtacaatctctcaggggtttcatagtttaaaaagctacaatcacatcatgttgtaactacgtaaaaaacagagctgtaaatggaactgcttggctttgaccatacmcatttctgcccagcccttacagaatctgcacaaagaaatatctccctttgctccrgttaattgttctkgtatgtaagttgctttctattccagtatatccagagtggtgaaataacaaggccagccacgtagccaaaggtcgctccaagcgtacaggagatgggccatacctgaggagagaatgtatgagatcaaaaaagaacaaatgttttattattacttgagcacaagtgtaacctaaatatttctatattaaagcttaatgtgctttcttaaagaatgccaaaagtgtaataaggtcataactgcatttatcatgaacactaaaaatgtacacattttagttartgtgyattaaactgtaacaaggcttctggcaattgtagatttagtttgacgctccccaaagtgcatgagacacatgctaaaattacaaattaaaattttgggtcagactttgccataatgatagactcaatttagctctctgaactagttggtaattttttttttttaattcccactttggctgtgtacatcaaatgaaatgagaagtgtgtatgctgaccaaaccacaagaaactttctttaagttgtgttaaagaggaaagacctagaatccaagcgtgttacatgaaaattgtaacagagcagctgcttccacctttcagatatrgatgytggraccacagcagaagttatagagcgasaacttayatacacacctagaatgtaagttaaacaaaataccggcttcsagagaccccttttctccagccatattacatcaggctagaagtaattaatgttgatttatttcatctacaagcagttggtccctaagtgaaaggctctgcttgaaaaaaaaaaraaaaaaaagttggaggaaaattttcatgttcttctgtgaagcttatttggtacactggagccatttctaatctttctctggggggaacaggccacagaactgtgttagaggtgaaccatcttaattactagttctattacctaattcagcttccttgtttggtctgctgtggatctgccttattgcataygccatgcatcagataatggatgcatcagataatggtgttagacaaagcttcattgtgaacaacctaatgcattttagagaaacaatctcatcacattttttctagcctttcctacatttaaacttgctgttgcccaaattataattttttaaatgtctttggtgggcttctgttaattcacatg

SEQ ID NO: 2707 - DNA, 2440 bp, Homo sapiens
gcagggccgcgcggcggcagcaggcgggggcgcgtggcgcgggccgcgctcggggaggcgcctgggcccgccctcctccggggcgccgcgggaggggcccgggttggcgcggggcggggagagccgcctggcccctcccctccgccgccctccccaaagttgccgtctcccccggggccggccggtcttatgatccggcggatcctcctggggaggccgggccggggagagggcgcgggcgccgagtggcgggggcagcgggcgggcgcggcgaccggggccggggcggggatccgggcggcgaccgcggcggcggcagcgccccgggcccgccgccccctcccctcctgcgaggggagccgctgcatggggccgggggggcggccctgcggcgcggagcggcggcgacggcggcggaccccccaggcgggctggggctgagcccggggccggggcgggggctccggggggaccatgcccggaggccggccggcagcagcatggctcacgggcccggcgcgctgatgctcaagtgcgtggtggtcggcgacggggcggtgggcaagacgtgcctactcatgagctatgccaacgacgccttcccggaggagtacgtgcccaccgtcttcgaccactacgcagtcagcgtcaccgtggggggcaagcagtacctcctaggactctatgacacggccggacagataggagcatgctgctatgtggaatgttcagctttaacccagaagggattgaagactgtttttgatgaggctatcatagccattttaactccaaagaaacayactgtaaaaaaaagaataggatcaagatgtataaactgttgtttaattacgtgagaaacatcttcagtggccaaggaaactgtccatttctctcagaaagcaaatgaaatgctacagctatacccagaccttttataggtaatgaagcagttcaaaacttgaaagaaaacaaaacctgtcctcagaattctataaagtgtattaagaatgttccttaaaggtttaagaagcagtaagcagcatctgaagccacaatctattataaatactttatttcaactagaaggtacaatctctcaggggtttcatagtttaaaaagctacaatcacatcatgttgtaactacgtaaaaaacagagctgtaaatggaactgcttggctttgaccatacmcatttctgcccagcccttacagaatctgcacaaagaaatatctccctttgctccrgttaattgttctkgtatgtaagttgctttctattccagtatatccagagtggtgaaataacaaggccagccacgtagccaaaggtcgctccaagcgtacaggagatgggccatacctgaggagagaatgtatgagatcaaaaaagaacaaatgttttattattacttgagcacaagtgtaacctaaatatttctatattaaagcttaatgtgctttcttaaagaatgccaaaagtgtaataaggtcataactgcatttatcatgaacactaaaaatgtacacattttagttartgtgyattaaactgtaacaaggcttctggcaattgtagatttagtttgacgctccccaaagtgcatgagacacatgctaaaattacaaattaaaattttgggtcagactttgccataatgatagactcaatttagctctctgaactagttggtaattttttttttttaattcccactttggctgtgtacatcaaatgaaatgagaagtgtgtatgctgaccaaaccacaagaaactttctttaagttgtgttaaagaggaaagacctagaatccaagcgtgttacatgaaaattgtaacagagcagctgcttccacctttcagatatrgatgytggraccacagcagaagttatagagcgasaacttayatacacacctagaatgtaagttaaacaaaataccggcttcsagagaccccttttctccagccatattacatcaggctagaagtaattaatgttgatttatttcatctacaagcagttggtccctaagtgaaaggctctgcttgaaaaaaaaaaraaaaaaaagttggaggaaaattttcatgttcttctgtgaagcttatttggtacactggagccatttctaatctttctctggggggaacaggccacagaactgtgttagaggtgaaccatcttaattactagttctattacctaattcagcttccttgtttggtctgctgtggatctgccttattgcataygccatgcatcagataatggatgcatcagataatggtgttagacaaagcttcattgtgaacaacctaatgcattttagagaaacaatctcatcacattttttctagcctttcctacatttaaacttgctgttgcccaaattataattttttaaatgtctttggtgggcttctgttaattcacatg

SEQ ID NO: 2708 - DNA, 2417 bp, Homo sapiens
acgcggctcctgctccccgcacttcctacccctcggcgccctgggccgtcctccttgaccttcccacatcccctttcctactgccccaaggccccgggggaaatattcgaggggaccgagcgagacgtggctacgggacttgggagaagggggtggacggctggggaccacatcacaccccggccctttgccggttcacagtgagctggccgcacgggaaaagggggtgacatctcgcggggagcgcccccacgcctctagctgggttgggagaggagggtccgggtggggagcgaaattgccccagagcccaggtcactgtgagcttctctccccgcccccacttctgtccttgcagtcagcgtcaccgtggggggcaagcagtacctcctaggactctatgacacggccggacaggaagactatgaccgtctgaggcctttatcttacccaatgaccgatgtcttccttatatgcttctcggtggtaaatccagcctcatttcaaaatgtgaaagaggagtgggtaccggaacttaaggaataygcaccaaatgtaccctttttattaataggaactcagattgatctccgagatgaccccaaaactttagcaagactgaatgatatgaaagaaaaacctatatgtgtggaacaaggacagaaactagcaaaagagataggagcatgctgctatgtggaatgttcagctttaacccagaagggattgaagactgtttttgatgaggctatcatagccattttaactccaaagaaacayactgtaaaaaaaagaataggatcaagatgtataaactgttgtttaattacgtgagaaacatcttcagtggccaaggaaactgtccatttctctcagaaagcaaatgaaatgctacagctatacccagaccttttataggtaatgaagcagttcaaaacttgaaagaaaacaaaacctgtcctcagaattctataaagtgtattaagaatgttccttaaaggtttaagaagcagtaagcagcatctgaagccacaatctattataaatactttatttcaactagaaggtacaatctctcaggggtttcatagtttaaaaagctacaatcacatcatgttgtaactacgtaaaaaacagagctgtaaatggaactgcttggctttgaccatacmcatttctgcccagcccttacagaatctgcacaaagaaatatctccctttgctccrgttaattgttctkgtatgtaagttgctttctattccagtatatccagagtggtgaaataacaaggccagccacgtagccaaaggtcgctccaagcgtacaggagatgggccatacctgaggagagaatgtatgagatcaaaaaagaacaaatgttttattattacttgagcacaagtgtaacctaaatatttctatattaaagcttaatgtgctttcttaaagaatgccaaaagtgtaataaggtcataactgcatttatcatgaacactaaaaatgtacacattttagttartgtgyattaaactgtaacaaggcttctggcaattgtagatttagtttgacgctccccaaagtgcatgagacacatgctaaaattacaaattaaaattttgggtcagactttgccataatgatagactcaatttagctctctgaactagttggtaattttttttttttaattcccactttggctgtgtacatcaaatgaaatgagaagtgtgtatgctgaccaaaccacaagaaactttctttaagttgtgttaaagaggaaagacctagaatccaagcgtgttacatgaaaattgtaacagagcagctgcttccacctttcagatatrgatgytggraccacagcagaagttatagagcgasaacttayatacacacctagaatgtaagttaaacaaaataccggcttcsagagaccccttttctccagccatattacatcaggctagaagtaattaatgttgatttatttcatctacaagcagttggtccctaagtgaaaggctctgcttgaaaaaaaaaaraaaaaaaagttggaggaaaattttcatgttcttctgtgaagcttatttggtacactggagccatttctaatctttctctggggggaacaggccacagaactgtgttagaggtgaaccatcttaattactagttctattacctaattcagcttccttgtttggtctgctgtggatctgccttattgcataygccatgcatcagataatggatgcatcagataatggtgttagacaaagcttcattgtgaacaacctaatgcattttagagaaacaatctcatcacattttttctagcctttcctacatttaaacttgctgttgcccaaattataattttttaaatgtctttggtgggcttctgttaattcacatg

SEQ ID NO: 2709 - DNA, 2323 bp, Homo sapiens
gcagggccgcgcggcggcagcaggcgggggcgcgtggcgcgggccgcgctcggggaggcgcctgggcccgccctcctccggggcgccgcgggaggggcccgggttggcgcggggcggggagagccgcctggcccctcccctccgccgccctccccaaagttgccgtctcccccggggccggccggtcttatgatccggcggatcctcctggggaggccgggccggggagagggcgcgggcgccgagtggcgggggcagcgggcgggcgcggcgaccggggccggggcggggatccgggcggcgaccgcggcggcggcagcgccccgggcccgccgccccctcccctcctgcgaggggagccgctgcatggggccgggggggcggccctgcggcgcggagcggcggcgacggcggcggaccccccaggcgggctggggctgagcccggggccggggcgggggctccggggggaccatgcccggaggccggccggcagcagcatggctcacgggcccggcgcgctgatgctcaagtgcgtggtggtcggcgacggggcggtgggcaagacgtgcctactcatgagctatgccaacgacgccttcccggaggagtacgtgcccaccgtcttcgaccactacgcaggaagactatgaccgtctgaggcctttatcttacccaatgaccgatgtcttccttatatgcttctcggtggtaaatccagcctcatttcaaaatgtgaaagaggagtgggtaccggaacttaaggaataygcaccaaatgtaccctttttattaataggaactcagattgatctccgagatgaccccaaaactttagcaagactgaatgatatgaaagaaaaacctatatgtgtggaacaaggacagaaactagcaaaagagataggagcatgctgctatgtggaatgttcagctttaacccagaagggattgaagactgtttttgatgaggctatcatagccattttaactccaaagaaacayactgtaaaaaaaagaataggatcaagatgtataaactgttgtttaattacrtgagaaacatcttcagtggccaaggaaactgtccatttctctcagaaagcaaatgaaatgctacagctatacccagaccttttataggtaatgaagcagttcaaaacttgaaagaaaacaaaacctgtcctcagaattctataaagtgtattaagaatgttccttaaaggtttaagaagcagtaagcagcatctgaagccacaatctattataaatactttatttcaactagaaggtacaatctctcaggggtttcatagtttaaaaagctacaatcacatcatgttgtaactacgtaaaaaacagagctgtaaatggaactgcttggctttgaccatacmcatttctgcccagcccttacagaatctgcacaaagaaatatctccctttgctccrgttaattgttctkgtatgtaagttgctttctattccagtatatccagagtggtgaaataacaaggccagccacgtagccaaaggtcgctccaagcgtacaggagatgggccatacctgaggagagaatgtatgagatcaaaaaagaacaaatgttttattattacttgagcacaagtgtaacctaaatatttctatattaaagcttaatgtgctttcttaaagaatgccaaaagtgtaataaggtcataactgcatttatcatgaacactaaaaatgtacacattttagttartgtgyattaaactgtaacaaggcttctggcaattgtagatttagtttgacgctccccaaagtgcatgagacacatgctaaaattacaaattaaaattttgggtcagactttgccataatgatagactcaatttagctctctgaactagttggtaattttttttttttaattcccactttggctgtgtacatcaaatgaaatgagaagtgtgtatgctgaccaaaccacaagaaactttctttaagttgtgttaaagaggaaagacctagaatccaagcgtgttacatgaaaattgtaacagagcagctgcttccacctttcagatatrgatgytggraccacagcagaagttatagagcgasaacttayatacacacctagaatgtaagttaaacaaaataccggcttcsagagaccccttttctccagccatattacatcaggctagaagtaattaatgttgatttatttcatctacaagcagttggtccctaagtgaaaggctctgcttgaaaaaaaaaaaatctttctctggggggaacaggccacagaactgtgttagaggtgaaccatcttaa

SEQ ID NO: 2710 - DNA, 1683 bp, Homo sapiens
cactcccagccggccacagcctgacacgccgcgcggccccccagtctcccgcggccgctcccccaggcatggcacrgggcctcgcctcactatggcagcagcacggcacagcacgctcgacttcatgctcagtgccaaagctgatggtgagaccattctaaaaggcctccagtccattttccaggagcaggggatggcggagtcggtgcacacctggcaggaccatggctatttagcaacctacacaaacaagaatggcagctttgccaatatgagaatttacccacatggattggtgttgctggaccttcagagttatgatggtgatgcgcaaggcaaagaagagatcgacagtattttgaacaaagtagaagaaagaatgaaagaattgagtcaggacagtactgggcgggtgaaacgattaccacccatagtgcgaggagagccatcgacagatattggcccaccgccgatgggcgcctggttgaatatgacatagatgaagtggtatatgatgaagattcaccttatcaaaatataaaaattctacactcgaagcagtttggaaatattctcattcttagtggggatgttaatttggcagagagtgatttggcatatacccgggccatcatgggcagtggcaaagaagattacactggcaaagatgtactcattctgggaggtggagacagaggcatattgtgtgaaatagtcaaactaaaaccaaagatggtcactatggtagagactgaccaaatgatgattgatgggtgtaagaaatacatgcgaaaaacgtgtggcgatgtcttagacaatcttaaaggagactgctatcaggttctaatagaagactgtatcccggtactgaagagatacaccaaagaagggagagaatttgattatgtgattaatgatttgacagctgttccaatctccacgtctccagaagaagattccacatgggagtttctcagactgattcttgacctctcaatgaaagtgttgaaacaggatgggaaatattttacacaggggaactgtgtcaatctgaaagaagcactgtcgctctatgaagaacagctggggcgcctgtattgtcctgtggaattttcaaaggagatcatctgtgtcccttcatacctggaattgtgggtattttacactgtttggaagaaagctaaaccctgaagatcagtagcccctaatcacatgtgctgcaaatagccttcctgacctccatatgctgtacatgacatcaaaatgagtcaggcaattgattgtgaagtccttaaagttttcctttttttagtaattatttttaatttaaaaaagyaaatggaaaatgtatattttgatgagcttagggtgttttttttgaaagtcagctgaaggatggttagacagcacagcgaagactgctaaatgcactgacccccccattagaatgtgatttttgttcctttttatttatctgtgggcttttgtttttgtttttgttttggtagatcttcagtttggatatttggaggagtgaacatcgttgttttgctggagggaagatcttgatggtgtttctttccccaaaaattgacttagatattaaaaattggtgcttataagagagagttaaaaaaataggattgcttcaattaaaattacaaaagagaaaaaaaaatacat

SEQ ID NO: 2711 - DNA, 426 bp, Homo sapiens
atgactaaggagcatcaagtgactaccaaacccaaactccccatcaagcactgggtacgaactgaaaaggctatcccattggccctagaggggaaggacctcctggctcaggctggcaggggctccaagaagacagctgcttatgctattctgatgctgcagctgttgctccacaggacggcgacaggtccagtagtagaacacgcagtgagaggccttgttcttgctcctaccaaagagctggcacagcaggcacagtccatgattcagtggctagctacctactgtgctcgggatgtccgagtggccaatgcctcagctgctgaagattcagcctttcagagagctgtgctgatggagaagccagatgtgttacagccatggtgcatgttgcatgcagtcgtctatacattatttaaaygggct

SEQ ID NO: 2712 - DNA, 1544 bp, Homo sapiens
tcacttccgtccagaccggaacccaagatggctgcgctgttgctgagacacgttggtcgtcattgcctccgagcccactttagccctcagctctgtatcagaaattggtctcttcccatggcgatgtccatctgccaccgtggcactggtattgctttgagtgcaggggtctctctttttggcatgtcggccctgttactccctgggaactttgagtcttatttggaacttgtgaagtccctgtgtctggggccagcactgatccacacagctaagttygcacttgtcttccctctcatgtatcatacctggaatgggatccgacacttgatgtgggacctaggaaaaggcctgaagattccccagctataccagtctggagtggttgtcctggttcttactgtgttgtcctctatggggctggcagccatgtgaagaaaggaggctcccagcatcatcttcctacacattattacattcacccatctttctgtttgtcattcttatctccagcctgggaaaagttctccttatttgtttagatccttttgtattttcagatctccttggagcagtagagtacctggtagaccataatagtggaaaagggtctagttttccccttgtttctaaagatgaggtggctgcaaaaactccccttttttgcccacagcttgcctactctcggcctagaagcagttattctctctccatattgggctttgatttgtgctgagggtcagcttttggctccttcttcctgagacagtggaaacaatgccagctctgtggcttctgccctggggatgggccgggttgrggggtgggttggtgaggctttgggtgccactrcctgtgggttgctggcttaaaggacaattctcttcattggtgagagcccaggccattaacacctacacagtgttattgaaagaagagaggtgggggtggaggggaattagtctgtcccagctagagggagataaagagggctagttagttcttggagcagctgcttttgaggagaaaatatatagctttggacacgaggaagatctagaaaattatcattgaacatattaatggttatttctttttcttggatttccagaaaagcctcttaattttatgctttctcatcgaagtaatgtaccctttttttctgaaactgaattaaatactcattttatctttgactctccttgaaatctagagaaaccaagaaaatggctgttgggaaggaaccaatttcctcctcttccctcgggtctcaggcatttacatcctccctctccccgcaatctgacctttaccaggagggaaacagttctcctacatctcatcattggaaaagttttcagggaatcagatagaacttagccagagatttaaatatcacagaraagcctcagagaaggaaggagaaaaagaaaagaagtgacgcatgtagagtgcttttgggttataggcaccaaaatcccattaaggactgattataagcttcatggtacagttcagcaaattatgattcattgaggggcaca

SEQ ID NO: 2713 - DNA, 1646 bp, Homo sapiens
tcacttccgtccagaccggaacccaagatggctgcgctgttgctgagacacgttggtcgtcattgcctccgagcccactttagccctcagctctgtatcagaaatgctgttcctttgggaaccacggccaaagaagagatggagcggttctggaataagaatataggttcaaaccgtcctctgtctccccacattactatctacagttggtctcttcccatggcgatgtccatctgccaccgtggcactggtattgctttgagtgcaggggtctctctttttggcatgtcggccctgttactccctgggaactttgagtcttatttggaacttgtgaagtccctgtgtctggggccagcactgatccacacagctaagttygcacttgtcttccctctcatgtatcatacctggaatgggatccgacacttgatgtgggacctaggaaaaggcctgaagattccccagctataccagtctggagtggttgtcctggttcttactgtgttgtcctctatggggctggcagccatgtgaagaaaggaggctcccagcatcatcttcctacacattattacattcacccatctttctgtttgtcattcttatctccagcctgggaaaagttctccttatttgtttagatccttttgtattttcagatctccttggagcagtagagtacctggtagaccataatagtggaaaagggtctagttttccccttgtttctaaagatgaggtggctgcaaaaactccccttttttgcccacagcttgcctactctcggcctagaagcagttattctctctccatattgggctttgatttgtgctgagggtcagcttttggctccttcttcctgagacagtggaaacaatgccagctctgtggcttctgccctggggatgggccgggttgrggggtgggttggtgaggctttgggtgccactrcctgtgggttgctggcttaaaggacaattctcttcattggtgagagcccaggccattaacacctacacagtgttattgaaagaagagaggtgggggtggaggggaattagtctgtcccagctagagggagataaagagggctagttagttcttggagcagctgcttttgaggagaaaatatatagctttggacacgaggaagatctagaaaattatcattgaacatattaatggttatttctttttcttggatttccagaaaagcctcttaattttatgctttctcatcgaagtaatgtaccctttttttctgaaactgaattaaatactcattttatctttgactctccttgaaatctagagaaaccaagaaaatggctgttgggaaggaaccaatttcctcctcttccctcgggtctcaggcatttacatcctccctctccccgcaatctgacctttaccaggagggaaacagttctcctacatctcatcattggaaaagttttcagggaatcagatagaacttagccagagatttaaatatcacagaraagcctcagagaaggaaggagaaaaagaaaagaagtgacgcatgtagagtgcttttgggttataggcaccaaaatcccattaaggactgattataagcttcatggtacagttcagcaaattatgattcattgaggggcaca

SEQ ID NO: 2714 - DNA, 1628 bp, Homo sapiens
gcgcgcctccgccctcgggtggcggggccgcctggcgtcacttccgtccagaccggaacccaagatggctgcgctcttgcagacacgttggtcgtcattgcctccgagcccactttagccctcagctctgtatcagaaatgctgttcctttgggaaccacggccaaagaagagatggagcggttctggaataagaatataggttcaaaccgtcctctgtctccccacattactatctacagttggtctcttcccatggcgatgtccatctgccaccgtggcactggtattgctttgagtgcaggggtctctctttttggcatgtcggccctgttactccctgggaactttgagtcttatttggaacttgtgaagtccctgtgtctggggccagcactgatccacacagctaagttygcacttgtcttccctctcatgtatcatacctggaatgggatccgacacttgatgtgggacctaggaaaaggcctgaagattccccagctataccagtctggagtggttgtcctggttcttactgtgttgtcctctatggggctggcagccatgtgaagaaaggaggctcccagcatcatcttcctacacattattacattcacccatctttctgtttgtcattcttatctccagcctgggaaaagttctccttatttgtttagatccttttgtattttcagatctccttggagcagtagagtacctggtagaccataatagtggaaaagggtctagttttccccttgtttctaaagatgaggtggctttattctctctccatattgggctttgatttgtgctgagggtcagcttttggctccttcttcctgagacagtggaaacaatgccagctctgtggcttctgccctggggatgggccgggttgrggggtgggttggtgaggctttgggtgccactrcctgtgggttgctggcttaaaggacaattctcttcattggtgagagcccaggccattaacacctacacagtgttattgaaagaagagaggtgggggtggaggggaattagtctgtcccagctagagggagataaagagggctagttagttcttggagcagctgcttttgaggagaaaatatatagctttggacacgaggaagatctagaaaattatcattgaacatattaatggttatttctttttcttggatttccagaaaagcctcttaattttatgctttctcatcgaagtaatgtaccctttttttctgaaactgaattaaatactcattttatctttgactctccttgaaatctagagaaaccaagaaaatggctgttgggaaggaaccaatttcctcctcttccctcgggtctcaggcatttacatcctccctctccccgcaatctgacctttaccaggagggaaacagttctcctacatctcatcattggaaaagttttcagggaatcagatagaacttagccagagatttaaatatcacagaraagcctcagagaaggaaggagaaaaagaaaagaagtgacgcatgtagagtgcttttgggttataggcaccaaaatcccattaaggactgattataagcttcatggtacagttcagcaaattatgattcattgaggggcaca

SEQ ID NO: 2715 - DNA, 1456 bp, Homo sapiens
cttatcttgcagacacgttggtcgtcattgcctccgagcccactttagccctcagctctgtatcagaaattggtctcttcccatggcgatgtccatctgccaccgtggcactggtattgctttgagtgcaggggtctctctttttggcatgtcggccctgttactccctgggaactttgagtcttatttggaacttgtgaagtccctgtgtctggggccagcactgatccacacagctaagttygcacttgtcttccctctcatgtatcatacctggaatgggatccgacacttgatgtgggacctaggaaaaggcctgaagattccccagctataccagtctggagtggttgtcctggttcttactgtgttgtcctctatggggctggcagccatgtgaagaaaggaggctcccagcatcatcttcctacacattattacattcacccatctttctgtttgtcattcttatctccagcctgggaaaagttctccttatttgtttagatccttttgtattttcagatctccttggagcagtagagtacctggtagaccataatagtggaaaagggtctagttttccccttgtttctaaagatgaggtggctttattctctctccatattgggctttgatttgtgctgagggtcagcttttggctccttcttcctgagacagtggaaacaatgccagctctgtggcttctgccctggggatgggccgggttgrggggtgggttggtgaggctttgggtgccactrcctgtgggttgctggcttaaaggacaattctcttcattggtgagagcccaggccattaacacctacacagtgttattgaaagaagagaggtgggggtggaggggaattagtctgtcccagctagagggagataaagagggctagttagttcttggagcagctgcttttgaggagaaaatatatagctttggacacgaggaagatctagaaaattatcattgaacatattaatggttatttctttttcttggatttccagaaaagcctcttaattttatgctttctcatcgaagtaatgtaccctttttttctgaaactgaattaaatactcattttatctttgactctccttgaaatctagagaaaccaagaaaatggctgttgggaaggaaccaatttcctcctcttccctcgggtctcaggcatttacatcctccctctccccgcaatctgacctttaccaggagggaaacagttctcctacatctcatcattggaaaagttttcagggaatcagatagaacttagccagagatttaaatatcacagaraagcctcagagaaggaaggagaaaaagaaaagaagtgacgcatgtagagtgcttttgggttataggcaccaaaatcccattaaggactgattataagcttcatggtacagttcagcaaattatgattcattgaggggcaca

SEQ ID NO: 2716 - DNA, 879 bp, Homo sapiens
gtcacttccgtccagaccggaacccaagatggctgcgctgttgctgagacacgttggtcgtcattgcctccgagcccactttagccctcagctctgtatcagaaaagtctcgttctgtcgaccaggctggagtgtagtggcgtgatctgggctcactgcaacctccacgtcctgagttcaagtgattatcctgcctcagcctcctaagtagccggaattacagtgctgttcctttgggaaccacggccaaagaagagatggagcggttctggaataagaatataggttcaaaccgtcctctgtctccccacattactatctacagttggtctcttcccatggcgatgtccatctgccaccgtggcactggtattgctttgagtgcaggggtctctctttttggcatgtcggccctgttactccctgggaactttgagtcttatttggaacttgtgaagtccctgtgtctggggccagcactgatccacacagctaagttygcacttgtcttccctctcatgtatcatacctggaatgggatccgacacttgatgtgggacctaggaaaaggcctgaagattccccagctataccagtctggagtggttgtcctggttcttactgtgttgtcctctatggggctggcagccatgtgaagaaaggaggctcccagcatcatcttcctacacattattacattcacccatctttctgtttgtcattcttatctccagcctgggaaaagttctccttatttgtttagatccttttgtattttcagatctccttggagcagtagagtacctggtagaccataatagtggaaaagggtctagttttccccttgtttctaaagatgaggtggctgcaaaaactccc

SEQ ID NO: 2717 - DNA, 4679 bp, Homo sapiens
atttcaagaccgtactaggtagatggtcaattagagttcccagggtttgaagcctgtaactgctgccgccgctcaagccctccagagcattgctacggctgctgcccttgtactactacctccaaatacgttcttgctggtagtggcggcagcaggaccaattacctcttttttgctctccctcgagaagctccagatggcgtcttccgtgggcaacgtggccgacagcacagggttagctgagttggcacatcgagaatatcaggcaggagattttgaggcagctgagagacactgcatgcagctctggagacaagagccagacaatactggtgtgcttttattactttcatctatacacttccagtgtcgaaggctggacagatctgctcactttagcactctggcaattaaacagaacccccttctggcagaagcttattcgaatttggggaatgtgtacaaggaaagagggcagttgcaggaggcaattgagcattatcgacatgcattgcgtctcaaacctgatttcatcgatggttatattaacctggcagccgccttggtagcagcgggtgacatggaaggggcagtacaagcttacgtctctgctcttcagtacaatcctgatttgtactgtgttcgcagtgacctggggaacctgctcaaagccctgggtcgcttggaagaagccaaggcatgttatttgaaagcaattgagacgcaaccgaactttgcagtagcttggagtaatcttggctgtgttttcaatgcacaaggggaaatttggcttgcaattcatcactttgaaaaggctgtcacccttgacccaaactttctggatgcttatatcaatttaggaaatgtcttgaaagaggcacgcatttttgacagagctgtggcagcttatcttcgtgccctaagtttgagtccaaatcacgcagtggtgcacggcaacctggcttgtgtatactatgagcaaggcctgatagatctggcaatagacacctacaggcgggctatcgaactacaaccacatttccctgatgcttactgcaacctagccaatgctctcaaagagaagggcagtgttgctgaagcagaagattgttataatacagctctccgtctgtgtcccacccatgcagactctctgaataacctagccaatatcaaacgagaacagggaaacattgaagaggcagttcgcttgtatcgtaaagcattagaagtcttcccagagtttgctgctgcccattcaaatttagcaagtgtactgcagcagcagggaaaactgcaggaagctctgatgcattataaggaggctattcgaatcagtcctacctttgctgatgcctactctaatatgggaaacactctaaaggagatgcaggatgttcagggagccttgcagtgttatacgcgtgccatccaaattaatcctgcmtttgcagatgcacatagcaatctggcttccattcataaggattcagggaatattccagaagccatagcttcttaccgcacggctctgaaacttaagcctgattttcctgatgcttattgtaacttggctcattgcctgcagattgtctgtgattggacagactatgatgagcgaatgaagaagttggtcagtattgtggctgaccagttagagaagaataggttgccttctgtrcatcctcatcatagtatgctatatcctctttctcatggcttcaggaaggctattgctgagaggcacggcaacctgtgcttagataagattaatgttcttcataaaccaccatatgaacatccaaaagacttgaagctcagtgatggtcggctgcgtgtaggatatgtgagttccgactttgggaatcatcctacttctcaccttatgcagtctattccaggcatgcacaatcctgataaatttgaggtgttctgttatgccctgagcccagacgatggcacaaacttccgagtgaaggtgatggcagaagccaatcatttcattgatctttctcagattccatgcaatggaaaagcagctgatcgcatccatcaggatggaattcatatccttgtaaatatgaatggctatactaagggcgctcgaaatgagctttttgctctcaggccagctcctattcaggcaatgtggctgggataccctgggacgagtggtgcgcttttcatggattatattatcactgatcaggaaacttcgccagctgaagttgctgagcagtattccgagaaattggcttatatgccccacactttttttattggtgatcatgctaatatgttccctcacctgaagaaaaaagcagtcatcgattttaagtccaatgggcacatttatgacaatcggatagttctgaatggcatcgacctcaaagcatttcttgatagtctaccagatgtgaaaattgtcaagatgaagtgtcctgatggaggagacaatgcagatagcagtaacacagctcttaatatgcctgttattcctatgaatactattgcagaagcagttattgaaatgattaaccgaggacagattcaaataacaattaatggattcagtattagcaatggactggcaactactcagatcaacaataaggctgcaactggagaggaggttccccgtaccattattgtaaccacccgttctcagtacgggttaccagaagatgccatcgtatactgtaactttaatcagttgtataaaattgacccttctactttgcagatgtgggcaaacattctgaagcgtgttcccaatagtgtactctggctgttgcgttttccagcagtaggagaacctaatattcaacagtatgcacaaaacatgggcctgccccagaaccgtatcattttttcacctgttgctcctaaagaggaacacgtcaggagaggccagctggctgatgtctgcttggacactccactctgtaatgggcacaccacagggatggatgtcctctgggcagggacccccatggtgactatgccaggagagactcttgcttctcgagttgcagcatcccagctcacttgcttaggttgtcttgagcttattgctaaaaacagacaagaatatgaagacatagctgtgaagctgggaactgatctagaatacctgaagaaagttcgtggcaaagtctggaagcaaagaatatctagccctctgttcaacaccaaacaatacacaatggaactagagcggctctatctacagatgtgggagcattatgcagctggcaacaaacctgaccacatgattaagcctgttgaagtcactgagtcagcataaataaagactgcacaggagaattacccctatacctgagcctcaaccttctgggggaaagggaactagataacatacttcttacttgtctgtacagtaccttgttgcagatgggtgatatataatggtaatagaatagcacagccagacttgcttcctgcatggtagggagagacacaaaagatgggaaactgcttttccacaaggaatctccgtagaattttgcggcgaccagatggtgcataggtctggaaggtctgatctcccttggtcttccatgggatggttagtgtggaggggagatatagattgtccggccgctttgtgattccatggattgattcagtcttctggatttttttttctttatattttgggtactggagcttttaaaaatgtttggtttcaggtatttttattcatgtgaagtgtatatgattctcttgagataaggttttaagctaaaatgttactccctgttttagtttctgaactctgacagattgacagggactttgctggtgtagtctttttataggttttataaaccacttgagcctatatcagtcgttttagtgtctgacctaatatttggagctatcagtgctttgttgatttagatgatgactcaagattttttctggtccatttcccatttccttttcttccctgacccccataccctcacccttaaaattctcctgtaactcaactaacaaaatcaagcctgattcaaaacatcctagggtgttttaaacacaccatctggtgccaaatgaagatttttaggagtgattactaattatcaagggcacagttgtggtactgtcattgataataatatagtttttttttttttcctaattttgacctgtttcaccagtgttttacccttgactgccccttctatgctgcttccaaaagtgatagtgtgtgtaagatttttaccttcctttctaaagttttttttttttttttttaagtgagtcctgttcttcctatttctttcagcagaaatgaaatcccaggtaagtataagtattcaagtatttgatcagtaagtcacagttatctccagtgcattaaataaccttcatcaagaaataggttataggtaaaatctctgaaggatcatctatgtattcaagtaattattttttagataataactgtcttctggacttggtcttgaagtctgtacagattcagcctcagtagtagcgaactgcactgctgtttggtttggagtacaaattagacttatagtcctcctggaacttgagttattaaaatcataggaataaaattatgggatctcaacaaagggtcgagggtttgaggcttaaacaagccaacatatgaatatatgttttgt

SEQ ID NO: 2718 - DNA, 7322 bp, Homo sapiens
gatttgtactgtgttcgcagtgacctggggaacctgctcaaagccctgggtcgcttggaagaagccaaggtaggtgtttgatagaacacatttaaacatcagtattatgaaaacttgtactttttgccaagtsttcaactcttcattgagctatcttcacaaaacagtcctttgaaactgaggaaaactgacggcacgaatcgcctcagaatagagcagggccaggctttggcatatctgttctaaatctgggggtaaagcaagaacctgaacattttggagcctttctgctgagctagaccatctttataacactgggctccgtcatgatcttatgtgggaataaataacattccttcaaatctgaggcttgcctgctggtgacaagcagagcgcctgtgatttggctcaagactcctatatgatgcaggtgccattgaaaatgctgctcttctaagtcctttgtggcttgtaagtggagaagaatttcatccaaatgttaccctgtaatactggcatttaaaattcttatttaaccttcctcccttcatcttcctcaccctttttacagtggaagaaaggctgttaaaatgattacaaattaataattggaacatcctgtcccttgtccccactcccttcccaagttcctttttcctcttttccaatcctagttgtctaccttcttttcttcctcatttccttcttttattcctccccaccccaaccccttaaaaaaaaggtcagaaggacaaagctggtttgtttgggaaatggactgatcgaaagaaaacttgccaaagtggaaaggtggcttttagcattctgtgtttccaaataatgaatttgaacaccaggttgggttaattaaagcttttggtataatttaaaattaaatttataaatgcagttgtcttgttacaagccaccttacgcaaccgcgctgcaggggtgaggagtggggagaaaccagaatgcttctgaaactcccacctgttgctctgagccccacgcgcatgctaatgcgtggagtgtatgcgcagagtagctgtctgtttgactgcttcatccagggagggagaaggcttttcagcaccatctaatgttttaaaaggcactagttttaagtgcacagctcataaattctgctgacattttggattaaccttatgtaggttgccagctaatgaattgtaattgatttcaatcttagctgataaatctaattggtaatttatagaacaaatatttgataagctcctattaattgtcaccccaccaagcggacagctaacatgaattgcacttcactgcagctttagagatcggtttaggctgagacattgcgcctgccttaggttgctgacttctttatttcagagctctggagacacctagtttgaaaaatgttattctgtttttttgtgagaacttagtaaacaagaaaatactcttgagtgaaatgcaatgtatttcttttgtaatcagtgcatttgaaaattcaagccagcatattcctagtagatggaagcaaaattaagttgtctttgtagaaaatgaagagcctttcttccagcaaaaatccctgctgtatgmaatagccctgattaaccctctcccttctgcatgtttcccatattacagacttgagactgtcctcattcccatatgtaatagacatccaaagaatttcaattgctttgttgaacttttactaatgatcttgtttttattttctctcttgtttttggtttttcaccattgatattgtatttagaaggtttcaggtgggtgaaacctcctattccatgcgtaaggtgcctcgctgaagggagctcgaggcctggatctagggcagacacacaacctcctcctcctcttccagcaaggaacgcaccgaaaagtcacatgatgagaaatatggtaacgggtttgtaactgccacagcaaaacaatttgcctccatgcctgaatcttctgtcttgtggcttcagaaacagcttaaaataattttatttacaagcaagttatgtaagagaatgttttatactatagccacaattctgtcaaagataagtaaaagttaattgatattaaaaattattagagataatttacttagtaaaagcttctaactcttcttgttgttcattttttttccttttttcttctttgtttggattgcagcattctgctcttctgatgatgcgctgtgaccctgcagtagcgcaaaggctgcgcagcgttaatgcgcattgcgtgcgaatgaacccctgtgaacggttgactagatgagtaatctgattgactggctccctcagtcctattctgtagcctttttggataaaattgggttttaacatacctcgagtccaactaatctcattaaacaaatattctccatgggcctgtctagtagattaatggatctggttggccgtttgctgcgtctaggggtgttctatgtagcgcagcagttcgcagcgattgcgcagtgcgatgctgttaggttgcgcaagcgatgtttgcgctcgcattacagggacctcaacctaggtgcaatcctgtcatgtgaggtttcagcttcagtcctccttgggagacggggcattgtgagaatgtaacttaaagcctggctttatgatatcctacttggcagaaagacatttttctcctcagtagcatagttttgatgttagtgaggaacattgttgaagagcagcatttcccaaaatgtgtttcatagtattctaataaaatgcccaatgaaagaagagttccatggtcaactaagttcagggaaccctgttacactattaaaggcttagggaagtccagtaaagaaacctattttccgaatttatttgatcatgaactcctttttttttcagccatacctcttaacacctcatagaacacactttgggaaacagtgggggtaggaaaactcggcctcaagttgcgccctctaggtagcacttgaaaacatgacaagggcccgtagttgtttggataagagaactccagcatagagccttatagcaactgacttcccagttaagtcccagtgtaagggttggtctttggttggcagaactgaacatggtggtttgcacttgggttctggtggcgcaggcgcaggagcagccagctgtggcagcgcattagttttggcgcaagcgagcctatgctgcagggtcacttttggctggtcagagaaggaataatgatatcaccttcttccccccctccccccaatcttttttttttccctttacaaattttcccctttccctttacctcctttccctcccatcttctttcattaacccctcctaaggcatgttatttgaaagcaattgagacgcaaccgaactttgcagtagcttggagtaatcttggctgtgttttcaatgcacaaggggaaatttggcttgcaattcatcactttgaaaaggctgtcacccttgacccaaactttctggatgcttatatcaatttaggaaatgtcttgaaagaggcacgcatttttgacagagctgtggcagcttatcttcgtgccctaagtttgagtccaaatcacgcagtggtgcacggcaacctggcttgtgtatactatgagcaaggcctgatagatctggcaatagacacctacaggcgggctatcgaactacaaccacatttccctgatgcttactgcaacctagccaatgctctcaaagagaagggcagtgttgctgaagcagaagattgttataatacagctctccgtctgtgtcccacccatgcagactctctgaataacctagccaatatcaaacgagaacagggaaacattgaagaggcagttcgcttgtatcgtaaagcattagaagtcttcccagagtttgctgctgcccattcaaatttagcaagtgtactgcagcagcagggaaaactgcaggaagctctgatgcattataaggaggctattcgaatcagtcctacctttgctgatgcctactctaatatgggaaacactctaaaggagatgcaggatgttcagggagccttgcagtgttatacgcgtgccatccaaattaatcctgcmtttgcagatgcacatagcaatctggcttccattcataaggattcagggaatattccagaagccatagcttcttaccgcacggctctgaaacttaagcctgattttcctgatgcttattgtaacttggctcattgcctgcagattgtctgtgattggacagactatgatgagcgaatgaagaagttggtcagtattgtggctgaccagttagagaagaataggttgccttctgtrcatcctcatcatagtatgctatatcctctttctcatggcttcaggaaggctattgctgagaggcacggcaacctgtgcttagataagattaatgttcttcataaaccaccatatgaacatccaaaagacttgaagctcagtgatggtcggctgcgtgtaggatatgtgagttccgactttgggaatcatcctacttctcaccttatgcagtctattccaggcatgcacaatcctgataaatttgaggtgttctgttatgccctgagcccagacgatggcacaaacttccgagtgaaggtgatggcagaagccaatcatttcattgatctttctcagattccatgcaatggaaaagcagctgatcgcatccatcaggatggaattcatatccttgtaaatatgaatggctatactaagggcgctcgaaatgagctttttgctctcaggccagctcctattcaggcaatgtggctgggataccctgggacgagtggtgcgcttttcatggattatattatcactgatcaggaaacttcgccagctgaagttgctgagcagtattccgagaaattggcttatatgccccacactttttttattggtgatcatgctaatatgttccctcacctgaagaaaaaagcagtcatcgattttaagtccaatgggcacatttatgacaatcggatagttctgaatggcatcgacctcaaagcatttcttgatagtctaccagatgtgaaaattgtcaagatgaagtgtcctgatggaggagacaatgcagatagcagtaacacagctcttaatatgcctgttattcctatgaatactattgcagaagcagttattgaaatgattaaccgaggacagattcaaataacaattaatggattcagtattagcaatggactggcaactactcagatcaacaataaggctgcaactggagaggaggttccccgtaccattattgtaaccacccgttctcagtacgggttaccagaagatgccatcgtatactgtaactttaatcagttgtataaaattgacccttctactttgcagatgtgggcaaacattctgaagcgtgttcccaatagtgtactctggctgttgcgttttccagcagtaggagaacctaatattcaacagtatgcacaaaacatgggcctgccccagaaccgtatcattttttcacctgttgctcctaaagaggaacacgtcaggagaggccagctggctgatgtctgcttggacactccactctgtaatgggcacaccacagggatggatgtcctctgggcagggacccccatggtgactatgccaggagagactcttgcttctcgagttgcagcatcccagctcacttgcttaggttgtcttgagcttattgctaaaaacagacaagaatatgaagacatagctgtgaagctgggaactgatctagaatacctgaagaaagttcgtggcaaagtctggaagcaaagaatatctagccctctgttcaacaccaaacaatacacaatggaactagagcggctctatctacagatgtgggagcattatgcagctggcaacaaacctgaccacatgattaagcctgttgaagtcactgagtcagcataaataaagactgcacaggagaattacccctatacctgagcctcaaccttctgggggaaagggaactagataacatacttcttacttgtctgtacagtaccttgttgcagatgggtgatatataatggtaatagaatagcacagccagacttgcttcctgcatggtagggagagacacaaaagatgggaaactgcttttccacaaggaatctccgtagaattttgcggcgaccagatggtgcataggtctggaaggtctgatctcccttggtcttccatgggatggttagtgtggaggggagatatagattgtccggccgctttgtgattccatggattgattcagtcttctggatttttttttctttatattttgggtactggagcttttaaaaatgtttggtttcaggtatttttattcatgtgaagtgtatatgattctcttgagataaggttttaagctaaaatgttactccctgttttagtttctgaactctgacagattgacagggactttgctggtgtagtctttttataggttttataaaccacttgagcctatatcagtcgttttagtgtctgacctaatatttggagctatcagtgctttgttgatttagatgatgactcaagattttttctggtccatttcccatttccttttcttccctgacccccataccctcacccttaaaattctcctgtaactcaactaacaaaatcaagcctgattcaaaacatcctagggtgttttaaacacaccatctggtgccaaatgaagatttttaggagtgattactaattatcaagggcacagttgtggtactgtcattgataataatatagtttttttttttttcctaattttgacctgtttcaccagtgttttacccttgactgccccttctatgctgcttccaaaagtgatagtgtgtgtaagatttttaccttcctttctaaagttttttttttttttttttaagtgagtcctgttcttcctatttctttcagcagaaatgaaatcccaggtaagtataagtattcaagtatttgatcagtaagtcacagttatctccagtgcattaaataaccttcatcaagaaataggttataggtaaaatctctgaaggatcatctatgtattcaagtaattattttttagataataactgtcttctggacttggtcttgaagtctgtacagattcagcctcagtagtagcgaactgcactgctgtttggtttggagtacaaattagacttatagtcctcctggaacttgagttattaaaatcataggaataaaattatgggatctcaacaaagggtcgagggtttgaggcttaaacaagccaacatatgaatatatgttttgt

SEQ ID NO: 2719 - DNA, 7987 bp, Homo sapiens
cgccgccatttcaagaccgtactaggtagatggtcaattagagttcccagggtttgaagcctgtaactgctgccgccgctcaagccctccagagcattgctacggctgctgcccttgtactactacctccaaatacgttcttgctggtagtggcggcagcaggaccaattacctcttttttgctctccctcgagaagctccagatggcgtcttccgtgggcaacgtggccgacagcacagaaccaacgaaacgtatgctttccttccaagggttagctgagttggcacatcgagaatatcaggcaggagattttgaggcagctgagagacactgcatgcagctctggagacaagagccagacaatactggtgtgcttttattactttcatctatacacttccagtgtcgaaggctggacagatctgctcactttagcactctggcaattaaacagaacccccttctggcagaagcttattcgaatttggggaatgtgtacaaggaaagagggcagttgcaggaggcaattgagcattatcgacatgcattgcgtctcaaacctgatttcatcgatggttatattaacctggcagccgccttggtagcagcgggtgacatggaaggggcagtacaagcttacgtctctgctcttcagtacaatcctgatttgtactgtgttcgcagtgacctggggaacctgctcaaagccctgggtcgcttggaagaagccaaggtaggtgtttgatagaacacatttaaacatcagtattatgaaaacttgtactttttgccaagtsttcaactcttcattgagctatcttcacaaaacagtcctttgaaactgaggaaaactgacggcacgaatcgcctcagaatagagcagggccaggctttggcatatctgttctaaatctgggggtaaagcaagaacctgaacattttggagcctttctgctgagctagaccatctttataacactgggctccgtcatgatcttatgtgggaataaataacattccttcaaatctgaggcttgcctgctggtgacaagcagagcgcctgtgatttggctcaagactcctatatgatgcaggtgccattgaaaatgctgctcttctaagtcctttgtggcttgtaagtggagaagaatttcatccaaatgttaccctgtaatactggcatttaaaattcttatttaaccttcctcccttcatcttcctcaccctttttacagtggaagaaaggctgttaaaatgattacaaattaataattggaacatcctgtcccttgtccccactcccttcccaagttcctttttcctcttttccaatcctagttgtctaccttcttttcttcctcatttccttcttttattcctccccaccccaaccccttaaaaaaaaggtcagaaggacaaagctggtttgtttgggaaatggactgatcgaaagaaaacttgccaaagtggaaaggtggcttttagcattctgtgtttccaaataatgaatttgaacaccaggttgggttaattaaagcttttggtataatttaaaattaaatttataaatgcagttgtcttgttacaagccaccttacgcaaccgcgctgcaggggtgaggagtggggagaaaccagaatgcttctgaaactcccacctgttgctctgagccccacgcgcatgctaatgcgtggagtgtatgcgcagagtagctgtctgtttgactgcttcatccagggagggagaaggcttttcagcaccatctaatgttttaaaaggcactagttttaagtgcacagctcataaattctgctgacattttggattaaccttatgtaggttgccagctaatgaattgtaattgatttcaatcttagctgataaatctaattggtaatttatagaacaaatatttgataagctcctattaattgtcaccccaccaagcggacagctaacatgaattgcacttcactgcagctttagagatcggtttaggctgagacattgcgcctgccttaggttgctgacttctttatttcagagctctggagacacctagtttgaaaaatgttattctgtttttttgtgagaacttagtaaacaagaaaatactcttgagtgaaatgcaatgtatttcttttgtaatcagtgcatttgaaaattcaagccagcatattcctagtagatggaagcaaaattaagttgtctttgtagaaaatgaagagcctttcttccagcaaaaatccctgctgtatgmaatagccctgattaaccctctcccttctgcatgtttcccatattacagacttgagactgtcctcattcccatatgtaatagacatccaaagaatttcaattgctttgttgaacttttactaatgatcttgtttttattttctctcttgtttttggtttttcaccattgatattgtatttagaaggtttcaggtgggtgaaacctcctattccatgcgtaaggtgcctcgctgaagggagctcgaggcctggatctagggcagacacacaacctcctcctcctcttccagcaaggaacgcaccgaaaagtcacatgatgagaaatatggtaacgggtttgtaactgccacagcaaaacaatttgcctccatgcctgaatcttctgtcttgtggcttcagaaacagcttaaaataattttatttacaagcaagttatgtaagagaatgttttatactatagccacaattctgtcaaagataagtaaaagttaattgatattaaaaattattagagataatttacttagtaaaagcttctaactcttcttgttgttcattttttttccttttttcttctttgtttggattgcagcattctgctcttctgatgatgcgctgtgaccctgcagtagcgcaaaggctgcgcagcgttaatgcgcattgcgtgcgaatgaacccctgtgaacggttgactagatgagtaatctgattgactggctccctcagtcctattctgtagcctttttggataaaattgggttttaacatacctcgagtccaactaatctcattaaacaaatattctccatgggcctgtctagtagattaatggatctggttggccgtttgctgcgtctaggggtgttctatgtagcgcagcagttcgcagcgattgcgcagtgcgatgctgttaggttgcgcaagcgatgtttgcgctcgcattacagggacctcaacctaggtgcaatcctgtcatgtgaggtttcagcttcagtcctccttgggagacggggcattgtgagaatgtaacttaaagcctggctttatgatatcctacttggcagaaagacatttttctcctcagtagcatagttttgatgttagtgaggaacattgttgaagagcagcatttcccaaaatgtgtttcatagtattctaataaaatgcccaatgaaagaagagttccatggtcaactaagttcagggaaccctgttacactattaaaggcttagggaagtccagtaaagaaacctattttccgaatttatttgatcatgaactcctttttttttcagccatacctcttaacacctcatagaacacactttgggaaacagtgggggtaggaaaactcggcctcaagttgcgccctctaggtagcacttgaaaacatgacaagggcccgtagttgtttggataagagaactccagcatagagccttatagcaactgacttcccagttaagtcccagtgtaagggttggtctttggttggcagaactgaacatggtggtttgcacttgggttctggtggcgcaggcgcaggagcagccagctgtggcagcgcattagttttggcgcaagcgagcctatgctgcagggtcacttttggctggtcagagaaggaataatgatatcaccttcttccccccctccccccaatcttttttttttccctttacaaattttcccctttccctttacctcctttccctcccatcttctttcattaacccctcctaaggcatgttatttgaaagcaattgagacgcaaccgaactttgcagtagcttggagtaatcttggctgtgttttcaatgcacaaggggaaatttggcttgcaattcatcactttgaaaaggctgtcacccttgacccaaactttctggatgcttatatcaatttaggaaatgtcttgaaagaggcacgcatttttgacagagctgtggcagcttatcttcgtgccctaagtttgagtccaaatcacgcagtggtgcacggcaacctggcttgtgtatactatgagcaaggcctgatagatctggcaatagacacctacaggcgggctatcgaactacaaccacatttccctgatgcttactgcaacctagccaatgctctcaaagagaagggcagtgttgctgaagcagaagattgttataatacagctctccgtctgtgtcccacccatgcagactctctgaataacctagccaatatcaaacgagaacagggaaacattgaagaggcagttcgcttgtatcgtaaagcattagaagtcttcccagagtttgctgctgcccattcaaatttagcaagtgtactgcagcagcagggaaaactgcaggaagctctgatgcattataaggaggctattcgaatcagtcctacctttgctgatgcctactctaatatgggaaacactctaaaggagatgcaggatgttcagggagccttgcagtgttatacgcgtgccatccaaattaatcctgcmtttgcagatgcacatagcaatctggcttccattcataaggattcagggaatattccagaagccatagcttcttaccgcacggctctgaaacttaagcctgattttcctgatgcttattgtaacttggctcattgcctgcagattgtctgtgattggacagactatgatgagcgaatgaagaagttggtcagtattgtggctgaccagttagagaagaataggttgccttctgtrcatcctcatcatagtatgctatatcctctttctcatggcttcaggaaggctattgctgagaggcacggcaacctgtgcttagataagattaatgttcttcataaaccaccatatgaacatccaaaagacttgaagctcagtgatggtcggctgcgtgtaggatatgtgagttccgactttgggaatcatcctacttctcaccttatgcagtctattccaggcatgcacaatcctgataaatttgaggtgttctgttatgccctgagcccagacgatggcacaaacttccgagtgaaggtgatggcagaagccaatcatttcattgatctttctcagattccatgcaatggaaaagcagctgatcgcatccatcaggatggaattcatatccttgtaaatatgaatggctatactaagggcgctcgaaatgagctttttgctctcaggccagctcctattcaggcaatgtggctgggataccctgggacgagtggtgcgcttttcatggattatattatcactgatcaggaaacttcgccagctgaagttgctgagcagtattccgagaaattggcttatatgccccacactttttttattggtgatcatgctaatatgttccctcacctgaagaaaaaagcagtcatcgattttaagtccaatgggcacatttatgacaatcggatagttctgaatggcatcgacctcaaagcatttcttgatagtctaccagatgtgaaaattgtcaagatgaagtgtcctgatggaggagacaatgcagatagcagtaacacagctcttaatatgcctgttattcctatgaatactattgcagaagcagttattgaaatgattaaccgaggacagattcaaataacaattaatggattcagtattagcaatggactggcaactactcagatcaacaataaggctgcaactggagaggaggttccccgtaccattattgtaaccacccgttctcagtacgggttaccagaagatgccatcgtatactgtaactttaatcagttgtataaaattgacccttctactttgcagatgtgggcaaacattctgaagcgtgttcccaatagtgtactctggctgttgcgttttccagcagtaggagaacctaatattcaacagtatgcacaaaacatgggcctgccccagaaccgtatcattttttcacctgttgctcctaaagaggaacacgtcaggagaggccagctggctgatgtctgcttggacactccactctgtaatgggcacaccacagggatggatgtcctctgggcagggacccccatggtgactatgccaggagagactcttgcttctcgagttgcagcatcccagctcacttgcttaggttgtcttgagcttattgctaaaaacagacaagaatatgaagacatagctgtgaagctgggaactgatctagaatacctgaagaaagttcgtggcaaagtctggaagcaaagaatatctagccctctgttcaacaccaaacaatacacaatggaactagagcggctctatctacagatgtgggagcattatgcagctggcaacaaacctgaccacatgattaagcctgttgaagtcactgagtcagcataaataaagactgcacaggagaattacccctatacctgagcctcaaccttctgggggaaagggaactagataacatacttcttacttgtctgtacagtaccttgttgcagatgggtgatatataatggtaatagaatagcacagccagacttgcttcctgcatggtagggagagacacaaaagatgggaaactgcttttccacaaggaatctccgtagaattttgcggcgaccagatggtgcataggtctggaaggtctgatctcccttggtcttccatgggatggttagtgtggaggggagatatagattgtccggccgctttgtgattccatggattgattcagtcttctggatttttttttctttatattttgggtactggagcttttaaaaatgtttggtttcaggtatttttattcatgtgaagtgtatatgattctcttgagataaggttttaagctaaaatgttactccctgttttagtttctgaactctgacagattgacagggactttgctggtgtagtctttttataggttttataaaccacttgagcctatatcagtcgttttagtgtctgacctaatatttggagctatcagtgctttgttgatttagatgatgactcaagattttttctggtccatttcccatttccttttcttccctgacccccataccctcacccttaaaattctcctgtaactcaactaacaaaatcaagcctgattcaaaacatcctagggtgttttaaacacaccatctggtgccaaatgaagatttttaggagtgattactaattatcaagggcacagttgtggtactgtcattgataataatatagtttttttttttttcctaattttgacctgtttcaccagtgttttacccttgactgccccttctatgctgcttccaaaagtgatagtgtgtgtaagatttttaccttcctttctaaagttttttttttttttttttaagtgagtcctgttcttcctatttctttcagcagaaatgaaatcccaggtaagtataagtattcaagtatttgatcagtaagtcacagttatctccagtgcattaaataaccttcatcaagaaataggttataggtaaaatctctgaaggatcatctatgtattcaagtaattattttttagataataactgtcttctggacttggtcttgaagtctgtacagattcagcctcagtagtagcgaactgcactgctgtttggtttggagtacaaattagacttatagtcctcctggaacttgagttattaaaatcataggaataaaattatgggatctcaacaaagggtcgagggtttgaggcttaaacaagccaacatatgaatatatgttttgt

SEQ ID NO: 2720 - DNA, 4716 bp, Homo sapiens
cgccgccatttcaagaccgtactaggtagatggtcaattagagttcccagggtttgaagcctgtaactgctgccgccgctcaagccctccagagcattgctacggctgctgcccttgtactactacctccaaatacgttcttgctggtagtggcggcagcaggaccaattacctcttttttgctctccctcgagaagctccagatggcgtcttccgtgggcaacgtggccgacagcacagaaccaacgaaacgtatgctttccttccaagggttagctgagttggcacatcgagaatatcaggcaggagattttgaggcagctgagagacactgcatgcagctctggagacaagagccagacaatactggtgtgcttttattactttcatctatacacttccagtgtcgaaggctggacagatctgctcactttagcactctggcaattaaacagaacccccttctggcagaagcttattcgaatttggggaatgtgtacaaggaaagagggcagttgcaggaggcaattgagcattatcgacatgcattgcgtctcaaacctgatttcatcgatggttatattaacctggcagccgccttggtagcagcgggtgacatggaaggggcagtacaagcttacgtctctgctcttcagtacaatcctgatttgtactgtgttcgcagtgacctggggaacctgctcaaagccctgggtcgcttggaagaagccaaggcatgttatttgaaagcaattgagacgcaaccgaactttgcagtagcttggagtaatcttggctgtgttttcaatgcacaaggggaaatttggcttgcaattcatcactttgaaaaggctgtcacccttgacccaaactttctggatgcttatatcaatttaggaaatgtcttgaaagaggcacgcatttttgacagagctgtggcagcttatcttcgtgccctaagtttgagtccaaatcacgcagtggtgcacggcaacctggcttgtgtatactatgagcaaggcctgatagatctggcaatagacacctacaggcgggctatcgaactacaaccacatttccctgatgcttactgcaacctagccaatgctctcaaagagaagggcagtgttgctgaagcagaagattgttataatacagctctccgtctgtgtcccacccatgcagactctctgaataacctagccaatatcaaacgagaacagggaaacattgaagaggcagttcgcttgtatcgtaaagcattagaagtcttcccagagtttgctgctgcccattcaaatttagcaagtgtactgcagcagcagggaaaactgcaggaagctctgatgcattataaggaggctattcgaatcagtcctacctttgctgatgcctactctaatatgggaaacactctaaaggagatgcaggatgttcagggagccttgcagtgttatacgcgtgccatccaaattaatcctgcmtttgcagatgcacatagcaatctggcttccattcataaggattcagggaatattccagaagccatagcttcttaccgcacggctctgaaacttaagcctgattttcctgatgcttattgtaacttggctcattgcctgcagattgtctgtgattggacagactatgatgagcgaatgaagaagttggtcagtattgtggctgaccagttagagaagaataggttgccttctgtrcatcctcatcatagtatgctatatcctctttctcatggcttcaggaaggctattgctgagaggcacggcaacctgtgcttagataagattaatgttcttcataaaccaccatatgaacatccaaaagacttgaagctcagtgatggtcggctgcgtgtaggatatgtgagttccgactttgggaatcatcctacttctcaccttatgcagtctattccaggcatgcacaatcctgataaatttgaggtgttctgttatgccctgagcccagacgatggcacaaacttccgagtgaaggtgatggcagaagccaatcatttcattgatctttctcagattccatgcaatggaaaagcagctgatcgcatccatcaggatggaattcatatccttgtaaatatgaatggctatactaagggcgctcgaaatgagctttttgctctcaggccagctcctattcaggcaatgtggctgggataccctgggacgagtggtgcgcttttcatggattatattatcactgatcaggaaacttcgccagctgaagttgctgagcagtattccgagaaattggcttatatgccccacactttttttattggtgatcatgctaatatgttccctcacctgaagaaaaaagcagtcatcgattttaagtccaatgggcacatttatgacaatcggatagttctgaatggcatcgacctcaaagcatttcttgatagtctaccagatgtgaaaattgtcaagatgaagtgtcctgatggaggagacaatgcagatagcagtaacacagctcttaatatgcctgttattcctatgaatactattgcagaagcagttattgaaatgattaaccgaggacagattcaaataacaattaatggattcagtattagcaatggactggcaactactcagatcaacaataaggctgcaactggagaggaggttccccgtaccattattgtaaccacccgttctcagtacgggttaccagaagatgccatcgtatactgtaactttaatcagttgtataaaattgacccttctactttgcagatgtgggcaaacattctgaagcgtgttcccaatagtgtactctggctgttgcgttttccagcagtaggagaacctaatattcaacagtatgcacaaaacatgggcctgccccagaaccgtatcattttttcacctgttgctcctaaagaggaacacgtcaggagaggccagctggctgatgtctgcttggacactccactctgtaatgggcacaccacagggatggatgtcctctgggcagggacccccatggtgactatgccaggagagactcttgcttctcgagttgcagcatcccagctcacttgcttaggttgtcttgagcttattgctaaaaacagacaagaatatgaagacatagctgtgaagctgggaactgatctagaatacctgaagaaagttcgtggcaaagtctggaagcaaagaatatctagccctctgttcaacaccaaacaatacacaatggaactagagcggctctatctacagatgtgggagcattatgcagctggcaacaaacctgaccacatgattaagcctgttgaagtcactgagtcagcataaataaagactgcacaggagaattacccctatacctgagcctcaaccttctgggggaaagggaactagataacatacttcttacttgtctgtacagtaccttgttgcagatgggtgatatataatggtaatagaatagcacagccagacttgcttcctgcatggtagggagagacacaaaagatgggaaactgcttttccacaaggaatctccgtagaattttgcggcgaccagatggtgcataggtctggaaggtctgatctcccttggtcttccatgggatggttagtgtggaggggagatatagattgtccggccgctttgtgattccatggattgattcagtcttctggatttttttttctttatattttgggtactggagcttttaaaaatgtttggtttcaggtatttttattcatgtgaagtgtatatgattctcttgagataaggttttaagctaaaatgttactccctgttttagtttctgaactctgacagattgacagggactttgctggtgtagtctttttataggttttataaaccacttgagcctatatcagtcgttttagtgtctgacctaatatttggagctatcagtgctttgttgatttagatgatgactcaagattttttctggtccatttcccatttccttttcttccctgacccccataccctcacccttaaaattctcctgtaactcaactaacaaaatcaagcctgattcaaaacatcctagggtgttttaaacacaccatctggtgccaaatgaagatttttaggagtgattactaattatcaagggcacagttgtggtactgtcattgataataatatagtttttttttttttcctaattttgacctgtttcaccagtgttttacccttgactgccccttctatgctgcttccaaaagtgatagtgtgtgtaagatttttaccttcctttctaaagttttttttttttttttttaagtgagtcctgttcttcctatttctttcagcagaaatgaaatcccaggtaagtataagtattcaagtatttgatcagtaagtcacagttatctccagtgcattaaataaccttcatcaagaaataggttataggtaaaatctctgaaggatcatctatgtattcaagtaattattttttagataataactgtcttctggacttggtcttgaagtctgtacagattcagcctcagtagtagcgaactgcactgctgtttggtttggagtacaaattagacttatagtcctcctggaacttgagttattaaaatcataggaataaaattatgggatctcaacaaagggtcgagggtttgaggcttaaacaagccaacatatgaatatatgttttgt

SEQ ID NO: 2721 - DNA, 3209 bp, Homo sapiens
cgctctctctctctctccggctcgccagcgacacttgttcgttcaacttgaccaatgagacttgaggaagggctctgagtcccgcctctgcatgagtgaccgtctcttttccaatccaggycccgccccgactccccagggctgcttttctcgcggctgcgggtggtcgggctgcatcctgccttcagagtcttactgcgcggggccccagtctccagtcccgcccaggcgcctttgcaggctgcggtgggatttcgttttgcctccggttggggctgctgtttctcttcgccgacgtggatcctctatccttcagagactctggaacccctgtgstcttctcytcatctartgaccctgaggkgatggagttttcaagtccttccagagaggaatgtcccaagcctttgagtagggtaagcatcatggctggcagcctcacaggattgcttctacttcaggcagtgtcgtgrgcatcaggtgcccgcccctgcatccctaaaagcttcggctacagctcggtgstgtstgtctgcaatgccacatactgtgactcctttgaccccccgacctttcctgcccttggtaccktcagccgctayragagyabamgcagtgrgcgayggatggagctgagtatggggcccatccaggctaatcacacgggcacaggcctgctactgaccctgcagccagaacagaagttccagaaagtgaasggatttggaggggccatgacagatgctgctrctctcaacatccttgccctgtcaccccctgcccaaaatttgctacttaaatygtacttctctgaagaagraatcggatatracatcaycyrggtacccatggccagctgtgacttctccatcykcacctacayctakgmagacacccctsatgatttccagttgcacaacttcagcctcccagaggaagataccaagctcaagatacccctgattcaccgagccctgcagttggcccagcgtcccgtttsactccttgmcagcycctrgacatcamccactyggctcaagaccarkgkarmggkgaatgggaagkrgycactcragggacagcccrragacatctaccaccagacctgggccagayacwttgtgaagttcctggatgcctatgctgagcacaagttacagttctgggcagtgasagctkaaaatgagccttctgctgggctgttgagtggataccccttccagtgcctgggcttcacccctgaacakcagyragacttmattgcccgtgacctagrtcbtaccctygccaacrrtactcaccacaatgtccgcctactcatgctggatgaccaacgcttgctgctgcyccactgggcaaaggtggtactgacagacccagaagcagctaaatatgttcatggcattgytgtacrttgkyacctgsactttctggmtccagccaaagccayccyakggragacacaccrcctgttccccaacaccatgctctttgcctcagagrcckgtgtgggctccaagttctgggagcagagtstgsggctagrctyctgggatcgagggatgcagtacagccacagcatcatcacgaacctcctgtaccatktggtcggctggaccgactggaaccttgccctgaaccycgaagraggacycawtwggktgcgtamctttbtcdacagtcycwycattgtagacatcaccaagswcacgttttacaaacagcccatgttctaccaccttggccacttcagcaagttcattcctgagggctcccagagagtggggctggttgccagtcagaagaacgaccbggacscagtggcactgatgcatcccgatggctctsctgttgtggtcrtsctaaascgctcctctaaggatgtgcctcttaccatcaaggatcctgctgtgggcttcctggagacaatctcacctggctactccattcacacctacctgtggcgtcgccagtgatggagcagatactcaaggaggcactgggctcagcctgggcattaaagggacagagtcagctcacacgctgtctgtgactaaagagggcacaacagggccagygtgagcttacagcgacgtaagcccaggggcaatggtttgggtgactcactttcccctctaggtggtgccaggggctggaggcccctagaaaaagatcagtaagccccagtgtccccccagcccccatgcttatgtgaacatgcgctgtgtgctgcttgctttggaaactgggcctgggtccaggcctagggtgagctcactgtccgtacaaacacaagatcagggctgagggtaaggaaaagaagagactaggaaagctgggcccaaaactggagactgtttgtctttcctggagatgcagaactgggcccgtggagcagcagtgtcagcatcagggcggaagccttaaagcagcagcgggtgtgcccaggcacccagatgattcctatggcaccagccaggaaaaatggcagctcttaaaggagaaaatgtttgagcccagtcagtgtgagtggctttattctgggtggcagcaccccgtgtccggctgtaccaacaacgaggaggcacgggggcctctggaatgcatgagagtagaaaaaccagtcttgggagcgtgaggacaaatcattcctcttcatcctcctcagccatgcccagggtccgggtgcctggggcccgagcaggcgctccagtccctgttcctcagcatcccccwccacatcctgagtaagctttgtccccagataacctcttcagcatgatccttaaatctccctaagcctyagtttctcccctgtggaatgggggtaagaatctctttctctgaatgcccctgtgttaggaaataatttagaatacttyggaaactggaaaagctctgttcacacctaagcaatcagggcagtggcctcggctctgccaggaacttwggcttttatctggatcctctctttccaggcctctcaattaattccccaggtcctcaacctttgggaagttagaaatgaggaagagtgtcctacttctgacactgttccctcttggaacctgaccgtcaatgctagaagaacccttggaaaacatgctggcccagccctctagttttacaaataagggagtgcacagccctgagaggttacatggcctgcccgagatcacatagtcaatggcagagtaaagagcatagcc

SEQ ID NO: 2722 - DNA, 2697 bp, Homo sapiens
aatccaggycccgccccgactccccagggctgcttttctcgcggctgcgggtggtcgggctgcatcctgccttcagagtcttactgcgcggggccccagtctccagtcccgcccaggcgcctttgcaggctgcggtgggatttcgttttgcctccggttggggctgctgtttctcttcgccgacgagactctggaacccctgtgstcttctcytcatctartgaccctgaggkgatggagttttcaagtccttccagagaggaatgtcccaagcctttgagtagggtaagcatcatggctggcagcctcacaggattgcttctacttcaggcagtgtcgtgrgcatcaggtgcccgcccctgcatccctaaaagcttcggctacagctcggtgstgtstgtctgcaatgccacatactgtgactcctttgaccccccgacctttcctgcccttggtaccktcagccgctayragagyabamgcagtgrgcgayggatggagctgagtatggggcccatccaggctaatcacacgggcacaggcctgctactgaccctgcagccagaacagaagttccagaaagtgaasggatttggaggggccatgacagatgctgctrctctcaacatccttgccctgtcaccccctgcccaaaatttgctacttaaatygtacttctctgaagaagraatcggatatracatcaycyrggtacccatggccagctgtgacttctccatcykcacctacayctakgmagacacccctsatgatttccagttgcacaacttcagcctcccagaggaagataccaagctcaagatacccctgattcaccgagccctgcagttggcccagcgtcccgtttsactccttgmcagcycctrgacatcamccactyggctcaagaccarkgkarmggkgaatgggaagkrgycactcragggacagcccrragacatctaccaccagacctgggccagayacwttgtgaagttcctggatgcctatgctgagcacaagttacagttctgggcagtgasagctkaaaatgagccttctgctgggctgttgagtggataccccttccagtgcctgggcttcacccctgaacakcagyragacttmattgcccgtgacctagrtcbtaccctygccaacrrtactcaccacaatgtccgcctactcatgctggatgaccaacgcttgctgctgcyccactgggcaaaggtggtactgacagacccagaagcagctaaatatgttcatggcattgytgtacrttgkyacctgsactttctggmtccagccaaagccayccyakggragacacaccrcctgttccccaacaccatgctctttgcctcagagrcckgtgtgggctccaagttctgggagcagagtstgsggctagrctyctgggatcgagggatgcagtacagccacagcatcatcacgaacctcctgtaccatktggtcggctggaccgactggaaccttgccctgaaccycgaagraggacycawtwggktgcgtamctttbtcdacagtcycwycattgtagacatcaccaagswcacgttttacaaacagcccatgttctaccaccttggccacttcagcaagttcattcctgagggctcccagagagtggggctggttgccagtcagaagaacgaccbggacscagtggcactgatgcatcccgatggctctsctgttgtggtcrtsctaaascgctcctctaaggatgtgcctcttaccatcaaggatcctgctgtgggcttcctggagacaatctcacctggctactccattcacayctacctgtggcgtygccagtgatggagcagatactcaaggaggcactgggctcagcctgggcattaaagggacagagtcagctcacacgctgtctgtgactaaagagggcacarcagggccagygtgagcttacagcgacgtaagcccaggggcaatggtttgggtgactcactttcccctctaggyggtgccaggggctggaggcccctagaaaaagatcagtaagccccagtgtccccccagcccccatgcttatgtgaacatgcgctgtgtgctgcttgctttggaaactgggcctgggtccaggcctagggtgagctcactgtccgtacaaacacaagatcagggctgagggtaaggaaaagaagagactaggaaagctgggcccaaaactggagactgtttgtctttcctggagatgcagaactgggcccgtggagcagcagtgtcagcatcagggcggaagccttaaagcagcagcgggtgtgcccaggcacccagatgattcctatggcaccagccaggaaaaatggcagctcttaaaggagaaaatgtttgagcccagtcagtgtgagtggctttattctgggtggcagcaccccgtgtccggctgtaccaacaacgaggaggcacgggggcctctggaatgcatgagagtagaaaaaccagtcttgggagcgtgaggacaaatcattcctcttcatcctcctcagccatgcccagggtccgggtgcctggggcccgagcaggcgttgcccgctggatggagacaatgccgctgagcaaggcgtagcccaccatggctgccagtcctgccagcacagataggatctggttccggcgccggtatggctcctcctcagtctctgggcc

SEQ ID NO: 2723 - DNA, 2613 bp, Homo sapiens
acatygggaagccggaattacttgcagggctaacctagtgcctatagctawggcaggtacctgcatccttgtttttgtttagtggatcctctatccttcagagactctggaacccctgtgstcttctcytcatctartgaccctgaggkgatggagttttcaagtccttccagagaggaatgtcccaagcctttgagtagggtaagcatcatggctggcagcctcacaggattgcttctacttcaggcagtgtcgtgrgcatcaggtgcccgcccctgcatccctaaaagcttcggctacagctcggtgstgtstgtctgcaatgccacatactgtgactcctttgaccccccgacctttcctgcccttggtaccktcagccgctayragagyabamgcagtgrgcgayggatggagctgagtatggggcccatccaggctaatcacacgggcacaggcctgctactgaccctgcagccagaacagaagttccagaaagtgaasggatttggaggggccatgacagatgctgctrctctcaacatccttgccctgtcaccccctgcccaaaatttgctacttaaatygtacttctctgaagaagraatcggatatracatcaycyrggtacccatggccagctgtgacttctccatcykcacctacayctakgmagacacccctsatgatttccagttgcacaacttcagcctcccagaggaagataccaagctcaagatacccctgattcaccgagccctgcagttggcccagcgtcccgtttsactccttgmcagcycctrgacatcamccactyggctcaagaccarkgkarmggkgaatgggaagkrgycactcragggacagcccrragacatctaccaccagacctgggccagayacwttgtgaagttcctggatgcctatgctgagcacaagttacagttctgggcagtgasagctkaaaatgagccttctgctgggctgttgagtggataccccttccagtgcctgggcttcacccctgaacakcagyragacttmattgcccgtgacctagrtcbtaccctygccaacrrtactcaccacaatgtccgcctactcatgctggatgaccaacgcttgctgctgcyccactgggcaaaggtggtactgacagacccagaagcagctaaatatgttcatggcattgytgtacrttgkyacctgsactttctggmtccagccaaagccayccyakggragacacaccrcctgttccccaacaccatgctctttgcctcagagrcckgtgtgggctccaagttctgggagcagagtstgsggctagrctyctgggatcgagggatgcagtacagccacagcatcatcacgaacctcctgtaccatktggtcggctggaccgactggaaccttgccctgaaccycgaagraggacycawtwggktgcgtamctttbtcdacagtcycwycattgtagacatcaccaagswcacgttttacaaacagcccatgttctaccaccttggccacttcagcaagttcattcctgagggctcccagagagtggggctggttgccagtcagaagaacgaccbggacscagtggcactgatgcatcccgatggctctsctgttgtggtcrtsctaaascgctcctctaaggatgtgcctcttaccatcaaggatcctgctgtgggcttcctggagacaatctcacctggctactccattcacayctacctgtggcgtygccagtgatggagcagatactcaaggaggcactgggctcagcctgggcattaaagggacagagtcagctcacacgctgtctgtgactaaagagggcacarcagggccagygtgagcttacagcgacgtaagcccaggggcaatggtttgggtgactcactttcccctctaggyggtgccaggggctggaggcccctagaaaaagatcagtaagccccagtgtccccccagcccccatgcttatgtgaacatgcgctgtgtgctgcttgctttggaaactgggcctgggtccaggcctagggtgagctcactgtccgtacaaacacaagatcagggctgagggtaaggaaaagaagagactaggaaagctgggcccaaaactggagactgtttgtctttcctggagatgcagaactgggcccgtggagcagcagtgtcagcatcagggcggaagccttaaagcagcagcgggtgtgcccaggcacccagatgattcctatggcaccagccaggaaaaatggcagctcttaaaggagaaaatgtttgagcccagtcagtgtgagtggctttattctgggtggcagcaccccgtgtccggctgtaccaacaacgaggaggcacgggggcctctggaatgcatgagagtagaaaaaccagtcttgggagcgtgaggacaaatcattcctcttcatcctcctcagccatgcccagggtccgggtgcctggggcccgagcaggcgttgcccgctggatggagacaatgccgctgagcaaggcgtagcccaccatggctgccagtcctgccagcacagataggatctggttccggcgccggtatggctcctcctcagtctctgggcc

SEQ ID NO: 2724 - DNA, 1433 bp, Homo sapiens
tttccttttgccttcggttggggctgctgtttctcttcgccgacgtggatcctctatccttcagagactctggaacccctgtgctcttctcctcatctagtgaccctgaggtgatggagttttcaagtccttccagagaggaatgtcccaagccttcgggtagggtaagcatcatggctggcagcctcacaggattgcttctacttcaggcagtgtcgtgggcatcagatgagtrccttcagccgctacaagagcagaagcagtgggcattggatgragctgagtacaggaccatacaggctaattgcaccggcacaggaatcggatataacatcatctgggtacccatggccagctgtgacttctccatccgcacctacacctatgcagacacccctgatgatttccagttgcacaacttcagcctcccagaggaagataccaagctcaagatacccctgattcaccgagccctgcagttggcccagcgtcccgtttcactccttgccagcccctggacatcacccactyggctcaagaccaagggagcggggaatgggaaggggccactcaagggacagcccrgagacatctaccaccagacctgggccagatacattgtgaagttcctggatgcctatgctgagcacaagttacagttctgggcagtgacagstgaaaatgagccttctgctgggctgttgagtggataccccttccagtgcctgggcttcacccctgaacatcagcgagacttcattgcccgtgacctaggtcctacccttgccaacggtactcaccacaatgtccgcctactcatgctggatgaccaacgcttgctgctgccccactgggcaaaggtggtactgacagacccagaagcagctaagtatgttcatggtattgctgtacattggtacctggactttctggctccagccaaagccaccctaagggagacacaccacctgttccccaacaccatgctctttgcctcagaggcctgtgtgggttccaagttctgggagcagagtgtgcggctaggctcctgggatcgagggatgcagtacagccacagcatcatcacagtaagccaccccagtctcccttcctgcaaaggagacctcagacccattagtagtctcaccaaagactgatagaagcccktcctgtccagctttccccaggtagcctgcccttttgsgcaactctggggaaccatgattccctgtcttgcctttccttcacaggtctgcacacctcattgccccttttgcaactactgaggcacttgcagctgcctcagacttctcagctccccttgagatgcctggatcttcacacccccaactccttagctactaaggaatgtgcccctcacagggctgacctacccacagctgcctctcccacacgtgacccttacctacact

SEQ ID NO: 2725 - DNA, 1157 bp, Homo sapiens
ccttttgccttcggttggggctgctgtttctcttcgccgacggtgacagggctttccctatgttgcccaggttcgtctcaaactcctgggctcaaaagatcctcatcttctcaagtggttgaatatacacgctccagcgaccatgcctggctgaatgaagagctttgagattttgaagaaacaggaaccatgaaatttgctttgcaactgtttgcaacctttaaggaagactgaaaaggcattcctgaagcatgtrccttcagccgctacaagagcagaagcagtgggcattggatgragctgagtacaggaccatacaggctaattgcaccggcacaggaatcggatataacatcatctgggtacccatggccagctgtgacttctccatccgcacctacacctatgcagacacccctgatgatttccagttgcacaacttcagcctcccagaggaagataccaagctcaagatacccctgattcaccgagccctgcagttggcccagcgtcccgtttcactccttgccagcccctggacatcacccactyggctcaagaccaagggagcggggaatgggaaggggccactcaagggacagcccrgagacatctaccaccagacctgggccagatacattgtgaagttcctggatgcctatgctgagcacaagttacagttctgggcagtgacagstgaaaatgagccttctgctgggctgttgagtggataccccttccagtgcctgggcttcacccctgaacatcagcgagacttcattgcccgtgacctaggtcctacccttgccaacggtactcaccacaatgtccgcctactcatgctggatgaccaacgcttgctgctgccccactgggcaaaggtggtactgacagacccagaagcagctaagtatgttcatggtattgctgtacattggtacctggactttctggctccagccaaagccaccctaagggagacacaccacctgttccccaacaccatgctctttgcctcagaggcctgtgtgggttccaagttctgggagcagagtgtgcggctaggctcctgggatcgagggatgcagtacagccacagcatcatcacaaacctcctgtaccatgtggtcggctggaccgactggaacccatcattg

SEQ ID NO: 2726 - DNA, 773 bp, Homo sapiens
ggttctcactatgagcccaggctcatcttgaagttctgggctcaagcaatcctcttaccttggcttyccaaacacaggaattgtgcccaaaggctaggataaggaattaaagatgcatgccaagaaatacccacaaacattaattataaaagggagactatactaatgtttgtgaaaagcttatactaacatagagcaatatttaagttataaagttaaatgaaaaagggtataaaactgtatgaacagtacaatctcaactatgtaaaaaccaaccaaaatctgccctaaaaaggctggaaggaaatagctcaaaatgttaatgtgattgtatttaagaagtgtatctaatagggatcttttttcttcctttttagttttctgtcttttccaaatgtttctctactggggagatttttttaaaaagctattagggaaggagtagaacaaaagtggaaaaaaaaatctattagttacaaaaaactgagtctgatagaagcattgaatttgagttaatgaatctaagtctagcctataagaatttgtacatttagaaaactatgaaacagtccaggctactccatgaatccattggtaggaccagaggctggaggtggaagtgccacctggtcctgcctgataaaaaatgctgaatcagccaggcacggtggcccacacacctgtaatcccaccaytttgggaggctgaggtgggcggatcacctgagcctcccaaaatgctgggattacaggcatgagccactgtgcccagcc

SEQ ID NO: 2727 - DNA, 2286 bp, Homo sapiens
cccgccccgttgaggctttgagaaaggagtaggagcckagcattccggcagaggaagaaaaacggcccatcttttagagtccgacctctrgaaattcgggtggccgcggggacccgggcgasgtcggaggccctgccgggaacccaggctgcagcccccacccccgcgctgcgacacgccccccaccccttccggctcacacccccgcccacactcctgagtggtgcggtgcagcgtcggccgaggcagcagagccgaggagagcaggtccacacctctgcatccctgcaccaggactcaccaagacgcccatcctggaaaaggtcccccgtaagatgrcagcaaaaactcccagcagtgaggagtctgggctgcccaaactgcccgtgcccccgctgcagcagaccctggccacgtayctgcagtgcatgcgacacttggtgtctgaggagcagttcaggaagagccaggccattgtgcagcagtttggggcccctggtggcctcggcgagaccctgcagcagaaactcctggagcggcaggagaagacagccaactgggtgtctgagtactggctgaatgacatgtatctcaacaaccgcctggcccygsctgtcaactccagccctgccgtgatctttgctcggcagcacttccctggcaccgatgaccagctgaggtttgcagccagcctcatctctggtgtactcagctacaaggccctgctggacagccactccattcccactgactgtgccaaaggccagctgtcagggcagcccctttgcatgaagcaatactatgggctcttctcctcctaccggctccccggccatacccaggacacgctggtggctcagaacagcagcatcatgcyggagcctgagcacgtcaycgtagcctgctgcaatcagttctttgtcttggatgttgtcattaatttccgccgtctcagtgagggggatctgttcactcagttgagaaagatagtcaaaatggcttccaacgaggacgagcgtttgcctccaattggcctgctgacgtctgacrggaggagcgagtgggccgaggccaggacggtcctcgtgaaagactccaccaaccgggactcgctggacatgattgagcgctgcatctgccttgtatgcctggacgcgccaggaggcgtggagctcagcgacacccacagggcactccagctccttcacggcggaggctacagcaagaacggggccaatcgctggtacgacaagtccctgcagtttgtggtgggccgagacggcacctgcggtgtggtgtgcgaacactccccattcgatggcatcgtcctggtgcagtgcactgagcatctgctcaagcacatgacgcagagcagcaggaagctgatccgagcagactccgtcagcgagctccccrccccccggrggctgcggtggaaatgctccccggaaattcaaggccacttagcctcctyggcagaaaaacttcaacgaataktaaagaaccttgacttcattgtctataagtttgacaactatgggaaaacattcattaagaagcagaaatgcagccctgatgccttcatccaggtggccctccagctggccttctacaggctccaycgaagactggtgcccacctacgagagcgcgtcyatccrccgattccaggagggacgcgtggacaacatcagatcggccactccagaggcactggcttttgtgagagccgtgactgaccacaaggctgctgtgccagcttctgagaagcttctgctcctgaaggatgccatccgtgcccagactgcatacacagtcatggccataacagggatggccattgacaaccacctgctggcactgcgggagctggcccgggccatgtgcaaggagctgcccgagatgttcatggatgaaacctacctgatgagcaaccggtttgtcctctccactagccaggtgcccacaaccacggagatgttctgctgctatggtcctgtggtcccaaatgggtatggtgcctgctacaacccccagccagagaccatycttttctgcatctctagctttcacagctgcaaagagacttcttctagcaagtttgcaaaagctgtggaagaaagcctcattgacatgagagacctctgcagtctgctgccgcctactgagagcaagccattggcaacaaaggaaaaagccacgaggcccagccagggacaccaaccttgactcctgccactaggtttcacctcccaaacccagcctctagaacagccagaccctgcag

SEQ ID NO: 2728 - DNA, 2124 bp, Homo sapiens
tcaacgccgctctggggacgcgtcaggcccagcgcacagcctgggcagctcagcctgtcagctgagcacgggcgcctcaaggggtgcggccctctcagaaggaaggtccacacctctgcatccctgcaccaggactcaccaagacgcccatcctggaaaaggtcccccgtaagatgrcagcaaaaactcccagcagtgaggagtctgggctgcccaaactgcccgtgcccccgctgcagcagaccctggccacgtayctgcagtgcatgcgacacttggtgtctgaggagcagttcaggaagagccaggccattgtgcagcagtttggggcccctggtggcctcggcgagaccctgcagcagaaactcctggagcggcaggagaagacagccaactgggtgtctgagtactggctgaatgacatgtatctcaacaaccgcctggcccygsctgtcaactccagccctgccgtgatctttgctcggcagcacttccctggcaccgatgaccagctgaggtttgcagccagcctcatctctggtgtactcagctacaaggccctgctggacagccactccattcccactgactgtgccaaaggccagctgtcagggcagcccctttgcatgaagcaatactatgggctcttctcctcctaccggctccccggccatacccaggacacgctggtggctcagaacagcagcatcatgcyggagcctgagcacgtcaycgtagcctgctgcaatcagttctttgtcttggatgttgtcattaatttccgccgtctcagtgagggggatctgttcactcagttgagaaagatagtcaaaatggcttccaacgaggacgagcgtttgcctccaattggcctgctgacgtctgacrggaggagcgagtgggccgaggccaggacggtcctcgtgaaagactccaccaaccgggactcgctggacatgattgagcgctgcatctgccttgtatgcctggacgcgccaggaggcgtggagctcagcgacacccacagggcactccagctccttcacggcggaggctacagcaagaacggggccaatcgctggtacgacaagtccctgcagtttgtggtgggccgagacggcacctgcggtgtggtgtgcgaacactccccattcgatggcatcgtcctggtgcagtgcactgagcatctgctcaagcacatgacgcagagcagcaggaagctgatccgagcagactccgtcagcgagctccccrccccccggrggctgcggtggaaatgctccccggaaattcaaggccacttagcctcctyggcagaaaaacttcaacgaataktaaagaaccttgacttcattgtctataagtttgacaactatgggaaaacattcattaagaagcagaaatgcagccctgatgccttcatccaggtggccctccagctggccttctacaggctccaycgaagactggtgcccacctacgagagcgcgtcyatccrccgattccaggagggacgcgtggacaacatcagatcggccactccagaggcactggcttttgtgagagccgtgactgaccacaaggctgctgtgccagcttctgagaagcttctgctcctgaaggatgccatccgtgcccagactgcatacacagtcatggccataacagggatggccattgacaaccacctgctggcactgcgggagctggcccgggccatgtgcaaggagctgcccgagatgttcatggatgaaacctacctgatgagcaaccggtttgtcctctccactagccaggtgcccacaaccacggagatgttctgctgctatggtcctgtggtcccaaatgggtatggtgcctgctacaacccccagccagagaccatycttttctgcatctctagctttcacagctgcaaagagacttcttctagcaagtttgcaaaagctgtggaagaaagcctcattgacatgagagacctctgcagtctgctgccgcctactgagagcaagccattggcaacaaaggaaaaagccacgaggcccagccagggacaccaaccttgactcctgccactaggtttcacctcccaaacccagcctctagaacagccagaccctgcag

SEQ ID NO: 2729 - DNA, 2059 bp, Homo sapiens
atgtggccggaatgcagaratgaagcactgagcacagtaggtccacacctctgcatccctgcaccaggactcaccaagacgcccatcctggaaaaggtcccccgtaagatgrcagcaaaaactcccagcagtgaggagtctgggctgcccaaactgcccgtgcccccgctgcagcagaccctggccacgtayctgcagtgcatgcgacacttggtgtctgaggagcagttcaggaagagccaggccattgtgcagcagtttggggcccctggtggcctcggcgagaccctgcagcagaaactcctggagcggcaggagaagacagccaactgggtgtctgagtactggctgaatgacatgtatctcaacaaccgcctggcccygsctgtcaactccagccctgccgtgatctttgctcggcagcacttccctggcaccgatgaccagctgaggtttgcagccagcctcatctctggtgtactcagctacaaggccctgctggacagccactccattcccactgactgtgccaaaggccagctgtcagggcagcccctttgcatgaagcaatactatgggctcttctcctcctaccggctccccggccatacccaggacacgctggtggctcagaacagcagcatcatgcyggagcctgagcacgtcaycgtagcctgctgcaatcagttctttgtcttggatgttgtcattaatttccgccgtctcagtgagggggatctgttcactcagttgagaaagatagtcaaaatggcttccaacgaggacgagcgtttgcctccaattggcctgctgacgtctgacrggaggagcgagtgggccgaggccaggacggtcctcgtgaaagactccaccaaccgggactcgctggacatgattgagcgctgcatctgccttgtatgcctggacgcgccaggaggcgtggagctcagcgacacccacagggcactccagctccttcacggcggaggctacagcaagaacggggccaatcgctggtacgacaagtccctgcagtttgtggtgggccgagacggcacctgcggtgtggtgtgcgaacactccccattcgatggcatcgtcctggtgcagtgcactgagcatctgctcaagcacatgacgcagagcagcaggaagctgatccgagcagactccgtcagcgagctccccrccccccggrggctgcggtggaaatgctccccggaaattcaaggccacttagcctcctyggcagaaaaacttcaacgaataktaaagaaccttgacttcattgtctataagtttgacaactatgggaaaacattcattaagaagcagaaatgcagccctgatgccttcatccaggtggccctccagctggccttctacaggctccaycgaagactggtgcccacctacgagagcgcgtcyatccrccgattccaggagggacgcgtggacaacatcagatcggccactccagaggcactggcttttgtgagagccgtgactgaccacaaggctgctgtgccagcttctgagaagcttctgctcctgaaggatgccatccgtgcccagactgcatacacagtcatggccataacagggatggccattgacaaccacctgctggcactgcgggagctggcccgggccatgtgcaaggagctgcccgagatgttcatggatgaaacctacctgatgagcaaccggtttgtcctctccactagccaggtgcccacaaccacggagatgttctgctgctatggtcctgtggtcccaaatgggtatggtgcctgctacaacccccagccagagaccatycttttctgcatctctagctttcacagctgcaaagagacttcttctagcaagtttgcaaaagctgtggaagaaagcctcattgacatgagagacctctgcagtctgctgccgcctactgagagcaagccattggcaacaaaggaaaaagccacgaggcccagccagggacaccaaccttgactcctgccactaggtttcacctcccaaacccagcctctagaacagccagaccctgcag

SEQ ID NO: 2730 - DNA, 2485 bp, Homo sapiens
tggggttggggaagtgcggtgactgggaaatgctgagctaggggcaggaggcatgggcgggacagtgttctgtgcccccttctagagcctaaatttgttgcccgagttcctccgggaagcgctccgggtagattctsggggccgggagctgagatccctgggcggggagcgggggaagggatggggctgaggacagcgaagaagagggggcttgggggaggggggaaatggaagagagaggagggaggaggtacaagaggaaggagagaagtgcggccagcttgctttctccagtcgggtggccgcggggacccgggcgasgtcggaggccctgccgggaacccaggctgcagcccccacccccgcgctgcgacacgccccccaccccttccggctcacacccccgcccacactcctgagtggtgcggtgcagcgtcggccgaggcagcagagccgaggagagcaggtccacacctctgcatccctgcaccaggactcaccaagacgcccatcctggaaaaggtcccccgtaagatgrcagcaaaaactcccagcagtgaggagtctgggctgcccaaactgcccgtgcccccgctgcagcagaccctggccacgtayctgcagtgcatgcgacacttggtgtctgaggagcagttcaggaagagccaggccattgtgcagcagtttggggcccctggtggcctcggcgagaccctgcagcagaaactcctggagcggcaggagaagacagccaactgggtgtctgagtactggctgaatgacatgtatctcaacaaccgcctggcccygsctgtcaactccagccctgccgtgatctttgctcggcagcacttccctggcaccgatgaccagctgaggtttgcagccagcctcatctctggtgtactcagctacaaggccctgctggacagccactccattcccactgactgtgccaaaggccagctgtcagggcagcccctttgcatgaagcaatactatgggctcttctcctcctaccggctccccggccatacccaggacacgctggtggctcagaacagcagcatcatgcyggagcctgagcacgtcaycgtagcctgctgcaatcagttctttgtcttggatgttgtcattaatttccgccgtctcagtgagggggatctgttcactcagttgagaaagatagtcaaaatggcttccaacgaggacgagcgtttgcctccaattggcctgctgacgtctgacrggaggagcgagtgggccgaggccaggacggtcctcgtgaaagactccaccaaccgggactcgctggacatgattgagcgctgcatctgccttgtatgcctggacgcgccaggaggcgtggagctcagcgacacccacagggcactccagctccttcacggcggaggctacagcaagaacggggccaatcgctggtacgacaagtccctgcagtttgtggtgggccgagacggcacctgcggtgtggtgtgcgaacactccccattcgatggcatcgtcctggtgcagtgcactgagcatctgctcaagcacatgacgcagagcagcaggaagctgatccgagcagactccgtcagcgagctccccrccccccggrggctgcggtggaaatgctccccggaaattcaaggccacttagcctcctyggcagaaaaacttcaacgaataktaaagaaccttgacttcattgtctataagtttgacaactatgggaaaacattcattaagaagcagaaatgcagccctgatgccttcatccaggtggccctccagctggccttctacaggctccaycgaagactggtgcccacctacgagagcgcgtcyatccrccgattccaggagggacgcgtggacaacatcagatcggccactccagaggcactggcttttgtgagagccgtgactgaccacaaggctgctgtgccagcttctgagaagcttctgctcctgaaggatgccatccgtgcccagactgcatacacagtcatggccataacagggatggccattgacaaccacctgctggcactgcgggagctggcccgggccatgtgcaaggagctgcccgagatgttcatggatgaaacctacctgatgagcaaccggtttgtcctctccactagccaggtgcccacaaccacggagatgttctgctgctatggtcctgtggtcccaaatgggtatggtgcctgctacaacccccagccagagaccatycttttctgcatctctagctttcacagctgcaaagagacttcttctagcaagtttgcaaaagctgtggaagaaagcctcattgacatgagagacctctgcagtctgctgccgcctactgagagcaagccattggcaacaaaggaaaaagccacgaggcccagccagggacaccaaccttgactcctgccactaggtttcacctcccaaacccagcctctagaacagccagaccctgcag

SEQ ID NO: 2731 - DNA, 2103 bp, Homo sapiens
gaggctttgagaaaggagtaggagcckagcattccggcagaggaagaaaaacggcccatcttttagagtccgacctctrgaaatgtccacacctctgcatccctgcaccaggactcaccaagacgcccatcctggaaaaggtcccccgtaagatgrcagcaaaaactcccagcagtgaggagtctgggctgcccaaactgcccgtgcccccgctgcagcagaccctggccacgtayctgcagtgcatgcgacacttggtgtctgaggagcagttcaggaagagccaggccattgtgcagcagtttggggcccctggtggcctcggcgagaccctgcagcagaaactcctggagcggcaggagaagacagccaactgggtgtctgagtactggctgaatgacatgtatctcaacaaccgcctggcccygsctgtcaactccagccctgccgtgatctttgctcggcagcacttccctggcaccgatgaccagctgaggtttgcagccagcctcatctctggtgtactcagctacaaggccctgctggacagccactccattcccactgactgtgccaaaggccagctgtcagggcagcccctttgcatgaagcaatactatgggctcttctcctcctaccggctccccggccatacccaggacacgctggtggctcagaacagcagcatcatgcyggagcctgagcacgtcaycgtagcctgctgcaatcagttctttgtcttggatgttgtcattaatttccgccgtctcagtgagggggatctgttcactcagttgagaaagatagtcaaaatggcttccaacgaggacgagcgtttgcctccaattggcctgctgacgtctgacrggaggagcgagtgggccgaggccaggacggtcctcgtgaaagactccaccaaccgggactcgctggacatgattgagcgctgcatctgccttgtatgcctggacgcgccaggaggcgtggagctcagcgacacccacagggcactccagctccttcacggcggaggctacagcaagaacggggccaatcgctggtacgacaagtccctgcagtttgtggtgggccgagacggcacctgcggtgtggtgtgcgaacactccccattcgatggcatcgtcctggtgcagtgcactgagcatctgctcaagcacatgacgcagagcagcaggaagctgatccgagcagactccgtcagcgagctccccrccccccggrggctgcggtggaaatgctccccggaaattcaaggccacttagcctcctyggcagaaaaacttcaacgaataktaaagaaccttgacttcattgtctataagtttgacaactatgggaaaacattcattaagaagcagaaatgcagccctgatgccttcatccaggtggccctccagctggccttctacaggctccaycgaagactggtgcccacctacgagagcgcgtcyatccrccgattccaggagggacgcgtggacaacatcagatcggccactccagaggcactggcttttgtgagagccgtgactgaccacaaggctgctgtgccagcttctgagaagcttctgctcctgaaggatgccatccgtgcccagactgcatacacagtcatggccataacagggatggccattgacaaccacctgctggcactgcgggagctggcccgggccatgtgcaaggagctgcccgagatgttcatggatgaaacctacctgatgagcaaccggtttgtcctctccactagccaggtgcccacaaccacggagatgttctgctgctatggtcctgtggtcccaaatgggtatggtgcctgctacaacccccagccagagaccatycttttctgcatctctagctttcacagctgcaaagagacttcttctagcaagtttgcaaaagctgtggaagaaagcctcattgacatgagagacctctgcagtctgctgccgcctactgagagcaagccattggcaacaaaggaaaaagccacgaggcccagccagggacaccaaccttgactcctgccactaggtttcacctcccaaacccagcctctagaacagccagaccctgcag

SEQ ID NO: 2732 - DNA, 1754 bp, Homo sapiens
catgcacaggtatgttcattgcagcactactcgcaatagcaaagacttggaaccaaccgaaatgtccatcaatgatagagtggataaagaaaatgtggcacatatacaccatggaatactatgcagtcataaaaaggatgagttcatgtcctttgcagggacatggatgaagctggaaaccatcattctcagcaagctatcacaaactatcgtaggaacagaaaaccaaacaccacatgttctcacttataaatgggagttgaacaagaacacatggacacagggaagggaactcacacacccgggcctgttagggggtgggggcctaaggaagggataacattaggagaaatacctaatgtaggtgacaggttgatgggtgcagcaaacgaccatggcatgtgcatacctatgtaacaaaactgcacgttctgcacatgtaccgcagaacttaaagtataataaataaatatataaatatttataaataaataataaatacataaatatcagaaagtaaaagaggaaaaaactgaaccttgaatttttttcttttagaatatttataatatttaacgtatttgaaggtgaaggccatcctacatggacatctgaagctttagctaagtattatcttttctgtaatgtgactattggtttgcagttcggttcttcttttcgaatagtatgagattaattttctcagtacttaaatcactcctcagttaagttggatgttcatggaggaacattctttccttcaggttgctgatacatttgctgcactgtaggggagggagtgggtatctgagttagtcagttttaccatttataaaatgtttggtggaggaaattgaaactaattgctaaattgttagtaaccagtgcattaactaggaccctactgagtggactgaaagaatcgaaaatgtttaactggttgagaggcaatgatgttgcaaatggggtattcttcaaagctccttctttttttaaatcttcaaaggcaattattctgaatgtaaactacagaccaaattgcagtcttctgtaagcatttcagagattacctcaaatattttttgattaaaaaactcttccgtggtcttttgtgcttcagaactacccagtacaacagggtcttcagcctgctcaggatctctaaagagagctagcacacagtcagccaactttggctgcttcaactcctaggaacaagaaatgatgctgagataatttgtctggcaggtattatcagcccacaatgactgctgtcatttagcctcaaaatgtttatttttccttttacaatgctgtatttctttagaaccttcctattccgagtgtggaccctaggccagccccatagacttcccctggggacttgtcagaaatgcataattttaggccccaccccagacctgttggaccagaatcttcatttaacaagatgcccagaaaacctgagataatcaaagacccacaactaagtaagacctctcaggatctcaaagccaagtgttttacagagaagagaagatagaaaaggcatattatctaggagtggaaaagaattttatgctgaaaatgttgaagagagaattcrwaatcaaattcaacattccacctaggaggcttccatctctgcttaggagctgagtaatggaggtgattggtgtaagtgttcagtacctatgaagacctaactcttgagggagagactccaatgtaaacttcctactcaatactgcctt

SEQ ID NO: 2733 - DNA, 858 bp, Homo sapiens
tgacccaggctgcttttatcttgcacagctaaagagggtctgatgggtggctcaacaccccacccactcctataccatgwcatcagtgttcacattttccaaatgagttgaagtgccttgatctgtccactgccaccaccaccagtgctgagttttcccatgtggttttgcttttgtggtgttactgccttgctgctagagcagcaggactgtctgcgtagcgcctccagcctgggacctcactcagttcccagggtattcaaagacggcagcggctcccattccagtcccgatgcacatggacaccactccgtatgccctcttcccacggcgcttcagctcattgagcagcgtgatgacctgtcgtgccccagtgcagcccagtgggtgccctaaggccactgcaccccccagggggttcaccttctcaggggggagtcgtagcttctccacacagtaggcagcctggcttgcaaaggcctcattgatctcgaagatgtccacgtcactcactgtcagccctgctttttgcaaagctactgggatggcataggcaggtccaatgcccatgatgtcaggtgggaccccaaccactgcataagacctcakgaccccaaggatgggaaggcccaactcttctgccttggacctccgggccagcaggatggccagctgtggtagaamcatctttcttgaaggcaggcttcagtttggccaggccytccatggtggtgctggggcggataccctcatcctgggtcacagtgatgctcctcttggtgcccttgtcatcmtggaccgtggtggtcacaggcacaatctcagcttggaaacagcccttgctctgggctcttgctg

SEQ ID NO: 2734 - DNA, 1913 bp, Homo sapiens
cccagggtgcacgtaaccctcaagcactaggaccgtgcggaatccaggctgcgatggcaccttcatttaccgcccgcattcagttgttcctcttgcgggcgctaggctttctcataggcttagtaggccgagcagctttagtcttagggggyccaaagtttgcctcaaagacccctcggccggtgactgaaccattgcttctgctttcggggatgcagctggccaagctgatccgacagagaaaggtgaaatgtatagatgttgttcaggcttatatcaacagaatcaaggacgtgaacccaatgatcaatggaattgtcaagtacaggtttgaggaagcgatgaaggaggctcatgctgtagatcaaaagcttgcagagaagcaggaagatgaagccaccctggaaaataaatggcccttccttggggttcctttgacagtcaaggaagctttccagctacaaggaatgcccaattcttctggactcatgaaccgtcgtgatgccattgccaaaacagatgccactgtggtggcattactgaagggagctggtgccattcctcttggcataaccaactgtagtgagttgtgtatgtggtatgaatccagtaacaagatctatggccgatcaaacaacccatatgatttacagcatattgtaggtggaagttctggtggtgagggctgcacactggcagctgcctgctcagttattggtgtgggctctgatattggtggtagcattcgaatgcctgctttcttcaatggtatatttggacacaagccttctccaggtgtggttcccaacaaaggtcagtttcccttggctgtgggagcccaggagttgtttctgtgcactggtcctatgtgccgytatgctgaagacctggcccccatgttgaaggtcatggcaggacctgggatcaaaaggttaaaactagacacaaaggtacatttaaaagacttaaaattttactggatggaacatgatggaggctcatttttaatgtccaaagtggaccaagatctcattatgactcagaaaaaggttgtggttcaccttgaaactattctaggagcctcagttcaacatgttaaactgaagaaaatgaagtactcttttcagttgtggatcgcaatgatgtcagcaaagggacatgatgggaaggaacctgtgaaatttgtagatttgcttggtgaccatgggaaacatgtcagtcctctgtgggagttgatcaaatggtgcctgggtctgtcagtgtacaccatcccttccattggactggctttgttggaagaaaagctcagatatagcaatgagaaataccaaaagtttaaggcagtggaagaaagcctgcgtaaagagctggtggatatgctaggtgatgatggtgtgttcttatatccctcacatcccacagtggcacctaagcatcatgtccctctaacacggccyttcaactttgcttacacaggtgtcttcagtgccctgggtttgcctgtgacccaatgcccactgggactgaatgccaaaggactccctttaggcatccaggttgtggctggaccctttaatgatcatctgaccctggctgtggcccagtacttggagaaaacttttgggggctgggtctgtccaggaaagttttaggaggaccttctgcaaggttaatgtgtgtgtgtgtttgtgttcgtgtggtggtgtttctattaattgggtgaaaycaagcaccagcagacaagcagagaaacaactggggaatttattgactcatttagttattctttctacttttatttccttctctaactgttggtcttactaaaatggtaatatttgcttcttgcttttatgttactggaaaattaggacatgtaaatggataagtgcaataaagtttcctaaatgctg

SEQ ID NO: 2735 - DNA, 1974 bp, Homo sapiens
atggaagaagcaacatctaagatgacggaaattatttcagagcccacagttacactggaaaatgagggtgcacgtaaccctcaagcactaggaccgtgcggaatccaggctgcgatggcaccttcatttaccgcccgcattcagttgttcctcttgcgggcgctaggctttctcataggcttagtaggccgagcagctttagtcttagggggyccaaagtttgcctcaaagacccctcggccggtgactgaaccattgcttctgctttcggggatgcagctggccaagctgatccgacagagaaaggtgaaatgtatagatgttgttcaggcttatatcaacagaatcaaggacgtgaacccaatgatcaatggaattgtcaagtacaggtttgaggaagcgatgaaggaggctcatgctgtagatcaaaagcttgcagagaagcaggaagatgaagccaccctggaaaataaatggcccttccttggggttcctttgacagtcaaggaagctttccagctacaaggaatgcccaattcttctggactcatgaaccgtcgtgatgccattgccaaaacagatgccactgtggtggcattactgaagggagctggtgccattcctcttggcataaccaactgtagtgagttgtgtatgtggtatgaatccagtaacaagatctatggccgatcaaacaacccatatgatttacagcatattgtaggtggaagttctggtggtgagggctgcacactggcagctgcctgctcagttattggtgtgggctctgatattggtggtagcattcgaatgcctgctttcttcaatggtatatttggacacaagccttctccaggtgtggttcccaacaaaggtcagtttcccttggctgtgggagcccaggagttgtttctgtgcactggtcctatgtgccgytatgctgaagacctggcccccatgttgaaggtcatggcaggacctgggatcaaaaggttaaaactagacacaaaggtacatttaaaagacttaaaattttactggatggaacatgatggaggctcatttttaatgtccaaagtggaccaagatctcattatgactcagaaaaaggttgtggttcaccttgaaactattctaggagcctcagttcaacatgttaaactgaagaaaatgaagtactcttttcagttgtggatcgcaatgatgtcagcaaagggacatgatgggaaggaacctgtgaaatttgtagatttgcttggtgaccatgggaaacatgtcagtcctctgtgggagttgatcaaatggtgcctgggtctgtcagtgtacaccatcccttccattggactggctttgttggaagaaaagctcagatatagcaatgagaaataccaaaagtttaaggcagtggaagaaagcctgcgtaaagagctggtggatatgctaggtgatgatggtgtgttcttatatccctcacatcccacagtggcacctaagcatcatgtccctctaacacggccyttcaactttgcttacacaggtgtcttcagtgccctgggtttgcctgtgacccaatgcccactgggactgaatgccaaaggactccctttaggcatccaggttgtggctggaccctttaatgatcatctgaccctggctgtggcccagtacttggagaaaacttttgggggctgggtctgtccaggaaagttttaggaggaccttctgcaaggttaatgtgtgtgtgtgtttgtgttcgtgtggtggtgtttctattaattgggtgaaaycaagcaccagcagacaagcagagaaacaactggggaatttattgactcatttagttattctttctacttttatttccttctctaactgttggtcttactaaaatggtaatatttgcttcttgcttttatgttactggaaaattaggacatgtaaatggataagtgcaataaagtttcctaaatgctg

SEQ ID NO: 2736 - DNA, 1792 bp, Homo sapiens
ggggaaaggataagtcagctgttgtccccagaagactctaatgaatgtcctgttctgtcctattaaaaattaactctaaagcctcaccctaaggatgatgggcaatcgagttatgctctgaaaccaggagagatcattccagcagagagaagtgctgataggagtcatytggaaataagaagaagtgccttttgcctcccgccatgatcctgaggactccccagccatgtggaactgtaagtccaattaaacctcttttcttcccagtctcggatatgactttatcaacagcatgaaaatagactaatacaataaataggtgccagtagagtggagcattattgaaaagatacccaaacatctggaagcgactttggaactgggtaacaggcagagattggaacagtttggagggctcagaagaagacaggaaaatgtgggaacttcctagagacttgttgaatagctttacccaaaatgctgatagcaatatggacaataaggtccaggctgaggtggtctcaggtggagatgaggaacttgttgggaactcaagtaaaggtgactgttgttatgttttaacagagagacgagtggcattttgcccctgccctagagatttgtggaactttgaaattgagagagatgatttagggtatcttgtggaagaaatttctaagcagcaaagcgttcaaaaggtgacttgggtattgttaaaaacatttcatttttaaatggaaacagagcataaacgttcagaaaacttgcagcctgataatgcaggagaaaaaagaattttttttttgaggagaaattcaagcccgctgcagaaatttgcataagtatcaaggagcctaatgttaatccccaagaccacaggaaaatgtctccaggccgtcagagaccttcacggcagcctctcccatcagaggcccgaaagcccaggaggaaaaagtggttgcatgagtggggtccagggtccccatgctgtgtgcagcctgcggacttggtgacctgtgtcacagctgctccagctgtggctgaaagaggccaaagtacagctcaggctgtggcttcagaagatggaagaaagccccaagccttggcagcctgcgggtgcacggaagtcaagaattgaggtctggaaacctccacgtagatatcagatgtatagaaatgcctggatgcccaggcaaatgtttgctgcaggggtagcatttaaggcttgaagcataaaagaaagaaatagaagagaaggcaggagtggaaacagaacatagttatgatcttccagtagctgaaatcatcttaggtttcatttttttaaattagaatataattcacacactgtaaaacacatccattttaagtgtacagctcttcaagtttctgcaagacaggcatcaagttaccaccacattcaagataattgaacattttcatcattacagaacgtttccttgtcttttcccagtcaatgctgtttcacccacagaggtagtcactgttctgactttttgcatcatcacatagaatttcaaattgttgctctggaatttcaaattattggaatcaattaaatgtttatttatgactctttttgttcaacatgctcttttgagtcaactgtgttttgcttgcatgagtatttcactgtttttttccattgctcagcattgttctattgtatgaatttaatccacatttgttttatccattcacctgttggtgggcattctaatggtttccagtttggggggctattatgaataaaaccactgtgaatattctt

SEQ ID NO: 2737 - DNA, 1350 bp, Homo sapiens
ccgggacgaaccagtcctggcccagcccattccgcgagccagcaagcttctgaaaagcaaacctaggaagttgctttccaacataaagtggaggtttcaacacaggagactttaagcaagttccagtgtgtctatatttggtctggctgatcggctggactctggccttccccgctcacattagcagacagctctgccctagtgggcgtttagcctgcgacggcagcccgagaggaagagttgggcagagttgcaggggtctccacagctgaggcagtttggccggattatttgggttcctgctcggatggcggcgacgctgatcctggagcccgcgggccgctgctgctgggacgaaccggtgcgaatcgccgtgcgcggcctagccccggagcagccggtcacgctgcgcgcgtccctgcgcgacgagaagggcgcgcttttccaggcccacgcgcgctaccgcgccgacacccttggcgagctggacctggagcgcgcgcccgcgctgggcggcagcttcgcggggcttgagcccatggggctgctctgggccttggagcccgagaaacccttggtgcggctggtgaagcgcgacgtgcgaacgcccttggccgtggagctggaggtgctggatggccacgaccccgaccccgggcggctgctgtgccgggtgcggcacgagcgctacttcctcccgcccggggtgcggcgcgagccggtgcgcgcgggccgggtgcgaggcacgctcttcctgccgccagcgtcaacagaaatcgcatcaaggtgaccaaagatggctatgcagacattgtggatgtcctgaacagccctttggaaggacctgaccagaagagcttcattcctgtggaaagggcagagagcaccttcctgttcctggtaggtcaggatgaccacaactggaagagtgagttctatgctaatgaggcctgtaaacgcttgcaggcccatgggaggagaaagccccagatcatctgttacccagagacagggcactatattgagcctccttacttccccctgtgtcgggcttccctgcatgccttggtgggcagtcctattatctggggaggggagcccagggctcatgccatggctcaggtggatgcttggaaacaactccagactttcttccacaaacacttgggtggccacgaggggacaatcccatcaaaagtgtaaattttatttgatcatgtggcctctctgttgctaatctctcctggaaacatctgccacatttagtgtgtgtatgtgtattcattctttctcataacttcttaaagtttyttcccctcattattaaaatgaatttaccagtaagaatga

SEQ ID NO: 2738 - DNA, 1605 bp, Homo sapiens
tacacctgtaaggaataaagctcagaggtcacacagctagtaagaagccagcacccttcgatgtgggagtgatgtggaggataggcatatacagagaacacgaaagcaaaacaccatggtgcagattttgaaagaaaagccctaagattagtaatgagtgtgaattattcaacaaagtgatcaaaaccaactccagtcctgcattcctcttcgccatcaggagtttggagcctggagactgctagctgcctggttccgggacgaaccagtcctggcccagcccattccgcgagccagcaagcttctgaaaagcaaacctaggaagttgctttccaacataaagtggaggtttcaacacaggagactttaagcaagttccagtgtgtctatatttggtctggctgatcggctggactctggccttccccgctcacattagcagacagctctgccctagtgggcgtttagcctgcgacggcagcccgagaggaagagttgggcagagttgcaggggtctccacagctgaggcagtttggccggattatttgggttcctgctcggatggcggcgacgctgatcctggagcccgcgggccgctgctgctgggacgaaccggtgcgaatcgccgtgcgcggcctagccccggagcagccggtcacgctgcgcgcgtccctgcgcgacgagaagggcgcgcttttccaggcccacgcgcgctaccgcgccgacacccttggcgagctggacctggagcgcgcgcccgcgctgggcggcagcttcgcggggcttgagcccatggggctgctctgggccttggagcccgagaaacccttggtgcggctggtgaagcgcgacgtgcgaacgcccttggccgtggagctggaggtgctggatggccacgaccccgaccccgggcggctgctgtgccgggtgcggcacgagcgctacttcctcccgcccggggtgcggcgcgagccggtgcgcgcgggccgggtgcgaggcacgctcttcctgccgccagcgtcaacagaaatcgcatcaaggtgaccaaagatggctatgcagacattgtggatgtcctgaacagccctttggaaggacctgaccagaagagcttcattcctgtggaaagggcagagagcaccttcctgttcctggtaggtcaggatgaccacaactggaagagtgagttctatgctaatgaggcctgtaaacgcttgcaggcccatgggaggagaaagccccagatcatctgttacccagagacagggcactatattgagcctccttacttccccctgtgtcgggcttccctgcatgccttggtgggcagtcctattatctggggaggggagcccagggctcatgccatggctcaggtggatgcttggaaacaactccagactttcttccacaaacacttgggtggccacgaggggacaatcccatcaaaagtgtaaattttatttgatcatgtggcctctctgttgctaatctctcctggaaacatctgccacatttagtgtgtgtatgtgtattcattctttctcataacttcttaaagtttyttcccctcattattaaaatgaatttaccagtaagaatga

SEQ ID NO: 2739 - DNA, 2604 bp, Homo sapiens
gagccaaggaccagactgtggaacactgtgggtactagcggacgggccgtgacccggatgaagcagaggggcgcctgagttcccgtcacctaagcgacagcctgcgagcctctcttcccctcccccacccaagccccagcccggcctccgctccggccgccgccaccgcccctgttttgtttccatggcgacaggcggcgcagggcccgctccaaacataacgcgctgtggaaaacatgctgctcgggggacccccccgcagtccccgctcggggacgagccccaaggggccctggagcagtacaggccacgtgcagtttggcaagagcccccagacctggcccaggcgcacaagaccccgctctccagagcctgccgcgccttcaggggttcggggctccacttggacgaggcgccgtgacwctccgaggcgcgccgggccgacagcgctgtcccgctacgtgggccacctctggatgggccggcggccgccctcccccgaggcccgcggcccagtcccccgcagttcagctgccagtcgggccagaagaagcctcgcctccccggggatctccccaggccccctgaccgcaacgatcggaggggcggtggcggggggcgggcccaggcaggggagggcagaagcacacaaggaagtgtttccgggacagagggtgggcaagatggcggcgcccatggagctgttctgctggtcagggggctgggggctgccgtcagtggacctggacagcctggccgtgctgacctatgccagatttactggtgctccactgaaggtacacaagatcagcaacccctggcagagcccttcaggaactctgcctgcccttcggaccagtcatggagaggtcatctcagttccacacaagatcatcacccaccttcgaaaagagaagtacaatgctgattatgatctgtcagctcggcaaggggcagacaccctggccttcatgtctctcctggargagaagttgctcccggtgctggtacatactttttggatagacaccaagaactacgtrgaagtgacccggaagtggtatgcagaggctatgccctttcccctcaacttcttcctgcctggccgcatgcagcggcagtacatggaacggctacagctgctgactggggagcacaggcctgaggacgaggaagagctggagaaggagctgtaccgagaggctcgggagtgtctgaccctgctctctcagcgcctgggctctcaaaagttcttctttggagatgcccctgcctccttggacgccttcgtcttcagctacttggccctgctgctgcaggcaaagctgcccagtgggaagctgcaggtccacctgcgtgggctgcacaacctctgtgcctattgtacccacattctcagtctctacttcccctgggatggagctgaggtaccaccgcaacgccagacaccagcaggcccagagactgaggaggagccataccggcgccggaaccagatcctatctgtgctggcaggactggcagccatggtgggctacgccttgctcagcggcattgtctccatccagcgggcaacgcctgctcgggccccaggcacccggaccctgggcatggctgaggaggatgaagaggaatgatttggctcaaacattttctcctttaagagctgccatttttcctggctggtgccataggaatcatctgggtgcctgggcacacccgctgctgctttaaggcttccgccctgatgctgacactgctgctccacgggcccagttctgcatctccaggaaagacaaacagtctccagttttgggcccagctttcctagtctcttcttttccttaccctcagccctgatcttgtgtttgtacggacagtgagctcaccctaggcctggacccaggcccagtttccaaagcaagcagcacacagcgcatgttcacataagcatgggggctggggggacactggggcttactgatctttttctaggggcctccagcccctggcaccacctagaggggaaagtgagtcacccaaaccattgcccctgggcttacgtcgctgtaagctcacrctggccctgttgtgccctctttagtcacagacagcgtgtgagctgactctgtccctttaatgcccaggctgagcccagtgcctccttgagtatctgctccatcactggcgacgccacaggtaggtgtgaatggagtagccaggtgagattgtctccaggaagcccacagcaggatccttgatggtaagaggcacatccttagaggagctagggagcagggaggagagccatcgggatgcatcagtgccactgcgtccgggtcgttcttctgactggcaaccagccccactctctgggagccctcaggaatgaacttgctgaatcttttctgcatcgcagtccagcctcaggcattggggttttctgttgctacctagtcacttcctgcctccatggcgcaaaaggggatgggtgtgcctcttccgaggttccaccctgaacaccttcctgctccctcgtggtgtagagtgatgtaagccatccgatgtaggagatgataggcctggtatggaatgggggtgccc

SEQ ID NO: 2740 - DNA, 2158 bp, Homo sapiens
cgggcacattgggagttgtagtctaattatatatttccgcccttagtgtggggagagcgggaactactcgacccacagagccgatcgcggagcggattctgcttttaggagtacccgccaacaagcgggaccgagcaggaatccgtatctgggaacaggatgcccctgtcccgctggttgagatctgtgggggtcttcctgctgccagccccctactgggcaccccgggagaggtggctgggttccctacggcggccctccctggtgcacgggtacccagtcctggcctggcacagtgccygctgctggtgccaagcgtggacagaggaacctcgagccctttgctcctccctcagaatgaacggagaccagaattcagatgtttatgcccaagaaaagcaggatttcgttcagcacttctcccagatcgttagggtgctgactgaggatgagatggggcacccagagataggagatgctattgcccggctcaaggaggtcctggagtacaatgccrytggaggcaagtataaccggggtttgacggtggtagtagcattccgggagctggtggagccaaggaaacaggatgctgatagtctccagcgggcctggactgtgggctggtgtgtggaactgctgcaagctttcttcctggtggcagatgacatcatggattcatcccttacccgccggggacagatctgctggtatcagaagccgggcgtgggtttggatgccatcaatgatgctaacctcctggaagcatgtatctaccgcctgctgaagctctattgccgggagcagccctattacctgaacctgatcgagctcttcctgcagagttcctatcagactgagattgggcagaccctggacctcctcacagccccccagggcaatgtggatcttgtcagattcactgaaaagaggtacaaatctattgtcaagtacaagacagctttctactccttctaccttcctatagctgcagccatgtacatggcaggaattgatggcgagaaggagcacgccaatgccaagaagatcctgctggagatgggggagttctttcagattcaggatgattaccttgacctctttggggaccccagtgtgaccggcaaaattggcactgacatccaggacaacaaatgcagctggctggtggttcagtgtctgcaacgggccactccagaacagtaccagatcctgaaggaaaattacgggcagaaggaggctgagaaagtggcccgggtgaaggcgctatatgaggagcwggatctgccagcagtgttcttgcaatatgaggaagacagttacagccacrttatggctctcattgaacagtacgcagcacccctgcccccagccgtctttytggggcttgcgcgcaaaatctacaagcggagaaagtgacctagagattgcaagggcggggagaggaggctctcaataaataatcgtgtaaccttcttgtggttctgttcttgctcggcccagccagagtctggctctttccagaatgtgcagggtggggtgctgggaggactcgctgcacggaaccaggacccaggggccaaaagcttaggatatatcaaaccckctaggtgggtgacaaaagacgctaaacgctgggggcgggtctgagctacgccacgcccatgcgcgaaggggtgcagctgcgcagcgcagggtaggttgtgctagtgcccctcccctcccgctctgtgccccgccgggcggggaccgtgggagccgcggacaagcccaaggccggagcggttccaggaggaccctggtgaggagggctcggcccatgggtgtagaccgatggacctgggcacgaggggcggggcaggacaagggagcaggagaaatgaatagagaaagggtgcggtggtggctgaacgatggagacgaatgcggagagaatggacataccgctgttccgaggggcgagggcgcaggctggagcccggccgaggcagccagcagatgcggagttgacaagctgacggctgctccatccttttcctctccagcccccacccctttcctgcattcaccagacaaactctgcgtattgccccacccccatcctccacctcctttcagggcatctgggtgggtctccctgggtcccttcctctgggag

SEQ ID NO: 2741 - DNA, 2269 bp, Homo sapiens
cgggcacattgggagttgtagtctaattatatatttccgcccttagtgtggggagagcgggaactactcgacccacagagccgatcgcggagcggattctgcttttaggagtacccgccaacaagcgggaccgagcaggaatccgtatctgggaacaggtgagagaggatgtgtgctgggccttggaggaagggggccgagaccgggccttacttctgtaacgatactgtgaggcatcggaaggccagcctgttgtgtccgttttgaaggatgcccctgtcccgctggttgagatctgtgggggtcttcctgctgccagccccctactgggcaccccgggagaggtggctgggttccctacggcggccctccctggtgcacgggtacccagtcctggcctggcacagtgccygctgctggtgccaagcgtggacagaggaacctcgagccctttgctcctccctcagaatgaacggagaccagaattcagatgtttatgcccaagaaaagcaggatttcgttcagcacttctcccagatcgttagggtgctgactgaggatgagatggggcacccagagataggagatgctattgcccggctcaaggaggtcctggagtacaatgccrytggaggcaagtataaccggggtttgacggtggtagtagcattccgggagctggtggagccaaggaaacaggatgctgatagtctccagcgggcctggactgtgggctggtgtgtggaactgctgcaagctttcttcctggtggcagatgacatcatggattcatcccttacccgccggggacagatctgctggtatcagaagccgggcgtgggtttggatgccatcaatgatgctaacctcctggaagcatgtatctaccgcctgctgaagctctattgccgggagcagccctattacctgaacctgatcgagctcttcctgcagagttcctatcagactgagattgggcagaccctggacctcctcacagccccccagggcaatgtggatcttgtcagattcactgaaaagaggtacaaatctattgtcaagtacaagacagctttctactccttctaccttcctatagctgcagccatgtacatggcaggaattgatggcgagaaggagcacgccaatgccaagaagatcctgctggagatgggggagttctttcagattcaggatgattaccttgacctctttggggaccccagtgtgaccggcaaaattggcactgacatccaggacaacaaatgcagctggctggtggttcagtgtctgcaacgggccactccagaacagtaccagatcctgaaggaaaattacgggcagaaggaggctgagaaagtggcccgggtgaaggcgctatatgaggagcwggatctgccagcagtgttcttgcaatatgaggaagacagttacagccacrttatggctctcattgaacagtacgcagcacccctgcccccagccgtctttytggggcttgcgcgcaaaatctacaagcggagaaagtgacctagagattgcaagggcggggagaggaggctctcaataaataatcgtgtaaccttcttgtggttctgttcttgctcggcccagccagagtctggctctttccagaatgtgcagggtggggtgctgggaggactcgctgcacggaaccaggacccaggggccaaaagcttaggatatatcaaaccckctaggtgggtgacaaaagacgctaaacgctgggggcgggtctgagctacgccacgcccatgcgcgaaggggtgcagctgcgcagcgcagggtaggttgtgctagtgcccctcccctcccgctctgtgccccgccgggcggggaccgtgggagccgcggacaagcccaaggccggagcggttccaggaggaccctggtgaggagggctcggcccatgggtgtagaccgatggacctgggcacgaggggcggggcaggacaagggagcaggagaaatgaatagagaaagggtgcggtggtggctgaacgatggagacgaatgcggagagaatggacataccgctgttccgaggggcgagggcgcaggctggagcccggccgaggcagccagcagatgcggagttgacaagctgacggctgctccatccttttcctctccagcccccacccctttcctgcattcaccagacaaactctgcgtattgccccacccccatcctccacctcctttcagggcatctgggtgggtctccctgggtcccttcctctgggag

SEQ ID NO: 2742 - DNA, 1818 bp, Homo sapiens
cgggcacattgggagttgtagtctaattatatatttccgcccttagtgtggggagagcgggaactactcgacccacagagccgatcgcggagcggattctgcttttaggagtacccgccaacaagcgggaccgagcaggaatccgtatctgggaacaggtcctggagtacaatgccrytggaggcaagtataaccggggtttgacggtggtagtagcattccgggagctggtggagccaaggaaacaggatgctgatagtctccagcgggcctggactgtgggctggtgtgtggaactgctgcaagctttcttcctggtggcagatgacatcatggattcatcccttacccgccggggacagatctgctggtatcagaagccgggcgtgggtttggatgccatcaatgatgctaacctcctggaagcatgtatctaccgcctgctgaagctctattgccgggagcagccctattacctgaacctgatcgagctcttcctgcagagttcctatcagactgagattgggcagaccctggacctcctcacagccccccagggcaatgtggatcttgtcagattcactgaaaagaggtacaaatctattgtcaagtacaagacagctttctactccttctaccttcctatagctgcagccatgtacatggcaggaattgatggcgagaaggagcacgccaatgccaagaagatcctgctggagatgggggagttctttcagattcaggatgattaccttgacctctttggggaccccagtgtgaccggcaaaattggcactgacatccaggacaacaaatgcagctggctggtggttcagtgtctgcaacgggccactccagaacagtaccagatcctgaaggaaaattacgggcagaaggaggctgagaaagtggcccgggtgaaggcgctatatgaggagcwggatctgccagcagtgttcttgcaatatgaggaagacagttacagccacrttatggctctcattgaacagtacgcagcacccctgcccccagccgtctttytggggcttgcgcgcaaaatctacaagcggagaaagtgacctagagattgcaagggcggggagaggaggctctcaataaataatcgtgtaaccttcttgtggttctgttcttgctcggcccagccagagtctggctctttccagaatgtgcagggtggggtgctgggaggactcgctgcacggaaccaggacccaggggccaaaagcttaggatatatcaaaccckctaggtgggtgacaaaagacgctaaacgctgggggcgggtctgagctacgccacgcccatgcgcgaaggggtgcagctgcgcagcgcagggtaggttgtgctagtgcccctcccctcccgctctgtgccccgccgggcggggaccgtgggagccgcggacaagcccaaggccggagcggttccaggaggaccctggtgaggagggctcggcccatgggtgtagaccgatggacctgggcacgaggggcggggcaggacaagggagcaggagaaatgaatagagaaagggtgcggtggtggctgaacgatggagacgaatgcggagagaatggacataccgctgttccgaggggcgagggcgcaggctggagcccggccgaggcagccagcagatgcggagttgacaagctgacggctgctccatccttttcctctccagcccccacccctttcctgcattcaccagacaaactctgcgtattgccccacccccatcctccacctcctttcagggcatctgggtgggtctccctgggtcccttcctctgggag

SEQ ID NO: 2743 - DNA, 1619 bp, Homo sapiens
gcgtccgcagcgggcggctgctgaggtgagggccgggccagaggagaggcatacccactggggcgyaggtctgggactccccctgtccgccctggcgcgacctcaggactckccgtgtcccctccgtgacccccgcggcccgggccgctctttgcatcttgtcttgcccacagctggcctcggccaggtccgagggcctggatgcgaccttggggcagcccctactcttccgggcagcccacttccgcggccaccggtgcagggcatgccccggggccgtggaggggaaattcacgttacctctccacgtgccgaccaaggctctgagacccccagctgccttgaggtgcagtgttggggatccagagccatgtcggacctgctactactgggcctgattgggggcctgactctcttactgctgctgacgctgctggcctttgccgggtactcagggctactggctggggtggaagtgagtgctgggtcaccccccatccgcaacgtcactgtggcctacaagttccacatggggctctatggtgagactgggcggcttttcactgagagctgcagcatctctcccaagctccgctccatcgctgtctactatgacaacccccacatggtgccccctgataagtgccgatgtgccgtgggcagcatcctgagtgaaggtgaggaatcgccctcccctgagctcatcgacctctaccagaaatttggcttcaaggtgttctccttcccggcacccagccatgtggtgacagccaccttcccctacaccaccattctgtccatctggctggctacccgccgtgtccatcctgccttggacacctacatcaaggagcggaagctgtgtgcctatcctcggctggagatctaccaggaagaccagatccatttcatgtgcccactggcacggcagggagacttctatgtgcctgagatgaaggagacagagtggaaatggcgggggcttgtggaggccattgacacccaggtggatggcacaggagctgacacaatgagtgacacgagttctgtaagcttggaagtgagccctggcagccgggagacttcagctgccacactgtcacctggggcgagcagccgtggctgggatgacggtgacacccgcagcgagcacagctacagcgagtcaggtgccagcggctcctcttttgaggagctggacttggagggcgaggggcccttaggggagtcacggctggaccctgrgactgagcccctggggactaccaagtggcyctgggagcccactgcccctgagaagggcaaggagtaacccatggcctgcaccctcctgcagtgcagttgctgaggaactgagcagactctccakcagactctccarccctcttcctccttcctctgggggaggaggggttcctgagggacctgacttcccctgctccaggcctcttgctaagccttctcctcactgccctttaggctcccagggccagaggagccagggactattttctgcaccagcccccagggctgccrcccctgttgtgtctttttttcagactcacagtggagcttccaggacccagaataaagccaatgatttacttgtttcacctgga

SEQ ID NO: 2744 - DNA, 4435 bp, Homo sapiens
gaaggcatgtgtggcactgagcatgcccagttgggagaagatgggcagcagccgccgcggtgcacttcaactacctcatctcagtctgagccttcagagcagcttaggcgccaccaaggcaagaacctagcctccgaggaccccaaaaagaagagagctcagaagccctcccacatgagaagaaacatacgaaagctactccgggaggatcaattggagcctgttaccaaagcagcacagcaagaagagttggaaagaaggaagcgcctggagcagcagaggaaagattatgcagcccctattcctactgttccgctggagttcctccctgaggaaattgctttaagggcaagtgacggtccccaactgcctcctcgggtcttggcccaggaagtcatttgtttggacagtagcagtggcagtgaggatgaaaaaagcagtcgagatgaggtgattgaactgagctctggagaggaggacactctgcacattgtggacagcagtgaatctgtcagtgaagatgatgaggaagaagagaagggtggcacccatgtcaatgatgtcttaaaccagcgtgacgcccttgggcgggtccttgtcaacctaaaccaccctccagaggaggaaaatgtcttccttgccccacagttggcacgggctgtgaaacctcatcagattggcgggatccggttcctttacgataacctagtggagtctctggagaggtttaagaccagcagtggctttggctgtattctggcccacagcatgggtctggggaaaactttgcaagtgatctctttcatcgacgtcctcttccgccacacgccagccaaaacagtccttgccattgtgccggttaatactcttcagaattggctggcagagttcaacatgtggcttccacctcctgaagccctcccggctgacaacaagcctgaagaagtccagcctcggttctttaaagttcacatcttgaatgatgagcacaagacgatggcatctcgtgctaaagtgatggctgattgggtgtcagagggtggcgtgctgctgatggggtacgagatgtacagactcctcactctgaagaaatcatttgccacaggtagaccgaagaaaaccaagaagcgttctcacccagtcatcattgatctagatgaggaagatcggcagcaggagtttcggagagagtttgagaaggctttatgccgccctggccctgatgtagtaatctgtgatgagggacaccgcatcaaaaactgccaggccagcacctcacaggctctgaagaatatccgctctcgccgccgggtggtgctgactgggtaccctctgcaaaacaacctcattgagtactggtgcatggtggactttgtgcgcccagacttccttggcacccggcaggagttcagcaacatgtttgaacgccctatcctgaatgggcaatgtattgacagcacacctcaggacgtccgcctcatgcggtaccggagccatgtcctgcacagtcttctggagggctttgtgcagaggagaggccacactgtgctgaagattcatctccctgccaaggaagaaaatgtgatccttgtgcggctctccaagatccagcgagatttgtatacacagttcatggatcgcttccgggactgtggtagcagcggttggctggggctgaacccccttaaggcattctgtgtgtgttgcaagatctggaatcaccctgatgtgctgtatgaagcccttcagaaggagagcttggccaatgagcaggacctagacgtggaagaacttggctctgcagggaccagtgcccgctgtccaccacagggaacaaaaggcaagggagaggatagcaccttggcttcctcgatgggagaggcaaccaatagcaagttcctacagggcgttggcttcaaccctttccaggagcgaggcaacaacattgtcacatatgaatgggccaaggaccttctgactaattaccagactggagtcctagaaaactctcccaagatggtactgcttttccacctgattgaggaaagtgtgaagcttggggacaagatccttgtgtttagccagagtctttccaccttggctctcatcgaggaattccttggaaaacgagaagtaccctgtccacctggtaccgaggggcaaggagcacagaagtgggttcgaaacatcagctacttccggctagatggtagcacccctgcctttgagagggagcggcttattaatcagttcaatgatcccagcaacctcaccacctggctgttccttctctctacaagggccggatgcttgggtgtgaatctgattggtgccaaccgagtggtggtgtttgatgcttcctggaacccttgccatgatgcccaggcagtatgtcgggtataccgttatggccagaaaaagccctgttacatctatcgccttgtggctgattacactctagaaaagaagatctatgaccgtcagatttccaagcagggcatgtcagatcgggtggtggatgatctaaatccaatgctgaacttcacacggaaagaggtggaaaacctactgcactttgttgagaaggagccagctccccaagtttccttgaacgtaaaggggatcaaggagtcagtcctgcaactggcctgtctgaagtaccctcacctcatcaccaaggagcctttcgagcatgagtcattgctcttgaaccgaaaggatcacaagctaaccaaggctgagaaaaaagcagcaaagaaaagctatgaggaagacaaacgcacatcagtcccctatacccgcccatcgtatgcgcagtattaccctgccagcgatcagagcctgaccagcatccccgccttcagccagagaaactggcagccaactttgaagggtgatgaaaagcctgtggccagtgttcgtcctgtgcagtccacccccatccccatgatgccccggcatgtcccattgggaggaagtgtaagctctgcctccagcacaaatccatccatgaactttcccatcaactacttgcagcgtgcaggagtccttgtgcagaaggtggtcaccacgacagatattgttattcctggactcaacagctccacagatgtacaggcaagaattaatgctggtgagagcatccacatcatccgtgggacaaaagggacgtacatccgtaccagtgatggacggatctttgctgtccgggcaactggcaaaccaaaggttcctgaagatggtcggatggctgcctcaggttcccagggaccttcttgcgagtccacaagcaacggcagacacagtgcctcatcacccaaagcccccgaccctgaggggctggccaggcccgtctctcctgacagcccagagatcatcagtgagcttcagcagtatgcagatgtggctgctgcccgggaatcccgtcagagctccccaagcaccaatgccgccctgcctggccccccggcccaacttatggacagcagtgctgttcccgggacagctctcggaactgagcctcgactagggggtcattgcctcaatagttccctcttggtgactggccagccctgtggtgacaggcacccagtgctggacttaaggggccacaagcgaaagttggccacaccacctgctgcccaggagtcatcccgccggcggtccaggaagggtcatctgccagcccccgtgcagccgtatgaacacgggtatccagtctctggcgggtttgccatgccacccgtctccttaaaccataacctcaccacccccttcacctcccaggctggggagaactccctgtttatgggcagtaccccctcctactaccagctgtccaatttgctggcagatgcccgcctggtgtttccagtgactactgaccctctggtgccagcaggccccgtcagttcctcttccacggctacctcagtcactgccagcaacccctccytcatgctcaacccttctgtgccagggatactacccagctattcactcccattctcacagccactcctgtccgagccgaggatgtttgcgccttttccttcccctgtcttgcccagcaacctttcgcggggcatgtctatctatccaggctacatgtccccacatgcaggctacccagctggtggcctcctacggtcccaggtgcctccatttgactctcatgaggttgccgaggttgggttcagctccaatgatgatgaggataaagacgatgatgtgatagaggtcactgggaaatagctagggagcccctccccacctcacttggggcccccagcaggttgcccaccaagctgraaggcagtgatttagaccttttgagaataggacacttggcaggagggaaaaggaagaggacaaaggagggtggttggccaaagtggcagagctctgttgctgtttaacaaaagaggcaaaaaaa

SEQ ID NO: 2745 - DNA, 1567 bp, Homo sapiens
gcgtccgcagcgggcggctgctgaggtgagggccgggccagaggagaggcatacccactggggcgyaggtctgggactccccctgtccgccctggcgcgacctcaggactckccgtgtcccctccgtgacccccgcggcccgggccgctctttgcatcttgtcttgcccacagctggcctcggccaggtccgagggcctggatgcgaccttggggcagcccctactcttccgggcagcccacttccgcggccaccggtgcagggcatgccccggggccgtggagctgccttgaggtgcagtgttggggatccagagccatgtcggacctgctactactgggcctgattgggggcctgactctcttactgctgctgacgctgctggcctttgccgggtactcagggctactggctggggtggaagtgagtgctgggtcaccccccatccgcaacgtcactgtggcctacaagttccacatggggctctatggtgagactgggcggcttttcactgagagctgcagcatctctcccaagctccgctccatcgctgtctactatgacaacccccacatggtgccccctgataagtgccgatgtgccgtgggcagcatcctgagtgaaggtgaggaatcgccctcccctgagctcatcgacctctaccagaaatttggcttcaaggtgttctccttcccggcacccagccatgtggtgacagccaccttcccctacaccaccattctgtccatctggctggctacccgccgtgtccatcctgccttggacacctacatcaaggagcggaagctgtgtgcctatcctcggctggagatctaccaggaagaccagatccatttcatgtgcccactggcacggcagggagacttctatgtgcctgagatgaaggagacagagtggaaatggcgggggcttgtggaggccattgacacccaggtggatggcacaggagctgacacaatgagtgacacgagttctgtaagcttggaagtgagccctggcagccgggagacttcagctgccacactgtcacctggggcgagcagccgtggctgggatgacggtgacacccgcagcgagcacagctacagcgagtcaggtgccagcggctcctcttttgaggagctggacttggagggcgaggggcccttaggggagtcacggctggaccctgrgactgagcccctggggactaccaagtggcyctgggagcccactgcccctgagaagggcaaggagtaacccatggcctgcaccctcctgcagtgcagttgctgaggaactgagcagactctccakcagactctccarccctcttcctccttcctctgggggaggaggggttcctgagggacctgacttcccctgctccaggcctcttgctaagccttctcctcactgccctttaggctcccagggccagaggagccagggactattttctgcaccagcccccagggctgccrcccctgttgtgtctttttttcagactcacagtggagcttccaggacccagaataaagccaatgatttacttgtttcacctgga

SEQ ID NO: 2746 - DNA, 1742 bp, Homo sapiens
gtccccaggttcccagggaccttcttgcgagtccacaagcaacggcagacacagtgcctcatcacccaaagcccccgaccctgaggggctggccaggcccgtctctcctgacagcccagagatcatcagtgagcttcagcagtatgcagatgtggctgctgcccgggaatcccgtcagagctccccaagcaccaatgccgccctgcctggccccccggcccaacttatggacagcagtgctgttcccgggacagctctcggaactgagcctcgactagggggtcattgcctcaatagttccctcttggtgactggccagccctgtggtgacaggcacccagtgctggacttaaggggccacaagcgaaagttggccacaccacctgctgcccaggagtcatcccgccggcggtccaggaagggtcatctgccagcccccgtgcagccgtatgaacacggctgccttgaggtgcagtgttggggatccagagccatgtcggacctgctactactgggcctgattgggggcctgactctcttactgctgctgacgctgctggcctttgccgggtactcagggctactggctggggtggaagtgagtgctgggtcaccccccatccgcaacgtcactgtggcctacaagttccacatggggctctatggtgagactgggcggcttttcactgagagctgcagcatctctcccaagctccgctccatcgctgtctactatgacaacccccacatggtgccccctgataagtgccgatgtgccgtgggcagcatcctgagtgaaggtgaggaatcgccctcccctgagctcatcgacctctaccagaaatttggcttcaaggtgttctccttcccggcacccagccatgtggtgacagccaccttcccctacaccaccattctgtccatctggctggctacccgccgtgtccatcctgccttggacacctacatcaaggagcggaagctgtgtgcctatcctcggctggagatctaccaggaagaccagatccatttcatgtgcccactggcacggcagggagacttctatgtgcctgagatgaaggagacagagtggaaatggcgggggcttgtggaggccattgacacccaggtggatggcacaggagctgacacaatgagtgacacgagttctgtaagcttggaagtgagccctggcagccgggagacttcagctgccacactgtcacctggggcgagcagccgtggctgggatgacggtgacacccgcagcgagcacagctacagcgagtcaggtgccagcggctcctcttttgaggagctggacttggagggcgaggggcccttaggggagtcacggctggaccctgrgactgagcccctggggactaccaagtggcyctgggagcccactgcccctgagaagggcaaggagtaacccatggcctgcaccctcctgcagtgcagttgctgaggaactgagcagactctccakcagactctccarccctcttcctccttcctctgggggaggaggggttcctgagggacctgacttcccctgctccaggcctcttgctaagccttctcctcactgccctttaggctcccagggccagaggagccagggactattttctgcaccagcccccagggctgccrcccctgttgtgtctttttttcagactcacagtggagcttccaggacccagaataaagccaatgatttacttgtttcacctgga

SEQ ID NO: 2747 - DNA, 1402 bp, Homo sapiens
cggccatgtcccgccgcgagagggggcggagcgagcgtgcgcggcgggcgcgcgcaggctccgtaaccgaaccctgagccgcctgcgcggatcggcgtccgcagcgggcggctgctgagctgccttgaggtgcagtgttggggatccagagccatgtcggacctgctactactgggcctgattgggggcctgactctcttactgctgctgacgctgctggcctttgccgggtactcagggctactggctggggtggaagtgagtgctgggtcaccccccatccgcaacgtcactgtggcctacaagttccacatggggctctatggtgagactgggcggcttttcactgagagctgcagcatctctcccaagctccgctccatcgctgtctactatgacaacccccacatggtgccccctgataagtgccgatgtgccgtgggcagcatcctgagtgaaggtgaggaatcgccctcccctgagctcatcgacctctaccagaaatttggcttcaaggtgttctccttcccggcacccagccatgtggtgacagccaccttcccctacaccaccattctgtccatctggctggctacccgccgtgtccatcctgccttggacacctacatcaaggagcggaagctgtgtgcctatcctcggctggagatctaccaggaagaccagatccatttcatgtgcccactggcacggcagggagacttctatgtgcctgagatgaaggagacagagtggaaatggcgggggcttgtggaggccattgacacccaggtggatggcacaggagctgacacaatgagtgacacgagttctgtaagcttggaagtgagccctggcagccgggagacttcagctgccacactgtcacctggggcgagcagccgtggctgggatgacggtgacacccgcagcgagcacagctacagcgagtcaggtgccagcggctcctcttttgaggagctggacttggagggcgaggggcccttaggggagtcacggctggaccctgrgactgagcccctggggactaccaagtggcyctgggagcccactgcccctgagaagggcaaggagtaacccatggcctgcaccctcctgcagtgcagttgctgaggaactgagcagactctccakcagactctccarccctcttcctccttcctctgggggaggaggggttcctgagggacctgacttcccctgctccaggcctcttgctaagccttctcctcactgccctttaggctcccagggccagaggagccagggactattttctgcaccagcccccagggctgccrcccctgttgtgtctttttttcagactcacagtggagcttccaggacccagaataaagccaatgatttacttgtttcacctgga

SEQ ID NO: 2748 - DNA, 776 bp, Homo sapiens
cccccaggttcctaaaagtaaagctttagaggccaccaaattggcaatwgaagcyggsttccrccatattgattctgcwcatttatacaataatgaggagcaggttggactggccatccgaagcaagattgcagatggcagtgtgaagagagaagacatattctacacttcaaagctttggtgcaattcccatcgaccagagttggtccgaccagccttggaaaggtcactgaaaaatcttcaattggaytatgttgacctctaycttattcattttccagtgtctgtaaagccaggtgaggaagtgatcccaaaagatgaaaatggaaaaatactatttgacacagtggatctctgtgccacrtgggaggccgtggagaagtgtaaagatgcaggattggccaagtccatcggggtgtccaacttcaaccrcaggcwgctggagatgatcctcaacaagccagggctcaagtacaagcctgtctgcaaccaggtggaatgtcatccttacttcaaccagagaaaactgctggatttctgcaagtcaaaagacattgttctggttgcctatagtgctctgggatcccatcgagaagaaccatgggtggacccgaactccccggtgctcttggaggacccagtcctttgtgccttggcaaaaaagcacaagcgaaccccagccctgattgccctgcgctaccagctrcagcgtggggttgtggtcctggccaagagctacaatgagcagcgcatcagacagaacgtgcaggtgagga

SEQ ID NO: 2749 - DNA, 778 bp, Homo sapiens
cccccaggttcctaaaagtaaagctttagaggccaccaaattggcaatwgaagcyggsttccrccatattgattctgcwcatttatacaataatgaggagcaggttggactggccatccgaagcaagattgcagatggcagtgtgaagagagaagacatattctacacttcaaagctttggtgcaattcccatcgaccagagttggtccgaccagccttggaaaggtcactgaaaaatcttcaattggaytatgttgacctctaycttattcattttccagtgtctgtaaagccaggtgaggaagtgatcccaaaagatgaaaatggaaaaatactatttgacacagtggatctctgtgccacrtgggaggccgtggagaagtgtaaagatgcaggattggccaagtccatcggggtgtccaacttcaaccrcaggcwgctggagatgatcctcaacaagccagggctcaagtacaagcctgtctgcaaccaggtggaatgtcatccttacttcaaccagagaaaactgctggatttctgcaagtcaaaagacattgttctggttgcctatagtgctctgggatcccatcgagaagaaccatgggtggacccgaactccccggtgctcttggaggacccagtcctttgtgccttggcaaaaaagcacaagcgaaccccagccctgattgccctgcgctaccagctrcagcgtggggttgtggtcctggccaagagctacaatgagcagcgcatcagacagaacgtgcaggtgaggagc

SEQ ID NO: 2750 - DNA, 2794 bp, Homo sapiens
cccccaggttcctaaaagtaaagctttagaggccaccaaattggcaatwgaagcyggsttccrccatattgattctgcwcatttatacaataatgaggagcaggttggactggccatccgaagcaagattgcagatggcagtgtgaagagagaagacatattctacacttcaaagctttggtgcaattcccatcgaccagagttggtccgaccagccttggaaaggtcactgaaaaatcttcaattggaytatgttgacctctaycttattcattttccagtgtctgtaaaggtaggcagcttgtgtgatcaaattaatttcacttttgttctcagcataaatattgtttttatggatatttgaactaagcattttcttaggaggacatagggattataacatrgaagaagaatcctaaayctaactcctaattcctttctatgggatacattttgaatccatacttccgtgattgcatgtctataagaaaagaaagtgcagaactctcaaagcctctgcctcaaaaacttgaggaaatgatagtcatctccttgaaggcacaaggtcttagttatgattcctgatttcacctcttgggatgttcacagacacagagtttcatgaagctgtggtgtccagaaaacctgctgcacatagggtgcacaatgagtttccatcttcttgcctctttttaaggggcgagaactcagtccgggagtgtcttaaactacagaccttcatgggaaaccttgttgcttctgcttcctctcttttcacactggaggttttatttttgcttagccatgaattcttgkgtcattcataacttttgtcttaaggwactgaaaactagtcaggctagttaatgcaaaagggtatattagatatgataatgggaaatcaaagccagggctacattaagaatttgataaaarctctaaaaatatatcctttctccacccttatctctgctttattacaaaaggctttttaagtatttgttccaacctttttcgttggtggcatttatggctttggagcactgtcaggcccatgttcattaccgtgagctcctgtgcatctcctaatttccaaactagccttgaaaacacctccattgaccatgattggttcatggtcctgtgcatgkracatcatatgttcagggagataaagaactctgatagtggcacctgggtaaaaagtacaatccattatatctggatatcaagatcttttgcagttgaagagaggtattgccacagagaaaattataggagcagaagaaagtcaatgaaagtcaatgatgacactccattaggaaccagaaagaggtatttatttatacatgtaatagttgtaagagattagagggagcctgtcacctgaagacattccttataccttcatatgtagtacactctgtacataccactctctggagcactgcatcacctacctcatggaggattagtgtccttaaatgtacctcagagcatggctatgtgtggagaaattgacttgtgacatcactaaactgactgcttctacttcagccaggtgaggaagtgatcccaaaagatgaaaatggaaaaatactatttgacacagtggatctctgtgccacrtgggaggtgagtgtttggaggtgagagaacggataagaaagatgaggtaggatacatctgtttcctatcttcttagtacargtatggaaaatgcaccattggatcaaaaacttaggaactttacaaaggtagtttttgtgagcagygagraaaaagaaatgacaggcatacaaaagagagaagtggaggagaagaattgggggtaaggaggactgggatttatttccttrccttttcactaatctctccagtttcccaaggaggaaacagaaatwctyactcttgcaatcactatcttcttccccaattttctgttttattttttcccttttaagaaccacggctagctagttttattgtcatatctagacagttgttactttcacagttctgtgtcacatttatcttgatcttccacacctcacaattcctttttcccaggccgtggagaagtgtaaagatgcaggattggccaagtccatcggggtgtccaacttcaaccrcaggcwgctggagatgatcctcaacaagccagggctcaagtacaagcctgtctgcaaccaggtggaatgtcatccttacttcaaccagagaaaactgctggatttctgcaagtcaaaagacattgttctggttgcctatagtgctctgggatcccatcgagaagaaccatggtaataagagatacaggaagtttrcckaaaacactggtwtgataaaaaaaatttaatcagatcatgctgtttcctggagttcactcacagctgacttggggtgagggaagaatttgcatttctgacgagatcccaggtgatgttgaggctgctgttcgggggcctcgcttgagaagctccggtgcagagtggacgccttagtctgtttagggagccgcctaacaaactatccccagcctcagggcctcagcctttctgcctttccttccagggtggacccgaactccccggtgctcttggaggacccagtcctttgtgccttggcaaaaaagcacaagcgaaccccagccctgattgccctgcgctaccagctrcagcgtggggttgtggtcctggccaagagctacaatgagcagcgcatcagacagaacgtgcaggtgaggagcggggctgtgggcctcaggtctcctgcacagtgtccttcacacgtg

SEQ ID NO: 2751 - DNA, 2306 bp, Homo sapiens
ggaggccctgagtccggcacctggccatgtgcaaccctgaggaggcagctctgctgcggctggaggaggtcttctcagccaccctcgcccatgtcaacagccttgtcctccagcccctgctcccagccgccccagatccctcggatccctggggcagasagtgcctgcggctcttgcaacagctgcacaagagctcccagcaactctgggaggtgacggaggaaagcctgcactcactgcaggagaggctgcgttacccggactccaccggtctggagtccctgctgctgctgcgaggtgctgaccgtgtactgcaggcccacatagagtacattgagtcctacacaagctgcatggtggtgcaggccttccagaaggcagcaaagaggagaagcgagtactggcggggccagcggaaggcgctgcggcagctgctttcaggtgtgagctcagagggctcggtgggcgcatcgctgggccaggccctccaccagccactcgcccatcacgtgcaacagtacgtgctcctcctgctgagcctcggggacaccattggggagcatcayccarcccgggagctkgtggtgaacgcagtcaccctctttgggaacctgcagtccttcatgaagcaggagttggaccaggctgtggccacacaggctctctggcacaccctgagaggccggctgagggatgtgctctgcacccctgctcacagactccttcaggacagccaggacgtacccgtgacggtcgcaccgttgcgggctgagcgtgtgctgctctttgatgatgccctcgtcctgctgcagggccacaatgtccacacctttgatctgaagctggtgtgggtggatcctgggcaggacgggtgcacgtttcacctcctcacgcccgaagaagagttctccttttgtgccaaggactcccagggccaggcagtctggcagtggaaggtgacctgggctgttcaccaggccctgcatgggaagaaggacttccccgtgctgggggctggcctggagccctcccagcctcccgactgccgctgcgcagaatataccttccaggcagagggccggctctgccaggccacctacgagggcgagtggtgcaggggccggccccagggaaccctgaaatggccggatgggcggaatcaygtggggaatttctgccagggcctggagcatggcttcggcatccgcctgctgccccaggcctctgaggacaagttcgactgttacaagtgtcactggcgagaaggcagcatgtgtggctayggcatctgtgagtacagcaccgacgaggtgtacaagggctacttccaggagggcctgcggcacggatttggggtccttgagagtggtccgcaggccccccagcccttcaggtacacgggccactgggagaggggccagaggagcggctatggcattgaggaggatggtgacagaggtgagcgctacattggcatgtggcaggctggtcagcgccacggcccaggggtcatggtcacccaggcaggtgtctgctaccagggcaccttccaggcggacaagacggtgggcccgggcatcctcctctctgaagacgactccctgtatgagggcaccttcaccagggacctgaccctcatggggaagggcaaggtcaccttccccaatggcttcaccctggagggctcgttcggcagtggggcagggagaggactgcacacacagggtgtgctggacacggctgccctcccaccagacccragcagtacctgcaagaggcagctgggcgtgggtgccttccccgtggaaagccgctggcagggagtctacagccccttccgggactttgtgtgtgctggctgccccagggacctgcaggaggccctgctgggcttcgacgtgcagagctccagggagctgcgtaggtctcaggattacctgtcctgcgagaggacccaccctgaggacagtgtgggcagtatggaagacatcctggaggagctgctgcagcaccgggagcccaaggccctgcagctgtacctcaggaaggctctgagcaactcactgcaccccctgggaaagctgctccggacactgatgctgaccttccaggctacctacgcaggtgtcggggccaacaagcacctgcaggagctggcccaggaggaggtgaagcagcatgcccaggaactctgggctgcctacaggtgggctcggtggcaaacgggacagctactrccctgtgacactagtgtgccctttccaggcatcagttctgccttgcatttgggaggaatgccaagtgtc

SEQ ID NO: 2752 - DNA, 1780 bp, Homo sapiens
ggaggccctgagtccggcacctggccatgtgcaaccctgaggaggcagctctgctgcggctggaggaggtcttctcagccaccctcgcccatgtcaacagccttgtcctccagcccctgctcccagccgccccagatccctcggatccctggggcagasagtgcctgcggctcttgcaacagctgcacaagagctcccagcaactctgggaggtgacggaggaaagcctgcactcactgcaggagaggctgcgttacccggactccaccggtctggagtccctgctgctgctgcgaggtgctgaccgtgtactgcaggcccacatagagtacattgagtcctacacaagctgcatggtggtgcaggccttccagaaggcagcaaagaggagaagcgagtactggcggggccagcggaaggcgctgcggcagctgctttcaggtgtgagctcagagggctcggtgggcgcatcgctgggccaggccctccaccagccactcgcccatcacgtgcaacagtacgtgctcctcctgctgagcctcggggacaccattggggagcatcayccarcccgggagctkgtggtgaacgcagtcaccctctttgggaacctgcagtccttcatgaagcaggagttggaccaggctgtggccacacaggctctctggcacaccctgagaggccggctgagggatgtgctctgcacccctgctcacagactccttcaggacagccaggacgtacccgtgacggtcgcaccgttgcgggctgagcgtgtgctgctctttgatgatgccctcgtcctgctgcagggccacaatgtccacacctttgatctgaagctggtgtgggtggatcctgggcaggacgggtgcacgtttcacctcctcacgcccgaagaagagttctccttttgtgccaaggactcccagggccaggcagtctggcagtggaaggtgacctgggctgttcaccaggccctgcatgggaagaaggacttccccgtgctgggggctggcctggagccctcccagcctcccgactgccgctgcgcagaatataccttccaggcagagggccggctctgccaggccacctacgagggcgagtggtgcaggggccggccccacggcaagggaaccctgaaatggccggatgggcggaatcaygtggggaatttctgccagggcctggagcatggcttcggcatccgcctgctgccccaggcctctgaggacaagttcgactgttacaagtgtcactggcgagaaggcagcatgtgtggctayggcatctgtgagtacagcaccgacgaggtgtacaagggctacttccaggagggcctgcggcacggatttggggtccttgagagtggtccgcaggccccccagcccttcaggtacacgggccactgggagaggggccagaggagcggctatggcattgaggaggatggtgacaggtgagcgccctgcagccaccactcccaggacggaggggtggacmgggccctcacagaccagattgttgcaggacacaggctcctgtttgtcccccactgtgtctctcttaagcccctcacttcccctccagtccctcggttgctgcggaggctcaggctgagcgaatcttggtcacgctgactgcagggtcgcccccgcccctcacccctcctcatggtgttggagaggcatttctgaccccctgctctgtcacgtctaaaaactgcagcccttgctggctctctgggctgtgtgataaagccctggatccttggcct

SEQ ID NO: 2753 - DNA, 1430 bp, Homo sapiens
ggctacggaagctggcgaggccgagcccctcctagtgsttccggaccttgctccctgaacactcggaggtggcggtggatcttactccttccagccagtgaggatccagcaacctgctccgtgcctcccgcgcctgttggttggaagtgacgaccttgaagatcggccggttggaagtgacgaccttgaagatcggcgggcgcagcggggccgagggggcgggtctggcgctaggtccagcccctgcgtgccgggaaccccagaggaggtcgcagttcagcccagctgaggcctgtctgcagaatcgacaccaaccagcatcatgtccatgacactggggtactgggacatccgcgggctggcccacgccatccgcctgctcctggaatacacagactcaagctacgaggaaaagaagtatacgatgggggacgctcctgactatgacagaagccagtggctgaatgaaaaattcaagctgggcctggactttcccaatctgccctacttgattgatggggctcacaagatcacccagagcaacgccatcctgtgctacattgcccgcaagcacaacctgtgtggggagacagaagaggagaagattcgtgtggacattttggagaaccaggctatggacgtctccaatcagctggccagagtctgctacagccctgactttgagaaactgaagccagaatacttggaggaacttcctacaatgatgcagcacttctcacagttcctggggaagaggccatggtttgttggagacaagatcacctttgtagatttcctcgcctatgatgtccttgacctccaccgtatatttgagcccaastgcttggacgccttyccaaatctgaaggacttcatctcccgctttgagggcttggagaagatctctgcctacatgaagtccagccgcttcctcccaaaacctctgtacacaaggrtggctgtctggggcaacaagtartgccttgaaggccaggaggtgggagtgaggagcccatactcagcctgctgcccaggctgtgcagcgcagctggactctgcatcccagcacctgcctcctcgttcctttctcctgtttattcccatctttacycccaagacttyattgkscctcttcactycccctaaacccctgtcccatgcaggccctttgaagcctcagctacccactwtccttcatgaacatccccctcccaacaytacccttccctgcactaaagccagcctgaccttccttcctgttagtggttgtatctgctttgaagggcctrcctggcccctcgcctgtggagctcagcccygagctgtccccgtgttgcatgacagcattgactggtttacaggccctgctcctgcagcatgsyccctgccttaggcctacctgatcaaaataaagcctcagccacatttgc

SEQ ID NO: 2754 - DNA, 1380 bp, Homo sapiens
ggctacggaagctggcgaggccgagcccctcctagtgsttccggaccttgctccctgaacactcggaggtggcggtggatcttactccttccagccagtgaggatccagcaacctgctccgtgcctcccgcgcctgttggttggaagtgacgaccttgaagatcggccggttggaagtgacgaccttgaagatcggcgggcgcagcggggccgagggggcgggtctggcgctaggtccagcccctgcgtgccgggaaccccagaggaggtcgcagttcagcccagctgaggcctgtctgcagaatcgacaccaaccagcatcatgtccatgacactggggtactgggacatccgcgggctggcccacgccatccgcctgctcctggaatacacagactcaagctacgaggaaaagaagtatacgatgggggacgctcctgactatgacagaagccagtggctgaatgaaaaattcaagctgggcctggactttcccaatctgccctacttgattgatggggctcacaagatcacccagagcaacgccatcctgtgctacattgcccgcaagcacaacctgtgtggggagacagaagaggagaagattcgtgtggacattttggagaaccaggctatggacgtctccaatcagctggccagagtctgctacagccctgactttgagaaactgaagccagaatacttggaggaacttcctacaatgatgcagcacttctcacagttcctggggaagaggccatggtttgttggagacaagatcacctttgtagatttcctcgcctatgatgtccttgacctccaccgtatatttgagcccaastgcttggacgccttyccaaatctgaaggacttcatctcccgctttgaggtttcctgtggcataatgtgatggtcaattttctgcatcaacttgactgggctaagggatgctcagatggcaggtaaaatcattgtgcttgtgagggtgtttccagaagagatttgcctttgaatcagaagacagcaaagatttccttcagcaatgaaggaggcatccaccaaactgtcagggcccagagagaagaaaaagacaggaagggtgaatttgacctctctgactgggacatccatctctgcctatcctgggacctccacactcctggttctctggccttcagacttgatcagggactaacaccatcgcctcccacccccacctttgttctgaggcctttagcctctgaatgataccactggctttcctgcttctctatcctgcagtcggcagatcatgggacttcttcactccaaaattgtgtgagccaattcccataacagatagatawatttataaataaacacacaaatttcctacagcct

SEQ ID NO: 2755 - DNA, 1520 bp, Homo sapiens
ggctacggaagctggcgaggccgagcccctcctagtgsttccggaccttgctccctgaacactcggaggtggcggtggatcttactccttccagccagtgaggatccagcaacctgctccgtgcctcccgcgcctgttggttggaagtgacgaccttgaagatcggccggttggaagtgacgaccttgaagatcggcgggcgcagcggggccgagggggcgggtctggcgctaggtccagcccctgcgtgccgggaaccccagaggaggtcgcagttcagcccagctgaggcctgtctgcagaatcgacaccaaccagcatcatgtccatgacactggggtactgggacatccgcgggctggcccacgccatccgcctgctcctggaatacacagactcaagctacgaggaaaagaagtatacgatgggggacgctcctgactatgacagaagccagtggctgaatgaaaaattcaagctgggcctggactttcccaatctgccctacttgattgatggggctcacaagatcacccagagcaacgccatcctgtgctacattgcccgcaagcacaacctgtgtggggagacagaagaggagaagattcgtgtggacattttggagaaccaggctatggacgtctccaatcagctggccagagtctgctacagccctgactttgagaaactgaagccagaatacttggaggaacttcctacaatgatgcagcacttctcacagttcctggggaagaggccatggtttgttggagacaaggtaatgggggcatgtgatgaggacactagagatttgccatacatcctaygttacagagattccagcccacacattcttggccttctgcagatcacctttgtagatttcctcgcctatgatgtccttgacctccaccgtatatttgagcccaastgcttggacgccttyccaaatctgaaggacttcatctcccgctttgagggcttggagaagatctctgcctacatgaagtccagccgcttcctcccaaaacctctgtacacaaggrtggctgtctggggcaacaagtartgccttgaaggccaggaggtgggagtgaggagcccatactcagcctgctgcccaggctgtgcagcgcagctggactctgcatcccagcacctgcctcctcgttcctttctcctgtttattcccatctttacycccaagacttyattgkscctcttcactycccctaaacccctgtcccatgcaggccctttgaagcctcagctacccactwtccttcatgaacatccccctcccaacaytacccttccctgcactaaagccagcctgaccttccttcctgttagtggttgtatctgctttgaagggcctrcctggcccctcgcctgtggagctcagcccygagctgtccccgtgttgcatgacagcattgactggtttacaggccctgctcctgcagcatgsyccctgccttaggcctacctgatcaaaataaagcctcagccacatttgc

SEQ ID NO: 2756 - DNA, 1342 bp, Homo sapiens
ggctacggaagctggcgaggccgagcccctcctagtgsttccggaccttgctccctgaacactcggaggtggcggtggatcttactccttccagccagtgaggatccagcaacctgctccgtgcctcccgcgcctgttggttggaagtgacgaccttgaagatcggccggttggaagtgacgaccttgaagatcggcgggcgcagcggggccgagggggcgggtctggcgctaggtccagcccctgcgtgccgggaaccccagaggaggtcgcagttcagcccagctgaggcctgtctgcagaatcgacaccaaccagcatcatgtccatgacactggggtactgggacatccgcgggctggcccacgccatccgcctgctcctggaatacacagactcaagctacgaggaaaagaagtatacgatgggggacgctcctgactatgacagaagccagtggctgaatgaaaaattcaagctgggcctggactttcccaatgtggggagacagaagaggagaagattcgtgtggacattttggagaaccaggctatggacgtctccaatcagctggccagagtctgctacagccctgactttgagaaactgaagccagaatacttggaggaacttcctacaatgatgcagcacttctcacagttcctggggaagaggccatggtttgttggagacaagatcacctttgtagatttcctcgcctatgatgtccttgacctccaccgtatatttgagcccaastgcttggacgccttyccaaatctgaaggacttcatctcccgctttgagggcttggagaagatctctgcctacatgaagtccagccgcttcctcccaaaacctctgtacacaaggrtggctgtctggggcaacaagtartgccttgaaggccaggaggtgggagtgaggagcccatactcagcctgctgcccaggctgtgcagcgcagctggactctgcatcccagcacctgcctcctcgttcctttctcctgtttattcccatctttacycccaagacttyattgkscctcttcactycccctaaacccctgtcccatgcaggccctttgaagcctcagctacccactwtccttcatgaacatccccctcccaacaytacccttccctgcactaaagccagcctgaccttccttcctgttagtggttgtatctgctttgaagggcctrcctggcccctcgcctgtggagctcagcccygagctgtccccgtgttgcatgacagcattgactggtttacaggccctgctcctgcagcatgsyccctgccttaggcctacctgatcaaaataaagcctcagccac

SEQ ID NO: 2757 - DNA, 1294 bp, Homo sapiens
ctgggaattgcagtccccgctctgctctgtccrgtcacaggactttttgccctctgttcccgggtccctcaggcggccacccagtgggcacactcccaggcggcgctccggccccgcgctccctccctctgcctttcattcccagctgtcaacatcctggaagctttgaagctcaggaaagaagagaaatccactgagaacagtctgtaaaggtatcctaggaatacctgcctgcttagaccctctataaaagctctgtgcatcctgccactgaggactccgaagaggtagcagtcttctgaaaggtcyccgtcggatcaatcagtggaagaagggggttgctgattcacattacgtaaaaacacaagtcctcacttgagtcatagacttcaactgtgaggacatgtcgttcagatttggccaacatctcatcaagccctctgtagtgtttctcaaaacagaactgtccttcgctcttgtgaataggaaacctgtggtaccaggacatgtccttgtgtgcccgctgcggccagtggagcgcttccatgacctgcgtcctgatgaagtggccgatttgtttcagacgacccagagagtcgggacagtggtggaaaaacatttccatgggacctctctcaccttttccatgcaggatggccccgaagcyggacagactgtgaagcacgttcacgtccaygttcttcccaggaaggctggagactttcacaggaatgacagcatctatgaggagctccagaaacatgacaaggaggactttcctgcctcttggagatcagaggaggaaatggcagcagaagccgcagctctgcgggtctactttcagtgacrcagatgtttttcagatcctgaattccagcaaaagagctattgccaaccagtttgaagaccgcccccccgcctctccccaagaggaactgaatcagcatgaaaatgcagtttyttcatctcaccatcctgtattcttcaaccagtgatcccccacctcggtcactccaactcccttaaaatacctagacctaaacggctcagacaggcagatttgaggtttccccctgtctccttattcggcagccttatgattaaacttccttctctgctgcaaccctgtgtctcggtgtattgacttgccatgaattaggcaacaaacctattacagttacagttacttttttaaaggaaattcaatcgttggattggtccacctgcttatttcttcccttttcaaaaaaaatgtctacatattgaatttttatacattaagtggttcatgaaa

SEQ ID NO: 2758 - DNA, 1266 bp, Homo sapiens
ctgggaattgcagtccccgctctgctctgtccrgtcacaggactttttgccctctgttcccgggtccctcaggcggccacccagtgggcacactcccaggcggcgctccggccccgcgctccctccctctgcctttcattcccagctgtcaacatcctggaagctttgaagctcaggaaagaagagaaatccactgagaacagtctgtaaaggtccgtagtgctatctacatccagacggtggaagggagagaaagagaaagaaggtatcctaggaatacctgcctgcttagaccctctataaaagctctgtgcatcctgccactgaggactccgaagaggtagcagtcttctgaaagacttcaactgtgaggacatgtcgttcagatttggccaacatctcatcaagccctctgtagtgtttctcaaaacagaactgtccttcgctcttgtgaataggaaacctgtggtaccaggacatgtccttgtgtgcccgctgcggccagtggagcgcttccatgacctgcgtcctgatgaagtggccgatttgtttcagacgacccagagagtcgggacagtggtggaaaaacatttccatgggacctctctcaccttttccatgcaggatggccccgaagcyggacagactgtgaagcacgttcacgtccaygttcttcccaggaaggctggagactttcacaggaatgacagcatctatgaggagctccagaaacatgacaaggaggactttcctgcctcttggagatcagaggaggaaatggcagcagaagccgcagctctgcgggtctactttcagtgacrcagatgtttttcagatcctgaattccagcaaaagagctattgccaaccagtttgaagaccgcccccccgcctctccccaagaggaactgaatcagcatgaaaatgcagtttyttcatctcaccatcctgtattcttcaaccagtgatcccccacctcggtcactccaactcccttaaaatacctagacctaaacggctcagacaggcagatttgaggtttccccctgtctccttattcggcagccttatgattaaacttccttctctgctgcaaccctgtgtctcggtgtattgacttgccatgaattaggcaacaaacctattacagttacagttacttttttaaaggaaattcaatcgttggattggtccacctgcttatttcttcccttttcaaaaaaaatgtctacatattgaatttttatacattaagtggttcatgaaa

SEQ ID NO: 2759 - DNA, 2000 bp, Homo sapiens
atcccactccacccctgcccactggctcagccccgccttgtggtggccgccatcgcgatcgggcaggggctgacctttgggagacaatcgctgttggaaactttgctcagcccctgcctctggctgcgtgaccccaagccagcccctcctcctcctctctggaaccttttgtcagctgtgggttcaccgagccttaagccrtcaagggattctgggccacccgcccttccttctccaccttctacttcgtctttgccrtttttgtggtgtccaccatctttcactgccaccagcacctggctctggtgcctgcgccctgggcatactcagcccgtgtggtcctggcccccagacacctgccccgggaggacctgttcactatcaactccaagggccgcctggggaaccagatgggcgagtacgccacgctgtacgccctggccaagatgaacgggcggcccgccttcatcccggcccagatgcacagcaccctggcccccatcttcagaatcaccctgccggtgctgcacagcgccacggccagcaggatcccctggcagaactaccacctgaacgactggatggaggaggartaccgccacatcccggggsrstrygtccrcytcacsggctacccctgctcctggaccttctaccaccacctccgccaggagatcctccaggagttcaccctgcacgaccacgtgcgcgaggaggcccagaagttcctgcggggcctgcaggccaagtgggcagggcaggcgaccttcgtgggggtccacgtgcgccggggggactatgtccgtgtcatgccgcgcgtatggaagggggtgctggccgaccggctacctgcagcgggccctggactggttccgggcctgctgccrcctcccggtctttgtggtcaccagcgatgacatggcctggtgccgggagagcatcaacagctcccttggggacgtggtgttcgctggcaatggcctccagggctcacctgccaaggacttcgcactgctcacacagtgcaaccacaccatcatcaccgtgggcaccttcggggtctgggccgcgtacctcgcgggcggggacactgtctacctggccaacttcaccctgcccaactcccctttcaacgtggtctttaggccgtaagcggccttcctgccagagtgggtgggccttgcggctgaccttggacaggctggacagaacrgcctctagccagccctgcatgtgcctggtcctcatcctgtgacccgaggggcagtgagtggggcgtgcggggcatggactcacggtccctcatgcagtttggatccaggcttatctacttcatagctgagtgagtttggacaactgactcaacctctgtgccttagtatgtcaaccacaaaatgcacaaaccacagaactaaacaccagtagcagctggtgggagctgagcaaattcgcttagagccagtgccttgtgaccgtgtgggaggtgtcggctgctcacatgtatgcagcacgtcaggaacactggcattgctttccaatggaaacgcagttttgccctctccttcctggcagcactggtagcacagagcccagatattttgcactcacgtcccaggacgaagccatccctgccctgaaggataggggaactcgattttctgggcaactaggaattttggctttggagttagtgggccttatcacaaaagaatgtgagggaagggccgggtgcggtggcacgcctgtaatcccagccctttgggaagccaaggctggtggatcacttgaggtcaggagttcgagaccagcctggccaacatggcgaaacccagtctctactaaaaatacaaaaagccaggcacggtggtgcgtgcccctaatcccagctactccggaggctgaagcaggaggatagcttgaattgggaagcagaggttgcagtaaaccgagatcataccactgcactccagcctgggccacagagcgagactccatcgcaa

SEQ ID NO: 2760 - DNA, 380 bp, Homo sapiens
agtcaccgatgctggaagggtttctttggccctgagtgaagagagacccagagggaacactgaggtgcctgcccaaccactctgtcccggtttccttcagcaggaccaggtccttccttgtctccttcccctcagcagtttctatgaaccaccctggcagtaatggtgcagatggctcgcgcacagctggtggtgacccgactttcctgcctccaccctggggctcctcagaggcttcatggaacccaaactgctggtctcacctccgagccctgccstcgcccagggagggcggctccgtccctcctgcactccctaatcccgctctgaatcaccgcttctgttctgggtcggagaataaaggtggggtttccaagtga

SEQ ID NO: 2761 - DNA, 3475 bp, Homo sapiens
cttgtggggaggcttaggacgggcgggtgcaatcctcgaaggggagtctcagcgaccatgggggacaccatccactagatgtcaggctgaaggagatgatgaaactctgtaagccgaagaacatggggaaagaggagacacaggaagccacgctatccccacagggacccctgccagccaggccacccgcaacggtgtgggacgtgagtgccgttgcccccggcggtccagcagcaggacagccccgagcagcctggcctaggaggctcaccgcagccrtcaagggattctgggccacccgcccttccttctccaccttctacttcgtctttgccrtttttgtggtgtccaccatctttcactgccaccagcacctggctctggtgcctgcgccctgggcatactcagcccgtgtggtcctggcccccagacacctgccccgggaggacctggggatgtggacgatcaatgcrataggccgcctggggaaccagatgggcgagtacgccacactgtaygccctggccaagatgaacgggcggcccgccttcatcccggcccagatgcacagcaccctggcccccatcttcagaatcaccctgccggtgctgcacagygccacggccagcaggatcccctggcagaactaccacctgaaygactggatggaggaggartacygccacwtcccgggggagtacgtccgcttcaccggctacccctgctcctrraccttctaccaccacctccgccaggagatcctccaggagttcaccctgcayraccacgtgcgggaggaggcccagaagttcctgcggggcctgcaggtgaacgggagccggccgggcacctttgtaggkgtccatgttcgcygaggggactatgtccatgtcatgccaaaagtgtggaagggggtggtggccgaccggygatacctacagcaggccctggactggttcygagctcgctacagctccctcatcttcgtggtcaccagtaatggcatggcctggtgtcgggagaacattgacacctcccacrgtgatgtggtgtttgctggcgatggcattgagggctcacctgccaaagattttgctctactcacacagtgtaaccacaccatcatgaccattgggacgttcgggatctgrgccgcatacctcacgggcggagacaccatctacctggccaattacaccctccccgactcccctttcctcaaaatctttaagccagaggcagccttcctgccggagtggacrgggattgccgcagacctgtcccccttactcaagcactaatgctggcccrtyctttgagaccttttctccttctctgcctccctcaagatgagtgcccgggcatgagaagcacatggttccatgagcaggacccatctctcttctgtgaagatgcgttgggctgcaagtaacagaaatctcagtgaacagtggcctggcgtggtggctcatgcctgtaatgctcgcactttgkgaggccagggtgggtggatcacttgaggtcaggagttcaagactagcctggccaacatggtgaaaccccatctcgactaaaaatacaaaaattagccaggcgtggtggtgcacacytgtaatcccagctactcgggaggctgaggcaagagaatcacttgaacccaggaggcggaggttgcagtgagccaagatggtgccgctgcactccagyctgggtgacacagcaagactccatctcaaaaaaaaaaaaaaaaaaargaaaagaaaaagaaatgaaygggttcaaagaccataatcatgcatatcacataagaccagaagtggcccaggtccagggtcagttaatttagcrgctccacaaagtcatcagtcacctgagctccatccatcttcacatgctgtgctaccatttcttagctgtatcatcccatggtcccaaaagggctgctacacatccagccatcacatgcagataattcctttcaaaaacagcagaaagaggctcgttcttgtcttggtcccttttgaagaatgaatgaaaccttcctaagccttccagcaatttccccccaactccgatgggtaggaattgtcacatacccatgtgacccrataggaggcaaaagaaatgagacttctgggattagtttagcctcagattctgcagctgagaagttgatcagccacctctgaaggacatgcagcttgcagaaaattagggtggtgttaccaaggtgaaaaggggaaatggctttagagtagacaacagagatgccctgaggggttgtgtaggttgttcactgcaggaagtcccctggttaagaaggcaagtggggtttaaacagacccacagtctactcatcaaaccaggtgtccttggcattgtgtccacccagagagctcactgttttcttttctttttcttttytttttttttttttttttgagatggagtcttgctgcatcccccaggctggagtgcagtggcatgatcttggctcactgcagcctccgcctcccaggttcaagcgattctcctgcctcagcctcccgagtagctrggattacaggtgcgtgccaccacgcccagctaatttttatacgtttagtggaaatggagtttyaccatgttggtcaggctggtctcaaactcctgacctcatgatccgccttcctcggcctcccaaactgctgggattacaggtgttagccactgcgcccggccctagagctcactgttttctagttagtccatctggaagtggagcctttttccagtttgcacaaatgtgccatattggcttgtagctggcatgcatccaagtccataggtcctgcctcttcaatcctggctttctagggcctgggatgatcattgctagaactgagagaccagcctggctcagtgaacttcagggcgttccrttcattctttcagtaaatgtttgcagcacatgtgttacatgtcaggcagtgaaaccccccacagcagccttccctctcagaggatacatttgtaaccattacacagtcatcaraggaataattttttttaatcaccagtgtgcayacagtcatggagttgggtattcccagctaccagggaggctgaggtgggaggattgcttgatgccaggagttagggaatatagtgcaccgtgattggacttgcgaatagccactgcactgcggcctggacgacgtagtgataccctgactcttataaataaataaatgaataaacacaattatgactttgcggatgggagaaaaggttctctgagarcgtattacataagtatcacatgaactccaaaatacatcttaggccaggcatggtggctgtaatcccagcactttgggagggtaaggcgggcrgatcacytgaggtcaggagtycgagactagcctgggcaacatagtgaaaccctgtctctactaaacatacaaaacattagccaggggtggtggtgcagacc

SEQ ID NO: 2762 - DNA, 3397 bp, Homo sapiens
atcccactccacccctgcccactggctcagccccgccttgtggtggccgccatcgcgatcgggcaggggctgacctttgggagacaatcgctgttggaaactttgctcagcccctgcctctggctgcgtgaccccaagccagcccctcctcctcctctctggaaccttttgtcagctgtgggttcaccgagccttaagccrtcaagggattctgggccacccgcccttccttctccaccttctacttcgtctttgccrtttttgtggtgtccaccatctttcactgccaccagcacctggctctggtgcctgcgccctgggcatactcagcccgtgtggtcctggcccccagacacctgccccgggaggacctggggatgtggacgatcaatgcrataggccgcctggggaaccagatgggcgagtacgccacactgtaygccctggccaagatgaacgggcggcccgccttcatcccggcccagatgcacagcaccctggcccccatcttcagaatcaccctgccggtgctgcacagygccacggccagcaggatcccctggcagaactaccacctgaaygactggatggaggaggartacygccacwtcccgggggagtacgtccgcttcaccggctacccctgctcctrraccttctaccaccacctccgccaggagatcctccaggagttcaccctgcayraccacgtgcgggaggaggcccagaagttcctgcggggcctgcaggtgaacgggagccggccgggcacctttgtaggkgtccatgttcgcygaggggactatgtccatgtcatgccaaaagtgtggaagggggtggtggccgaccggygatacctacagcaggccctggactggttcygagctcgctacagctccctcatcttcgtggtcaccagtaatggcatggcctggtgtcgggagaacattgacacctcccacrgtgatgtggtgtttgctggcgatggcattgagggctcacctgccaaagattttgctctactcacacagtgtaaccacaccatcatgaccattgggacgttcgggatctgrgccgcatacctcacgggcggagacaccatctacctggccaattacaccctccccgactcccctttcctcaaaatctttaagccagaggcagccttcctgccggagtggacrgggattgccgcagacctgtcccccttactcaagcactaatgctggcccrtyctttgagaccttttctccttctctgcctccctcaagatgagtgcccgggcatgagaagcacatggttccatgagcaggacccatctctcttctgtgaagatgcgttgggctgcaagtaacagaaatctcagtgaacagtggcctggcgtggtggctcatgcctgtaatgctcgcactttgkgaggccagggtgggtggatcacttgaggtcaggagttcaagactagcctggccaacatggtgaaaccccatctcgactaaaaatacaaaaattagccaggcgtggtggtgcacacytgtaatcccagctactcgggaggctgaggcaagagaatcacttgaacccaggaggcggaggttgcagtgagccaagatggtgccgctgcactccagyctgggtgacacagcaagactccatctcaaaaaaaaaaaaaaaaaaargaaaagaaaaagaaatgaaygggttcaaagaccataatcatgcatatcacataagaccagaagtggcccaggtccagggtcagttaatttagcrgctccacaaagtcatcagtcacctgagctccatccatcttcacatgctgtgctaccatttcttagctgtatcatcccatggtcccaaaagggctgctacacatccagccatcacatgcagataattcctttcaaaaacagcagaaagaggctcgttcttgtcttggtcccttttgaagaatgaatgaaaccttcctaagccttccagcaatttccccccaactccgatgggtaggaattgtcacatacccatgtgacccrataggaggcaaaagaaatgagacttctgggattagtttagcctcagattctgcagctgagaagttgatcagccacctctgaaggacatgcagcttgcagaaaattagggtggtgttaccaaggtgaaaaggggaaatggctttagagtagacaacagagatgccctgaggggttgtgtaggttgttcactgcaggaagtcccctggttaagaaggcaagtggggtttaaacagacccacagtctactcatcaaaccaggtgtccttggcattgtgtccacccagagagctcactgttttcttttctttttcttttytttttttttttttttttgagatggagtcttgctgcatcccccaggctggagtgcagtggcatgatcttggctcactgcagcctccgcctcccaggttcaagcgattctcctgcctcagcctcccgagtagctrggattacaggtgcgtgccaccacgcccagctaatttttatacgtttagtggaaatggagtttyaccatgttggtcaggctggtctcaaactcctgacctcatgatccgccttcctcggcctcccaaactgctgggattacaggtgttagccactgcgcccggccctagagctcactgttttctagttagtccatctggaagtggagcctttttccagtttgcacaaatgtgccatattggcttgtagctggcatgcatccaagtccataggtcctgcctcttcaatcctggctttctagggcctgggatgatcattgctagaactgagagaccagcctggctcagtgaacttcagggcgttccrttcattctttcagtaaatgtttgcagcacatgtgttacatgtcaggcagtgaaaccccccacagcagccttccctctcagaggatacatttgtaaccattacacagtcatcaraggaataattttttttaatcaccagtgtgcayacagtcatggagttgggtattcccagctaccagggaggctgaggtgggaggattgcttgatgccaggagttagggaatatagtgcaccgtgattggacttgcgaatagccactgcactgcggcctggacgacgtagtgataccctgactcttataaataaataaatgaataaacacaattatgactttgcggatgggagaaaaggttctctgagarcgtattacataagtatcacatgaactccaaaatacatcttaggccaggcatggtggctgtaatcccagcactttgggagggtaaggcgggcrgatcacytgaggtcaggagtycgagactagcctgggcaacatagtgaaaccctgtctctactaaacatacaaaacattagccaggggtggtggtgcagacc

SEQ ID NO: 2763 - DNA, 3317 bp, Homo sapiens
agtcaccgatgctggaagggtttctttggccctgagtgaagagagacccagagggaacactgaggtgcctgcccaaccactctgtcccggtttccttcagcaggaccagccatgctggtcgttcagatgcctttctcctttcccatggcccacttcatcctctttgtctttacggtttccactrtatttcacgttcagcagcggctagcgaagattcaagccatgtgggagttaccggtgcagataccagtgctagcctcaacatcaaaggcactgggacccagccagctcagggggatgtggacgatcaatgcrataggccgcctggggaaccagatgggcgagtacgccacactgtaygccctggccaagatgaacgggcggcccgccttcatcccggcccagatgcacagcaccctggcccccatcttcagaatcaccctgccggtgctgcacagygccacggccagcaggatcccctggcagaactaccacctgaaygactggatggaggaggartacygccacwtcccgggggagtacgtccgcttcaccggctacccctgctcctrraccttctaccaccacctccgccaggagatcctccaggagttcaccctgcayraccacgtgcgggaggaggcccagaagttcctgcggggcctgcaggtgaacgggagccggccgggcacctttgtaggkgtccatgttcgcygaggggactatgtccatgtcatgccaaaagtgtggaagggggtggtggccgaccggygatacctacagcaggccctggactggttcygagctcgctacagctccctcatcttcgtggtcaccagtaatggcatggcctggtgtcgggagaacattgacacctcccacrgtgatgtggtgtttgctggcgatggcattgagggctcacctgccaaagattttgctctactcacacagtgtaaccacaccatcatgaccattgggacgttcgggatctgrgccgcatacctcacgggcggagacaccatctacctggccaattacaccctccccgactcccctttcctcaaaatctttaagccagaggcagccttcctgccggagtggacrgggattgccgcagacctgtcccccttactcaagcactaatgctggcccrtyctttgagaccttttctccttctctgcctccctcaagatgagtgcccgggcatgagaagcacatggttccatgagcaggacccatctctcttctgtgaagatgcgttgggctgcaagtaacagaaatctcagtgaacagtggcctggcgtggtggctcatgcctgtaatgctcgcactttgkgaggccagggtgggtggatcacttgaggtcaggagttcaagactagcctggccaacatggtgaaaccccatctcgactaaaaatacaaaaattagccaggcgtggtggtgcacacytgtaatcccagctactcgggaggctgaggcaagagaatcacttgaacccaggaggcggaggttgcagtgagccaagatggtgccgctgcactccagyctgggtgacacagcaagactccatctcaaaaaaaaaaaaaaaaaaargaaaagaaaaagaaatgaaygggttcaaagaccataatcatgcatatcacataagaccagaagtggcccaggtccagggtcagttaatttagcrgctccacaaagtcatcagtcacctgagctccatccatcttcacatgctgtgctaccatttcttagctgtatcatcccatggtcccaaaagggctgctacacatccagccatcacatgcagataattcctttcaaaaacagcagaaagaggctcgttcttgtcttggtcccttttgaagaatgaatgaaaccttcctaagccttccagcaatttccccccaactccgatgggtaggaattgtcacatacccatgtgacccrataggaggcaaaagaaatgagacttctgggattagtttagcctcagattctgcagctgagaagttgatcagccacctctgaaggacatgcagcttgcagaaaattagggtggtgttaccaaggtgaaaaggggaaatggctttagagtagacaacagagatgccctgaggggttgtgtaggttgttcactgcaggaagtcccctggttaagaaggcaagtggggtttaaacagacccacagtctactcatcaaaccaggtgtccttggcattgtgtccacccagagagctcactgttttcttttctttttcttttytttttttttttttttttgagatggagtcttgctgcatcccccaggctggagtgcagtggcatgatcttggctcactgcagcctccgcctcccaggttcaagcgattctcctgcctcagcctcccgagtagctrggattacaggtgcgtgccaccacgcccagctaatttttatacgtttagtggaaatggagtttyaccatgttggtcaggctggtctcaaactcctgacctcatgatccgccttcctcggcctcccaaactgctgggattacaggtgttagccactgcgcccggccctagagctcactgttttctagttagtccatctggaagtggagcctttttccagtttgcacaaatgtgccatattggcttgtagctggcatgcatccaagtccataggtcctgcctcttcaatcctggctttctagggcctgggatgatcattgctagaactgagagaccagcctggctcagtgaacttcagggcgttccrttcattctttcagtaaatgtttgcagcacatgtgttacatgtcaggcagtgaaaccccccacagcagccttccctctcagaggatacatttgtaaccattacacagtcatcaraggaataattttttttaatcaccagtgtgcayacagtcatggagttgggtattcccagctaccagggaggctgaggtgggaggattgcttgatgccaggagttagggaatatagtgcaccgtgattggacttgcgaatagccactgcactgcggcctggacgacgtagtgataccctgactcttataaataaataaatgaataaacacaattatgactttgcggatgggagaaaaggttctctgagarcgtattacataagtatcacatgaactccaaaatacatcttaggccaggcatggtggctgtaatcccagcactttgggagggtaaggcgggcrgatcacytgaggtcaggagtycgagactagcctgggcaacatagtgaaaccctgtctctactaaacatacaaaacattagccaggggtggtggtgcagacc

SEQ ID NO: 2764 - DNA, 2078 bp, Homo sapiens
cttgtggggaggcttaggacgggcgggtgcaatcctcgaaggggagtctcagcgaccatgggggacaccatccactagatgtcaggctgaaggagatgatgaaactctgtaagccgaagaacatggggaaagaggagacacaggaagccacgctatccccacagggacccctgccagccaggccacccgcaacggtgtgggacgtgagtgccgttgcccccggcggtccagcagcaggacagccccgagcagcctggcctaggaggctcaccgcagccrtcaagggattctgggccacccgcccttccttctccaccttctacttcgtctttgccrtttttgtggtgtccaccatctttcactgccaccagcacctggctctggtgcctgcgccctgggcatactcagcccgtgtggtcctggcccccagacacctgccccgggaggacctgttcactatcaactccaagggccgcctggggaaccagatgggcgagtacgccacgctgtacgccctggccaagatgaacgggcggcccgccttcatcccggcccagatgcacagcaccctggcccccatcttcagaatcaccctgccggtgctgcacagcgccacggccagcaggatcccctggcagaactaccacctgaacgactggatggaggaggartaccgccacatcccggggsrstrygtccrcytcacsggctacccctgctcctggaccttctaccaccacctccgccaggagatcctccaggagttcaccctgcacgaccacgtgcgcgaggaggcccagaagttcctgcggggcctgcaggccaagtgggcagggcaggcgaccttcgtgggggtccacgtgcgccggggggactatgtccgtgtcatgccgcgcgtatggaagggggtgctggccgaccggctacctgcagcgggccctggactggttccgggcctgctgccrcctcccggtctttgtggtcaccagcgatgacatggcctggtgccgggagagcatcaacagctcccttggggacgtggtgttcgctggcaatggcctccagggctcacctgccaaggacttcgcactgctcacacagtgcaaccacaccatcatcaccgtgggcaccttcggggtctgggccgcgtacctcgcgggcggggacactgtctacctggccaacttcaccctgcccaactcccctttcaacgtggtctttaggccgtaagcggccttcctgccagagtgggtgggccttgcggctgaccttggacaggctggacagaacrgcctctagccagccctgcatgtgcctggtcctcatcctgtgacccgaggggcagtgagtggggcgtgcggggcatggactcacggtccctcatgcagtttggatccaggcttatctacttcatagctgagtgagtttggacaactgactcaacctctgtgccttagtatgtcaaccacaaaatgcacaaaccacagaactaaacaccagtagcagctggtgggagctgagcaaattcgcttagagccagtgccttgtgaccgtgtgggaggtgtcggctgctcacatgtatgcagcacgtcaggaacactggcattgctttccaatggaaacgcagttttgccctctccttcctggcagcactggtagcacagagcccagatattttgcactcacgtcccaggacgaagccatccctgccctgaaggataggggaactcgattttctgggcaactaggaattttggctttggagttagtgggccttatcacaaaagaatgtgagggaagggccgggtgcggtggcacgcctgtaatcccagccctttgggaagccaaggctggtggatcacttgaggtcaggagttcgagaccagcctggccaacatggcgaaacccagtctctactaaaaatacaaaaagccaggcacggtggtgcgtgcccctaatcccagctactccggaggctgaagcaggaggatagcttgaattgggaagcagaggttgcagtaaaccgagatcataccactgcactccagcctgggccacagagcgagactccatcgcaa

SEQ ID NO: 2765 - DNA, 3560 bp, Homo sapiens
gtaaagatagggtctcactttttttgctcaagctggtcttgaacttgggctcaagtgatcctcccatctcagcctcccaaagtgccaggattacaggcacaagccgctgtgctcagcgaggtgcagtaacttgactgaagtcacaaggtgctggtgaggctgggacttccagcaggaactcagcctcaggtggaaagaccccagggtctgtgctctgaggcctctcccatgcactgtggtgctcaggacagaggcttggatggattgagtgagtgaatgaatgactttggcagggggtgggtgaaragactcctgtccccccagccctgcctcctgaccatgtcctctctcctccccacagccrtcaagggattctgggccacccgcccttccttctccaccttctacttcgtctttgccrtttttgtggtgtccaccatctttcactgccaccagcacctggctctggtgcctgcgccctgggcatactcagcccgtgtggtcctggcccccagacacctgccccgggaggacctggggatgtggacgatcaatgcrataggccgcctggggaaccagatgggcgagtacgccacactgtaygccctggccaagatgaacgggcggcccgccttcatcccggcccagatgcacagcaccctggcccccatcttcagaatcaccctgccggtgctgcacagygccacggccagcaggatcccctggcagaactaccacctgaaygactggatggaggaggartacygccacwtcccgggggagtacgtccgcttcaccggctacccctgctcctrraccttctaccaccacctccgccaggagatcctccaggagttcaccctgcayraccacgtgcgggaggaggcccagaagttcctgcggggcctgcaggtgaacgggagccggccgggcacctttgtaggkgtccatgttcgcygaggggactatgtccatgtcatgccaaaagtgtggaagggggtggtggccgaccggygatacctacagcaggccctggactggttcygagctcgctacagctccctcatcttcgtggtcaccagtaatggcatggcctggtgtcgggagaacattgacacctcccacrgtgatgtggtgtttgctggcgatggcattgagggctcacctgccaaagattttgctctactcacacagtgtaaccacaccatcatgaccattgggacgttcgggatctgrgccgcatacctcacgggcggagacaccatctacctggccaattacaccctccccgactcccctttcctcaaaatctttaagccagaggcagccttcctgccggagtggacrgggattgccgcagacctgtcccccttactcaagcactaatgctggcccrtyctttgagaccttttctccttctctgcctccctcaagatgagtgcccgggcatgagaagcacatggttccatgagcaggacccatctctcttctgtgaagatgcgttgggctgcaagtaacagaaatctcagtgaacagtggcctggcgtggtggctcatgcctgtaatgctcgcactttgkgaggccagggtgggtggatcacttgaggtcaggagttcaagactagcctggccaacatggtgaaaccccatctcgactaaaaatacaaaaattagccaggcgtggtggtgcacacytgtaatcccagctactcgggaggctgaggcaagagaatcacttgaacccaggaggcggaggttgcagtgagccaagatggtgccgctgcactccagyctgggtgacacagcaagactccatctcaaaaaaaaaaaaaaaaaaargaaaagaaaaagaaatgaaygggttcaaagaccataatcatgcatatcacataagaccagaagtggcccaggtccagggtcagttaatttagcrgctccacaaagtcatcagtcacctgagctccatccatcttcacatgctgtgctaccatttcttagctgtatcatcccatggtcccaaaagggctgctacacatccagccatcacatgcagataattcctttcaaaaacagcagaaagaggctcgttcttgtcttggtcccttttgaagaatgaatgaaaccttcctaagccttccagcaatttccccccaactccgatgggtaggaattgtcacatacccatgtgacccrataggaggcaaaagaaatgagacttctgggattagtttagcctcagattctgcagctgagaagttgatcagccacctctgaaggacatgcagcttgcagaaaattagggtggtgttaccaaggtgaaaaggggaaatggctttagagtagacaacagagatgccctgaggggttgtgtaggttgttcactgcaggaagtcccctggttaagaaggcaagtggggtttaaacagacccacagtctactcatcaaaccaggtgtccttggcattgtgtccacccagagagctcactgttttcttttctttttcttttytttttttttttttttttgagatggagtcttgctgcatcccccaggctggagtgcagtggcatgatcttggctcactgcagcctccgcctcccaggttcaagcgattctcctgcctcagcctcccgagtagctrggattacaggtgcgtgccaccacgcccagctaatttttatacgtttagtggaaatggagtttyaccatgttggtcaggctggtctcaaactcctgacctcatgatccgccttcctcggcctcccaaactgctgggattacaggtgttagccactgcgcccggccctagagctcactgttttctagttagtccatctggaagtggagcctttttccagtttgcacaaatgtgccatattggcttgtagctggcatgcatccaagtccataggtcctgcctcttcaatcctggctttctagggcctgggatgatcattgctagaactgagagaccagcctggctcagtgaacttcagggcgttccrttcattctttcagtaaatgtttgcagcacatgtgttacatgtcaggcagtgaaaccccccacagcagccttccctctcagaggatacatttgtaaccattacacagtcatcaraggaataattttttttaatcaccagtgtgcayacagtcatggagttgggtattcccagctaccagggaggctgaggtgggaggattgcttgatgccaggagttagggaatatagtgcaccgtgattggacttgcgaatagccactgcactgcggcctggacgacgtagtgataccctgactcttataaataaataaatgaataaacacaattatgactttgcggatgggagaaaaggttctctgagarcgtattacataagtatcacatgaactccaaaatacatcttaggccaggcatggtggctgtaatcccagcactttgggagggtaaggcgggcrgatcacytgaggtcaggagtycgagactagcctgggcaacatagtgaaaccctgtctctactaaacatacaaaacattagccaggggtggtggtgcagacc

SEQ ID NO: 2766 - DNA, 721 bp, Homo sapiens
tccttctggctgcaaatcgtttttatgggaacctgcagggtgacccggcaccttgctaactgggcttaragtctaagggcttgggggctgcatctgatacaggttggagtttggggtgggagagtcctaggaagggggccccaagtaraaatgagaraaatcaggaagggatatcgggggcgtccacgggggtgctccgactggccttgcacccgtaccccagctctgcaccccccgtcacgagcagttcaatgcccgtgcagaagttggcttcggaggccaggaacactgccgcagccccgacctcagcgggctggcccatgcggcccagtggcagttgactcggacaccatatggactttcatccagggccaaagctttggtcatggctgttactgcccccttggtggccacatagggaactgcctgggcctggccgattgcccccaccaggctggagatgttgatgacatttcacggtggccagcgttgttgacaacacaatccaggcggccaaatcggcggatggtctcagaaaccagggtcttcacatcatcttcctgagtcacatcacagaggataaagacagctccagggagctcctgctccagggcccggcccccagactcatccttgtcgcagataaccactcgggccccgctgttcacgaaggcgcgcacgatcccagctccgatgccgcgcccgcccccggtcacgacca

SEQ ID NO: 2767 - DNA, 3752 bp, Homo sapiens
ccgggaagagcgcatctcgccaaccagaattgaggagggtgtagccagtgctaagttygcttgcggctgacctttctttggaatgtygtggaagcaaatactgcacatgcgtgttggtcctgtgagggaaaccagctagtggagagggagaggttgaaggaacagaaaaatgagaagayaactcactggtgaagctgaacccagatctacacatacagctaatcttaccaaaatgtgtggaagtaaagcaatctgaaggaaattcagtaccatacaatttactgactgaaatacatcatattgctcatactaagaataagagtggagaagaatcatttttttcctgctaaaatgatagaggcagaagagcaacagccttgcaagacagacttctattctgaattgccaaaagtggaacttcatgcccacttgaatggatccattagttctcataccatgaagaaattaatagcccagaagccagatcttaaaatccacgatcagatgactgtgattgacaagggaaagaaaagaactttggaagaatgtttccagatgtttcaaactattcatcagcttactagtagccctgaagatattctaatggtcacaaaagatgtcataaaagaatttgcagatgacggcgtcaagtacctggaactaaggagcacacccagaagagaaaatgctacyggaatgactaaaaagacttatgtggaatctatacttgaaggtataaaacagtccaaacaagaaaacttggacattgatgttaggtatttgatagcagttgacagaagaggtggccctttagtagccaaggagactgtaaaacttgccgaggagttcttcctttctactgagggtacagttcttggccttgacctcagtggagaccctactgtaggacaagcaaaagacttcttggaacctcttttagaagctaagaaagcaggtctgaagttagcattgcatctttcagagattccaaaccaaaaaaaagaaacacaaatactcctggatctgcttcctgacagaatcgggcatggaacatttctcaactccggtgagggaggatccctggatctggtggactttgtgaggcaacatcggataccactggaactctgtttgacctcaaacgtcaaaagtcagacagttccatcttatgaccagcaccatttcggattctggtacagcattgcccatccttctgtgatctgtactgatgataagggtgtttttgcaacacacctttctcaagagtaccagctggcagctgaaacatttaatttgacccagtctcaggtgtgggatctgtcttatgaatccatcaactacatctttgcttctgacagcaccagatctgaactgaggaagaaatggaatcacctgaagcccagagtgttacatatttaagctataatgaggtgaactacttctgagtatgtgtttcaatcaagttcctgccatatcccacttagtaaaacagtccaccactcctttgaagcatagcaaccaagttccttgggctctatcaccagcaccttacacatggcaggtactcagtaaatacgtgtcttcaactgactcacaagctctcaggtgcttactgggtgggacttgactgttgttgctaattaaatccccattccaccagtgattmttgtgactcagcagtccttccctattagtgatcataaaatttcagggaaatcgaagtttctcatcaggaaatgttttggaattactagtataaagttaggaaagtggggaaattaggttactgccgagacctttaagccttctaaacagctttatattttattgtgcatactttaatcagactcccttcactcgctttaagtttttaaaagtattccccagccggatgtgatggctcatgcctgtaatcccagcactttgggaagccaaagtgggcagattgcttgatcctaggagttcagtagcagcctaggcaacatggagaaaccctgtctctacaaaaacaaaaaaacaaaaaaccggaaattagtcaggcacggtggtacacacctgtagtcccagccaccagggaggctaaggtgggaggagacctgatcccagggatgtttgaggctgcagtgagctgtgatgctacagcactccagcctgggcaacagagtgaaaccctgtttcaagaaaaagaaaagtattctccaagatcccaagaccattgacaccaggccacattgtataccagggatttatgtgaatgcctagggatgaccgtagtgacagataaagctaggtgctgagatctggttttgccctctttatgattgtcccatcggtactagaaagtgaagtcattgctccaattttggaagaggagagaataactggctgaggggtgagaaagacagaaatagctgcagctctcttttttttttttttcaacaaaggctctcactctgttccccaggctggagtgcagtgacatgatcacagatcactgcagctttcagttttaaaacagcttctattacattttctttgtggaagctgtatttctaccttagtactcactttctgcttggtctgaaagatacctctagtagtggcaacattgtgttaagtagagttcattgggtctcttgtaaccctacccctacataatggaccactggtgcaggcttacataaacacacatactgtggccacttcagctgaagacaagggacaaactaagatagttctgaaaggtaaaaaaamaaacaaacaaaaaacaaaaacaaaattattagataccaagttatgcttgaattgctttgctctttagaatgtgtgtttttccctggtatcagaagaagttaaggctgatgacacccctaatttaaattactaaggatttctgataggttttctgtctttctgtgatatcgtaaagtatttatttggtctttgaccctgtttcctggcatactgctcctaaaatccttagagtctccagagtgatggctttttgtatctaatgagttgactgctggctggcagcccctaggggctggtcactggaaagacaaatgcatgattagagttgggactttcagtcctcccccaaactcttgggagaagggctgaaggttaagttgatcaccagtgaccagtggtaatcataccttcataatgaagcctccataaaactccagaagaacagattttggagcatttccaggtaactgaacatatggaggtccctagagggtgctgtacctgaagagggtagagggtataggagctccctgtcccttcccacatgccttgctctatccatttcttcatctctatcctttgtactgtcctttataataaaccagtgaacctaagtgtttccctgagttctgtgagctttactagcaaattaaactcaaggaggggtcatgggaaccctgatttataggtttggtcagaagcacaggtaaaaccacctggggtttgaacttggcactggaagtgggcagcagtcttgtgggactgggccctcaatctgtgggatcaaatgccatctctaggggatagcatgggaaactggaggacacctagctggtatctgctgcaaaattgattgcttgcttgrtggtggggaaaaaactccacacatttggtcagagaagttttctgtctttattgtggtgtgagagcagaggaaaaaagtttgttttttccgctcagactttgttttaaggaacaggggagagggaagttctgtg

SEQ ID NO: 2768 - DNA, 4775 bp, Homo sapiens
gggtagagacggagtttcaccatattggccaggctggtctccaactcctgagttcaagtgatctgccagccttggcctcccaaagtgctgggatcaaggcatgtgccactgcgcctggcctcatcacagtgttctgcttttatctgctcctgaaagctggggtgtgctgtagtaaacttagaaacaggaaatacagaacagccattttctcctgctgatcatattccctgccagttttctactacctggcccactgatcgccttgccagatgtcttcccagctgtaataagccctgtttcccaggactcagtcatagccataaccaatgctttccctagaaatggctcttacaaagtctcaggaaagctgaagttggacaacaaccttttttttttttctttttaagagacggggtctcactctgtcaaccaggcaggagtgcagtggcacaatcacagctcactatcrcctcagcctccagagtatccaagactacaagcacacaccaccgtgcctacttatttttttgtagagatggggatctgactttgttgcctgggctggtcttaaactcctggctttaagtgatccttctgycttggcctcccaaagtgctggaattataggcgtgagccaccatgcccagcctataccacaaccctcattcagctggtctcccccggggaggcttcatctaacagagccaagactgtcctctccatacacttaggtttgtgtttgctacttggtttttatattaatcacctttcacatccatttatatgcaaaattaatagaaataaaggatgcaatttgtcatcaatgatggttcataataatcatttaggcacttgtagaatgaaaactactaargtttctaggactaagaagaaatactaaagtaatacacttattaccaccaaagccactacattttttgaggtgtatatttcacaaggtatgcataatttagatgacaaattaaggctcaaattttaaggatgaatagctatttcattgatctcacatggctcactaggcaacagattcccatttaaaagggataattgagtttaatgggatgctaactataaggggctgagtagggttaagggaaaccaagtcaagatatccagtcagcagtgtccagtagaaatttctgtaacgatgaaatgttctacatctacattgtctaatacagtagccaaagccacacatagttattaagcacttaaaatgtggtcaatgtgactaagccactgaatttattaattcgtttaaatagtcacatgtygtcaatagctaccacattggacagtacagttcaggtctagcaaagagccatcacaactcctaggcctgaaaaggtgaagtaaaggaacaattactgaaacctgggatgatgcagaattagaactctgtcttcaggaaaggattacacggcaggagctgtagcctttgacagaagaatgctgccactgccaacttgcaaaccaacaggggaagaattgggaataaataccaactcactctcactcttctttttgcccccattcccctctggtgcctctgactggtggaactcaaccaaaaagtaaagagagctccttgatgcagcccataaaggtcagcctcttggagcacaraacagtgaaaggtggagagtatatctggaacaaaacattattataccccgtgcaaaatgaattgaggcatcaaaagtttgctttattgacacttataaatctaaataaatatggaaccaatagcaaaacatttaaaaagtatgttggtaaaggaagtcctmcaagtgtttcctgttgttaaaactatccgagttttctgttgcaacaaacaggacaatgttttaatcaaactgtgactgtgttcatttcaggtttcctacatgaagaattgtcaatactacgctccctcaactatattcaaccaaggatctgcgtgaaactttttctaaggtaccatctcaaatatattcaaccacggaactgcgtgtaactttttctaaggtaccatctcaaatcacaaggcctgggattgggaaattgttttactttactaaagaccactgtaactcaataaacgaacttagattagaaaattagaggcagaccactactcctctcggactgcatggccactgtcttcagctgttttcygtagtgattgtttctaggtattttacctattttaccaacctttttcactttttgcactgaatagtgctaagggaaaaaaaggatggggaaaggaggagtggcagtatctatagctagagggtcatcctatttgtggaaaactttattgtctactttagtgggtcctgaatattagtccagtccttactgcccagcacttaaggaagaaaggtctaatgtgactgtatgggggttgaagtaggtaccaaaggaaaagcagttcccaccacctccaaggagcaggagctgttgctcttcaggaagaaggatactagtatggttgtgtaacattaatggccatggcacatatgttgtgtcaatctgatactcagagctcaatcctgtagtcaaattgatcacagtcactccaggaaatgaggaggaatgaatccagatccctccaaccagtaacagctttccattgagcacatgagctgtgtgggagtaccttggggtaatgggaggctggatgtctactgactcccagaggaatccacaagagattggtctcagaaagagcacagagttcaatggctcctcagaagccccgagacctccagcaataagggctcccccttgccaagtgcaggcactgtgagaatgccgggcttcaggtacttctccctccactgggatcctgacccaagccattgtccctacatggaggaaatgccagtcacttagtacaggttccaccacgcttcgacccccatacacaaacaaatattcctgattctgacaggacacttctgttgttgaatgccgccaacaacacaaagtggaatcatcctttcggccagcctttgttattgtcactttcaggtcctcagtgttattatcctcactcttaaaaaaatgaagctggagaacccccaaggctggacttactggggacagtctccctcccagaaccagaacccgactctctgagagtcttgtcatggtgtgataaaggcgtccatcccactgaactccagtcccacaactgcctatttggctgcctttccattcagagtcacaatctcttgagagcaagtgaaactggctcactcggcagtgccgcccctcctgctctccaaatcctcctgcactgagaataacgtctgggctcaagaagacagaggcgtggccatatctcttcaggtttgggacctggccctcgctactgactacgctggcagggaatacccctgaaggcgaagcaggatttacgcgaggaaatgcctctgaggatggaaacactagggtgtgggagagggtgtctcccctagaagctgccagaatgaaataatgggcgcacttcagatgccactcctcaaattcgtcaaagggttcaatattttccacccgccggcgttcttctgcgggaagaaagcagtgatagaattcattcatgtccacggcaccgcaggcggtccagccagcttgaaggaagcggcgccgctgcgcctccacgtcaggaaarcgctccaggccatgcaggggggagtttagctgccgaaaatgttgcagcatgaactggccaaaggcgtcttgaggcctcatctgctcatagaccacgaaaagggcattaggaaaacgctgggctgcccaggcgatgagggccgcggcactckccggctcgaggtaggtcagcaccgcctcggccaggagcagagtgggtgaggctgcgtcgagccccgcggcgcccagggcctcctccactcgctggagctgccgcaagtccagacccaggatgcagtagtctgcgctctcaaagcacagcgcggacgcgggctccccmctctcgaaaggcccggttaacgcgcacagctctggcgtctctccaatcctttctgctttgcgccgcgccacgtccggaaaatccacctcccagactgcagcccgggccaggcggcccgcggtttttaagcgaaaatagagcgagtcgaagccagcgccgagagacaagatctgcgcgcgaagcgcggcctggggcgcgccaatctgctccaaaaaagcgcgcacgcagtgcctcacggcgcgtgcgcggacgtagtagcctcggtgaatgagcggtgcgcggcgcgccgcgcccggaaccagcaacgcggcaaaggggtcctgcacgtacccgcgcgcggccagggaacgcttgctgagggcgctgctgtcgttggtgttctgtaccgcgcctgcccgacgctcacggctccgggggcccatggccagaagagactcaggaatggcagtctgtcacggttgtgagccgccccttggttagcacacmcctcacggacctcggtagggggaaaaaaaccacccatgctcctggacttccccttccgccggcacttgtgcgtcacttccgggaagagcgcatctcgccaaccagaattgaggagggtgtagccagtgctaagttygcttgcggctgacctttctttggaatgtygaggctgaagtgggaggatcgcttgagtctggaagcttgagactgcagcaagctgtgatcgtgacactgcactccagcctgggcaacaaagtaagatcctgtctcaaaagaaaaaaaaaaaaag

SEQ ID NO: 2769 - DNA, 1734 bp, Homo sapiens
ggtggccgcgggggcgcgacggcggggcgggggcgctgctgctgcgggggcaggaagcggcaagggcggtggcggcccgctccagccrtgccgaataaaacaagaaggagaaagaatcaccaaaagcagggaagagtggaaaaagttcaaaagaaggacaagacacagtagaatcagagcaaatttccgtcaggaaaaacagccttgttgctgtcccgtctacagtgtctgctaaaataaaagtacccgtctctcagcccatagtgaagaaagacaaacagcaaaattcttcaaggtttagcgcaagcagtaatagagaacttcaaaaactaccatccttaaaagatgttcctcctgctgatcaaaagaagttttttatccagaagttatgtcagtgttgcgtcctttttgactttgtttctgatccactaagtgaactaaagtagaaggaattaaaacgagctgctttaagtgaaatggtagaatatatcacccataattggaatgtgatcacagagcctgtttacccagaagtagtccatatgtttgcagttaacatgtttcgaatattaccaccttcctccaatcctacgggagcagaatttgacycagaggaagatgaaccaacgttagaagcaggctggcttcatctacacttatttatgaatttttcttaagatttttagagtctgcagatttccaatctaatatagcgaagaaatatattgatcagaagtttgtattgcagcttttaaagctctttgacagtgaagatcctcaggagagagattttcttaaaaccacccttcacagaatctatgggaaattcctaggcttgagagcttacatcagaaaacagataaataatatattttataggtttatttatgaaacagagcatcataatggcatagcagagttactggaaatattgggaagtataattaatggatttgycttaccactaaaagaagaacacaagattttcttattgaaggtgttactacctttgcacaaagtgaaatctcttgagtgtctaccacccccagctggcatactgtggagtgcagtttttagaaaaggacagcacccccacagaaccagtggtgatgacacttctcaaatgctggccaaagactcacagtccaaaagaagtaatgttcttaaacaaattagaagcgattttagatgtcattgaaccatcagaatttgtgaagaccatggagcccctcttccggcagttggccaaatgtgtctccagcccacacttccaggtggcagagcgagctctctattactggaataatgaatacatcatgagtttaatcagtgacaatgcagcgaagattctgcccatcatgtttccttccttgtaccacaactcaaagacccattggaacaagataatacatggcttgatatacaacgccctgaatctgttcatagagatggaacaaaagctgtttgatgactgtacacaacagtccaaagcagagaaactaaaagagaagctaaaaatggaagtacgagaagaagcatgggttaaaatagaaaatctagccaaagccaatccccaggtactaaaaacgagagtgacatgaaaacgtccagggttacttgaaatgtttttataagataggactatgtcttcaccatgggggcggggggtggggctcgatttcactaacgttgtatatgaaaatgtctgcaataaaaagtacttttgaactttgt

SEQ ID NO: 2770 - DNA, 1072 bp, Homo sapiens
gacacgaaggttgaagtgaaggccagagtaaacrgatttggccttactgggtgcctgatcactaggacagttttaactgtagcaaagtggttattgtcaccatcagtgacctcttcattgacctcaattacatggtccacatgttccagtatgattccacccatggcaagttccacgcaccatcaaggctgagaatgggaagcttgtcatcaatggcaatcccattaccatcttccaggagcaagatcccatccaaatcaaacaaggggatgccagtgctgattatcttgtggaatccaccagcatcatcactaccttggaaaagactagggctcacttaaaggggacatgatttctcccccttctgctgatgcccccatgtttgtgatgggtgtgaatcatgagaaaaacaaaaacaacttcacaatcatcaacaatgctttctgttccaccaactgcttagcacccccagccaaggtcatccatgacaactttggcatcatggagggattcatgaccacagtccatgccatcactgccacccagaagacgaagacaacccctctcggaaactgggatgacagctatggagctccacagacatcacccctgcaattaactagtgttgccaaggcaaagtcatccccacactgaatgagaacctcactggcatggccttctgtgtccccactgccaacatgttggttgtggacctgacctgccatctaaagaaacctgccaaatatggtaacaccaagaaggtaatgaaggaggcacggaagggcccctcaagagcatcgtggtgctacactgagcaccaagttgtctcctccaactataacagtgacatcgaccttccactttcgacgttggggctggcattgtcctcagcgataactctgtcaagctcatattctgataygacaaggaatttggctacagcaacagggtggtagactttatggtacacatggcctccaaggagtaagagccccctagaccatcagccccagtgagaacacaacaagaaaacagaggccctcagctgcagcaagtccctgccacactgtcc

SEQ ID NO: 2771 - DNA, 1716 bp, Homo sapiens
tgccatgctcagccgcgatggctggggctgccgggcgcgtccaagatygcgccctgcggcggtttcccatcaccctgcctgtgggcgacttgagcaacttgcatcttaaggaagagaaaatcaaaccagataccaatggtgctgttgtcaagaccaatgccaatgcagagaagacagatgaagaagagaaagaggacagagctgcccagtccttactcaacaagctgatcagaagcaaccttgttgataacacaaaccaagtggaagtcctgcagcgggatccaaactcccctctgtactcggtgaagtcttttgaagagcttcggctgaaaccacagcttctccaaggagtctatgccatgggtttcaatcgtccatccaagatacaagagaacgcattgccactgatgcttgctgagcccccacagaacttaattgcccaatctcagtctggtactggtaaaacagctgccttcktgctggccatgcttagccaagtagaacctgcaaacaaatacccccagtgtctatgtctctccccaacgtatgagctcgccctccaaacaggaaaagtgattgaacaaatgggcaaattttaccctgaactgaagctagcttatgctgttcgaggcaataaattggaaagaggccagaagatcagtgagcagattgtcattggcacccctgggactgtgctggactggtgctccaagctcaagttcattgatcccaagaaaatcaaggtgtttgttctggatgaggctgatgtcatgatagccactcagggccaccaagatcagagcatccgcatccagaggatgctgcccaggaactgccagatgctgcttttctccgccacctttgaagactctgtgtggaagtttgcccagaaagtggtcccagacccaaacgttatcaaactgaagcgtgaggaagagaccctggacaccatcaagcagtactatgtcctgtgcagcagcagagacgagaagttccaggccttgtgtaacctctacggggccatcaccattgctcaagccatgatcttctgccatactcgcaaaacagctagttggctggcagcagagctctcaaaagaaggccaccaggtggctctgctgagtggggagatgatggtggaacagagggctgcagtgattgagcgcttccgagagggcaaagagaaggttttggtgaccaccaacgtgtgtgcccgcggcattgatgttgaacaagtgtctgtcgtcatcaactttgatcttcccgtggacaaggacgggaatcctgacaatgagacctacctgcaccggatcgggcgcacgggccgctttggcaagaggggcctggcagtgaacatggtggacagcaagcacagcatgaacatcctgaayagaatccaggagcattttaataagaagatagaaagattggacacagatgatttggacgagattgagaaaatagccaactgagaagctccaccagccactgatgccagccctggcactgcccctgcacaggagacaagtgcgttyagggcacaggccccgacatcaccccaaggacaacggcasaagtagagagaaactacctacctcacttcaaattatgtttggacttracaaaaatgkatgcaaatgatgggggatrgwagaaaaaaattatttacacaaccttggaagattaggcatgaatacacagagatttaccttttgg

SEQ ID NO: 2772 - DNA, 1718 bp, Homo sapiens
agcagagcctgccgcgaacccccrgagcccacgatccctcgtgccatccctcgaatccaccagcacgagcgtcccacccgcgcctgggaccatggccactgactcatgggccctggcggtggacgagcaggaagctgcggctgagtcgttgagcaacttgcatcttaaggaagagaaaatcaaaccagataccaatgaggacagagctgcccagtccttactcaacaagctgatcagaagcaaccttgttgataacacaaaccaagtggaagtcctgcagcgggatccaaactcccctctgtactcggtgaagtcttttgaagagcttcggctgaaaccacagcttctccaaggagtctatgccatgggtttcaatcgtccatccaagatacaagagaacgcattgccactgatgcttgctgagcccccacagaacttaattgcccaatctcagtctggtactggtaaaacagctgccttcktgctggccatgcttagccaagtagaacctgcaaacaaatacccccagtgtctatgtctctccccaacgtatgagctcgccctccaaacaggaaaagtgattgaacaaatgggcaaattttaccctgaactgaagctagcttatgctgttcgaggcaataaattggaaagaggccagaagatcagtgagcagattgtcattggcacccctgggactgtgctggactggtgctccaagctcaagttcattgatcccaagaaaatcaaggtgtttgttctggatgaggctgatgtcatgatagccactcagggccaccaagatcagagcatccgcatccagaggatgctgcccaggaactgccagatgctgcttttctccgccacctttgaagactctgtgtggaagtttgcccagaaagtggtcccagacccaaacgttatcaaactgaagcgtgaggaagagaccctggacaccatcaagcagtactatgtcctgtgcagcagcagagacgagaagttccaggccttgtgtaacctctacggggccatcaccattgctcaagccatgatcttctgccatactcgcaaaacagctagttggctggcagcagagctctcaaaagaaggccaccaggtggctctgctgagtggggagatgatggtggaacagagggctgcagtgattgagcgcttccgagagggcaaagagaaggttttggtgaccaccaacgtgtgtgcccgcggcattgatgttgaacaagtgtctgtcgtcatcaactttgatcttcccgtggacaaggacgggaatcctgacaatgagacctacctgcaccggatcgggcgcacgggccgctttggcaagaggggcctggcagtgaacatggtggacagcaagcacagcatgaacatcctgaayagaatccaggagcattttaataagaagatagaaagattggacacagatgatttggacgagattgagaaaatagccaactgagaagctccaccagccactgatgccagccctggcactgcccctgcacaggagacaagtgcgttyagggcacaggccccgacatcaccccaaggacaacggcasaagtagagagaaactacctacctcacttcaaattatgtttggacttracaaaaatgkatgcaaatgatgggggatrgwagaaaaaaattatttacacaaccttggaagattaggcatgaatacacagagatttaccttt

SEQ ID NO: 2773 - DNA, 1702 bp, Homo sapiens
cagccttgtagtggggctggagcagagcctgccgcgaacccccrgagcccacgatccctcgtgccatccctcgaatccaccagcacgagcgtcccacccgcgcctgggaccatggccactgactcatgggccctggcggtggacgagcaggaagctgcggctgagtcgttgagcaacttgcatcttaaggaagagaaaatcaaaccagataccaatggtgctgttgtcaagaccaatgccaatgcagagaagacagatgaagaagagaaagaggacagagctgcccagtccttactcaacaagctgatcagaagcaaccttgttgataacacaaaccaagtggaagtcctgcagcgggatccaaactcccctctgtactcggtgaagtcttttgaagagcttcggctcccacagaacttaattgcccaatctcagtctggtactggtaaaacagctgccttcktgctggccatgcttagccaagtagaacctgcaaacaaatacccccagtgtctatgtctctccccaacgtatgagctcgccctccaaacaggaaaagtgattgaacaaatgggcaaattttaccctgaactgaagctagcttatgctgttcgaggcaataaattggaaagaggccagaagatcagtgagcagattgtcattggcacccctgggactgtgctggactggtgctccaagctcaagttcattgatcccaagaaaatcaaggtgtttgttctggatgaggctgatgtcatgatagccactcagggccaccaagatcagagcatccgcatccagaggatgctgcccaggaactgccagatgctgcttttctccgccacctttgaagactctgtgtggaagtttgcccagaaagtggtcccagacccaaacgttatcaaactgaagcgtgaggaagagaccctggacaccatcaagcagtactatgtcctgtgcagcagcagagacgagaagttccaggccttgtgtaacctctacggggccatcaccattgctcaagccatgatcttctgccatactcgcaaaacagctagttggctggcagcagagctctcaaaagaaggccaccaggtggctctgctgagtggggagatgatggtggaacagagggctgcagtgattgagcgcttccgagagggcaaagagaaggttttggtgaccaccaacgtgtgtgcccgcggcattgatgttgaacaagtgtctgtcgtcatcaactttgatcttcccgtggacaaggacgggaatcctgacaatgagacctacctgcaccggatcgggcgcacgggccgctttggcaagaggggcctggcagtgaacatggtggacagcaagcacagcatgaacatcctgaayagaatccaggagcattttaataagaagatagaaagattggacacagatgatttggacgagattgagaaaatagccaactgagaagctccaccagccactgatgccagccctggcactgcccctgcacaggagacaagtgcgttyagggcacaggccccgacatcaccccaaggacaacggcasaagtagagagaaactacctacctcacttcaaattatgtttggacttracaaaaatgkatgcaaatgatgggggatrgwagaaaaaaattatttacacaaccttggaagattaggcatgaatacacagagatttaccttttgg

SEQ ID NO: 2774 - DNA, 1670 bp, Homo sapiens
tgggaaggcggctctaacttggctgatgcaactgcgagaaaagttgagcaacttgcatcttaaggaagagaaaatcaaaccagataccaatggtgctgttgtcaagaccaatgccaatgcagagaagacagatgaagaagagaaagaggacagagctgcccagtccttactcaacaagctgatcagaagcaaccttgttgataacacaaaccaagtggaagtcctgcagcgggatccaaactcccctctgtactcggtgaagtcttttgaagagcttcggctgaaaccacagcttctccaaggagtctatgccatgggtttcaatcgtccatccaagatacaagagaacgcattgccactgatgcttgctgagcccccacagaacttaattgcccaatctcagtctggtactggtaaaacagctgccttcktgctggccatgcttagccaagtagaacctgcaaacaaatacccccagtgtctatgtctctccccaacgtatgagctcgccctccaaacaggaaaagtgattgaacaaatgggcaaattttaccctgaactgaagctagcttatgctgttcgaggcaataaattggaaagaggccagaagatcagtgagcagattgtcattggcacccctgggactgtgctggactggtgctccaagctcaagttcattgatcccaagaaaatcaaggtgtttgttctggatgaggctgatgtcatgatagccactcagggccaccaagatcagagcatccgcatccagaggatgctgcccaggaactgccagatgctgcttttctccgccacctttgaagactctgtgtggaagtttgcccagaaagtggtcccagacccaaacgttatcaaactgaagcgtgaggaagagaccctggacaccatcaagcagtactatgtcctgtgcagcagcagagacgagaagttccaggccttgtgtaacctctacggggccatcaccattgctcaagccatgatcttctgccatactcgcaaaacagctagttggctggcagcagagctctcaaaagaaggccaccaggtggctctgctgagtggggagatgatggtggaacagagggctgcagtgattgagcgcttccgagagggcaaagagaaggttttggtgaccaccaacgtgtgtgcccgcggcattgatgttgaacaagtgtctgtcgtcatcaactttgatcttcccgtggacaaggacgggaatcctgacaatgagacctacctgcaccggatcgggcgcacgggccgctttggcaagaggggcctggcagtgaacatggtggacagcaagcacagcatgaacatcctgaayagaatccaggagcattttaataagaagatagaaagattggacacagatgatttggacgagattgagaaaatagccaactgagaagctccaccagccactgatgccagccctggcactgcccctgcacaggagacaagtgcgttyagggcacaggccccgacatcaccccaaggacaacggcasaagtagagagaaactacctacctcacttcaaattatgtttggacttracaaaaatgkatgcaaatgatgggggatrgwagaaaaaaattatttacacaaccttggaagattaggcatgaatacacagagatttaccttttgg

SEQ ID NO: 2775 - DNA, 3168 bp, Homo sapiens
cggtctgcagccttgtagtggggctggagcagagcctgccgcgaacccccrgagcccacgatccctcgtgccatccctcgaatccaccagcacgagcgtcccacccgcgcctgggaccatggccactgactcatgggccctggcggtggacgagcaggaagctgcggctgagtcgaggacagagctgcccagtccttactcaacaagctgatcagaagcaaccttgttgataacacaaaccaagtggaagtcctgcagcgggatccaaactcccctctgtactcggtgaagtcttttgaagagcttcggctgaaaccacagcttctccaaggagtctatgccatgggtttcaatcgtccatccaagatacaagagaacgcattgccactgatgcttgctgagcccccacagaacttaattgcccaatctcagtctggtactggtaaaacagctgccttcktgctggccatgcttagccaagtagaacctgcaaacaaatacccccagtgtctatgtctctccccaacgtatgagctcgccctccaaacaggaaaagtgattgaacaaatgggcaaattttaccctgaactgaagctagcttatgctgttcgaggcaataaattggaaagaggccagaagatcagtgagcagattgtcattggcacccctgggactgtgctggactggtgctccaagctcaagttcattgatcccaagaaaatcaaggtgtttgttctggatgaggctgatgtcatgatagccactcagggccaccaagatcagagcatccgcatccagaggatgctgcccaggaactgccagatgctgcttttctccgccacctttgaagactctgtgtggaagtttgcccagaaagtggtcccagacccaaacgttatcaaactgaagcgtgaggaagagaccctggacaccatcaagcagtactatgtcctgtgcagcagcagagacgagaagttccaggccttgtgtaacctctacggggccatcaccattgctcaagccatgatcttctgccatactcgcaaaacagctagttggctggcagcagagctctcaaaagaaggccaccaggtggctctgctgagtggggagatgatggtggaacagagggctgcagtgattgagcgcttccgagagggcaaagagaaggttttggtgaccaccaacgtgtgtgcccgcggcattgatgttgaacaagtgtctgtcgtcatcaactttgatcttcccgtggacaaggacgggaatcctgacaatgagacctacctgcaccggatcgggcgcacgggccgctttggcaagaggggcctggcagtgaacatggtggacagcaagcacagcatgaacatcctgaayagaatccaggagcattttaataagaagatagaaagattggacacagatgatttggacgagattgagaaaatagccaactgagaagctccaccagccactgatgccagccctggcactgcccctgcacaggagacaagtgcgttyagggcacaggccccgacatcaccccaaggacaacggcasaagtagagagaaactacctacctcacttcaaattatgtttggacttracaaaaatgkatgcaaatgatgggggatrgwagaaaaaaattatttacacaaccttggaagattaggcatgaatacacagagatttaccttttggaagtttcatcttttaatttggccagtgtttccttcatgctaatctagatgctgtggctgattacttgcccaggatctcctgtggcagcctctgcttgttctctggcttggagtggatggggcagcctccagctcctgtggaagtaatggaatagtggtggaaagggaacacagagagggaggcttccagtaagataggtgtgtaagcccagccatcatgtttggaatggcatgaggcagcagaggaggcctgagagctgctgctttggacttgggggtgggacagctcatctgagtattgccagccccctgtcctagtgcccacagcagaagggaatttgttaaataagcatggaccaaaatgccaacctctcggttgtgtatatgggtttgtgtcacaggactgtgacctgttctcggtgggtgcagtctgtgtagagtgcacatctgattattggtgggtcctgtgcctgtgcttaagcaagtcctgtggagaagtcatcatggagaattagtggtggccctagcgtgccacaaaacctggtctcatgagcatttgcaacatcccttttacatccttaatatccccttaccccacagtagccccaaacaaatgtgatctgaggtttagatcctcagtgaaaattgtggtttcaagtcttcatggccagcctcaaggcagttctagatgtgatcagcagtagtcacaaattcttgttttgtctccacacccagaaggcaagttttgtcagagctggggaataatttcagatatttgacatcttgattataaagggcttctgaacatctgtgtttactgcctttggaatacaaacaggtgcaactgagggactagctacactaccaccatttatctgtccaaggcaagagtatcaccaaggcctttgctccagccttacttggcatctttgcgcaagatagtcagagcaaacaatagtaatggacacttctcacacctggccaaggctgttggtacccacgaaatgacagcaaagatgagaggaaactgaattgcaagagcaatatgaaaccccaaccaagaggagtactctgcagttctttggctttggtatagagtggccactttctctaggacctggaagaagagtttgatggctaagaacgattgtgatcctaggtcttctttgtacgcatctccrtatttaggccagatctgcctcctgggaagggaaggggccaatgtcagcctccaggtgatttctttaatctgacattacaaagagaccaacagactgccaattctaccacattcccctggtgggtactcgactatgtagttttctctatgcttctggtcaactctgacacatcttggaattcttgtaataagaaaagaaatttttatacttttttctccttccctgagtcctgtggaccaaccctgaaatactaaaaacaagggcaataattaaagaagtatagactctt

SEQ ID NO: 2776 - DNA, 3274 bp, Homo sapiens
ttccggtctgcagccttgtagtggggctggagcagagcctgccgcgaacccccrgagcccacgatccctcgtgccatccctcgaatccaccagcacgagcgtcccacccgcgcctgggaccatggccactgactcatgggccctggcggtggacgagcaggaagctgcggctgagtcgttgagcaacttgcatcttaaggaagagaaaatcaaaccagataccaatggtgctgttgtcaagaccaatgccaatgcagagaagacagatgaagaagagaaagaggacagagctgcccagtccttactcaacaagctgatcagaagcaaccttgttgataacacaaaccaagtggaagtcctgcagcgggatccaaactcccctctgtactcggtgaagtcttttgaagagcttcggctgaaaccacagcttctccaaggagtctatgccatgggtttcaatcgtccatccaagatacaagagaacgcattgccactgatgcttgctgagcccccacagaacttaattgcccaatctcagtctggtactggtaaaacagctgccttcktgctggccatgcttagccaagtagaacctgcaaacaaatacccccagtgtctatgtctctccccaacgtatgagctcgccctccaaacaggaaaagtgattgaacaaatgggcaaattttaccctgaactgaagctagcttatgctgttcgaggcaataaattggaaagaggccagaagatcagtgagcagattgtcattggcacccctgggactgtgctggactggtgctccaagctcaagttcattgatcccaagaaaatcaaggtgtttgttctggatgaggctgatgtcatgatagccactcagggccaccaagatcagagcatccgcatccagaggatgctgcccaggaactgccagatgctgcttttctccgccacctttgaagactctgtgtggaagtttgcccagaaagtggtcccagacccaaacgttatcaaactgaagcgtgaggaagagaccctggacaccatcaagcagtactatgtcctgtgcagcagcagagacgagaagttccaggccttgtgtaacctctacggggccatcaccattgctcaagccatgatcttctgccatactcgcaaaacagctagttggctggcagcagagctctcaaaagaaggccaccaggtggctctgctgagtggggagatgatggtggaacagagggctgcagtgattgagcgcttccgagagggcaaagagaaggttttggtgaccaccaacgtgtgtgcccgcggcattgatgttgaacaagtgtctgtcgtcatcaactttgatcttcccgtggacaaggacgggaatcctgacaatgagacctacctgcaccggatcgggcgcacgggccgctttggcaagaggggcctggcagtgaacatggtggacagcaagcacagcatgaacatcctgaayagaatccaggagcattttaataagaagatagaaagattggacacagatgatttggacgagattgagaaaatagccaactgagaagctccaccagccactgatgccagccctggcactgcccctgcacaggagacaagtgcgttyagggcacaggccccgacatcaccccaaggacaacggcasaagtagagagaaactacctacctcacttcaaattatgtttggacttracaaaaatgkatgcaaatgatgggggatrgwagaaaaaaattatttacacaaccttggaagattaggcatgaatacacagagatttaccttttggaagtttcatcttttaatttggccagtgtttccttcatgctaatctagatgctgtggctgattacttgcccaggatctcctgtggcagcctctgcttgttctctggcttggagtggatggggcagcctccagctcctgtggaagtaatggaatagtggtggaaagggaacacagagagggaggcttccagtaagataggtgtgtaagcccagccatcatgtttggaatggcatgaggcagcagaggaggcctgagagctgctgctttggacttgggggtgggacagctcatctgagtattgccagccccctgtcctagtgcccacagcagaagggaatttgttaaataagcatggaccaaaatgccaacctctcggttgtgtatatgggtttgtgtcacaggactgtgacctgttctcggtgggtgcagtctgtgtagagtgcacatctgattattggtgggtcctgtgcctgtgcttaagcaagtcctgtggagaagtcatcatggagaattagtggtggccctagcgtgccacaaaacctggtctcatgagcatttgcaacatcccttttacatccttaatatccccttaccccacagtagccccaaacaaatgtgatctgaggtttagatcctcagtgaaaattgtggtttcaagtcttcatggccagcctcaaggcagttctagatgtgatcagcagtagtcacaaattcttgttttgtctccacacccagaaggcaagttttgtcagagctggggaataatttcagatatttgacatcttgattataaagggcttctgaacatctgtgtttactgcctttggaatacaaacaggtgcaactgagggactagctacactaccaccatttatctgtccaaggcaagagtatcaccaaggcctttgctccagccttacttggcatctttgcgcaagatagtcagagcaaacaatagtaatggacacttctcacacctggccaaggctgttggtacccacgaaatgacagcaaagatgagaggaaactgaattgcaagagcaatatgaaaccccaaccaagaggagtactctgcagttctttggctttggtatagagtggccactttctctaggacctggaagaagagtttgatggctaagaacgattgtgatcctaggtcttctttgtacgcatctccrtatttaggccagatctgcctcctgggaagggaaggggccaatgtcagcctccaggtgatttctttaatctgacattacaaagagaccaacagactgccaattctaccacattcccctggtgggtactcgactatgtagttttctctatgcttctggtcaactctgacacatcttggaattcttgtaataagaaaagaaatttttatacttttttctccttccctgagtcctgtggaccaaccctgaaatactaaaaacaagggcaataattaaagaagtatagactctt

SEQ ID NO: 2777 - DNA, 1480 bp, Homo sapiens
cgcccgcttccggtctgcagccttgtagtggggctggagcagagcctgccgcgaacccccrgagcccacgatccctcgtgccatccctcgaatccaccagcacgagcgtcccacccgcgcctgggaccatggccactgactcatgggccctggcggtggacgagcaggaagctgcggctgagtcgcccacagaacttaattgcccaatctcagtctggtactggtaaaacagctgccttcktgctggccatgcttagccaagtagaacctgcaaacaaatacccccagtgtctatgtctctccccaacgtatgagctcgccctccaaacaggaaaagtgattgaacaaatgggcaaattttaccctgaactgaagctagcttatgctgttcgaggcaataaattggaaagaggccagaagatcagtgagcagattgtcattggcacccctgggactgtgctggactggtgctccaagctcaagttcattgatcccaagaaaatcaaggtgtttgttctggatgaggctgatgtcatgatagccactcagggccaccaagatcagagcatccgcatccagaggatgctgcccaggaactgccagatgctgcttttctccgccacctttgaagactctgtgtggaagtttgcccagaaagtggtcccagacccaaacgttatcaaactgaagcgtgaggaagagaccctggacaccatcaagcagtactatgtcctgtgcagcagcagagacgagaagttccaggccttgtgtaacctctacggggccatcaccattgctcaagccatgatcttctgccatactcgcaaaacagctagttggctggcagcagagctctcaaaagaaggccaccaggtggctctgctgagtggggagatgatggtggaacagagggctgcagtgattgagcgcttccgagagggcaaagagaaggttttggtgaccaccaacgtgtgtgcccgcggcattgatgttgaacaagtgtctgtcgtcatcaactttgatcttcccgtggacaaggacgggaatcctgacaatgagacctacctgcaccggatcgggcgcacgggccgctttggcaagaggggcctggcagtgaacatggtggacagcaagcacagcatgaacatcctgaayagaatccaggagcattttaataagaagatagaaagattggacacagatgatttggacgagattgagaaaatagccaactgagaagctccaccagccactgatgccagccctggcactgcccctgcacaggagacaagtgcgttyagggcacaggccccgacatcaccccaaggacaacggcasaagtagagagaaactacctacctcacttcaaattatgtttggacttracaaaaatgkatgcaaatgatgggggatrgwagaaaaaaattatttacacaaccttggaagattaggcatgaatacacagagatttaccttttgg

SEQ ID NO: 2778 - DNA, 1760 bp, Homo sapiens
gcccccggctcccggaggtcgacattttggtttccataggcaaagtcctaacaccacaattgacatagttaaaaaggggagacggtaacgtgtttggtagaggttacatatcttgctatagttgtttattttagttgctgagtgatacacagccctcaaagagtctgacattgtgcccatggttacacttgtccgggggagaccttgaatttggtgtggaagaaataacatcagtagttcagaggacagagctgcccagtccttactcaacaagctgatcagaagcaaccttgttgataacacaaaccaagtggaagtcctgcagcgggatccaaactcccctctgtactcggtgaagtcttttgaagagcttcggctgaaaccacagcttctccaaggagtctatgccatgggtttcaatcgtccatccaagatacaagagaacgcattgccactgatgcttgctgagcccccacagaacttaattgcccaatctcagtctggtactggtaaaacagctgccttcktgctggccatgcttagccaagtagaacctgcaaacaaatacccccagtgtctatgtctctccccaacgtatgagctcgccctccaaacaggaaaagtgattgaacaaatgggcaaattttaccctgaactgaagctagcttatgctgttcgaggcaataaattggaaagaggccagaagatcagtgagcagattgtcattggcacccctgggactgtgctggactggtgctccaagctcaagttcattgatcccaagaaaatcaaggtgtttgttctggatgaggctgatgtcatgatagccactcagggccaccaagatcagagcatccgcatccagaggatgctgcccaggaactgccagatgctgcttttctccgccacctttgaagactctgtgtggaagtttgcccagaaagtggtcccagacccaaacgttatcaaactgaagcgtgaggaagagaccctggacaccatcaagcagtactatgtcctgtgcagcagcagagacgagaagttccaggccttgtgtaacctctacggggccatcaccattgctcaagccatgatcttctgccatactcgcaaaacagctagttggctggcagcagagctctcaaaagaaggccaccaggtggctctgctgagtggggagatgatggtggaacagagggctgcagtgattgagcgcttccgagagggcaaagagaaggttttggtgaccaccaacgtgtgtgcccgcggcattgatgttgaacaagtgtctgtcgtcatcaactttgatcttcccgtggacaaggacgggaatcctgacaatgagacctacctgcaccggatcgggcgcacgggccgctttggcaagaggggcctggcagtgaacatggtggacagcaagcacagcatgaacatcctgaayagaatccaggagcattttaataagaagatagaaagattggacacagatgatttggacgagattgagaaaatagccaactgagaagctccaccagccactgatgccagccctggcactgcccctgcacaggagacaagtgcgttyagggcacaggccccgacatcaccccaaggacaacggcasaagtagagagaaactacctacctcacttcaaattatgtttggacttracaaaaatgkatgcaaatgatgggggatrgwagaaaaaaattatttacacaaccttggaagattaggcatgaatacacagagatttacc

SEQ ID NO: 2779 - DNA, 1470 bp, Homo sapiens
aatggaccactctcctcccacaaaaaattgtgcgagaaggcaaaggaaattttaacaaaaggatcagatgtgcaagaggttcgttgccctgatactgtctgtggagatgtgcatggtcaattacatgatcttatggaactctttagaattggtggaaaatcaccagatacaaactacttattaatgggtgactatgtagacagaggatattattcagtggagactgtgactcttcttgtagcattcattatccagaatgcattacaatattgagaggaaatcacaaaagccaacaaattacccaagtatatggcttttatgatgaatgtccgcgaaagtatgggaatgccaatgtttgaaaatactttacagatctctttgattatcttccacttayaactttagtagatggacagatattctgcctccatggtggcctgtctccatccacatacacactggatcatataagagccctgggtcatttacaagaagttccacatgagggcccaatgtatgatctattacggtcagatccagatgatcgtggtggatggggtatttcaccctgtgtgctggctacacatttggacaagacatttctgaaacctttaaccatgccaatggtctcacactggtttctcgtgcccaccagcttgtaatggagggataccattggtgtcatgatcagaatgtggttactattttcagtgcacccaattactgttattgttgtggtaaccaggctgcgatcatggaactagatgacgctttaagatattccttccttcagtttgacccagcactttgttgtggcgagcctcatgttacacagcacaccccagactacttcctataaatttctcctgggaaacctgcctttgtatgtggaagtatacctggcttattaaaatatatgtatttaaaaacaaaaagcaacagtaatctatgtgtttctgtaacaaattgggatctgtcttggcgttaaaccacatcatggaccaaatgtgccatactaatgatgagcatttagtacaatttgagactgaaatttagtacactatgttctagataggtcactctaacagtttgcctgctgtatttatagtaaccattttcctccagaccgttcaagcagaaaaggtaactaattgcttcatctccttttgtgcttatttggaaattttagttacagtgtttaactggcatggattaatagagttggagttttatttttaagaaaaattcacaagctaacttccactaatccattaccctttattttattgaaatgtataattaacttaactgaagaaagggttcttcttgggagtacgttgtcgtaacatttacagatttcccttcatttaaactaaattactgttgtatgttgatctgctgcatatttctgtcatgacagtgcttgcatcctatttggtgtagtcagcaaataaacttttcattttaaac

SEQ ID NO: 2780 - DNA, 6507 bp, Homo sapiens
gggccgcagcatctagatcgtcgtggcgaagccgactctccgggggatgcggccaatctccaagctaccctgggccgcaacttccgagcctcccagggcgctgtaaatgagcaaagatggatcaggaaggtgggggagatgggcagaaggccccgagcttccagtggcggaactacaagctcatcgtggatcctgccttggaccctgccctgcgcaggccttctcagaaggtgtaccgctatgatggagtccacttcagtgtcaacgactcaaagtatataccagtcgaagacctccaagacccccgttgccatgtcaggtccaaaaacagagacttttccctcccagtccctaagtttaagctggacgagttctatattggacagattccactgaaggaagtgacttttgcaaggctgaatgacaacgtgcgggagaccttcctgaaggatatgtgccgtaagtacggtgaggtggaagaggtaragatcctccttcacccccgtacgcgcaagcacctgggcctggcccgtgtgctcttcaccagcactcggggcgccaaggaaacggtcaaaaacctccaccttacctccgtcatgggcaacatcatccatgcccagcttgacatcaaaggacaacaacgaatgaaatactatgaactaattgtcaatggctcctacacccctcagactgtgcccactgggggcaaggccctgagtgagaagttccaaggctcgggtgcagccactgagacggccgaatcccgccgccgctcttcctctgacacagctgcctacccagcaggcaccactgcggtgggcactcctggcaacggcaccccytgctcccaggacacaagcttctccagcagccgacaagataccccatcttcctttggccagttcacacctcagtcctcccaaggaaccccctacacgtctcggggcagcaccccctactctcaggactctgcctactccagcagacctratgggccgccgccccctgagtaccccccacctcctccaccacccccgcacatctatgactttgtgaactccttggagctcatggaccgacttggggctcagtggggagggatgcccatgtccttccagatgcagacccagatgttaactcggctccatcagctgcggcagggcaagggattgattgccgcctcagctggcccccccggtggggcctttggggaggccttcctcccgtttccacccccgcaggaggcagcctacggcttgccgtatgctctatatgcacaggggcaggagggcagaggggcatactcacgggaggcctaccacctgcccatgccaatggcagccgagcccctgccctcctcctcagtctcgggagaggaggcccggctgccacccagggaagaagcagagctggcagagggcaagaccctcccgacagcaggcaccgtgggccgtgtgctcgccatgctggtccaggagatgaagagcatcatgcagcgagacctcaaccgcaagatggtggagaacgtggccttcggagcctttgaccagtggtgggagagcaaggaggagaaggccaagccattccagaacgcggccaagcagcaagccaaggaggaggataaagagaagacgaagctgaaggagcctggcctgctgtccctcgtggactgggccaagagcgggggcactacgggcatmgaggctttcgcctttgggtcagggctgagaggggccctgcggctgccttcattcaaggtaaagcggaaagagccatcggaaatttccgaggccagtgaggaaaagaggcctcgtccctccactcctgctgaggaagatgaagacgaccctgaacaagagaaggaggctggagagccaggacgtcyggggaccaagcccccgaagcgggacgaagagcgaggcaagacccagggcaagcaccgcaagtcctttgctctggacagygaaggggaggaggcatcccaggagtcctcctcggagaaggatgaggaggatgacgaggaagatgaggaagatgaagatygagaggaagctgtggataccacaaagaaggagacagaggtgtcggatggcgaggacgaggaaagcgattcgtcttccaaatgttctctgtatgctgactcagatggcgaaaatgacagcacatcagactccgagagcagcagctcttccagctcctcatcctcctcctcctcctcgtcctcatcctcctcgtcctcttcatcctctgagtcctcctctgaagatgaagaggaagaggagcggccagcagcccttccctcagcctccccgccccccagagaagtcccagtgcccacgccagcacctgtggaggtgccagtgccggaaagggttgcaggctccccagtcacacccctgcccgaacaggaggcgtctccagcaaggcctgcagtcaccaacctgaccaccccaaaacgcaagcggcggccccaggatgggccccgggagcaccagacaggctcagcccgcagcgaaggctactaccccatcagcaagaaggagaaggacaagtacctggacgtgtgcccagtctcrgcccggcagctggagggcgtggacactcaggggacgaaccgcgtgctgtccgagcgccggtccgagcagcggcggctgctgagcgccatcggtacctccgccatcatggacagtgacctgctgaaactcaaccagctcaagttccggaagaagaagctccgatttggccggagccggatccacgagtggggtctgtttgccatggaacccattgctgctgacgagatggtcatcgaatacgtgggtcagaacatccgtcagatggtggccgacatgcgggagaagcgctacgtgcaggagggcattggcagcagctacctgttccgggtggaccacgacaccatcatcgatgccaccaagtgtggcaacctggccagattcatcaaccactgctgcacgcctaactgctacgccaaggtcatcaccatcgagtcccagaagaagatcgtgatctactccaagcagcccattggcgtggacgaggagatcacctacgactacaagttcccactggaagacaacaagatcccgtgtctgtgtggcacagagagctgccggggctccctaaactgaggtggggcaggatgggtgcccacacccctatttattccccctggtgccctgagctcccagcacccccccagccttagtgggctcagcagggcccacatgcccccatctccaagcgtggggttgggggccccaagcccagcgagggagcctcagtccctggaggcagcttctgcctctcctgtcrcccctgcccaccaccccctgattgtttttctttgcggagaagaagctgtaaatgttttgtagcagccagcagctgtttcctgtggaaacctggggtgccggcctgtacagattctgtcctggggggctacacagtcctctygctttgtgttaatggggacttccccttacgccctgcgtgtacccctccccagtttaggggtctctggggcagtggccatgttctccccctgggggggctctgcacccccagtcctggggactccgtgcctggaaccctgcctcatctgttcctgccagaccctgagggtcacccttccaccctggtgtcactccccggctcagccaggccaggatggcggggtgggtcccttttgctgggctggactgtacatatgttaatagcgcaaacccgacgccacatttttataattgtgattaaactttattgtacaaaagtgtttggtcggtgtatttgggcaggagcgaggggttgggggtagagggcacggagggttgtgcaagttgaagagagggaaaagtgggtacctgaagtgtggggcaggtaaaggggccttcaggcaagagcccagacctgcagagacagtccgagactgtctcggaccccctgacaggctgcagcagccgcacccgcaccaggaataccccaccagtgcccgccagggtggtgccaaggtcaggcctccccttcctacaatcacagctgcagctggacctccggcctcctgggaagcccagcaggagggaaggcctgaggtcacactgtgggatgaggtcaccgctggctccacccacagccccagaccccttcagcccactctgcaagttcgagcttcatccccaccaagttctccgctggacccagatgccagtggagcacagagcggccgccagggggcgccttggggcaagagtggtgggggttgtggctgggcgggtctctgttcctggaatggggcaggagggagaaggaggagccagcggaaggacggtgtgcgggccggccagccctggacgaaagaagagggcccctccaggccagtctgggcaccctgggatagcggctgcagccaggcatggccgactctgcacaggcccagaagctggtgtacctggtcacagggggctgtggcttcctgggagagcacgtggtgcgaatgctgctgcagcgggagccccggctcggggagctgcgggtctttgaccaacacctgggtccctggctggaggagctgaagacagggcctgtgagggtgactgccatccagggggacgtgacccaggcccatgaggtggcagcagctgtggccggagcccatgtggtcatccacacggctgggctggtagacgtgtttggcagggccagtcccaagaccatccatgaggtcaacgtgcagggtacccggaacgtgatcgaggcttgtgtgcagaccggaacacggttcctggtctacaccagcagcatggaagttgtggggcctaacaccaaaggtcaccccttctacaggggcaacgaagacaccccatacgaagcagtgcacaggcacccctatccttgcagcaaggccctggccgagtggctggtcctggaggccaacgggaggaaggtccgtggggggctgcccctggtgacgtgtgcccttcgtcccacgggcatctacggtgaaggccaccagatcatgagggacttctaccgccagggcctgcgcctgggaggttggctcttccgggccatcccggcctctgtggagcatggccgggtctatgtgggcaatgttgcctggatgcacgtgctggcagcccgggagctggagcagcgggcarccctgatgggcggccaggtatacttctgctacgatggatcaccctacaggagctaygaggatttcaacatggagttcctgggcccctgcggactgcggctggtgggcgcccgcccattgctgccctactggctgctggtgttcctggctgccctcaatgccctgctgcagtggctgctgcrgccactggtgctctacgcacccctgctgaacccctacacgctggccgtggccaacaccaccttcaccgtcagcaccgacaaggctcagcgccatttcggctatgagccccygttctcgtgggaggatagccggacccgyaccattctctgggtacaggccgctacgggttcagcccagtgacggtggggctggggcctggaggcccagatacagcacatccacccaggtcccgagccctcacaccctggacgggaagggacagctgcattccagagcaggaggcagggctctggggccagaatggctgtccttgtcgtagagccctccacattttctttttcttttttgagacagggtcttgctctgtcacccagactggagtgcagtggtgtgatcatagctcactgcaccctcaacctcctgggttcaagcaatcctcctgcctcagcctcctgaacagctgggaccacaggtgcacgccaccacacctggcttttttttgttgtttttagagacagggtctcactatattgctcaggctggtcttgaactcctgggctcaagtgatcttcccacgtgggcctcccaaaacgctggaactacaagtgtgagccaccgcgcctggcccaagccctccacattttcaatccaggagccttgagtctgtgttgtgtcctgacacctccaagttctagggccgtcaggacacgggagggtttggggacagagtgtccttcctctgtcctctcatcccagtcctgatggccgcttggtgagtgtctggtgccctggtggcctgccccagctctcttctggctttctgagcaggaagcgagcagaggctccacaggsttacgctgctctcctgacagccacacgcgaccctcggtgcagagtgcagaggcggctctggttcctccagccacctcagtccctctttgggaggtgatgttcccattgtttttcaaaggcctcaccttcaactgtctgtcttagaattcccctctggagggctatggcctccctatgctttcacttcccacctctctacctaagttccttcccagcacatcgccagccctgggcctggggatgtccccaatgctgtacctggctgaccccggattaaaagcctcatccacgaccgt

SEQ ID NO: 2781 - DNA, 6351 bp, Homo sapiens
gggccgcagcatctagatcgtcgtggcgaagccgactctccgggggatgcggccaatctccaagctaccctgggccgcaacttccgagcctcccagggcgctgtaaatgagcaaagatggatcaggaaggtgggggagatgggcagaaggccccgagcttccagtggcggaactacaagctcatcgtggatcctgccttggaccctgccctgcgcaggccttctcagaaggtgtaccgctatgatggagtccacttcagtgtcaacgactcaaagtatataccagtcgaagacctccaagacccccgttgccatgtcaggtccaaaaacagagacttttccctcccagtccctaagtttaagctggacgagttctatattggacagattccactgaaggaagtgacttttgcaaggctgaatgacaacgtgcgggagaccttcctgaaggatatgtgccgtaagtacggtgaggtggaagaggtaragatcctccttcacccccgtacgcgcaagcacctgggcctggcccgtgtgctcttcaccagcactcggggcgccaaggaaacggtcaaaaacctccaccttacctccgtcatgggcaacatcatccatgcccagcttgacatcaaaggacaacaacgaatgaaatactatgaactaattgtcaatggctcctacacccctcagactgtgcccactgggggcaaggccctgagtgagaagttccaaggctcgggtgcagccactgagacggccgaatcccgccgccgctcttcctctgacacagctgcctacccagcaggcaccactgcggtgggcactcctggcaacggcaccccytgctcccaggacacaagcttctccagcagccgacaagataccccatcttcctttggccagttcacacctcagtcctcccaaggaaccccctacacgtctcggggcagcaccccctactctcaggactctgcctactccagcagacctratgggccgccgccccctgagtaccccccacctcctccaccacccccgcacatctatgactttgtgaactccttggagctcatggaccgacttggggctcagtggggagggatgcccatgtccttccagatgcagacccagatgttaactcggctccatcagctgcggcagggcaagggattgattgccgcctcagctggcccccccggtggggcctttggggaggccttcctcccgtttccacccccgcaggaggcagcctacggcttgccgtatgctctatatgcacaggggcaggagggcagaggggcatactcacgggaggcctaccacctgcccatgccaatggcagccgagcccctgccctcctcctcagtctcgggagaggaggcccggctgccacccagggaagaagcagagctggcagagggcaagaccctcccgacagcaggcaccgtgggccgtgtgctcgccatgctggtccaggagatgaagagcatcatgcagcgagacctcaaccgcaagatggtggagaacgtggccttcggagcctttgaccagtggtgggagagcaaggaggagaaggccaagccattccagaacgcggccaagcagcaagccaaggaggaggataaagagaagacgaagctgaaggagcctggcctgctgtccctcgtggactgggccaagagcgggggcactacgggcatmgaggctttcgcctttgggtcagggctgagaggggccctgcggctgccttcattcaaggtaaagcggaaagagccatcggaaatttccgaggccagtgaggaaaagaggcctcgtccctccactcctgctgaggaagatgaagacgaccctgaacaagagaaggaggctggagagccaggacgtcyggggaccaagcccccgaagcgggacgaagagcgaggcaagacccagggcaagcaccgcaagtcctttgctctggacagygaaggggaggaggcatcccaggagtcctcctcggagaaggatgaggaggatgacgaggaagatgaggaagatgaagatygagaggaagctgtggataccacaaagaaggagacagaggtgtcggatggcgaggacgaggaaagcgattcgtcttccaaatgttctctgtatgctgactcagatggcgaaaatgacagcacatcagactccgagagcagcagctcttccagctcctcatcctcctcctcctcctcgtcctcatcctcctcgtcctcttcatcctctgagtcctcctctgaagatgaagaggaagaggagcggccagcagcccttccctcagcctccccgccccccagagaagtcccagtgcccacgccagcacctgtggaggtgccagtgccggaaagggttgcaggctccccagtcacacccctgcccgaacaggaggcgtctccagcaaggcctgcagtcaccaacctgaccaccccaaaacgcaagcggcggccccaggatgggccccgggagcaccagacaggctcagcccgcagcgaaggctactaccccatcagcaagaaggagaaggacaagtacctggacgtgtgcccagtctcrgcccggcagctggagggcgtggacactcaggggacgaaccgcgtgctgtccgagcgccggtccgagcagcggcggctgctgagcgccatcggtacctccgccatcatggacagtgacctgctgaaactcaaccagctcaagttccggaagaagaagctccgatttggccggagccggatccacgagtggggtctgtttgccatggaacccattgctgctgacgagatggtcatcgaatacgtgggtcagaacatccgtcagatggtggccgacatgcgggagaagcgctacgtgcaggagggcattggcagcagctacctgttccgggtggaccacgacaccatcatcgatgccaccaagtgtggcaacctggccagattcatcaaccactgctgcacgcctaactgctacgccaaggtcatcaccatcgagtcccagaagaagatcgtgatctactccaagcagcccattggcgtggacgaggagatcacctacgactacaagttcccactggaagacaacaagatcccgtgtctgtgtggcacagagagctgccggggctccctaaactgaggtggggcaggatgggtgcccacacccctatttattccccctggtgccctgagctcccagcacccccccagccttagtgggctcagcagggcccacatgcccccatctccaagcgtggggttgggggccccaagcccagcgagggagcctcagtccctggaggcagcttctgcctctcctgtcrcccctgcccaccaccccctgattgtttttctttgcggagaagaagctgtaaatgttttgtagcagccagcagctgtttcctgtggaaacctggggtgccggcctgtacagattctgtcctggggggctacacagtcctctygctttgtgttaatggggacttccccttacgccctgcgtgtacccctccccagtttaggggtctctggggcagtggccatgttctccccctgggggggctctgcacccccagtcctggggactccgtgcctggaaccctgcctcatctgttcctgccagaccctgagggtcacccttccaccctggtgtcactccccggctcagccaggccaggatggcggggtgggtcccttttgctgggctggactgtacatatgttaatagcgcaaacccgacgccacatttttataattgtgattaaactttattgtacaaaagtgtttggtcggtgtatttgggcaggagcgaggggttgggggtagagggcacggagggttgtgcaagttgaagagagggaaaagtgggtacctgaagtgtggggcaggtaaaggggccttcaggcaagagcccagacctgcagagacagtccgagactgtctcggaccccctgacaggctgcagcagccgcacccgcaccaggaataccccaccagtgcccgccagggtggtgccaaggtcaggcctccccttcctacaatcacagctgcagctggacctccggcctcctgggaagcccagcaggagggaaggcctgaggtcacactgtgggatgaggtcaccgctggctccacccacagccccagaccccttcagcccactctgcaagttcgagcttcatccccaccaagttctccgctggacccagatgccagtggagcacagagcggccgccagggggcgccttggggcaagagtggtgggggttgtggctgggcgggtctctgttcctggaatggggcaggagggagaaggaggagccagcggaaggacggtgtgcgggccggccagccctggacgaaagaagagggcccctccaggccagtctgggcaccctgggatagcggctgcagccaggcatggccgactctgcacaggcccagaagctggtgtacctggtcacagggggctgtggcttcctgggagagcacgtggtgcgaatgctgctgcagcgggagccccggctcggggagctgcgggtctttgaccaacacctgggtccctggctggaggagctgaagacaggtacccggaacgtgatcgaggcttgtgtgcagaccggaacacggttcctggtctacaccagcagcatggaagttgtggggcctaacaccaaaggtcaccccttctacaggggcaacgaagacaccccatacgaagcagtgcacaggcacccctatccttgcagcaaggccctggccgagtggctggtcctggaggccaacgggaggaaggtccgtggggggctgcccctggtgacgtgtgcccttcgtcccacgggcatctacggtgaaggccaccagatcatgagggacttctaccgccagggcctgcgcctgggaggttggctcttccgggccatcccggcctctgtggagcatggccgggtctatgtgggcaatgttgcctggatgcacgtgctggcagcccgggagctggagcagcgggcarccctgatgggcggccaggtatacttctgctacgatggatcaccctacaggagctaygaggatttcaacatggagttcctgggcccctgcggactgcggctggtgggcgcccgcccattgctgccctactggctgctggtgttcctggctgccctcaatgccctgctgcagtggctgctgcrgccactggtgctctacgcacccctgctgaacccctacacgctggccgtggccaacaccaccttcaccgtcagcaccgacaaggctcagcgccatttcggctatgagccccygttctcgtgggaggatagccggacccgyaccattctctgggtacaggccgctacgggttcagcccagtgacggtggggctggggcctggaggcccagatacagcacatccacccaggtcccgagccctcacaccctggacgggaagggacagctgcattccagagcaggaggcagggctctggggccagaatggctgtccttgtcgtagagccctccacattttctttttcttttttgagacagggtcttgctctgtcacccagactggagtgcagtggtgtgatcatagctcactgcaccctcaacctcctgggttcaagcaatcctcctgcctcagcctcctgaacagctgggaccacaggtgcacgccaccacacctggcttttttttgttgtttttagagacagggtctcactatattgctcaggctggtcttgaactcctgggctcaagtgatcttcccacgtgggcctcccaaaacgctggaactacaagtgtgagccaccgcgcctggcccaagccctccacattttcaatccaggagccttgagtctgtgttgtgtcctgacacctccaagttctagggccgtcaggacacgggagggtttggggacagagtgtccttcctctgtcctctcatcccagtcctgatggccgcttggtgagtgtctggtgccctggtggcctgccccagctctcttctggctttctgagcaggaagcgagcagaggctccacaggsttacgctgctctcctgacagccacacgcgaccctcggtgcagagtgcagaggcggctctggttcctccagccacctcagtccctctttgggaggtgatgttcccattgtttttcaaaggcctcaccttcaactgtctgtcttagaattcccctctggagggctatggcctccctatgctttcacttcccacctctctacctaagttccttcccagcacatcgccagccctgggcctggggatgtccccaatgctgtacctggctgaccccggattaaaagcctcatccacgaccgt

SEQ ID NO: 2782 - DNA, 2481 bp, Homo sapiens
cccctccaggccagtctgggcaccctgggatagcggctgcaggtaggcagaggcgctgccagtgcccaggtggcctttccctccatccggcccttcccaccttcctataaccttccctccacctccctcaactcctggcctccccacccttttactgccttcaaatctctctccctaaaccctgaccccttcctgcaccccaagcccgcccctctctccgtaactcagccatcagcaggggcagacggcaggtggcctggttgctgcagctcccaggatcagctctgccctcccgccaaacgccagcctcgtcaccgctccagggcacctccagcagtaacaggtggttgcagcaggtggcagccagcccctggatgagccaaggtctcttccccagccaggcatggccgactctgcacaggcccagaagctggtgtacctggtcacagggggctgtggcttcctgggagagcacgtggtgcgaatgctgctgcagcgggagccccggctcggggagctgcgggtctttgaccaacacctgggtccctggctggaggagctgaagacagggcctgtgagggtgactgccatccagggggacgtgacccaggcccatgaggtggcagcagctgtggccggagcccatgtggtcatccacacggctgggctggtagacgtgtttggcagggccagtcccaagaccatccatgaggtcaacgtgcagggtacccggaacgtgatcgaggcttgtgtgcagaccggaacacggttcctggtctacaccagcagcatggaagttgtggggcctaacaccaaaggtcaccccttctacaggggcaacgaagacaccccatacgaagcagtgcacaggcacccctatccttgcagcaaggccctggccgagtggctggtcctggaggccaacgggaggaaggtccgtggggggctgcccctggtgacgtgtgcccttcgtcccacgggcatctacggtgaaggccaccagatcatgagggacttctaccgccagggcctgcgcctgggaggttggctcttccgggccatcccggcctctgtggagcatggccgggtctatgtgggcaatgttgcctggatgcacgtgctggcagcccgggagctggagcagcgggcarccctgatgggcggccaggtatacttctgctacgatggatcaccctacaggagctaygaggatttcaacatggagttcctgggcccctgcggactgcggctggtgggcgcccgcccattgctgccctactggctgctggtgttcctggctgccctcaatgccctgctgcagtggctgctgcrgccactggtgctctacgcacccctgctgaacccctacacgctggccgtggccaacaccaccttcaccgtcagcaccgacaaggctcagcgccatttcggctatgagccccygttctcgtgggaggatagccggacccgyaccattctctgggtacaggccgctacgggttcagcccagtgacggtggggctggggcctggaggcccagatacagcacatccacccaggtcccgagccctcacaccctggacgggaagggacagctgcattccagagcaggaggcagggctctggggccagaatggctgtccttgtcgtagagccctccacattttctttttcttttttgagacagggtcttgctctgtcacccagactggagtgcagtggtgtgatcatagctcactgcaccctcaacctcctgggttcaagcaatcctcctgcctcagcctcctgaacagctgggaccacaggtgcacgccaccacacctggcttttttttgttgtttttagagacagggtctcactatattgctcaggctggtcttgaactcctgggctcaagtgatcttcccacgtgggcctcccaaaacgctggaactacaagtgtgagccaccgcgcctggcccaagccctccacattttcaatccaggagccttgagtctgtgttgtgtcctgacacctccaagttctagggccgtcaggacacgggagggtttggggacagagtgtccttcctctgtcctctcatcccagtcctgatggccgcttggtgagtgtctggtgccctggtggcctgccccagctctcttctggctttctgagcaggaagcgagcagaggctccacaggsttacgctgctctcctgacagccacacgcgaccctcggtgcagagtgcagaggcggctctggttcctccagccacctcagtccctctttgggaggtgatgttcccattgtttttcaaaggcctcaccttcaactgtctgtcttagaattcccctctggagggctatggcctccctatgctttcacttcccacctctctacctaagttccttcccagcacatcgccagccctgggcctggggatgtccccaatgctgtacctggctgaccccggattaaaagcctcatccacgaccgt

SEQ ID NO: 2783 - DNA, 4918 bp, Homo sapiens
gggccgcagcatctagatcgtcgtggcgaagccgactctccgggggatgcggccaatctccaagctaccctgggccgcaacttccgagcctcccagggcgctgtaaatgagcaaagatggatcaggaaggtgggggagatgggcagaaggccccgagcttccagtggcggaactacaagctcatcgtggatcctgccttggaccctgccctgcgcaggccttctcagaaggtgtaccgctatgatggagtccacttcagtgtcaacgactcaaagtatataccagtcgaagacctccaagacccccgttgccatgtcaggtccaaaaacagagacttttccctcccagtccctaagtttaagctggacgagttctatattggacagattccactgaaggaagtgacttttgcaaggctgaatgacaacgtgcgggagaccttcctgaaggatatgtgccgtaagtacggtgaggtggaagaggtaragatcctccttcacccccgtacgcgcaagcacctgggcctggcccgtgtgctcttcaccagcactcggggcgccaaggaaacggtcaaaaacctccaccttacctccgtcatgggcaacatcatccatgcccagcttgacatcaaaggacaacaacgaatgaaatactatgaactaattgtcaatggctcctacacccctcagactgtgcccactgggggcaaggccctgagtgagaagttccaaggctcgggtgcagccactgagacggccgaatcccgccgccgctcttcctctgacacagctgcctacccagcaggcaccactgcggtgggcactcctggcaacggcaccccytgctcccaggacacaagcttctccagcagccgacaagataccccatcttcctttggccagttcacacctcagtcctcccaaggaaccccctacacgtctcggggcagcaccccctactctcaggactctgcctactccagcagacctratgggccgccgccccctgagtaccccccacctcctccaccacccccgcacatctatgactttgtgaactccttggagctcatggaccgacttggggctcagtggggagggatgcccatgtccttccagatgcagacccagatgttaactcggctccatcagctgcggcagggcaagggattgattgccgcctcagctggcccccccggtggggcctttggggaggccttcctcccgtttccacccccgcaggaggcagcctacggcttgccgtatgctctatatgcacaggggcaggagggcagaggggcatactcacgggaggcctaccacctgcccatgccaatggcagccgagcccctgccctcctcctcagtctcgggagaggaggcccggctgccacccagggaagaagcagagctggcagagggcaagaccctcccgacagcaggcaccgtgggccgtgtgctcgccatgctggtccaggagatgaagagcatcatgcagcgagacctcaaccgcaagatggtggagaacgtggccttcggagcctttgaccagtggtgggagagcaaggaggagaaggccaagccattccagaacgcggccaagcagcaagccaaggaggaggataaagagaagacgaagctgaaggagcctggcctgctgtccctcgtggactgggccaagagcgggggcactacgggcatmgaggctttcgcctttgggtcagggctgagaggggccctgcggctgccttcattcaaggtaaagcggaaagagccatcggaaatttccgaggccagtgaggaaaagaggcctcgtccctccactcctgctgaggaagatgaagacgaccctgaacaagagaaggaggctggagagccaggacgtcyggggaccaagcccccgaagcgggacgaagagcgaggcaagacccagggcaagcaccgcaagtcctttgctctggacagygaaggggaggaggcatcccaggagtcctcctcggagaaggatgaggaggatgacgaggaagatgaggaagatgaagatygagaggaagctgtggataccacaaagaaggagacagaggtgtcggatggtgagcacaagacagtgaaatcgactttgggctcggaggagggagaagtcccagtgcccacgccagcacctgtggaggtgccagtgccggaaagggttgcaggctccccagtcacacccctgcccgaacaggaggcgtctccagcaaggcctgcaggccccacggaggagtcaccccccagtgcgcctctgcgtcccccagaaccacctgctgggcccccggcccctgccccacgccccgatgagcgtccctcttctcccatccccctcctgcccccacccaagaaacgccggaaaactgtctccttctctgccatcgaggtggtgccagccccggagccccctccagccacaccgccgcaggccaagtttcccggcccagcctcccgcaaggctccccggggcgtggagcggaccatccgcaacctgcccctggaccacgcatctctggtcaagagttggcccgaggaggtgtcccgaggaggccggagccgggctggaggccgaggccgcctcaccgaggaagaggaggctgagccagggacagaggtggacctggcggtcctggccgacctggccctgacccctgcccggcgcgggctgcctgccctgcctgctgttgaagactcagaggccacagagacatcggacgaggccgagcgccctaggcccctgctcagccacatcctcctggagcacaactatgccctggccgtcaagcccacgccccctgcgccagccctgcggcccccggagccagtgcccgcacccgccgccctcttcagttccccagctgatgaggtcctggaggcccccgagccacgcagtgagtttgaacagatgaccatcctgtatgacatttggaactcgggcctggactcagaggacatgagttacctgcggcttacgtacgagcggctgctgcagcagacaagcggggctgactggctcaacgacactcactgggtccatcacacaaatatcctgagtgatgggccccgggagcaccagacaggctcagcccgcagcgaaggctactaccccatcagcaagaaggagaaggacaagtacctggacgtgtgcccagtctcrgcccggcagctggagggcgtggacactcagttccggaagaagaagctccgatttggccggagccggatccacgagtggggtctgtttgccatggaacccattgctgctgacgagatggtcatcgaatacgtgggtcagaacatccgtcagatggtggccgacatgcgggagaagcgctacgtgcaggagggcattggcagcagctacctgttccgggtggaccacgacaccatcatcgatgccaccaagtgtggcaacctggccagattcatcaaccactgctgcacgcctaactgctacgccaaggtcatcaccatcgagtcccagaagaagatcgtgatctactccaagcagcccattggcgtggacgaggagatcacctacgactacaagttcccactggaagacaacaagatcccgtgtctgtgtggcacagagagctgccggggctccctaaactgaggtggggcaggatgggtgcccacacccctatttattccccctggtgccctgagctcccagcacccccccagccttagtgggctcagcagggcccacatgcccccatctccaagcgtggggttgggggccccaagcccagcgagggagcctcagtccctggaggcagcttctgcctctcctgtcrcccctgcccaccaccccctgattgtttttctttgcggagaagaagctgtaaatgttttgtagcagccagcagctgtttcctgtggaaacctggggtgccggcctgtacagattctgtcctggggggctacacagtcctctygctttgtgttaatggggacttccccttacgccctgcgtgtacccctccccagtttaggggtctctggggcagtggccatgttctccccctgggggggctctgcacccccagtcctggggactccgtgcctggaaccctgcctcatctgttcctgccagaccctgagggtcacccttccaccctggtgtcactccccggctcagccaggccaggatggcggggtgggtcccttttgctgggctggactgtacatatgttaatagcgcaaacccgacgccacatttttataattgtgattaaactttattgtacaaaagtgtttggtcggtgtatttgggcaggagcgaggggttgggggtagagggcacggagggttgtgcaagttgaagagagggaaaagtgggtacctgaagtgtggggcaggtaaaggggccttcaggcaagagcccagacctgcagagacagtccgagactgtctcggaccccctgacaggctgcagcagccgcacccgcaccaggaataccccaccagtgcccgccagggtggtgccaaggtcaggcctccccttcctacaatcacagctgcagctggacctccggcctcctgggaagcccagcaggagggaaggcctgaggtcacactgtgggatgaggtcaccgctggctccacccacagccccagaccccttcagcccactctgcaagttcgagcttcatccccaccaagttctccgctggacccagatgccagtggagcacagagcggccgccagggggcgccttggggcaagagtggtgggggttgtggctgggcgggtctctgttcctggaatggggcaggagggagaaggaggagccagcggaaggacggtgtgcgggccggccagccctggacgaaagaagagggcccctccaggccagtctgggcaccctgggatagcggctgcag

SEQ ID NO: 2784 - DNA, 4667 bp, Homo sapiens
atggtccttggggccagagatacagggagtgaggtgccttctgggtcagggcatgggccctgcacaccccctccggccccagctaattttgaggatgtggcacctacagggagcggggagccaggggctacccgggagtctcccaaggcaaatggacagaaccaggcttctccatgctcttctggagacgacatggagatctccgacgacgaccggggtggctcaccccctccggccccgacgccccctcagcagcctccgccacctccccctcccccgccgcctcctcctccctacctggcgtcccttcctcttggttatcctccccaccaacctgcctacctcctcccacccagacctratgggccgccgccccctgagtaccccccacctcctccaccacccccgcacatctatgactttgtgaactccttggagctcatggaccgacttggggctcagtggggagggatgcccatgtccttccagatgcagacccagatgttaactcggctccatcagctgcggcagggcaagggattgattgccgcctcagctggcccccccggtggggcctttggggaggccttcctcccgtttccacccccgcaggaggcagcctacggcttgccgtatgctctatatgcacaggggcaggagggcagaggggcatactcacgggaggcctaccacctgcccatgccaatggcagccgagcccctgccctcctcctcagtctcgggagaggaggcccggctgccacccagggaagaagcagagctggcagagggcaagaccctcccgacagcaggcaccgtgggccgtgtgctcgccatgctggtccaggagatgaagagcatcatgcagcgagacctcaaccgcaagatggtggagaacgtggccttcggagcctttgaccagtggtgggagagcaaggaggagaaggccaagccattccagaacgcggccaagcagcaagccaaggaggaggataaagagaagacgaagctgaaggagcctggcctgctgtccctcgtggactgggccaagagcgggggcactacgggcatmgaggctttcgcctttgggtcagggctgagaggggccctgcggctgccttcattcaaggtaaagcggaaagagccatcggaaatttccgaggccagtgaggaaaagaggcctcgtccctccactcctgctgaggaagatgaagacgaccctgaacaagagaaggaggctggagagccaggacgtcyggggaccaagcccccgaagcgggacgaagagcgaggcaagacccagggcaagcaccgcaagtcctttgctctggacagygaaggggaggaggcatcccaggagtcctcctcggagaaggatgaggaggatgacgaggaagatgaggaagatgaagatygagaggaagctgtggataccacaaagaaggagacagaggtgtcggatggcgaggacgaggaaagcgattcgtcttccaaatgttctctgtatgctgactcagatggcgaaaatgacagcacatcagactccgagagcagcagctcttccagctcctcatcctcctcctcctcctcgtcctcatcctcctcgtcctcttcatcctctgagtcctcctctgaagatgaagaggaagaggagcggccagcagcccttccctcagcctccccgccccccagagaagtcccagtgcccacgccagcacctgtggaggtgccagtgccggaaagggttgcaggctccccagtcacacccctgcccgaacaggaggcgtctccagcaaggcctgcaggccccacggaggagtcaccccccagtgcgcctctgcgtcccccagaaccacctgctgggcccccggcccctgccccacgccccgatgagcgtccctcttctcccatccccctcctgcccccacccaagaaacgccggaaaactgtctccttctctgccatcgaggtggtgccagccccggagccccctccagccacaccgccgcaggccaagtttcccggcccagcctcccgcaaggctccccggggcgtggagcggaccatccgcaacctgcccctggaccacgcatctctggtcaagagttggcccgaggaggtgtcccgaggaggccggagccgggctggaggccgaggccgcctcaccgaggaagaggaggctgagccagggacagaggtggacctggcggtcctggccgacctggccctgacccctgcccggcgcgggctgcctgccctgcctgctgttgaagactcagaggccacagagacatcggacgaggccgagcgccctaggcccctgctcagccacatcctcctggagcacaactatgccctggccgtcaagcccacgccccctgcgccagccctgcggcccccggagccagtgcccgcacccgccgccctcttcagttccccagctgatgaggtcctggaggcccccgaggtggtggtggctgaggcggaggagcccaagccgcagcaactgcagcagcagcgggaggagggcgaagaggagggggaggaagagggggaggaagaggaggaggagtcctctgacagcagcagcagcagcgatggggagggcgccctccggaggcgcagcctccgctcccacgcccggcgccgccgccctccgcccccacccccgccgccaccgccccgcgcctacgagccacgcagtgagtttgaacagatgaccatcctgtatgacatttggaactcgggcctggactcagaggacatgagttacctgcggcttacgtacgagcggctgctgcagcagacaagcggggctgactggctcaacgacactcactgggtccatcacacaatcaccaacctgaccaccccaaaacgcaagcggcggccccaggatgggccccgggagcaccagacaggctcagcccgcagcgaaggctactaccccatcagcaagaaggagaaggacaagtacctggacgtgtgcccagtctcrgcccggcagctggagggcgtggacactcaggggacgaaccgcgtgctgtccgagcgccggtccgagcagcggcggctgctgagcgccatcggtacctccgccatcatggacagtgacctgctgaaactcaaccagctcaagttccggaagaagaagctccgatttggccggagccggatccacgagtggggtctgtttgccatggaacccattgctgctgacgagatggtcatcgaatacgtgggtcagaacatccgtcagatggtggccgacatgcgggagaagcgctacgtgcaggagggcattggcagcagctacctgttccgggtggaccacgacaccatcatcgatgccaccaagtgtggcaacctggccagattcatcaaccactgctgcacgcctaactgctacgccaaggtcatcaccatcgagtcccagaagaagatcgtgatctactccaagcagcccattggcgtggacgaggagatcacctacgactacaagttcccactggaagacaacaagatcccgtgtctgtgtggcacagagagctgccggggctccctaaactgaggtggggcaggatgggtgcccacacccctatttattccccctggtgccctgagctcccagcacccccccagccttagtgggctcagcagggcccacatgcccccatctccaagcgtggggttgggggccccaagcccagcgagggagcctcagtccctggaggcagcttctgcctctcctgtcrcccctgcccaccaccccctgattgtttttctttgcggagaagaagctgtaaatgttttgtagcagccagcagctgtttcctgtggaaacctggggtgccggcctgtacagattctgtcctggggggctacacagtcctctygctttgtgttaatggggacttccccttacgccctgcgtgtacccctccccagtttaggggtctctggggcagtggccatgttctccccctgggggggctctgcacccccagtcctggggactccgtgcctggaaccctgcctcatctgttcctgccagaccctgagggtcacccttccaccctggtgtcactccccggctcagccaggccaggatggcggggtgggtcccttttgctgggctggactgtacatatgttaatagcgcaaacccgacgccacatttttataattgtgattaaactttattgtacaaaagtgtttggtcggtgtatttgggcaggagcgaggggttgggggtagagggcacggagggttgtgcaagttgaagagagggaaaagtgggtacctgaagtgtggggcaggtaaaggggccttcaggcaagagcccagacctgcagagacagtccgagactgtctcggaccccctgacaggctgcagcagccgcacccgcaccaggaataccccaccagtgcccgccagggtggtgccaaggtcaggcctccccttcctacaatcacagctgcagctggacctccggcctcctgggaagcccagcaggagggaaggcctgaggtcacactgtgggatgaggtcaccgctggctccacccacagccccagaccccttcagcccactctgcaagttcgagcttcatccccaccaagttctccgctggacccagatgccagtggagcacagagcggccgcca

SEQ ID NO: 2785 - DNA, 2318 bp, Homo sapiens
cccctccaggccagtctgggcaccctgggatagcggctgcaggtaggcagaggcgctgccagtgcccaggtggcctttccctccatccggcccttcccaccttcctataaccttccctccacctccctcaactcctggcctccccacccttttactgccttcaaatctctctccctaaaccctgaccccttcctgcaccccaagcccgcccctctctccgtaactcagccatcagcaggggcagacggcaggtggcctggttgctgcagctcccaggatcagctctgccctcccgccaaacgccagcctcgtcaccgctccagggcacctccagcagtaacaggtggttgcagcaggtggcagccagcccctggatgagccaaggtctcttccccagccaggcatggccgactctgcacaggcccagaagctggtgtacctggtcacagggggctgtggcttcctgggagagcacgtggtgcgaatgctgctgcagcgggagccccggctcggggagctgcgggtctttgaccaacacctgggtccctggctggaggagctgaagacagggcctgtgagggtgactgccatccagggggacgtgacccaggcccatgaggtggcagcagctgtggccggagcccatgtggtcatccacacggctgggctggtagacgtgtttggcagggccagtcccaagaccatccatgaggtcaacgtgcagggtacccggaacgtgatcgaggcttgtgtgcagaccggaacacggttcctggtctacaccagcagcatggaagttgtggggcctaacaccaaaggtcaccccttctacaggggcaacgaagacaccccatacgaagcagtgcacaggcacccctatccttgcagcaaggccctggccgagtggctggtcctggaggccaacgggaggaaggcaatgttgcctggatgcacgtgctggcagcccgggagctggagcagcgggcarccctgatgggcggccaggtatacttctgctacgatggatcaccctacaggagctaygaggatttcaacatggagttcctgggcccctgcggactgcggctggtgggcgcccgcccattgctgccctactggctgctggtgttcctggctgccctcaatgccctgctgcagtggctgctgcrgccactggtgctctacgcacccctgctgaacccctacacgctggccgtggccaacaccaccttcaccgtcagcaccgacaaggctcagcgccatttcggctatgagccccygttctcgtgggaggatagccggacccgyaccattctctgggtacaggccgctacgggttcagcccagtgacggtggggctggggcctggaggcccagatacagcacatccacccaggtcccgagccctcacaccctggacgggaagggacagctgcattccagagcaggaggcagggctctggggccagaatggctgtccttgtcgtagagccctccacattttctttttcttttttgagacagggtcttgctctgtcacccagactggagtgcagtggtgtgatcatagctcactgcaccctcaacctcctgggttcaagcaatcctcctgcctcagcctcctgaacagctgggaccacaggtgcacgccaccacacctggcttttttttgttgtttttagagacagggtctcactatattgctcaggctggtcttgaactcctgggctcaagtgatcttcccacgtgggcctcccaaaacgctggaactacaagtgtgagccaccgcgcctggcccaagccctccacattttcaatccaggagccttgagtctgtgttgtgtcctgacacctccaagttctagggccgtcaggacacgggagggtttggggacagagtgtccttcctctgtcctctcatcccagtcctgatggccgcttggtgagtgtctggtgccctggtggcctgccccagctctcttctggctttctgagcaggaagcgagcagaggctccacaggsttacgctgctctcctgacagccacacgcgaccctcggtgcagagtgcagaggcggctctggttcctccagccacctcagtccctctttgggaggtgatgttcccattgtttttcaaaggcctcaccttcaactgtctgtcttagaattcccctctggagggctatggcctccctatgctttcacttcccacctctctacctaagttccttcccagcacatcgccagccctgggcctggggatgtccccaatgctgtacctggctgaccccggattaaaagcctcatccacgaccgt

SEQ ID NO: 2786 - DNA, 3532 bp, Homo sapiens
cctaactgctacgccaaggtcatcaccatcgagtcccagaagaagatcgtgatctactccaagcagcccattggcgtggacgaggagatcacctacgactacaagttcccactggaagacaacaagatcccgtgtctgtgtggcacagagagctgccggggctccctaaactgaggtggggcaggatgggtgcccacacccctatttattccccctggtgccctgagctcccagcacccccccagccttagtgggctcagcagggcccacatgcccccatctccaagcgtggggttgggggccccaagcccagcgagggagcctcagtccctggaggcagcttctgcctctcctgtcrcccctgcccaccaccccctgattgtttttctttgcggagaagaagctgtaaatgttttgtagcagccagcagctgtttcctgtggaaacctggggtgccggcctgtacagattctgtcctggggggctacacagtcctctygctttgtgttaatggggacttccccttacgccctgcgtgtacccctccccagtttaggggtctctggggcagtggccatgttctccccctgggggggctctgcacccccagtcctggggactccgtgcctggaaccctgcctcatctgttcctgccagaccctgagggtcacccttccaccctggtgtcactccccggctcagccaggccaggatggcggggtgggtcccttttgctgggctggactgtacatatgttaatagcgcaaacccgacgccacatttttataattgtgattaaactttattgtacaaaagtgtttggtcggtgtatttgggcaggagcgaggggttgggggtagagggcacggagggttgtgcaagttgaagagagggaaaagtgggtacctgaagtgtggggcaggtaaaggggccttcaggcaagagcccagacctgcagagacagtccgagactgtctcggaccccctgacaggctgcagcagccgcacccgcaccaggaataccccaccagtgcccgccagggtggtgccaaggtcaggcctccccttcctacaatcacagctgcagctggacctccggcctcctgggaagcccagcaggagggaaggcctgaggtcacactgtgggatgaggtcaccgctggctccacccacagccccagaccccttcagcccactctgcaagttcgagcttcatccccaccaagttctccgctggacccagatgccagtggagcacagagcggccgccagggggcgccttggggcaagagtggtgggggttgtggctgggcgggtctctgttcctggaatggggcaggagggagaaggaggagccagcggaaggacggtgtgcgggccggccagccctggacgaaagaagagggcccctccaggccagtctgggcaccctgggatagcggctgcagccaggcatggccgactctgcacaggcccagaagctggtgtacctggtcacagggggctgtggcttcctgggagagcacgtggtgcgaatgctgctgcagcgggagccccggctcggggagctgcgggtctttgaccaacacctgggtccctggctggaggagctgaagacagggcctgtgagggtgactgccatccagggggacgtgacccaggcccatgaggtggcagcagctgtggccggagcccatgtggtcatccacacggctgggctggtagacgtgtttggcagggccagtcccaagaccatccatgaggtcaacgtgcagggtacccggaacgtgatcgaggcttgtgtgcagaccggaacacggttcctggtctacaccagcagcatggaagttgtggggcctaacaccaaaggtcaccccttctacaggggcaacgaagacaccccatacgaagcagtgcacaggcacccctatccttgcagcaaggccctggccgagtggctggtcctggaggccaacgggaggaaggtccgtggggggctgcccctggtgacgtgtgcccttcgtcccacgggcatctacggtgaaggccaccagatcatgagggacttctaccgccagggcctgcgcctgggaggttggctcttccgggccatcccggcctctgtggagcatggccgggtctatgtgggcaatgttgcctggatgcacgtgctggcagcccgggagctggagcagcgggcarccctgatgggcggccaggtatacttctgctacgatggatcaccctacaggagctaygaggatttcaacatggagttcctgggcccctgcggactgcggctggtgggcgcccgcccattgctgccctactggctgctggtgttcctggctgccctcaatgccctgctgcagtggctgctgcrgccactggtgctctacgcacccctgctgaacccctacacgctggccgtggccaacaccaccttcaccgtcagcaccgacaaggctcagcgccatttcggctatgagccccygttctcgtgggaggatagccggacccgyaccattctctgggtacaggccgctacgggttcagcccagtgacggtggggctggggcctggaggcccagatacagcacatccacccaggtcccgagccctcacaccctggacgggaagggacagctgcattccagagcaggaggcagggctctggggccagaatggctgtccttgtcgtagagccctccacattttctttttcttttttgagacagggtcttgctctgtcacccagactggagtgcagtggtgtgatcatagctcactgcaccctcaacctcctgggttcaagcaatcctcctgcctcagcctcctgaacagctgggaccacaggtgcacgccaccacacctggcttttttttgttgtttttagagacagggtctcactatattgctcaggctggtcttgaactcctgggctcaagtgatcttcccacgtgggcctcccaaaacgctggaactacaagtgtgagccaccgcgcctggcccaagccctccacattttcaatccaggagccttgagtctgtgttgtgtcctgacacctccaagttctagggccgtcaggacacgggagggtttggggacagagtgtccttcctctgtcctctcatcccagtcctgatggccgcttggtgagtgtctggtgccctggtggcctgccccagctctcttctggctttctgagcaggaagcgagcagaggctccacaggsttacgctgctctcctgacagccacacgcgaccctcggtgcagagtgcagaggcggctctggttcctccagccacctcagtccctctttgggaggtgatgttcccattgtttttcaaaggcctcaccttcaactgtctgtcttagaattcccctctggagggctatggcctccctatgctttcacttcccacctctctacctaagttccttcccagcacatcgccagccctgggcctggggatgtccccaatgctgtacctggctgaccccggattaaaagcctcatccacgaccgt

SEQ ID NO: 2787 - DNA, 4830 bp, Homo sapiens
aagcraacttagcactggctacaccctcctcaattctggttggcgagatgcgctcttcccggaagtgacgcacaagtgccggcggaaggggaagtccaggagcatgggtggtttttttccccctaccgaggtccgtgaggkgtgtgctaaccaaggggcggctcacaaccgtgacagactgccattcctgagtctcttctggccatgggcccccggagccgtgagcgtcgggcaggcgcggtacagaacaccaacgacagcagcgccctcagcaagcgttccctggccgcgcgcgggtacgtgcaggacccctttgccgcgttgctggttccgggcgcggcgcgccgcgcaccgctcattcaccgaggctactacgtccgcgcacgcgccgtgaggcactgcgtgcgcgcttttttggagcagattggcgcgccccaggccgcgcttcgcgcgcagatcttgtctctcggcgctggcttcgactcgctctattttcgcttaaaaaccgcgggccgcctggcccgggctgcagtctgggaggtggattttccggacgtggcgcggcgcaaagcagaaaggattggagagacgccagagctgtgcgcgttaaccgggcctttcgagagkggggagcccgcgtccgcgctgtgctttgagagcgcagactactgcatcctgggtctggacttgcggcagctccagcgagtggaggaggccctgggcgccgcggggctcgacgcagcctcacccactctgctcctggccgaggcggtgctgacctacctcgagccggmgagtgccgcggccctcatcgcctgggcagcccagcgttttcctaatgcccttttcgtggtctatgagcagatgaggcctcaagacgcctttggccagttcatgctgcaacattttcggcagctaaactcccccctgcatggcctggagcgytttcctgacgtggaggcgcagcggcgccgcttccttcaagctggctggaccgcctgcggtgccgtggacatgaatgaattctatcactgctttcttcccgcagaagaacgccggcgggtggaaaatattgaaccctttgacgaatttgaggagtggcatctgaagtgcgcccattatttcattctggcagcttctaggggagacaccctctcccacaccctagtgtttccatcctcagaggcatttcctcgcgtaaatcctgcttcgccttcaggggtattccctgccagcgtagtcagtagcgagggccaggtcccaaacctgaagagatatggccacgcctctgtcttcttgagcccagacgttattctcagtgcaggaggatttggagagcaggaggggcggcactgccgagtgagccagtttcacttgctctcaagagattgtgactctgaatggaaaggcagccaaataggcagttgtgggactggagttcagtgggatggacgcctttatcacaccatgacaagactctcagagagtcgggttctggttctgggagggagactgtccccagtaagtccagccttgggggttctccagcttcatttttttaagagtgaggataataacactgaggacctgaaagtgacaataacaaaggctggccgaaaggatgattccactttgtgttgttggcggcattcaacaacagaagtgtcctgtcagaatcaggaatatttgtttgtgtatgggggtcgaagcgtggtggaacctgtactaagtgactggcatttcctccatgtagggacaatggcttgggtcaggatcccagtggagggagaagtacctgaagcccggcattctcacagtgcctgcacttggcaagggggagcccttattgctggaggtctcggggcttctgaggagccattgaactctgtgctctttctgagaccaatctcttgtggattcctctgggagtcagtagacatccagcctcccattaccccaaggtactcccacacagctcatgtgctcaatggaaagctgttactggttggagggatctggattcattcctcctcatttcctggagtgactgtgatcaatttgactacaggattgagctctgagtatcagattgacacaacatatgtgccatggccattaatgttacacaaccatactagtatccttcttcctgaagagcaacagctcctgctccttggaggtggtgggaactgcttttcctttggtacctacttcaacccccatacagtcacattagacctttcttccttaagtgctgggcagtaaggactggactaatattcaggacccactaaagtagacaataaagttttccacaaataggatgaccctctagctatagatactgccactcctcctttccccatcctttttttcccttagcactattcagtgcaaaaagtgaaaaaggttggtaaaataggtaaaatacctagaaacaatcactacrgaaaacagctgaagacagtggccatgcagtccgagaggagtagtggtctgcctctaattttctaatctaagttcgtttattgagttacagtggtctttagtaaagtaaaacaatttcccaatcccaggccttgtgatttgagatggtaccttagaaaaagttacacgcagttccgtggttgaatatatttgagatggtaccttagaaaaagtttcacgcagatccttggttgaatatagttgagggagcgtagtattgacaattcttcatgtaggaaacctgaaatgaacacagtcacagtttgattaaaacattgtcctgtttgttgcaacagaaaactcggatagttttaacaacaggaaacacttgkaggacttcctttaccaacatactttttaaatgttttgctattggttccatatttatttagatttataagtgtcaataaagcaaacttttgatgcctcaattcattttgcacggggtataataatgttttgttccagatatactctccacctttcactgttytgtgctccaagaggctgacctttatgggctgcatcaaggagctctctttactttttggttgagttccaccagtcagaggcaccagaggggaatgggggcaaaaagaagagtgagagtgagttggtatttattcccaattcttcccctgttggtttgcaagttggcagtggcagcattcttctgtcaaaggctacagctcctgccgtgtaatcctttcctgaagacagagttctaattctgcatcatcccaggtttcagtaattgttcctttacttcaccttttcaggcctaggagttgtgatggctctttgctagacctgaactgtactgtccaatgtggtagctattgacracatgtgactatttaaacgaattaataaattcagtggcttagtcacattgaccacattttaagtgcttaataactatgtgtggctttggctactgtattagacaatgtagatgtagaacatttcatcgttacagaaatttctactggacactgctgactggatatcttgacttggtttcccttaaccctactcagccccttatagttagcatcccattaaactcaattatcccttttaaatgggaatctgttgcctagtgagccatgtgagatcaatgaaatagctattcatccttaaaatttgagccttaatttgtcatctaaattatgcataccttgtgaaatatacacctcaaaaaatgtagtggctttggtggtaataagtgtattactttagtatttcttcttagtcctagaaacyttagtagttttcattctacaagtgcctaaatgattattatgaaccatcattgatgacaaattgcatcctttatttctattaattttgcatataaatggatgtgaaaggtgattaatataaaaaccaagtagcaaacacaaacctaagtgtatggagaggacagtcttggctctgttagatgaagcctccccgggggagaccagctgaatgagggttgtggtataggctgggcatggtggctcacgcctataattccagcactttgggaggccaagrcagaaggatcacttaaagccaggagtttaagaccagcccaggcaacaaagtcagatccccatctctacaaaaaaataagtaggcacggtggtgtgtgcttgtagtcttggatactctggaggctgaggygatagtgagctgtgattgtgccactgcactcctgcctggttgacagagtgagaccccgtctcttaaaaagaaaaaaaaaaaaggttgttgtccaacttcagctttcctgagactttgtaagagccatttctagggaaagcattggttatggctatgactgagtcctgggaaacagggcttattacagctgggaagacatctggcaaggcgatcagtgggccaggtagtagaaaactggcagggaatatgatcagcaggagaaaatggctgttctgtatttcctgtttctaagtttactacagcacaccccagctttcaggagcagataaaagcagaacactgtgatgaggccaggcgcagtggcacatgccttgatcccagcactttgggaggccaaggctggcagatcacttgaactcaggagttggagaccagcctggccaatatggtgaaactccgtctctacccaaaaaaaaaaaaaaaacaacatggtgaaaccccgtctctactaaaaatacaaaaattagctgggtgtgctggcatgcacctgtaatcccagctgctcaggaagctgaggcaggaaaattgcttgaacctgggaggcagaggttgcagtgagcggagattgggccactgcactccagcctgggcaacagagcaagagtctgtctc

SEQ ID NO: 2788 - DNA, 1584 bp, Homo sapiens
gcaacgcgctgagggactaggcagagccgtggaaccgccgccaggtcgctgtcggtccacgccgcccgtcgcgctgcccgcccgctcggcgtcggccrccgccatgggagtgcacgtggaaaccatctccccaggagactggcgcaccttcccgaagcgcagccagacctgcgtgatgcactacaccgggatgcttgaagatggaaagaaatttgattcctcccgggacagaaacaagccctttaagtttatgctaggcaagcaggaggtgatccgaggctgggaagaaggggttgtccagatgagtgtgggtcagagagccaaactgactatatctccagattatgcctatggtgccactgggcacccaggcatcatcccaccacatgccactctcgtcttcgatgtggagcttctaaaactggaatgacaggaatggcctcctcccttagctccctgttcttggatctgccrtggagggatctggtgcctccrgacgtgtgcacataartccwtatggagcttttcctgatgttccactccactttgtatagacatctgccccgactgaatgtgttctgtcactcagctttgcttccgacacctctgtttcctcttcccctttctcctggtatgtgcgtttacctaaactatatgccataaaygtcaagttaytcattttactttttcattttggggtgaagattcagtttcagtcttttgaatataggtttccaattaagtacatggtcaagtgttaacagcacaagtgataagttaacgttaggataggaattggtgttgagggggttgcaagaatattttattttaattttttggatgaaatttttatctattatatattaaacattcttgctgctgcgctgcaaaaccatagcagatttgaggcactgttgaggactgaattattctccaagttgagagatgtccttgggttaaattaaaagccctacctaaaactgaggtggggatggggagaggctttgcctccaccattcccaccccaccctccccttaaaccctctgcctttgaaagcaggtcatgttcactgcgatgctggacactacaggtatctgtccctgggccagcagggacctctgaagccttctttgtggccttatttttttttttttttttcatcctgtggtttttctaacggactttcaggaattttgtaatctcataactttccaagctccaccacttcctaaatcttaagaactttaattgacagtttcaattgaaggtgctgtttgtagacttaacacccagtgaaagcccagccatcatgacaaatccttgaatgttctcttaagaaaatgatgctggtcatcccagcttcagcatctcctgttttttgatgcttggctccctctgctgatctcagagtttcctggcttttcctccctcagccacttctcacccctttgctgtcctgtgtagtgatttggtgagaggaatcgttgctgcccccttcccctagcaccatatatgagtctcaagttttattattgcaataaaagtgctttatgcyggcttttctcaaaaaatwaataaataaa

SEQ ID NO: 2789 - DNA, 919 bp, Homo sapiens
tggaaccgccgccaggtcgctgtcggtccacgccgcccgtcgcgctgcccgcccgctcggcgtcggccrccgccatgggagtgcacgtggaaaccatctccccaggagactggcgcaccttcccgaagcgcagccagacctgcgtgatgcactacaccgatgagtgtgggtcagagagccaaactgactatatctccagattatgcctatggtgccactgggcacccaggcatcatcccaccacatgccactctcgtcttcgatgtggagcttctaaaactggaatgacaggaatggcctcctcccttagctccctgttcttggatctgccrtggagggatctggtgcctccrgacgtgtgcacataartccwtatggagcttttcctgatgttccactccactttgtatagacatctgccccgatgaattattctccaagttgagagatgtccttgggttaaattaaaagccctacctaaaactgaggtggggatggggagaggctttgcctccaccattcccaccccaccctccccttaaaccctctgcctttgaaagcaggtcatgttcactgcgatgctggacactacaggtatctgtccctgggccagcagggacctctgaagccttctttgtggccttatttttttttttttttttcatcctgtggtttttctaacggactttcaggaattttgtaatctcataactttccaagctccaccacttcctaaatcttaagaactttaattgacagtttcaattgaaggtgctgtttgtagacttaacacccagtgaaagcccagccatcatgacaaatccttgaatgttctcttaagaaaatgatgctgacccctttgctgtcctgtgtagtgatttggtgagaggaatcgttgctgcccccttcccctagcacc

SEQ ID NO: 2790 - DNA, 1415 bp, Homo sapiens
tgggcaggcaacgcgctgagggactaggcagagccgtggaaccgccgccaggtcgctgtcggtccacgccgcccgtcgcgctgcccgcccgctcggcgtcggccrccgccatgggagtgcacgtggaaaccatctccccaggagactggcgcaccttcccgaagcgcagccagacctgcgtgatgcactacaccgggatgcttgaagatggaaagaaatttgattcctcccgggacagaaacaagccctttaagtttatgctaggcaagcaggaggtgatccgaggctgggaagaaggggttgtccagatgagtgtgggtcagagagccaaactgactatatctccagattatgcctatggtgccactgggcacccaggcatcatcccaccacatgccactctcgtcttcgatcttttcctgatgttccactccactttgtatagacatctgccccgactgaatgtgttctgtcactcagctttgcttccgacacctctgtttcctcttcccctttctcctggtatgtgcgtttacctaaactatatgccataaaygtcaagttaytcattttactttttcattttggggtgaagattcagtttcagtcttttgaatataggtttccaattaagtacatggtcaagtgttaacagcacaagtgataagttaacgttaggataggaattggtgttgagggggttgcaagaatattttattttaattttttggatgaaatttttatctattatatattaaacattcttgctgctgcgctgcaaaaccatagcagatttgaggcactgttgaggactgaattattctccaagttgagagatgtccttgggttaaattaaaagccctacctaaaactgaggtggggatggggagagtcatgttcactgcgatgctggacactacaggtatctgtccctgggccagcagggacctctgaagccttctttgtggccttatttttttttttttttttcatcctgtggtttttctaacggactttcaggaattttgtaatctcataactttccaagctccaccacttcctaaatcttaagaactttaattgacagtttcaattgaaggtgctgtttgtagacttaacacccagtgaaagcccagccatcatgacaaatccttgaatgttctcttaagaaaatgatgctggtcatcccagcttcagcatctcctgttttttgatgcttggctccctctgctgatctcagagtttcctggcttttcctccctcagccacttctcacccctttgctgtcctgtgtagtgatttggtgagaggaatcgttgctgcccccttcccctagcaccatatatgagtctcaagttttattattgcaataaaagtgctttatgcyggcttttctcaaaaaatwaataaataaa

SEQ ID NO: 2791 - DNA, 5151 bp, Homo sapiens
ctagggggcgctcgcagggccggcgcgcacccgcacgcgcacacgcccctgcccagcctcctgcccgcctccgccttcggaggctgacgcgcccgggcgccgttccaggcctgtgcagggcggatcggcagccgcctggcggcgatccagggcggtgcggggcctgggcgggagccgggaggcgcggccggcatggaggcgctgctgctgggcgcggggttgctgctgggcgcttacgtgcttgtctactacaacctggtgaaggccccgccgtgcggcggcatgggcaacctgcggggccgcacggccgtggtcacgggtgagtgcggaggcgggtgagtgcgagctggcggggcgcgcggagaggaggccgggccggcggtagcagcggcccgccgggctcagctcagctcggctcccgcccgcggtccgcaggcgccaacagcggcatcggaaagatgacggcgctggagctggcgcgccggggagcgcgcgtggtgctggcctgccgcagccaggagcgcggggaggcggctgccttcgacctccgccaggagagtgggaacaatgaggtcatcttcatggccttggacttggccagtctggcctcggtgcgggcctttgccactgcctttctgagctctgagccacggttggacatcctcatccacaatgccggtatcagttcctgtggccggacccgygaggcgtttaacctgctgcttcgggtgaaccatatcggtccctttctgctgacacatctgctgctgccttgcctgaaggcatgtgcccctagccgygtggtggtggtagcctcagctgcccactgtcggggacgtcttgacttcaaacgcctggaccgcccagtggtgggctggcrgcaggagctgcgggcatatgctgacactaagctggctaatgtactgtttgcccgggagctcsccaaccagcttgaggccactggcgtcacctgctatgcagcccacccagggcctgtgaactcggagctgttcctgcgccatgttcctggatggctgcgcccacttttgcgcccattggcttggctggtgctccgggcaccaagagggggtgcccagacacccctgtattgtgctctacaagagggcatcgagcccctcagtgggagatattttgccaactgccatgtggaagaggtgcctccagctgcccgagacgaccgggcagcccatcggctatgggaggccagcaagaggctggcagggcttgggcctggggaggatgctgaacccgatgaagacccccagtctgaggactcagaggccccatcttctcwaagcaccccccaccctgaggagcccacagtttctcaaccttaccccagccctcagagctcaccagatttgtctaagatgacgcaccgaattcaggctaaagttgagcctgagatccagctctcctaaccctcaggccaggatgcttgccatggcacttcatggtccttgaaaacctcggatgtgtgygaggccatgccctggacactgacgggtttgtgatcttgacctccgtggttactttctggggccccaagctgtgccctggacatctcttttcctggttgaaggaataatgggtgattatttcttcctgagagtgacagtaaccccagatggagagataggggtatgctagacactgtgcttctcggaaatttggatgtagtattttcaggccccacccttattgattctgatcagctctggagcagaggcagggagtttgcaatgtgatgcactgccaacattgagaattagtgaactgatccctttgcaaccgtctagctaggtagttaaattacccccatgttaatgaarcggaattaggctcccgagctaagggactcgcctagggtctcacagtgagtaggaggagggcctgggatctgaacccaagggtctgaggccagggccgactgccgtaagatgggtgctgagaagtgagtcagggcagggcagctggtatcgaggtgccccatgggagtaaggggacgccttccgggcggatgcagggctggggtcatctgtatctgaagcccctcggaataaagcgcgttgaccgccgaagctgcgctcactcctgcctcaacgcgccggccccgccctccgccgccacacttccggcggggctgcgaccgcagaggggcgcgggcgagcgagcgggcggccggccgctgggggtggcgggataggctgggcgcggccggcgctgcagacccgctgctgttgtccgggtctgtgcggtcccgagggccctccgtgccgccggcgccatgggcaattgccacacggtggggcccaacgaggcgctggtggtttcagggggctgttgtggttccgactataaacagtacgtgtttggcggctgggcctgggcctggtggtgtatctccgacactcagaggatttccctagagattatgacgttgcagccccgctgcgaggacgtagagacggccgagggggtagctttaactgtgacgggtgtcgcccaggtgaagatcatgacggagaaggaactcctggccgtggcttgtgagcagtttctgggtaagaatgtgcaggacatcaaaaacgtcgtcctgcagaccctggagggacatctgcgctccatcctcgggaccctgacagtggagcagatttatcaggaccgggaccagtttgccaagctggtgcgggaggtggcagcccctgatgttggccgcatgggcattgagatcctcagcttcaccatcaaggacgtgtatgacaaagtggactatctgagctccctgggcaagacgcagactgccgtggtgcagagagatgctgacattggcgtggccgaggctgaacgggacgcaggcatccgggaagctgaktgcaagaaggagatgctggatgtgaagttcatggcagacaccaagattgctgactctaagcgagccttcgagctgcaaaagtcagccttcagtgaggaggttaacatcaagacagctgaggcccagttggcctatgagctgcagggggcccgtgaacagcagaagatccggcaggaagagattgagattgaggttgtgcagcgcaagaaacagattgccgtggaggcacaggagatcctgcgtacggacaaggagctcatcgctacagtgcgccggcctgccgaggccgaggcccaccgcatccagcagattgccgagggtgaaaaggtgaagcaggtcctcttggcacaggcagaggctgagaagatccgcaaaatcggggaggcggaagcgrcagtcatcgaggcgatgggcraggcagaggctgagcggatgaagctcaaggcagaagcctaccagaaatacggggatgcagccaagatggccttggtgctagaggccctgccccaggtgaggcttccacccaagygggtcctagggttcaagtgtccttgcttgacaagctgggcaagtgccagaacttctctgggccttgcgagtaacacagggacagatggctagaagggttaaatgaggagcatcctcagcagggggcaggaaccctacaaaggcctaagccatccctggcccacagggcgtctcttaccatggctcgagactaagggccacccaggctgctytggggttggagtgagttaaggaagggagggagagatgctggaccgggctgagaacagagtcagcgccaaccaggctgtcctcccactcttacctcctagattgctgccaaaatcgctgccccacttaccaaggtcgatgagattgtggtcctcagtggagacaacagtaaggtcacatcagaagtgaaccgactgctggccgagctgcctgcctctgtgcatgccctcacaggcgtggacctgtctaagatacccctgatcaagaaggccactggtgtgcaggtgtgaggctcctrcaggcccactctcttcagcagccacccggccctccctccagcacccgttttaatcccacagaacaacgggaacgttactgactctggtgccttatctcgaagggaccagaagtgctgygtgttcaggccatctctggctgtcttcctgtctctcctgtctgtccacctcctcctcttcctctcctttaccccactttcactgccactttcatcaggtttgtgtctcatctccctgcgtgtcttttcctttgtctgtctttttctttcccccatgcacatcatgtagattaagctgaagatgtttattacaatcactctctgtggggggtggccctgctgctcctcagaatcctggtgccttgaagttctctgtgcatctgtccatcctccctatggccctggccagagctcagcatgggcaggggttctgggtaggacggtcactgtcctytctcctggactggtcttcccagccctaaaccctgccccaggaagcccacagcctcacctgctgctgcccctctaggtmtgggcagccatgacctgcagggcccagagacactgtccttcccctcatccacccaaggccccagccagcgctcataccctgtcctttctccctgaccccaagggcacagaggcaaggcctcctgtctacagcagcttcctcagtttcctactgccttaggaggcccctgcttstgctcagggaaggcctcttcatgggcatgttcctgctggggcggtgcggtttggtcccaactctgctaagttttctgagatgagggtctagccctgttggggacagaaaagtgtgtagaccttcttcctgctagggctgcactgtcctgggtgttgggcccttctggtggacaaggctgtgccaaccctgtacagaatcgagtgctgtagcctggccagaccccagagcccttgtgccawctttyttcctggccagagtgatggggttccagccatggggaagcaacccaatcctctgtctccttgctccaatggaggcagaagagcccaggacccaagcrtcttggcaggggtgctgtgaatgtccagtggtcccagctccccaccctggccctgccccagcctgtgtagctcttcctgcatgtggatgctgcatgtytggtytggggcttggatgttgcactgccccactgcctgtcccttctggtaaaataaagaactcttaatgcccacccct

SEQ ID NO: 2792 - DNA, 4476 bp, Homo sapiens
ccaggtgagaggcagcgggggcgcgtgggacggtgagccgagaacccgccgggacacagagaagccagcaaaggggctgcggaggatccgggtccagggaggagagcgcggcgcgggcggctgagcgcgaagagggagtgcacggagcgctggggtcacccgaggaaggcgcaccagagccgagtgggggaggggcttcctgaaggccgagagtgggaacaatgaggtcatcttcatggccttggacttggccagtctggcctcggtgcgggcctttgccactgcctttctgagctctgagccacggttggacatcctcatccacaatgccggtatcagttcctgtggccggacccgygaggcgtttaacctgctgcttcgggtgaaccatatcggtccctttctgctgacacatctgctgctgccttgcctgaaggcatgtgcccctagccgygtggtggtggtagcctcagctgcccactgtcggggacgtcttgacttcaaacgcctggaccgcccagtggtgggctggcrgcaggagctgcgggcatatgctgacactaagctggctaatgtactgtttgcccgggagctcsccaaccagcttgaggccactggcgtcacctgctatgcagcccacccagggcctgtgaactcggagctgttcctgcgccatgttcctggatggctgcgcccacttttgcgcccattggcttggctggtgctccgggcaccaagagggggtgcccagacacccctgtattgtgctctacaagagggcatcgagcccctcagtgggagatattttgccaactgccatgtggaagaggtgcctccagctgcccgagacgaccgggcagcccatcggctatgggaggccagcaagaggctggcagggcttgggcctggggaggatgctgaacccgatgaagacccccagtctgaggactcagaggccccatcttctcwaagcaccccccaccctgaggagcccacagtttctcaaccttaccccagccctcagagctcaccagatttgtctaagatgacgcaccgaattcaggctaaagttgagcctgagatccagctctcctaaccctcaggccaggatgcttgccatggcacttcatggtccttgaaaacctcggatgtgtgygaggccatgccctggacactgacgggtttgtgatcttgacctccgtggttactttctggggccccaagctgtgccctggacatctcttttcctggttgaaggaataatgggtgattatttcttcctgagagtgacagtaaccccagatggagagataggggtatgctagacactgtgcttctcggaaatttggatgtagtattttcaggccccacccttattgattctgatcagctctggagcagaggcagggagtttgcaatgtgatgcactgccaacattgagaattagtgaactgatccctttgcaaccgtctagctaggtagttaaattacccccatgttaatgaarcggaattaggctcccgagctaagggactcgcctagggtctcacagtgagtaggaggagggcctgggatctgaacccaagggtctgaggccagggccgactgccgtaagatgggtgctgagaagtgagtcagggcagggcagctggtatcgaggtgccccatgggagtaaggggacgccttccgggcggatgcagggctggggtcatctgtatctgaagcccctcggaataaagcgcgttgaccgccgaagctgcgctcactcctgcctcaacgcgccggccccgccctccgccgccacacttccggcggggctgcgaccgcagaggggcgcgggcgagcgagcgggcggccggccgctgggggtggcgggataggctgggcgcggccggcgctgcagacccgctgctgttgtccgggtctgtgcggtcccgagggccctccgtgccgccggcgccatgggcaattgccacacggtggggcccaacgaggcgctggtggtttcagggggctgttgtggttccgactataaacagtacgtgtttggcggctgggcctgggcctggtggtgtatctccgacactcagagactgtctctggaggttatgaccatcctgtgtcgctgtgagaatattgagacgtcggagggggttccactattcgtaacaggggttgcacaggtgaagatcatgacggagaaggaactcctggccgtggcttgtgagcagtttctgggtaagaatgtgcaggacatcaaaaacgtcgtcctgcagaccctggagggacatctgcgctccatcctcgggaccctgacagtggagcagatttatcaggaccgggaccagtttgccaagctggtgcgggaggtggcagcccctgatgttggccgcatgggcattgagatcctcagcttcaccatcaaggacgtgtatgacaaagtggactatctgagctccctgggcaagacgcagactgccgtggtgcagagagatgctgacattggcgtggccgaggctgaacgggacgcaggcatccgggaagctgaktgcaagaaggagatgctggatgtgaagttcatggcagacaccaagattgctgactctaagcgagccttcgagctgcaaaagtcagccttcagtgaggaggttaacatcaagacagctgaggcccagttggcctatgagctgcagggggcccgtgaacagcagaagatccggcaggaagagattgagattgaggttgtgcagcgcaagaaacagattgccgtggaggcacaggagatcctgcgtacggacaaggagctcatcgctacagtgcgccggcctgccgaggccgaggcccaccgcatccagcagattgccgagggtgaaaaggtgaagcaggtcctcttggcacaggcagaggctgagaagatccgcaaaatcggggaggcggaagcgrcagtcatcgaggcgatgggcraggcagaggctgagcggatgaagctcaaggcagaagcctaccagaaatacggggatgcagccaagatggccttggtgctagaggccctgccccagattgctgccaaaatcgctgccccacttaccaaggtcgatgagattgtggtcctcagtggagacaacagtaaggtcacatcagaagtgaaccgactgctggccgagctgcctgcctctgtgcatgccctcacaggcgtggacctgtctaagatacccctgatcaagaaggccactggtgtgcaggtgtgaggctcctrcaggcccactctcttcagcagccacccggccctccctccagcacccgttttaatcccacagaacaacgggaacgttactgactctggtgccttatctcgaagggaccagaagtgctgygtgttcaggccatctctggctgtcttcctgtctctcctgtctgtccacctcctcctcttcctctcctttaccccactttcactgccactttcatcaggtttgtgtctcatctccctgcgtgtcttttcctttgtctgtctttttctttcccccatgcacatcatgtagattaagctgaagatgtttattacaatcactctctgtggggggtggccctgctgctcctcagaatcctggtgccttgaagttctctgtgcatctgtccatcctccctatggccctggccagagctcagcatgggcaggggttctgggtaggacggtcactgtcctytctcctggactggtcttcccagccctaaaccctgccccaggaagcccacagcctcacctgctgctgcccctctaggtmtgggcagccatgacctgcagggcccagagacactgtccttcccctcatccacccaaggccccagccagcgctcataccctgtcctttctccctgaccccaagggcacagaggcaaggcctcctgtctacagcagcttcctcagtttcctactgccttaggaggcccctgcttstgctcagggaaggcctcttcatgggcatgttcctgctggggcggtgcggtttggtcccaactctgctaagttttctgagatgagggtctagccctgttggggacagaaaagtgtgtagaccttcttcctgctagggctgcactgtcctgggtgttgggcccttctggtggacaaggctgtgccaaccctgtacagaatcgagtgctgtagcctggccagaccccagagcccttgtgccawctttyttcctggccagagtgatggggttccagccatggggaagcaacccaatcctctgtctccttgctccaatggaggcagaagagcccaggacccaagcrtcttggcaggggtgctgtgaatgtccagtggtcccagctccccaccctggccctgccccagcctgtgtagctcttcctgcatgtggatgctgcatgtytggtytggggcttggatgttgcactgccccactgcctgtcccttctggtaaaataaagaactcttaatgcccacccct

SEQ ID NO: 2793 - DNA, 1905 bp, Homo sapiens
gcgcacccgcacgcgcacacgcccctgcccagcctcctgcccgcctccgccttcggaggctgacgcgcccgggcgccgttccaggcctgtgcagggcggatcggcagccgcctggcggcgatccagggcggtgcggggcctgggcgggagccgggaggcgcggccggcatggaggcgctgctgctgggcgcggggttgctgctgggcgcttacgtgcttgtctactacaacctggtgaaggccccgccgtgcggcggcatgggcaacctgcggggccgcacggccgtggtcacgggcgccaacagcggcatcggaaagatgacggcgctggagctggcgcgccggggagcgcgcgtggtgctggcctgccgcagccaggagcgcggggaggcggctgccttcgacctccgccaggagagtgggaacaatgaggtcatcttcatggccttggacttggccagtctggcctcggtgcgggcctttgccactgcctttctgagctctgagccacggttggacatcctcatccacaatgccgggcctgtgaactcggagctgttcctgcgccatgttcctggatggctgcgcccacttttgcgcccattggcttggctggtgctccgggcaccaagagggggtgcccagacacccctgtattgtgctctacaagagggcatcgagcccctcagtgggagatattttgccaactgccatgtggaagaggtgcctccagctgcccgagacgaccgggcagcccatcggctatgggaggccagcaagaggctggcagggcttgggcctggggaggatgctgaacccgatgaagacccccagtctgaggactcagaggccccatcttctcwaagcaccccccaccctgaggagcccacagtttctcaaccttaccccagccctcagagctcaccagatttgtctaagatgacgcaccgaattcaggctaaagttgagcctgagatccagctctcctaaccctcaggccaggatgcttgccatggcacttcatggtccttgaaaacctcggatgtgtgygaggccatgccctggacactgacgggtttgtgatcttgacctccgtggttactttctggggccccaagctgtgccctggacatctcttttcctggttgaaggaataatgggtgattatttcttcctgagagtgacagtaaccccagatggagagataggggtatgctagacactgtgcttctcggaaatttggatgtagtattttcaggccccacccttattgattctgatcagctctggagcagaggcagggagtttgcaatgtgatgcactgccaacattgagaattagtgaactgatccctttgcaaccgtctagctaggtagttaaattacccccatgttaatgaarcggaattaggctcccgagctaagggactcgcctagggtctcacagtgagtaggaggagggcctgggatctgaacccaagggtctgaggccagggccgactgccgtaagatgggtgctgagaagtgagtcagggcagggcagctggtatcgaggtgccccatgggagtaaggggacgccttccgggcggatgcagggctggggtcatctgtatctgaagcccctcggaataaagcgcgttgaccgccgaagctgcgctcactcctgcctcaacgcgccggccccgccctccgccgccacacttccggcggggctgcgaccgcagaggggcgcgggcgagcgagcgggcggccggccgctgggggtggcgggataggctgggcgcggccggcgctgcagacccgctgctgttgtccgggtctgtgcggtcccgagggccctccgtgccgccggcgccatgggcaattgccacacggtggggcccaacgaggcgctggtggtttcag

SEQ ID NO: 2794 - DNA, 4761 bp, Homo sapiens
ctagggggcgctcgcagggccggcgcgcacccgcacgcgcacacgcccctgcccagcctcctgcccgcctccgccttcggaggctgacgcgcccgggcgccgttccaggcctgtgcagggcggatcggcagccgcctggcggcgatccagggcggtgcggggcctgggcgggagccgggaggcgcggccggcatggaggcgctgctgctgggcgcggggttgctgctgggcgcttacgtgcttgtctactacaacctggtgaaggccccgccgtgcggcggcatgggcaacctgcggggccgcacggccgtggtcacgggtgagtgcggaggcgggtgagtgcgagctggcggggcgcgcggagaggaggccgggccggcggtagcagcggcccgccgggctcagctcagctcggctcccgcccgcggtccgcaggcgccaacagcggcatcggaaagatgacggcgctggagctggcgcgccggggagcgcgcgtggtgctggcctgccgcagccaggagcgcggggaggcggctgccttcgacctccgccaggagagtgggaacaatgaggtcatcttcatggccttggacttggccagtctggcctcggtgcgggcctttgccactgcctttctgagctctgagccacggttggacatcctcatccacaatgccggtatcagttcctgtggccggacccgygaggcgtttaacctgctgcttcgggtgaaccatatcggtccctttctgctgacacatctgctgctgccttgcctgaaggcatgtgcccctagccgygtggtggtggtagcctcagctgcccactgtcggggacgtcttgacttcaaacgcctggaccgcccagtggtgggctggcrgcaggagctgcgggcatatgctgacactaagctggctaatgtactgtttgcccgggagctcsccaaccagcttgaggccactggcgtcacctgctatgcagcccacccagggcctgtgaactcggagctgttcctgcgccatgttcctggatggctgcgcccacttttgcgcccattggcttggctggtgctccgggcaccaagagggggtgcccagacacccctgtattgtgctctacaagagggcatcgagcccctcagtgggagatattttgccaactgccatgtggaagaggtgcctccagctgcccgagacgaccgggcagcccatcggctatgggaggccagcaagaggctggcagggcttgggcctggggaggatgctgaacccgatgaagacccccagtctgaggactcagaggccccatcttctcwaagcaccccccaccctgaggagcccacagtttctcaaccttaccccagccctcagagctcaccagatttgtctaagatgacgcaccgaattcaggctaaagttgagcctgagatccagctctcctaaccctcaggccaggatgcttgccatggcacttcatggtccttgaaaacctcggatgtgtgygaggccatgccctggacactgacgggtttgtgatcttgacctccgtggttactttctggggccccaagctgtgccctggacatctcttttcctggttgaaggaataatgggtgattatttcttcctgagagtgacagtaaccccagatggagagataggggtatgctagacactgtgcttctcggaaatttggatgtagtattttcaggccccacccttattgattctgatcagctctggagcagaggcagggagtttgcaatgtgatgcactgccaacattgagaattagtgaactgatccctttgcaaccgtctagctaggtagttaaattacccccatgttaatgaarcggaattaggctcccgagctaagggactcgcctagggtctcacagtgagtaggaggagggcctgggatctgaacccaagggtctgaggccagggccgactgccgtaagatgggtgctgagaagtgagtcagggcagggcagctggtatcgaggtgccccatgggagtaaggggacgccttccgggcggatgcagggctggggtcatctgtatctgaagcccctcggaataaagcgcgttgaccgccgaagctgcgctcactcctgcctcaacgcgccggccccgccctccgccgccacacttccggcggggctgcgaccgcagaggggcgcgggcgagcgagcgggcggccggccgctgggggtggcgggataggctgggcgcggccggcgctgcagacccgctgctgttgtccgggtctgtgcggtcccgagggccctccgtgccgccggcgccatgggcaattgccacacggtggggcccaacgaggcgctggtggtttcagggggctgttgtggttccgactataaacagtacgtgtttggcggctgggcctgggcctggtggtgtatctccgacactcagaggatttccctagagattatgacgttgcagccccgctgcgaggacgtagagacggccgagggggtagctttaactgtgacgggtgtcgcccaggtgaagatcatgacggagaaggaactcctggccgtggcttgtgagcagtttctgggtaagaatgtgcaggacatcaaaaacgtcgtcctgcagaccctggagggacatctgcgctccatcctcgggaccctgacagtggagcagatttatcaggaccgggaccagtttgccaagctggtgcgggaggtggcagcccctgatgttggccgcatgggcattgagatcctcagcttcaccatcaaggacgtgtatgacaaagtggactatctgagctccctgggcaagacgcagactgccgtggtgcagagagatgctgacattggcgtggccgaggctgaacgggacgcaggcatccgggaagctgaktgcaagaaggagatgctggatgtgaagttcatggcagacaccaagattgctgactctaagcgagccttcgagctgcaaaagtcagccttcagtgaggaggttaacatcaagacagctgaggcccagttggcctatgagctgcagggggcccgtgaacagcagaagatccggcaggaagagattgagattgaggttgtgcagcgcaagaaacagattgccgtggaggcacaggagatcctgcgtacggacaaggagctcatcgctacagtgcgccggcctgccgaggccgaggcccaccgcatccagcagattgccgagggtgaaaaggtgaagcaggtcctcttggcacaggcagaggctgagaagatccgcaaaatcggggaggcggaagcgrcagtcatcgaggcgatgggcraggcagaggctgagcggatgaagctcaaggcagaagcctaccagaaatacggggatgcagccaagatggccttggtgctagaggccctgccccagattgctgccaaaatcgctgccccacttaccaaggtcgatgagattgtggtcctcagtggagacaacagtaaggtcacatcagaagtgaaccgactgctggccgagctgcctgcctctgtgcatgccctcacaggcgtggacctgtctaagatacccctgatcaagaaggccactggtgtgcaggtgtgaggctcctrcaggcccactctcttcagcagccacccggccctccctccagcacccgttttaatcccacagaacaacgggaacgttactgactctggtgccttatctcgaagggaccagaagtgctgygtgttcaggccatctctggctgtcttcctgtctctcctgtctgtccacctcctcctcttcctctcctttaccccactttcactgccactttcatcaggtttgtgtctcatctccctgcgtgtcttttcctttgtctgtctttttctttcccccatgcacatcatgtagattaagctgaagatgtttattacaatcactctctgtggggggtggccctgctgctcctcagaatcctggtgccttgaagttctctgtgcatctgtccatcctccctatggccctggccagagctcagcatgggcaggggttctgggtaggacggtcactgtcctytctcctggactggtcttcccagccctaaaccctgccccaggaagcccacagcctcacctgctgctgcccctctaggtmtgggcagccatgacctgcagggcccagagacactgtccttcccctcatccacccaaggccccagccagcgctcataccctgtcctttctccctgaccccaagggcacagaggcaaggcctcctgtctacagcagcttcctcagtttcctactgccttaggaggcccctgcttstgctcagggaaggcctcttcatgggcatgttcctgctggggcggtgcggtttggtcccaactctgctaagttttctgagatgagggtctagccctgttggggacagaaaagtgtggacaaggctgtgccaaccctgtacagaatcgagtgctgtagcctggccagaccccagagcccttgtgccawctttyttcctggccagagtgatggggttccagccatggggaagcaacccaatcctctgtctccttgctccaatggaggcagaagagcccaggacccaagcrtcttggcaggggtgctgtgaatgtccagtggtcccagctccccaccctggccctgccccagcctgtgtagctcttcctgcatgtggatgctgcatgtytggtytggggcttggatgttgcactgccccactgcctgtcccttctggtaaaataaagaactcttaatgcc

SEQ ID NO: 2795 - DNA, 4266 bp, Homo sapiens
ccaggtgagaggcagcgggggcgcgtgggacggtgagccgagaacccgccgggacacagagaagccagcaaaggggctgcggaggatccgggtccagggaggagagcgcggcgcgggcggctgagcgcgaagagggagtgcacggagcgctggggtcacccgaggaaggcgcaccagagccgagtgggggaggggcttcctgaaggccgagagtgggaacaatgaggtcatcttcatggccttggacttggccagtctggcctcggtgcgggcctttgccactgcctttctgagctctgagccacggttggacatcctcatccacaatgccggtatcagttcctgtggccggacccgygaggcgtttaacctgctgcttcgggtgaaccatatcggtccctttctgctgacacatctgctgctgccttgcctgaaggcatgtgcccctagccgygtggtggtggtagcctcagctgcccactgtcggggacgtcttgacttcaaacgcctggaccgcccagtggtgggctggcrgcaggagctgcgggcatatgctgacactaagctggctaatgtactgtttgcccgggagctcsccaaccagcttgaggccactggcgtcacctgctatgcagcccacccagggcctgtgaactcggagctgttcctgcgccatgttcctggatggctgcgcccacttttgcgcccattggcttggctggtgctccgggcaccaagagggggtgcccagacacccctgtattgtgctctacaagagggcatcgagcccctcagtgggagatattttgccaactgccatgtggaagaggtgcctccagctgcccgagacgaccgggcagcccatcggctatgggaggccagcaagaggctggcagggcttgggcctggggaggatgctgaacccgatgaagacccccagtctgaggactcagaggccccatcttctcwaagcaccccccaccctgaggagcccacagtttctcaaccttaccccagccctcagagctcaccagatttgtctaagatgacgcaccgaattcaggctaaagttgagcctgagatccagctctcctaaccctcaggccaggatgcttgccatggcacttcatggtccttgaaaacctcggatgtgtgygaggccatgccctggacactgacgggtttgtgatcttgacctccgtggttactttctggggccccaagctgtgccctggacatctcttttcctggttgaaggaataatgggtgattatttcttcctgagagtgacagtaaccccagatggagagataggggtatgctagacactgtgcttctcggaaatttggatgtagtattttcaggccccacccttattgattctgatcagctctggagcagaggcagggagtttgcaatgtgatgcactgccaacattgagaattagtgaactgatccctttgcaaccgtctagctaggtagttaaattacccccatgttaatgaarcggaattaggctcccgagctaagggactcgcctagggtctcacagtgagtaggaggagggcctgggatctgaacccaagggtctgaggccagggccgactgccgtaagatgggtgctgagaagtgagtcagggcagggcagctggtatcgaggtgccccatgggagtaaggggacgccttccgggcggatgcagggctggggtcatctgtatctgaagcccctcggaataaagcgcgttgaccgccgaagctgcgctcactcctgcctcaacgcgccggccccgccctccgccgccacacttccggcggggctgcgaccgcagaggggcgcgggcgagcgagcgggcggccggccgctgggggtggcgggataggctgggcgcggccggcgctgcagacccgctgctgttgtccgggtctgtgcggtcccgagggccctccgtgccgccggcgccatgggcaattgccacacggtggggcccaacgaggcgctggtggtttcagggggctgttgtggttccgactataaacagtacgtgtttggcggctgggcctgggcctggtggtgtatctccgacactcagaggtgaagatcatgacggagaaggaactcctggccgtggcttgtgagcagtttctgggtaagaatgtgcaggacatcaaaaacgtcgtcctgcagaccctggagggacatctgcgctccatcctcggacgtgtatgacaaagtggactatctgagctccctgggcaagacgcagactgccgtggtgcagagagatgctgacattggcgtggccgaggctgaacgggacgcaggcatccgggaagctgaktgcaagaaggagatgctggatgtgaagttcatggcagacaccaagattgctgactctaagcgagccttcgagctgcaaaagtcagccttcagtgaggaggttaacatcaagacagctgaggcccagttggcctatgagctgcagggggcccgtgaacagcagaagatccggcaggaagagattgagattgaggttgtgcagcgcaagaaacagattgccgtggaggcacaggagatcctgcgtacggacaaggagctcatcgctacagtgcgccggcctgccgaggccgaggcccaccgcatccagcagattgccgagggtgaaaaggtgaagcaggtcctcttggcacaggcagaggctgagaagatccgcaaaatcggggaggcggaagcgrcagtcatcgaggcgatgggcraggcagaggctgagcggatgaagctcaaggcagaagcctaccagaaatacggggatgcagccaagatggccttggtgctagaggccctgccccagattgctgccaaaatcgctgccccacttaccaaggtcgatgagattgtggtcctcagtggagacaacagtaaggtcacatcagaagtgaaccgactgctggccgagctgcctgcctctgtgcatgccctcacaggcgtggacctgtctaagatacccctgatcaagaaggccactggtgtgcaggtgtgaggctcctrcaggcccactctcttcagcagccacccggccctccctccagcacccgttttaatcccacagaacaacgggaacgttactgactctggtgccttatctcgaagggaccagaagtgctgygtgttcaggccatctctggctgtcttcctgtctctcctgtctgtccacctcctcctcttcctctcctttaccccactttcactgccactttcatcaggtttgtgtctcatctccctgcgtgtcttttcctttgtctgtctttttctttcccccatgcacatcatgtagattaagctgaagatgtttattacaatcactctctgtggggggtggccctgctgctcctcagaatcctggtgccttgaagttctctgtgcatctgtccatcctccctatggccctggccagagctcagcatgggcaggggttctgggtaggacggtcactgtcctytctcctggactggtcttcccagccctaaaccctgccccaggaagcccacagcctcacctgctgctgcccctctaggtmtgggcagccatgacctgcagggcccagagacactgtccttcccctcatccacccaaggccccagccagcgctcataccctgtcctttctccctgaccccaagggcacagaggcaaggcctcctgtctacagcagcttcctcagtttcctactgccttaggaggcccctgcttstgctcagggaaggcctcttcatgggcatgttcctgctggggcggtgcggtttggtcccaactctgctaagttttctgagatgagggtctagccctgttggggacagaaaagtgtgtagaccttcttcctgctagggctgcactgtcctgggtgttgggcccttctggtggacaaggctgtgccaaccctgtacagaatcgagtgctgtagcctggccagaccccagagcccttgtgccawctttyttcctggccagagtgatggggttccagccatggggaagcaacccaatcctctgtctccttgctccaatggaggcagaagagcccaggacccaagcrtcttggcaggggtgctgtgaatgtccagtggtcccagctccccaccctggccctgccccagcctgtgtagctcttcctgcatgtggatgctgcatgtytggtytggggcttggatgttgcactgccccactgcctgtcccttctggtaaaataaagaactcttaatgcccacccct

SEQ ID NO: 2796 - DNA, 4385 bp, Homo sapiens
ccaggtgagaggcagcgggggcgcgtgggacggtgagccgagaacccgccgggacacagagaagccagcaaaggggctgcggaggatccgggtccagggaggagagcgcggcgcgggcggctgagcgcgaagagggagtgcacggagcgctggggtcacccgaggaaggcgcaccagagccgagtgggggaggggcttcctgaaggccgagagtgggaacaatgaggtcatcttcatggccttggacttggccagtctggcctcggtgcgggcctttgccactgcctttctgagctctgagccacggttggacatcctcatccacaatgccggtatcagttcctgtggccggacccgygaggcgtttaacctgctgcttcgggtgaaccatatcggtccctttctgctgacacatctgctgctgccttgcctgaaggcatgtgcccctagccgygtggtggtggtagcctcagctgcccactgtcggggacgtcttgacttcaaacgcctggaccgcccagtggtgggctggcrgcaggagctgcgggcatatgctgacactaagctggctaatgtactgtttgcccgggagctcsccaaccagcttgaggccactggcgtcacctgctatgcagcccacccagggcctgtgaactcggagctgttcctgcgccatgttcctggatggctgcgcccacttttgcgcccattggcttggctggtgctccgggcaccaagagggggtgcccagacacccctgtattgtgctctacaagagggcatcgagcccctcagtgggagatattttgccaactgccatgtggaagaggtgcctccagctgcccgagacgaccgggcagcccatcggctatgggaggccagcaagaggctggcagggcttgggcctggggaggatgctgaacccgatgaagacccccagtctgaggactcagaggccccatcttctcwaagcaccccccaccctgaggagcccacagtttctcaaccttaccccagccctcagagctcaccagatttgtctaagatgacgcaccgaattcaggctaaagttgagcctgagatccagctctcctaaccctcaggccaggatgcttgccatggcacttcatggtccttgaaaacctcggatgtgtgygaggccatgccctggacactgacgggtttgtgatcttgacctccgtggttactttctggggccccaagctgtgccctggacatctcttttcctggttgaaggaataatgggtgattatttcttcctgagagtgacagtaaccccagatggagagataggggtatgctagacactgtgcttctcggaaatttggatgtagtattttcaggccccacccttattgattctgatcagctctggagcagaggcagggagtttgcaatgtgatgcactgccaacattgagaattagtgaactgatccctttgcaaccgtctagctaggtagttaaattacccccatgttaatgaarcggaattaggctcccgagctaagggactcgcctagggtctcacagtgagtaggaggagggcctgggatctgaacccaagggtctgaggccagggccgactgccgtaagatgggtgctgagaagtgagtcagggcagggcagctggtatcgaggtgccccatgggagtaaggggacgccttccgggcggatgcagggctggggtcatctgtatctgaagcccctcggaataaagcgcgttgaccgccgaagctgcgctcactcctgcctcaacgcgccggccccgccctccgccgccacacttccggcggggctgcgaccgcagaggggcgcgggcgagcgagcgggcggccggccgctgggggtggcgggataggctgggcgcggccggcgctgcagacccgctgctgttgtccgggtctgtgcggtcccgagggccctccgtgccgccggcgccatgggcaattgccacacggtggggcccaacgaggcgctggtggtttcagggggctgttgtggttccgactataaacagtacgtgtttggcggctgggcctgggcctggtggtgtatctccgacactcagaggtgaagatcatgacggagaaggaactcctggccgtggcttgtgagcagtttctgggtaagaatgtgcaggacatcaaaaacgtcgtcctgcagaccctggagggacatctgcgctccatcctcgggaccctgacagtggagcagatttatcaggaccgggaccagtttgccaagctggtgcgggaggtggcagcccctgatgttggccgcatgggcattgagatcctcagcttcaccatcaaggacgtgtatgacaaagtggactatctgagctccctgggcaagacgcagactgccgtggtgcagagagatgctgacattggcgtggccgaggctgaacgggacgcaggcatccgggaagctgaktgcaagaaggagatgctggatgtgaagttcatggcagacaccaagattgctgactctaagcgagccttcgagctgcaaaagtcagccttcagtgaggaggttaacatcaagacagctgaggcccagttggcctatgagctgcagggggcccgtgaacagcagaagatccggcaggaagagattgagattgaggttgtgcagcgcaagaaacagattgccgtggaggcacaggagatcctgcgtacggacaaggagctcatcgctacagtgcgccggcctgccgaggccgaggcccaccgcatccagcagattgccgagggtgaaaaggtgaagcaggtcctcttggcacaggcagaggctgagaagatccgcaaaatcggggaggcggaagcgrcagtcatcgaggcgatgggcraggcagaggctgagcggatgaagctcaaggcagaagcctaccagaaatacggggatgcagccaagatggccttggtgctagaggccctgccccagattgctgccaaaatcgctgccccacttaccaaggtcgatgagattgtggtcctcagtggagacaacagtaaggtcacatcagaagtgaaccgactgctggccgagctgcctgcctctgtgcatgccctcacaggcgtggacctgtctaagatacccctgatcaagaaggccactggtgtgcaggtgtgaggctcctrcaggcccactctcttcagcagccacccggccctccctccagcacccgttttaatcccacagaacaacgggaacgttactgactctggtgccttatctcgaagggaccagaagtgctgygtgttcaggccatctctggctgtcttcctgtctctcctgtctgtccacctcctcctcttcctctcctttaccccactttcactgccactttcatcaggtttgtgtctcatctccctgcgtgtcttttcctttgtctgtctttttctttcccccatgcacatcatgtagattaagctgaagatgtttattacaatcactctctgtggggggtggccctgctgctcctcagaatcctggtgccttgaagttctctgtgcatctgtccatcctccctatggccctggccagagctcagcatgggcaggggttctgggtaggacggtcactgtcctytctcctggactggtcttcccagccctaaaccctgccccaggaagcccacagcctcacctgctgctgcccctctaggtmtgggcagccatgacctgcagggcccagagacactgtccttcccctcatccacccaaggccccagccagcgctcataccctgtcctttctccctgaccccaagggcacagaggcaaggcctcctgtctacagcagcttcctcagtttcctactgccttaggaggcccctgcttstgctcagggaaggcctcttcatgggcatgttcctgctggggcggtgcggtttggtcccaactctgctaagttttctgagatgagggtctagccctgttggggacagaaaagtgtgtagaccttcttcctgctagggctgcactgtcctgggtgttgggcccttctggtggacaaggctgtgccaaccctgtacagaatcgagtgctgtagcctggccagaccccagagcccttgtgccawctttyttcctggccagagtgatggggttccagccatggggaagcaacccaatcctctgtctccttgctccaatggaggcagaagagcccaggacccaagcrtcttggcaggggtgctgtgaatgtccagtggtcccagctccccaccctggccctgccccagcctgtgtagctcttcctgcatgtggatgctgcatgtytggtytggggcttggatgttgcactgccccactgcctgtcccttctggtaaaataaagaactcttaatgcccacccct

SEQ ID NO: 2797 - DNA, 2132 bp, Homo sapiens
cgacgcacgcctagggggcgctcgcagggccggcgcgcacccgcacgcgcacacgcccctgcccagcctcctgcccgcctccgccttcggaggctgacgcgcccgggcgccgttccaggcctgtgcagggcggatcggcagccgcctggcggcgatccagggcggtgcggggcctgggcgggagccgggaggcgcggccggcatggaggcgctgctgctgggcgcggggttgctgctgggcgcttacgtgcttgtctactacaacctggtgaaggccccgccgtgcggcggcatgggcaacctgcggggccgcacggccgtggtcacgggagagtgggaacaatgaggtcatcttcatggccttggacttggccagtctggcctcggtgcgggcctttgccactgcctttctgagctctgagccacggttggacatcctcatccacaatgccggtatcagttcctgtggccggacccgygaggcgtttaacctgctgcttcgggtgaaccatatcggtccctttctgctgacacatctgctgctgccttgcctgaaggcatgtgcccctagccgygtggtggtggtagcctcagctgcccactgtcggggacgtcttgacttcaaacgcctggaccgcccagtggtgggctggcrgcaggagctgcgggcatatgctgacactaagctggctaatgtactgtttgcccgggagctcsccaaccagcttgaggccactggcgtcacctgctatgcagcccacccagggcctgtgaactcggagctgttcctgcgccatgttcctggatggctgcgcccacttttgcgcccattggcttggctggtgctccgggcaccaagagggggtgcccagacacccctgtattgtgctctacaagagggcatcgagcccctcagtgggagatattttgccaactgccatgtggaagaggtgcctccagctgcccgagacgaccgggcagcccatcggctatgggaggccagcaagaggctggcagggcttgggcctggggaggatgctgaacccgatgaagacccccagtctgaggactcagaggccccatcttctcwaagcaccccccaccctgaggagcccacagtttctcaaccttaccccagccctcagagctcaccagatttgtctaagatgacgcaccgaattcaggctaaagttgagcctgagatccagctctcctaaccctcaggccaggatgcttgccatggcacttcatggtccttgaaaacctcggatgtgtgygaggccatgccctggacactgacgggtttgtgatcttgacctccgtggttactttctggggccccaagctgtgccctggacatctcttttcctggttgaaggaataatgggtgattatttcttcctgagagtgacagtaaccccagatggagagataggggtatgctagacactgtgcttctcggaaatttggatgtagtattttcaggccccacccttattgattctgatcagctctggagcagaggcagggagtttgcaatgtgatgcactgccaacattgagaattagtgaactgatccctttgcaaccgtctagctaggtagttaaattacccccatgttaatgaarcggaattaggctcccgagctaagggactcgcctagggtctcacagtgagtaggaggagggcctgggatctgaacccaagggtctgaggccagggccgactgccgtaagatgggtgctgagaagtgagtcagggcagggcagctggtatcgaggtgccccatgggagtaaggggacgccttccgggcggatgcagggctggggtcatctgtatctgaagcccctcggaataaagcgcgttgaccgccgaagctgcgctcactcctgcctcaacgcgccggccccgccctccgccgccacacttccggcggggctgcgaccgcagaggggcgcgggcgagcgagcgggcggccggccgctgggggtggcgggataggctgggcgcggccggcgctgcagacccgctgctgttgtccgggtctgtgcggtcccgagggccctccgtgccgccggcgccatgggcaattgccacacggtggggcccaacgaggcgctggtggtttcag

SEQ ID NO: 2798 - DNA, 2217 bp, Homo sapiens
gcgcacccgcacgcgcacacgcccctgcccagcctcctgcccgcctccgccttcggaggctgacgcgcccgggcgccgttccaggcctgtgcagggcggatcggcagccgcctggcggcgatccagggcggtgcggggcctgggcgggagccgggaggcgcggccggcatggaggcgctgctgctgggcgcggggttgctgctgggcgcttacgtgcttgtctactacaacctggtgaaggccccgccgtgcggcggcatgggcaacctgcggggccgcacggccgtggtcacgggcgccaacagcggcatcggaaagatgacggcgctggagctggcgcgccggggagcgcgcgtggtgctggcctgccgcagccaggagcgcggggaggcggctgccttcgacctccgccaggagagtgggaacaatgaggtcatcttcatggccttggacttggccagtctggcctcggtgcgggcctttgccactgcctttctgagctctgagccacggttggacatcctcatccacaatgccggtatcagttcctgtggccggacccgygaggcgtttaacctgctgcttcgggtgaaccatatcggtccctttctgctgacacatctgctgctgccttgcctgaaggcatgtgcccctagccgygtggtggtggtagcctcagctgcccactgtcggggacgtcttgacttcaaacgcctggaccgcccagtggtgggctggcrgcaggagctgcgggcatatgctgacactaagctggctaatgtactgtttgcccgggagctcsccaaccagcttgaggccactggcgtcacctgctatgcagcccacccagggcctgtgaactcggagctgttcctgcgccatgttcctggatggctgcgcccacttttgcgcccattggcttggctggtgctccgggcaccaagagggggtgcccagacacccctgtattgtgctctacaagagggcatcgagcccctcagtgggagatattttgccaactgccatgtggaagaggtgcctccagctgcccgagacgaccgggcagcccatcggctatgggaggccagcaagaggctggcagggcttgggcctggggaggatgctgaacccgatgaagacccccagtctgaggactcagaggccccatcttctcwaagcaccccccaccctgaggagcccacagtttctcaaccttaccccagccctcagagctcaccagatttgtctaagatgacgcaccgaattcaggctaaagttgagcctgagatccagctctcctaaccctcaggccaggatgcttgccatggcacttcatggtccttgaaaacctcggatgtgtgygaggccatgccctggacactgacgggtttgtgatcttgacctccgtggttactttctggggccccaagctgtgccctggacatctcttttcctggttgaaggaataatgggtgattatttcttcctgagagtgacagtaaccccagatggagagataggggtatgctagacactgtgcttctcggaaatttggatgtagtattttcaggccccacccttattgattctgatcagctctggagcagaggcagggagtttgcaatgtgatgcactgccaacattgagaattagtgaactgatccctttgcaaccgtctagctaggtagttaaattacccccatgttaatgaarcggaattaggctcccgagctaagggactcgcctagggtctcacagtgagtaggaggagggcctgggatctgaacccaagggtctgaggccagggccgactgccgtaagatgggtgctgagaagtgagtcagggcagggcagctggtatcgaggtgccccatgggagtaaggggacgccttccgggcggatgcagggctggggtcatctgtatctgaagcccctcggaataaagcgcgttgaccgccgaagctgcgctcactcctgcctcaacgcgccggccccgccctccgccgccacacttccggcggggctgcgaccgcagaggggcgcgggcgagcgagcgggcggccggccgctgggggtggcgggataggctgggcgcggccggcgctgcagacccgctgctgttgtccgggtctgtgcggtcccgagggccctccgtgccgccggcgccatgggcaattgccacacggtggggcccaacgaggcgctggtggtttcag

SEQ ID NO: 2799 - DNA, 2538 bp, Homo sapiens
gtttgctgtgtcccctccttcccttcctgtccctacctctccccaccccctggctgctcctcagactgtctctggaggttatgaccatcctgtgtcgctgtgagaatattgagacgtcggagggggttccactattcgtaacaggggttgcacaggatttccctagagattatgacgttgcagccccgctgcgaggacgtagagacggccgagggggtagctttaactgtgacgggtgtcgcccaggtgaagatcatgacggagaaggaactcctggccgtggcttgtgagcagtttctgggtaagaatgtgcaggacatcaaaaacgtcgtcctgcagaccctggagggacatctgcgctccatcctcgggaccctgacagtggagcagatttatcaggaccgggaccagtttgccaagctggtgcgggaggtggcagcccctgatgttggccgcatgggcattgagatcctcagcttcaccatcaaggacgtgtatgacaaagtggactatctgagctccctgggcaagacgcagactgccgtggtgcagagagatgctgacattggcgtggccgaggctgaacgggacgcaggcatccgggaagctgaktgcaagaaggagatgctggatgtgaagttcatggcagacaccaagattgctgactctaagcgagccttcgagctgcaaaagtcagccttcagtgaggaggttaacatcaagacagctgaggcccagttggcctatgagctgcagggggcccgtgaacagcagaagatccggcaggaagagattgagattgaggttgtgcagcgcaagaaacagattgccgtggaggcacaggagatcctgcgtacggacaaggagctcatcgctacagtgcgccggcctgccgaggccgaggcccaccgcatccagcagattgccgagggtgaaaaggtgaagcaggtcctcttggcacaggcagaggctgagaagatccgcaaaatcggggaggcggaagcgrcagtcatcgaggcgatgggcraggcagaggctgagcggatgaagctcaaggcagaagcctaccagaaatacggggatgcagccaagatggccttggtgctagaggccctgccccagattgctgccaaaatcgctgccccacttaccaaggtcgatgagattgtggtcctcagtggagacaacagtaaggtcacatcagaagtgaaccgactgctggccgagctgcctgcctctgtgcatgccctcacaggcgtggacctgtctaagatacccctgatcaagaaggccactggtgtgcaggtgtgaggctcctrcaggcccactctcttcagcagccacccggccctccctccagcacccgttttaatcccacagaacaacgggaacgttactgactctggtgccttatctcgaagggaccagaagtgctgygtgttcaggccatctctggctgtcttcctgtctctcctgtctgtccacctcctcctcttcctctcctttaccccactttcactgccactttcatcaggtttgtgtctcatctccctgcgtgtcttttcctttgtctgtctttttctttcccccatgcacatcatgtagattaagctgaagatgtttattacaatcactctctgtggggggtggccctgctgctcctcagaatcctggtgccttgaagttctctgtgcatctgtccatcctccctatggccctggccagagctcagcatgggcaggggttctgggtaggacggtcactgtcctytctcctggactggtcttcccagccctaaaccctgccccaggaagcccacagcctcacctgctgctgcccctctaggtmtgggcagccatgacctgcagggcccagagacactgtccttcccctcatccacccaaggccccagccagcgctcataccctgtcctttctccctgaccccaagggcacagaggcaaggcctcctgtctacagcagcttcctcagtttcctactgccttaggaggcccctgcttstgctcagggaaggcctcttcatgggcatgttcctgctggggcggtgcggtttggtcccaactctgctaagttttctgagatgagggtctagccctgttggggacagaaaagtgtgtagaccttcttcctgctagggctgcactgtcctgggtgttgggcccttctggtggacaaggctgtgccaaccctgtacagaatcgagtgctgtagcctggccagaccccagagcccttgtgccawctttyttcctggccagagtgatggggttccagccatggggaagcaacccaatcctctgtctccttgctccaatggaggcagaagagcccaggacccaagcrtcttggcaggggtgctgtgaatgtccagtggtcccagctccccaccctggccctgccccagcctgtgtagctcttcctgcatgtggatgctgcatgtytggtytggggcttggatgttgcactgccccactgcctgtcccttctggtaaaataaagaactcttaatgcccacccct

SEQ ID NO: 2800 - DNA, 2003 bp, Homo sapiens
cacgcctagggggcgctcgcagggccggcgcgcacccgcacgcgcacacgcccctgcccagcctcctgcccgcctccgccttcggaggctgacgcgcccgggcgccgttccaggcctgtgcagggcggatcggcagccgcctggcggcgatccagggcggtgcggggcctgggcgggagccgggaggcgcggccggcatggaggcgctgctgctgggcgcggggttgctgctgggcgcttacgtgcttgtctactacaacctggtgaaggccccgccgtgcggcggcatgggcaacctgcggggccgcacggccgtggtcacgggtatcagttcctgtggccggacccgygaggcgtttaacctgctgcttcgggtgaaccatatcggtccctttctgctgacacatctgctgctgccttgcctgaaggcatgtgcccctagccgygtggtggtggtagcctcagctgcccactgtcggggacgtcttgacttcaaacgcctggaccgcccagtggtgggctggcrgcaggagctgcgggcatatgctgacactaagctggctaatgtactgtttgcccgggagctcsccaaccagcttgaggccactggcgtcacctgctatgcagcccacccagggcctgtgaactcggagctgttcctgcgccatgttcctggatggctgcgcccacttttgcgcccattggcttggctggtgctccgggcaccaagagggggtgcccagacacccctgtattgtgctctacaagagggcatcgagcccctcagtgggagatattttgccaactgccatgtggaagaggtgcctccagctgcccgagacgaccgggcagcccatcggctatgggaggccagcaagaggctggcagggcttgggcctggggaggatgctgaacccgatgaagacccccagtctgaggactcagaggccccatcttctcwaagcaccccccaccctgaggagcccacagtttctcaaccttaccccagccctcagagctcaccagatttgtctaagatgacgcaccgaattcaggctaaagttgagcctgagatccagctctcctaaccctcaggccaggatgcttgccatggcacttcatggtccttgaaaacctcggatgtgtgygaggccatgccctggacactgacgggtttgtgatcttgacctccgtggttactttctggggccccaagctgtgccctggacatctcttttcctggttgaaggaataatgggtgattatttcttcctgagagtgacagtaaccccagatggagagataggggtatgctagacactgtgcttctcggaaatttggatgtagtattttcaggccccacccttattgattctgatcagctctggagcagaggcagggagtttgcaatgtgatgcactgccaacattgagaattagtgaactgatccctttgcaaccgtctagctaggtagttaaattacccccatgttaatgaarcggaattaggctcccgagctaagggactcgcctagggtctcacagtgagtaggaggagggcctgggatctgaacccaagggtctgaggccagggccgactgccgtaagatgggtgctgagaagtgagtcagggcagggcagctggtatcgaggtgccccatgggagtaaggggacgccttccgggcggatgcagggctggggtcatctgtatctgaagcccctcggaataaagcgcgttgaccgccgaagctgcgctcactcctgcctcaacgcgccggccccgccctccgccgccacacttccggcggggctgcgaccgcagaggggcgcgggcgagcgagcgggcggccggccgctgggggtggcgggataggctgggcgcggccggcgctgcagacccgctgctgttgtccgggtctgtgcggtcccgagggccctccgtgccgccggcgccatgggcaattgccacacggtggggcccaacgaggcgctggtggtttcag

SEQ ID NO: 2801 - DNA, 2512 bp, Homo sapiens
gattaccggcactgcccgcccaggagacgcggatgcggcctctacagggggctgttgtggttccgactataaacagtacgtgtttggcggctgggcctgggcctggtggtgtatctccgacactcagaggatttccctagagattatgacgttgcagccccgctgcgaggacgtagagacggccgagggggtagctttaactgtgacgggtgtcgcccaggtgaagatcatgacggagaaggaactcctggccgtggcttgtgagcagtttctgggtaagaatgtgcaggacatcaaaaacgtcgtcctgcagaccctggagggacatctgcgctccatcctcgggaccctgacagtggagcagatttatcaggaccgggaccagtttgccaagctggtgcgggaggtggcagcccctgatgttggccgcatgggcattgagatcctcagcttcaccatcaaggacgtgtatgacaaagtggactatctgagctccctgggcaagacgcagactgccgtggtgcagagagatgctgacattggcgtggccgaggctgaacgggacgcaggcatccgggaagctgaktgcaagaaggagatgctggatgtgaagttcatggcagacaccaagattgctgactctaagcgagccttcgagctgcaaaagtcagccttcagtgaggaggttaacatcaagacagctgaggcccagttggcctatgagctgcagggggcccgtgaacagcagaagatccggcaggaagagattgagattgaggttgtgcagcgcaagaaacagattgccgtggaggcacaggagatcctgcgtacggacaaggagctcatcgctacagtgcgccggcctgccgaggccgaggcccaccgcatccagcagattgccgagggtgaaaaggtgaagcaggtcctcttggcacaggcagaggctgagaagatccgcaaaatcggggaggcggaagcgrcagtcatcgaggcgatgggcraggcagaggctgagcggatgaagctcaaggcagaagcctaccagaaatacggggatgcagccaagatggccttggtgctagaggccctgccccagattgctgccaaaatcgctgccccacttaccaaggtcgatgagattgtggtcctcagtggagacaacagtaaggtcacatcagaagtgaaccgactgctggccgagctgcctgcctctgtgcatgccctcacaggcgtggacctgtctaagatacccctgatcaagaaggccactggtgtgcaggtgtgaggctcctrcaggcccactctcttcagcagccacccggccctccctccagcacccgttttaatcccacagaacaacgggaacgttactgactctggtgccttatctcgaagggaccagaagtgctgygtgttcaggccatctctggctgtcttcctgtctctcctgtctgtccacctcctcctcttcctctcctttaccccactttcactgccactttcatcaggtttgtgtctcatctccctgcgtgtcttttcctttgtctgtctttttctttcccccatgcacatcatgtagattaagctgaagatgtttattacaatcactctctgtggggggtggccctgctgctcctcagaatcctggtgccttgaagttctctgtgcatctgtccatcctccctatggccctggccagagctcagcatgggcaggggttctgggtaggacggtcactgtcctytctcctggactggtcttcccagccctaaaccctgccccaggaagcccacagcctcacctgctgctgcccctctaggtmtgggcagccatgacctgcagggcccagagacactgtccttcccctcatccacccaaggccccagccagcgctcataccctgtcctttctccctgaccccaagggcacagaggcaaggcctcctgtctacagcagcttcctcagtttcctactgccttaggaggcccctgcttstgctcagggaaggcctcttcatgggcatgttcctgctggggcggtgcggtttggtcccaactctgctaagttttctgagatgagggtctagccctgttggggacagaaaagtgtgtagaccttcttcctgctagggctgcactgtcctgggtgttgggcccttctggtggacaaggctgtgccaaccctgtacagaatcgagtgctgtagcctggccagaccccagagcccttgtgccawctttyttcctggccagagtgatggggttccagccatggggaagcaacccaatcctctgtctccttgctccaatggaggcagaagagcccaggacccaagcrtcttggcaggggtgctgtgaatgtccagtggtcccagctccccaccctggccctgccccagcctgtgtagctcttcctgcatgtggatgctgcatgtytggtytggggcttggatgttgcactgccccactgcctgtcccttctggtaaaataaagaactcttaatgcccacccct

SEQ ID NO: 2802 - DNA, 4476 bp, Homo sapiens
ccaggtgagaggcagcgggggcgcgtgggacggtgagccgagaacccgccgggacacagagaagccagcaaaggggctgcggaggatccgggtccagggaggagagcgcggcgcgggcggctgagcgcgaagagggagtgcacggagcgctggggtcacccgaggaaggcgcaccagagccgagtgggggaggggcttcctgaaggccgagagtgggaacaatgaggtcatcttcatggccttggacttggccagtctggcctcggtgcgggcctttgccactgcctttctgagctctgagccacggttggacatcctcatccacaatgccggtatcagttcctgtggccggacccgygaggcgtttaacctgctgcttcgggtgaaccatatcggtccctttctgctgacacatctgctgctgccttgcctgaaggcatgtgcccctagccgygtggtggtggtagcctcagctgcccactgtcggggacgtcttgacttcaaacgcctggaccgcccagtggtgggctggcrgcaggagctgcgggcatatgctgacactaagctggctaatgtactgtttgcccgggagctcsccaaccagcttgaggccactggcgtcacctgctatgcagcccacccagggcctgtgaactcggagctgttcctgcgccatgttcctggatggctgcgcccacttttgcgcccattggcttggctggtgctccgggcaccaagagggggtgcccagacacccctgtattgtgctctacaagagggcatcgagcccctcagtgggagatattttgccaactgccatgtggaagaggtgcctccagctgcccgagacgaccgggcagcccatcggctatgggaggccagcaagaggctggcagggcttgggcctggggaggatgctgaacccgatgaagacccccagtctgaggactcagaggccccatcttctcwaagcaccccccaccctgaggagcccacagtttctcaaccttaccccagccctcagagctcaccagatttgtctaagatgacgcaccgaattcaggctaaagttgagcctgagatccagctctcctaaccctcaggccaggatgcttgccatggcacttcatggtccttgaaaacctcggatgtgtgygaggccatgccctggacactgacgggtttgtgatcttgacctccgtggttactttctggggccccaagctgtgccctggacatctcttttcctggttgaaggaataatgggtgattatttcttcctgagagtgacagtaaccccagatggagagataggggtatgctagacactgtgcttctcggaaatttggatgtagtattttcaggccccacccttattgattctgatcagctctggagcagaggcagggagtttgcaatgtgatgcactgccaacattgagaattagtgaactgatccctttgcaaccgtctagctaggtagttaaattacccccatgttaatgaarcggaattaggctcccgagctaagggactcgcctagggtctcacagtgagtaggaggagggcctgggatctgaacccaagggtctgaggccagggccgactgccgtaagatgggtgctgagaagtgagtcagggcagggcagctggtatcgaggtgccccatgggagtaaggggacgccttccgggcggatgcagggctggggtcatctgtatctgaagcccctcggaataaagcgcgttgaccgccgaagctgcgctcactcctgcctcaacgcgccggccccgccctccgccgccacacttccggcggggctgcgaccgcagaggggcgcgggcgagcgagcgggcggccggccgctgggggtggcgggataggctgggcgcggccggcgctgcagacccgctgctgttgtccgggtctgtgcggtcccgagggccctccgtgccgccggcgccatgggcaattgccacacggtggggcccaacgaggcgctggtggtttcagggggctgttgtggttccgactataaacagtacgtgtttggcggctgggcctgggcctggtggtgtatctccgacactcagaggatttccctagagattatgacgttgcagccccgctgcgaggacgtagagacggccgagggggtagctttaactgtgacgggtgtcgcccaggtgaagatcatgacggagaaggaactcctggccgtggcttgtgagcagtttctgggtaagaatgtgcaggacatcaaaaacgtcgtcctgcagaccctggagggacatctgcgctccatcctcgggaccctgacagtggagcagatttatcaggaccgggaccagtttgccaagctggtgcgggaggtggcagcccctgatgttggccgcatgggcattgagatcctcagcttcaccatcaaggacgtgtatgacaaagtggactatctgagctccctgggcaagacgcagactgccgtggtgcagagagatgctgacattggcgtggccgaggctgaacgggacgcaggcatccgggaagctgaktgcaagaaggagatgctggatgtgaagttcatggcagacaccaagattgctgactctaagcgagccttcgagctgcaaaagtcagccttcagtgaggaggttaacatcaagacagctgaggcccagttggcctatgagctgcagggggcccgtgaacagcagaagatccggcaggaagagattgagattgaggttgtgcagcgcaagaaacagattgccgtggaggcacaggagatcctgcgtacggacaaggagctcatcgctacagtgcgccggcctgccgaggccgaggcccaccgcatccagcagattgccgagggtgaaaaggtgaagcaggtcctcttggcacaggcagaggctgagaagatccgcaaaatcggggaggcggaagcgrcagtcatcgaggcgatgggcraggcagaggctgagcggatgaagctcaaggcagaagcctaccagaaatacggggatgcagccaagatggccttggtgctagaggccctgccccagattgctgccaaaatcgctgccccacttaccaaggtcgatgagattgtggtcctcagtggagacaacagtaaggtcacatcagaagtgaaccgactgctggccgagctgcctgcctctgtgcatgccctcacaggcgtggacctgtctaagatacccctgatcaagaaggccactggtgtgcaggtgtgaggctcctrcaggcccactctcttcagcagccacccggccctccctccagcacccgttttaatcccacagaacaacgggaacgttactgactctggtgccttatctcgaagggaccagaagtgctgygtgttcaggccatctctggctgtcttcctgtctctcctgtctgtccacctcctcctcttcctctcctttaccccactttcactgccactttcatcaggtttgtgtctcatctccctgcgtgtcttttcctttgtctgtctttttctttcccccatgcacatcatgtagattaagctgaagatgtttattacaatcactctctgtggggggtggccctgctgctcctcagaatcctggtgccttgaagttctctgtgcatctgtccatcctccctatggccctggccagagctcagcatgggcaggggttctgggtaggacggtcactgtcctytctcctggactggtcttcccagccctaaaccctgccccaggaagcccacagcctcacctgctgctgcccctctaggtmtgggcagccatgacctgcagggcccagagacactgtccttcccctcatccacccaaggccccagccagcgctcataccctgtcctttctccctgaccccaagggcacagaggcaaggcctcctgtctacagcagcttcctcagtttcctactgccttaggaggcccctgcttstgctcagggaaggcctcttcatgggcatgttcctgctggggcggtgcggtttggtcccaactctgctaagttttctgagatgagggtctagccctgttggggacagaaaagtgtgtagaccttcttcctgctagggctgcactgtcctgggtgttgggcccttctggtggacaaggctgtgccaaccctgtacagaatcgagtgctgtagcctggccagaccccagagcccttgtgccawctttyttcctggccagagtgatggggttccagccatggggaagcaacccaatcctctgtctccttgctccaatggaggcagaagagcccaggacccaagcrtcttggcaggggtgctgtgaatgtccagtggtcccagctccccaccctggccctgccccagcctgtgtagctcttcctgcatgtggatgctgcatgtytggtytggggcttggatgttgcactgccccactgcctgtcccttctggtaaaataaagaactcttaatgcccacccct

SEQ ID NO: 2803 - DNA, 4852 bp, Homo sapiens
ctagggggcgctcgcagggccggcgcgcacccgcacgcgcacacgcccctgcccagcctcctgcccgcctccgccttcggaggctgacgcgcccgggcgccgttccaggcctgtgcagggcggatcggcagccgcctggcggcgatccagggcggtgcggggcctgggcgggagccgggaggcgcggccggcatggaggcgctgctgctgggcgcggggttgctgctgggcgcttacgtgcttgtctactacaacctggtgaaggccccgccgtgcggcggcatgggcaacctgcggggccgcacggccgtggtcacgggtgagtgcggaggcgggtgagtgcgagctggcggggcgcgcggagaggaggccgggccggcggtagcagcggcccgccgggctcagctcagctcggctcccgcccgcggtccgcaggcgccaacagcggcatcggaaagatgacggcgctggagctggcgcgccggggagcgcgcgtggtgctggcctgccgcagccaggagcgcggggaggcggctgccttcgacctccgccaggagagtgggaacaatgaggtcatcttcatggccttggacttggccagtctggcctcggtgcgggcctttgccactgcctttctgagctctgagccacggttggacatcctcatccacaatgccggtatcagttcctgtggccggacccgygaggcgtttaacctgctgcttcgggtgaaccatatcggtccctttctgctgacacatctgctgctgccttgcctgaaggcatgtgcccctagccgygtggtggtggtagcctcagctgcccactgtcggggacgtcttgacttcaaacgcctggaccgcccagtggtgggctggcrgcaggagctgcgggcatatgctgacactaagctggctaatgtactgtttgcccgggagctcsccaaccagcttgaggccactggcgtcacctgctatgcagcccacccagggcctgtgaactcggagctgttcctgcgccatgttcctggatggctgcgcccacttttgcgcccattggcttggctggtgctccgggcaccaagagggggtgcccagacacccctgtattgtgctctacaagagggcatcgagcccctcagtgggagatattttgccaactgccatgtggaagaggtgcctccagctgcccgagacgaccgggcagcccatcggctatgggaggccagcaagaggctggcagggcttgggcctggggaggatgctgaacccgatgaagacccccagtctgaggactcagaggccccatcttctcwaagcaccccccaccctgaggagcccacagtttctcaaccttaccccagccctcagagctcaccagatttgtctaagatgacgcaccgaattcaggctaaagttgagcctgagatccagctctcctaaccctcaggccaggatgcttgccatggcacttcatggtccttgaaaacctcggatgtgtgygaggccatgccctggacactgacgggtttgtgatcttgacctccgtggttactttctggggccccaagctgtgccctggacatctcttttcctggttgaaggaataatgggtgattatttcttcctgagagtgacagtaaccccagatggagagataggggtatgctagacactgtgcttctcggaaatttggatgtagtattttcaggccccacccttattgattctgatcagctctggagcagaggcagggagtttgcaatgtgatgcactgccaacattgagaattagtgaactgatccctttgcaaccgtctagctaggtagttaaattacccccatgttaatgaarcggaattaggctcccgagctaagggactcgcctagggtctcacagtgagtaggaggagggcctgggatctgaacccaagggtctgaggccagggccgactgccgtaagatgggtgctgagaagtgagtcagggcagggcagctggtatcgaggtgccccatgggagtaaggggacgccttccgggcggatgcagggctggggtcatctgtatctgaagcccctcggaataaagcgcgttgaccgccgaagctgcgctcactcctgcctcaacgcgccggccccgccctccgccgccacacttccggcggggctgcgaccgcagaggggcgcgggcgagcgagcgggcggccggccgctgggggtggcgggataggctgggcgcggccggcgctgcagacccgctgctgttgtccgggtctgtgcggtcccgagggccctccgtgccgccggcgccatgggcaattgccacacggtggggcccaacgaggcgctggtggtttcagggggctgttgtggttccgactataaacagtacgtgtttggcggctgggcctgggcctggtggtgtatctccgacactcagagactgtctctggaggttatgaccatcctgtgtcgctgtgagaatattgagacgtcggagggggttccactattcgtaacaggggttgcacaggatttccctagagattatgacgttgcagccccgctgcgaggacgtagagacggccgagggggtagctttaactgtgacgggtgtcgcccaggtgaagatcatgacggagaaggaactcctggccgtggcttgtgagcagtttctgggtaagaatgtgcaggacatcaaaaacgtcgtcctgcagaccctggagggacatctgcgctccatcctcgggaccctgacagtggagcagatttatcaggaccgggaccagtttgccaagctggtgcgggaggtggcagcccctgatgttggccgcatgggcattgagatcctcagcttcaccatcaaggacgtgtatgacaaagtggactatctgagctccctgggcaagacgcagactgccgtggtgcagagagatgctgacattggcgtggccgaggctgaacgggacgcaggcatccgggaagctgaktgcaagaaggagatgctggatgtgaagttcatggcagacaccaagattgctgactctaagcgagccttcgagctgcaaaagtcagccttcagtgaggaggttaacatcaagacagctgaggcccagttggcctatgagctgcagggggcccgtgaacagcagaagatccggcaggaagagattgagattgaggttgtgcagcgcaagaaacagattgccgtggaggcacaggagatcctgcgtacggacaaggagctcatcgctacagtgcgccggcctgccgaggccgaggcccaccgcatccagcagattgccgagggtgaaaaggtgaagcaggtcctcttggcacaggcagaggctgagaagatccgcaaaatcggggaggcggaagcgrcagtcatcgaggcgatgggcraggcagaggctgagcggatgaagctcaaggcagaagcctaccagaaatacggggatgcagccaagatggccttggtgctagaggccctgccccagattgctgccaaaatcgctgccccacttaccaaggtcgatgagattgtggtcctcagtggagacaacagtaaggtcacatcagaagtgaaccgactgctggccgagctgcctgcctctgtgcatgccctcacaggcgtggacctgtctaagatacccctgatcaagaaggccactggtgtgcaggtgtgaggctcctrcaggcccactctcttcagcagccacccggccctccctccagcacccgttttaatcccacagaacaacgggaacgttactgactctggtgccttatctcgaagggaccagaagtgctgygtgttcaggccatctctggctgtcttcctgtctctcctgtctgtccacctcctcctcttcctctcctttaccccactttcactgccactttcatcaggtttgtgtctcatctccctgcgtgtcttttcctttgtctgtctttttctttcccccatgcacatcatgtagattaagctgaagatgtttattacaatcactctctgtggggggtggccctgctgctcctcagaatcctggtgccttgaagttctctgtgcatctgtccatcctccctatggccctggccagagctcagcatgggcaggggttctgggtaggacggtcactgtcctytctcctggactggtcttcccagccctaaaccctgccccaggaagcccacagcctcacctgctgctgcccctctaggtmtgggcagccatgacctgcagggcccagagacactgtccttcccctcatccacccaaggccccagccagcgctcataccctgtcctttctccctgaccccaagggcacagaggcaaggcctcctgtctacagcagcttcctcagtttcctactgccttaggaggcccctgcttstgctcagggaaggcctcttcatgggcatgttcctgctggggcggtgcggtttggtcccaactctgctaagttttctgagatgagggtctagccctgttggggacagaaaagtgtggacaaggctgtgccaaccctgtacagaatcgagtgctgtagcctggccagaccccagagcccttgtgccawctttyttcctggccagagtgatggggttccagccatggggaagcaacccaatcctctgtctccttgctccaatggaggcagaagagcccaggacccaagcrtcttggcaggggtgctgtgaatgtccagtggtcccagctccccaccctggccctgccccagcctgtgtagctcttcctgcatgtggatgctgcatgtytggtytggggcttggatgttgcactgccccactgcctgtcccttctggtaaaataaagaactcttaatgcc

SEQ ID NO: 2804 - DNA, 3832 bp, Homo sapiens
ggcctgtgaactcggagctgttcctgcgccatgttcctggatggctgcgcccacttttgcgcccattggcttggctggtgctccgggcaccaagagggggtgcccagacacccctgtattgtgctctacaagagggcatcgagcccctcagtgggagatattttgccaactgccatgtggaagaggtgcctccagctgcccgagacgaccgggcagcccatcggctatgggaggccagcaagaggctggcagggcttgggcctggggaggatgctgaacccgatgaagacccccagtctgaggactcagaggccccatcttctcwaagcaccccccaccctgaggagcccacagtttctcaaccttaccccagccctcagagctcaccagatttgtctaagatgacgcaccgaattcaggctaaagttgagcctgagatccagctctcctaaccctcaggccaggatgcttgccatggcacttcatggtccttgaaaacctcggatgtgtgygaggccatgccctggacactgacgggtttgtgatcttgacctccgtggttactttctggggccccaagctgtgccctggacatctcttttcctggttgaaggaataatgggtgattatttcttcctgagagtgacagtaaccccagatggagagataggggtatgctagacactgtgcttctcggaaatttggatgtagtattttcaggccccacccttattgattctgatcagctctggagcagaggcagggagtttgcaatgtgatgcactgccaacattgagaattagtgaactgatccctttgcaaccgtctagctaggtagttaaattacccccatgttaatgaarcggaattaggctcccgagctaagggactcgcctagggtctcacagtgagtaggaggagggcctgggatctgaacccaagggtctgaggccagggccgactgccgtaagatgggtgctgagaagtgagtcagggcagggcagctggtatcgaggtgccccatgggagtaaggggacgccttccgggcggatgcagggctggggtcatctgtatctgaagcccctcggaataaagcgcgttgaccgccgaagctgcgctcactcctgcctcaacgcgccggccccgccctccgccgccacacttccggcggggctgcgaccgcagaggggcgcgggcgagcgagcgggcggccggccgctgggggtggcgggataggctgggcgcggccggcgctgcagacccgctgctgttgtccgggtctgtgcggtcccgagggccctccgtgccgccggcgccatgggcaattgccacacggtggggcccaacgaggcgctggtggtttcagggggctgttgtggttccgactataaacagtacgtgtttggcggctgggcctgggcctggtggtgtatctccgacactcagaggatttccctagagattatgacgttgcagccccgctgcgaggacgtagagacggccgagggggtagctttaactgtgacgggtgtcgcccaggtgaagatcatgacggagaaggaactcctggccgtggcttgtgagcagtttctgggtaagaatgtgcaggacatcaaaaacgtcgtcctgcagaccctggagggacatctgcgctccatcctcgggaccctgacagtggagcagatttatcaggaccgggaccagtttgccaagctggtgcgggaggtggcagcccctgatgttggccgcatgggcattgagatcctcagcttcaccatcaaggacgtgtatgacaaagtggactatctgagctccctgggcaagacgcagactgccgtggtgcagagagatgctgacattggcgtggccgaggctgaacgggacgcaggcatccgggaagctgaktgcaagaaggagatgctggatgtgaagttcatggcagacaccaagattgctgactctaagcgagccttcgagctgcaaaagtcagccttcagtgaggaggttaacatcaagacagctgaggcccagttggcctatgagctgcagggggcccgtgaacagcagaagatccggcaggaagagattgagattgaggttgtgcagcgcaagaaacagattgccgtggaggcacaggagatcctgcgtacggacaaggagctcatcgctacagtgcgccggcctgccgaggccgaggcccaccgcatccagcagattgccgagggtgaaaaggtgaagcaggtcctcttggcacaggcagaggctgagaagatccgcaaaatcggggaggcggaagcgrcagtcatcgaggcgatgggcraggcagaggctgagcggatgaagctcaaggcagaagcctaccagaaatacggggatgcagccaagatggccttggtgctagaggccctgccccagattgctgccaaaatcgctgccccacttaccaaggtcgatgagattgtggtcctcagtggagacaacagtaaggtcacatcagaagtgaaccgactgctggccgagctgcctgcctctgtgcatgccctcacaggcgtggacctgtctaagatacccctgatcaagaaggccactggtgtgcaggtgtgaggctcctrcaggcccactctcttcagcagccacccggccctccctccagcacccgttttaatcccacagaacaacgggaacgttactgactctggtgccttatctcgaagggaccagaagtgctgygtgttcaggccatctctggctgtcttcctgtctctcctgtctgtccacctcctcctcttcctctcctttaccccactttcactgccactttcatcaggtttgtgtctcatctccctgcgtgtcttttcctttgtctgtctttttctttcccccatgcacatcatgtagattaagctgaagatgtttattacaatcactctctgtggggggtggccctgctgctcctcagaatcctggtgccttgaagttctctgtgcatctgtccatcctccctatggccctggccagagctcagcatgggcaggggttctgggtaggacggtcactgtcctytctcctggactggtcttcccagccctaaaccctgccccaggaagcccacagcctcacctgctgctgcccctctaggtmtgggcagccatgacctgcagggcccagagacactgtccttcccctcatccacccaaggccccagccagcgctcataccctgtcctttctccctgaccccaagggcacagaggcaaggcctcctgtctacagcagcttcctcagtttcctactgccttaggaggcccctgcttstgctcagggaaggcctcttcatgggcatgttcctgctggggcggtgcggtttggtcccaactctgctaagttttctgagatgagggtctagccctgttggggacagaaaagtgtgtagaccttcttcctgctagggctgcactgtcctgggtgttgggcccttctggtggacaaggctgtgccaaccctgtacagaatcgagtgctgtagcctggccagaccccagagcccttgtgccawctttyttcctggccagagtgatggggttccagccatggggaagcaacccaatcctctgtctccttgctccaatggaggcagaagagcccaggacccaagcrtcttggcaggggtgctgtgaatgtccagtggtcccagctccccaccctggccctgccccagcctgtgtagctcttcctgcatgtggatgctgcatgtytggtytggggcttggatgttgcactgccccactgcctgtcccttctggtaaaataaagaactcttaatgcccacccct

SEQ ID NO: 2805 - DNA, 2357 bp, Homo sapiens
ctagggggcgctcgcagggccggcgcgcacccgcacgcgcacacgcccctgcccagcctcctgcccgcctccgccttcggaggctgacgcgcccgggcgccgttccaggcctgtgcagggcggatcggcagccgcctggcggcgatccagggcggtgcggggcctgggcgggagccgggaggcgcggccggcatggaggcgctgctgctgggcgcggggttgctgctgggcgcttacgtgcttgtctactacaacctggtgaaggccccgccgtgcggcggcatgggcaacctgcggggccgcacggccgtggtcacgggtgagtgcggaggcgggtgagtgcgagctggcggggcgcgcggagaggaggccgggccggcggtagcagcggcccgccgggctcagctcagctcggctcccgcccgcggtccgcaggcgccaacagcggcatcggaaagatgacggcgctggagctggcgcgccggggagcgcgcgtggtgctggcctgccgcagccaggagcgcggggaggcggctgccttcgacctccgccaggagagtgggaacaatgaggtcatcttcatggccttggacttggccagtctggcctcggtgcgggcctttgccactgcctttctgagctctgagccacggttggacatcctcatccacaatgccggtatcagttcctgtggccggacccgygaggcgtttaacctgctgcttcgggtgaaccatatcggtccctttctgctgacacatctgctgctgccttgcctgaaggcatgtgcccctagccgygtggtggtggtagcctcagctgcccactgtcggggacgtcttgacttcaaacgcctggaccgcccagtggtgggctggcrgcaggagctgcgggcatatgctgacactaagctggctaatgtactgtttgcccgggagctcsccaaccagcttgaggccactggcgtcacctgctatgcagcccacccagggcctgtgaactcggagctgttcctgcgccatgttcctggatggctgcgcccacttttgcgcccattggcttggctggtgctccgggcaccaagagggggtgcccagacacccctgtattgtgctctacaagagggcatcgagcccctcagtgggagatattttgccaactgccatgtggaagaggtgcctccagctgcccgagacgaccgggcagcccatcggctatgggaggccagcaagaggctggcagggcttgggcctggggaggatgctgaacccgatgaagacccccagtctgaggactcagaggccccatcttctcwaagcaccccccaccctgaggagcccacagtttctcaaccttaccccagccctcagagctcaccagatttgtctaagatgacgcaccgaattcaggctaaagttgagcctgagatccagctctcctaaccctcaggccaggatgcttgccatggcacttcatggtccttgaaaacctcggatgtgtgygaggccatgccctggacactgacgggtttgtgatcttgacctccgtggttactttctggggccccaagctgtgccctggacatctcttttcctggttgaaggaataatgggtgattatttcttcctgagagtgacagtaaccccagatggagagataggggtatgctagacactgtgcttctcggaaatttggatgtagtattttcaggccccacccttattgattctgatcagctctggagcagaggcagggagtttgcaatgtgatgcactgccaacattgagaattagtgaactgatccctttgcaaccgtctagctaggtagttaaattacccccatgttaatgaarcggaattaggctcccgagctaagggactcgcctagggtctcacagtgagtaggaggagggcctgggatctgaacccaagggtctgaggccagggccgactgccgtaagatgggtgctgagaagtgagtcagggcagggcagctggtatcgaggtgccccatgggagtaaggggacgccttccgggcggatgcagggctggggtcatctgtatctgaagcccctcggaataaagcgcgttgaccgccgaagctgcgctcactcctgcctcaacgcgccggccccgccctccgccgccacacttccggcggggctgcgaccgcagaggggcgcgggcgagcgagcgggcggccggccgctgggggtggcgggataggctgggcgcggccggcgctgcagacccgctgctgttgtccgggtctgtgcggtcccgagggccctccgtgccgccggcgccatgggcaattgccacacggtggggcccaacgaggcgctggtggtttcag

SEQ ID NO: 2806 - DNA, 3665 bp, Homo sapiens
gcctcgggaaggaagcgcctgtcgcgagcgcgagcttctgagctcgatgggccgagctggcagctggttggtgcttacaccttggccgcagcggcaggtccctccacgtgctttcggcggcgacctggagctggakgagtcggggatccgagaggaatgtggcgtgttccggtgcatcgcctcaggagagtggcccacgcagctggatgtgccgcatgtgatcactctgggacgccgcagcgccggggtcaggagagtgctggtaytctgactagtgacgggagttcsgcgccaacattcaaatcacacaagggaatgggtcttgtaaatcacgtctttactgaagacaatttgaaaaaatgacatgtttcaaatcttggaattggacacacaaggtatgccaccacaggaaaatgtgaactagaaaattgtcagccctttgttgctgaaacactttatgggaagatagctgtggcacataatggccaattggcaaatgctgctcgattaaggaaaaagcttctgcgtcatggtattgatctgtccacaagttctgatagtgaagtgattacccagttactggcgtatacccctcctcaggaacaagatgacaccccagactgggtagccaggattaaaaacttgatgaaggaaacacccacagcatactccctgcttaaaatgcccagagaygttatttacgcagtatgagatcattatggaaatcgtcccttatgcrttgatcgtcttattccagcgtctgatataaatgacaaagagaaaaaaacatcggaaacagaaggacgggtggtgtcttcagaatcttgtagcttcttatctattggtgcaagatattaccrtgaagtcttgcctggagaaattgtggaaatatccagacgtaatgtccgaactcttgatattatatcaaggtctgaaggaaaccctatggctttttgtatctttgaatatgtttattttgcaagaccagacagtatgtttgaagaccaaatggtttatacaataarataccgtcgtggccagcagctagctattgaagcacctatggatgcagatttggttagctctgttccagaatctgctacgcctgctgctcttgctyatgcagggaagtgtggacttccatatgtggaggtgctgtgtaaaacctgatatgtagggagaaccttcattcagccaaacatgaggttaagacaacttggtgttgcaaaaaaatttggagtattgtcagacaactttaaaggcaaaagaattgttcttgtagatgactcaattgtgagaggcaataccatctcaactatcataaaattgctcaaagaatctggtgcaaaagaggaacacattccagtagcttcaccaccaattaaatatccatgcttcatgggaataaacattcctacaaaagaagagctcattgccaataaaccagaatttgatcaccttgcagaatatctaggagcaaacagtgttgtgtatctgtcagtagaaggactggtttcatctgtgcaagaagggatacagtttaaaaaacagaaagagaaaaagcaygatattatgatcyaagaaaatggaaatggtctggaatgttttgaaaagagtggtcattgtacagcttgtctcactggaaaatatcctgtagaattagaatggtagctggtagggttggatgtgtgtagtttcaagatrgaaaggtggtcaagaagttatagtggtcacacctcatctatttactgttactcagttggtacaatgtaaaatgccatgcttatgtttacctttataagttttgagattttttttttctgaaaaggataccaaagtgggataaccaaccgaacatttctaattgcatataatacaacaatatgtggtgttcttttttttacacaagcattggctagcctttttaacctggtcagagaaggcaggtggtcactgacatttgccatgtccatgctttaaagggtttgcaagaagttagggttaaggagaggtgatgccaacaagacaggtgagttaaatgtaacatttcacacaaagtttgaatagaatacattatacctcataggtgtctagcttgtaaagttctggctgtagttatgaccttggcttccctgtctaactgtagacaaatctttaaaaacaaaaaacacaaaatataatctgtggtgcctcagtttccccacatgtgcaatgggatacttattagactaaataattaataagaatgtgaataagtgtcatacttttgtgatttgagtcatcatttcacttctgattttaagacagctcatgattgttagctttcggaaagctaatgattattaactttttgaaattagtttacaattaagatttcattatgatggaaggagatataattggcagatctttgccatctctctttgagatgtcctaaaaagggttgtaaaaatctgtgaaaaagtttttcctacatttgattagaaaatgtgatccacagtatttagcgccctgatactataagctcagcaagtaacctrgtacgtttgaaataaaaaccaaatttttagaataaaacaatccctttatccttaatttaattaattatcatatagttttttaatgaagggcttgatcacttgcaagcatatatacatgtagatgtacatatacatgtacacatacacataaatattattgcaattaagtgatcaagtacagacacaataggggccagttttgtttaaggatcaaagagtcaaccactttggggagttagtatcaacttataatccaagtccaagtatcatcttataatcgcttttttctactttattaagatctaatgaatttgatttcttttttgaagttttttcttgtaacatctgagatttagaagtttaagatgaccccaaacctttatgtaagaatttttaaacataaaagtgtttgtttctgttatgttaccataatttgatgtatatagtgtccagatccatttagaaatttaatattaataactgaaactgcttgtcttcctttggtatatagtctcacatattatattatagcagaccaagataaaattttgaaagctctttaagcccacatgcagcagtgggtcagacaaccctgtggcagtgacacgggcaaattggcatttgaataaagccctgggaccacttcaacatgtgtagcctcttgtcttaaatgtattccccatggcagcatggaggaggtaagacctgtgggtcaattttgaactggacttactttgatttttaaaacaagaaactcagggaaagtactaaaccaaaatctctgattttactttgcgttttctgtagtttttgttttactgagatgcttttgtaaaggaaaataatactgtgacagttcagtaattctacagatttcttaatatttctccatcatggccttttacttcacaattttctgaagtctgaattcaatttttttttaccaatttaatctcaaatgttgtttaactgctttaaatttatatacgtagagtattataaactgcagagatgaaaaatgtgttttcaagggatttatattgtgaactgaagtaagcctactttttgtgacttatttgtgatgtcttgttgataaatatgtgtaataagtatgtttaaaaaaaa

SEQ ID NO: 2807 - DNA, 845 bp, Homo sapiens
agccggacgcgcggaggtgggcaatccgctccttcccttgagcagtccacgccttgtggcggctttgcggagctgctgctttggcgggagttggaagctggtgtgaggtttctgtggggagaaggagagtgccagaggtgactggttcgtggttcttctaggctctcatggccaccatgttggaaggcagatgccaaactcagccaaggagcagccccagtggccgagaggctagcctgtggtcgtcaggctttgggatgaagctggaggctgtcactccattcctgggsaagtatcgcccctttgtgggtcgctgttgccagacctgcacccccaagagctgggagtccctcttccacagaagcataacggacctaggcttctgcaatgtgatcctggtgaaggaggagaacacaaggtttcggggctggctggttcggaggctctgctatttcctgtggtccctggagcagcacatccccccctgccaggatgtcccacagaagatcatggaaagcaccggggtgcagaacctcctctcagggagggtcccaggaggcactggggaaggccaggtgcctgaccttgtgaagaaggaggtacagcgcatcctgggtcacatccaggccccaccccgtcccttcctggtcaggctgttcagctgggcgctgctgaggttcctgaactgcctgttcctgaatgtgcagctccacaagggtcagatgaagatggtccagaaggccgcccaggcagtaaggcccgccctccattgggttggggatggtgggagcagaagagcagaggctgggccaagcccttaagtcaggagcagtccccatctggtc

SEQ ID NO: 2808 - DNA, 1981 bp, Homo sapiens
caagcagtgggaagagctctgttaacaatgcaatgttgtgggataaagttctcactagtgggattggccatataaccaactgcttcctaagtgttgaaggaaccgatggagataaatcctatcttatgacagaaggatcagatgaaaaaagagtgtaaagacaattaatcaactggcccatgcccttcacatggacaaaaacttgaaagctggctgtcttgtacatgtgttttggccaaaagcaaaatgtgccctcttgagagattacctggtgttagtagacagtccaggcacagatgttactacagagctggatagctggattgataagttttgcctagatgctgatgtctttgttttggttgcaaactctgaatcaacactaacgaatacggaaaaacatgttttcacaacatgaatgagtggctttccaagcctaatattttcattctcaataatcgttgggatgcctctgcatcagagccagaatatatggaagatgctgaaggatttcaggcaagattacaggaatttcagaattttgaacaaatctttgaggagttgtcatgtgcaatgacagatgaaatttgtcaactgtctgttttggttgatgaattttgttcagtttcatcctactccagatgtattaaaaatatataaaagtgaattaaataagcatatagaggatggtatgggaagaaatttggctgattgatgcaccaatgaagtaaacaccttagtgcttcagttccagcaagaaattgttgaaaatttgaagccattacttccagctggtatataggataaactacatacactgatcccttgcaagaaatttgatcttagttataatctaaattaccacaagttatgttcagattttcaagaagatattgtgtttcatttttccctgggctggtcttccctcgtacctcaatttttgggccctagaaatgctcaaatggtgctcctaggattatcagagcctatctttcagctccctagatctttagcttctactcccactgctcctaccagtccagcaatgccagataatgcatcacaggcagaactcatgattacattagtaacaggattggcttctcttacatctagaacttctatgggcatcgataatgttggaggaatgatttggaaaactataggctggaaactcatatctgtttcattaactatgtatggagctttgtatctttatgaaagactgtcctggaccacccatgccaaggagagagcctttaaacagcagtttgtaaactatgcaactggaaaactgaagatgattgctagctccacaagtgcaaactgcagccaccaagtaaaacaacaaatggctaccacttttgctcgcctgtgccaacaagctgatattactcaaagacaactggaagaagaaattgctagattacccaaagaaatagatcagtgggagaaaatacaaaacaatttaaagctcttaagaaataaagctgttcaacttgaatatgagctggagaattttactaagcagtttctaccttcacgcgatgaagaatcctagcaatagagattgctttggtgacaatgataggaggaaatgaaacttgtaagatcaggacaattgttatttttatgaaatgactttaaatatgaattttactaactgtacctaaatagcaaagccytatgtagattctgttagtgatgtatctcagggtattggtatttttgaagagtattgtgtccttagttttaattttgggtaaagaaaaaactaaaatctggaattagttacaagcaacagcaccaacttatgtgacccttgaggggtggggctgtgagctcttaatttgtttttgattctgaaaatctctgcttcctggcatycaggagttagagattgagcctttcatcttctttctcaaaactagtttttgatgctttctttcctgggaatagtcactttttaattttatttaat

SEQ ID NO: 2809 - DNA, 2109 bp, Homo sapiens
caagcagtgggaagagctctgttaacaatgcaatgttgtgggataaagttctcactagtgggattggccatataaccaactgcttcctaagtgttgaaggaaccgatggagataaatcctatcttatgacagaaggatcagatgaaaaaagagtgtaaagacaattaatcaactggcccatgcccttcacatggacaaaaacttgaaagctggctgtcttgtacatgtgttttggccaaaagcaaaatgtgccctcttgagagattacctggtgttagtagacagtccaggcacagatgttactacagagctggatagctggattgataagttttgcctagatgctgatgtctttgttttggttgcaaactctgaatcaacactaacgaatacggaaaaacatgttttcacaacatgaatgagtggctttccaagcctaatattttcattctcaataatcgttgggatgcctctgcatcagagccagaatatatggaagatgtgggccacctgctgaaggatttcaggcaagattacaggaatttcagaattttgaacaaatctttgaggagtgtatctcacagtcagcagtgaaaacaaagtttgaacagcacactatcagagctaaacagatactagctactgtgaaaaaacaatggattcaataaacatggcagctgaacagaaaagtgtcatgtgcaatgacagatgaaatttgtcaactgtctgttttggttgatgaattttgttcagtttcatcctactccagatgtattaaaaatatataaaagtgaattaaataagcatatagaggatggtatgggaagaaatttggctgattgatgcaccaatgaagtaaacaccttagtgcttcagttccagcaagaaattgttgaaaatttgaagccattacttccagctggtatataggataaactacatacactgatcccttgcaagaaatttgatcttagttataatctaaattaccacaagttatgttcagattttcaagaagatattgtgtttcatttttccctgggctggtcttccctcgtacctcaatttttgggccctagaaatgctcaaatggtgctcctaggattatcagagcctatctttcagctccctagatctttagcttctactcccactgctcctaccagtccagcaatgccagataatgcatcacaggcagaactcatgattacattagtaacaggattggcttctcttacatctagaacttctatgggcatcgataatgttggaggaatgatttggaaaactataggctggaaactcatatctgtttcattaactatgtatggagctttgtatctttatgaaagactgtcctggaccacccatgccaaggagagagcctttaaacagcagtttgtaaactatgcaactggaaaactgaagatgattgctagctccacaagtgcaaactgcagccaccaagtaaaacaacaaatggctaccacttttgctcgcctgtgccaacaagctgatattactcaaagacaactggaagaagaaattgctagattacccaaagaaatagatcagtgggagaaaatacaaaacaatttaaagctcttaagaaataaagctgttcaacttgaatatgagctggagaattttactaagcagtttctaccttcacgcgatgaagaatcctagcaatagagattgctttggtgacaatgataggaggaaatgaaacttgtaagatcaggacaattgttatttttatgaaatgactttaaatatgaattttactaactgtacctaaatagcaaagccytatgtagattctgttagtgatgtatctcagggtattggtatttttgaagagtattgtgtccttagttttaattttgggtaaagaaaaaactaaaatctggaattagttacaagcaacagcaccaacttatgtgacccttgaggggtggggctgtgagctcttaatttgtttttgattctgaaaatctctgcttcctggcatycaggagttagagattgagcctttcatcttctttctcaaaactagtttttgatgctttctttcctgggaatagtcactttttaattttatttaat

SEQ ID NO: 2810 - DNA, 2258 bp, Homo sapiens
caagcagtgggaagagctctgttaacaatgcaatgttgtgggataaagttctcactagtgggattggccatataaccaactgcttcctaagtgttgaaggaaccgatggagataaatcctatcttatgacagaaggatcagatgaaaaaagagtgtaaagacaattaatcaactggcccatgcccttcacatggacaaaaacttgaaagctggctgtcttgtacatgtgttttggccaaaagcaaaatgtgccctcttgagagattacctggtgttagtagacagtccaggcacagatgttactacagagctggatagctggattgataagttttgcctagatgctgatgtctttgttttggttgcaaactctgaatcaacactaacgaatacggaaaaacatgttttcacaacatgaatgagtggctttccaagcctaatattttcattctcaataatcgttgggatgcctctgcatcagagccagaatatatggaagatgtgggccacctgctgaaggatttcaggcaagattacaggaatttcagaattttgaacaaatctttgaggagtgtatctcacagtcagcagtgaaaacaaagtttgaacagcacactatcagagctaaacagatactagctactgtgaaaaaacaatggattcaataaacatggcagctgaacagaaaaggcattatgcagtggaagagaaggaagaccaaattgatagactggactttatctgaaaccagatgaaccttttaacactggatgttaacaaaaaaaccagggaggttactggggaggtggcaaacaaagtgtcatgtgcaatgacagatgaaatttgtcaactgtctgttttggttgatgaattttgttcagtttcatcctactccagatgtattaaaaatatataaaagtgaattaaataagcatatagaggatggtatgggaagaaatttggctgattgatgcaccaatgaagtaaacaccttagtgcttcagttccagcaagaaattgttgaaaatttgaagccattacttccagctggtatataggataaactacatacactgatcccttgcaagaaatttgatcttagttataatctaaattaccacaagttatgttcagattttcaagaagatattgtgtttcatttttccctgggctggtcttccctcgtacctcaatttttgggccctagaaatgctcaaatggtgctcctaggattatcagagcctatctttcagctccctagatctttagcttctactcccactgctcctaccagtccagcaatgccagataatgcatcacaggcagaactcatgattacattagtaacaggattggcttctcttacatctagaacttctatgggcatcgataatgttggaggaatgatttggaaaactataggctggaaactcatatctgtttcattaactatgtatggagctttgtatctttatgaaagactgtcctggaccacccatgccaaggagagagcctttaaacagcagtttgtaaactatgcaactggaaaactgaagatgattgctagctccacaagtgcaaactgcagccaccaagtaaaacaacaaatggctaccacttttgctcgcctgtgccaacaagctgatattactcaaagacaactggaagaagaaattgctagattacccaaagaaatagatcagtgggagaaaatacaaaacaatttaaagctcttaagaaataaagctgttcaacttgaatatgagctggagaattttactaagcagtttctaccttcacgcgatgaagaatcctagcaatagagattgctttggtgacaatgataggaggaaatgaaacttgtaagatcaggacaattgttatttttatgaaatgactttaaatatgaattttactaactgtacctaaatagcaaagccytatgtagattctgttagtgatgtatctcagggtattggtatttttgaagagtattgtgtccttagttttaattttgggtaaagaaaaaactaaaatctggaattagttacaagcaacagcaccaacttatgtgacccttgaggggtggggctgtgagctcttaatttgtttttgattctgaaaatctctgcttcctggcatycaggagttagagattgagcctttcatcttctttctcaaaactagtttttgatgctttctttcctgggaatagtcactttttaattttatttaataaactgcattgctggaaccac

SEQ ID NO: 2811 - DNA, 2340 bp, Homo sapiens
taatctgtttgaggatrtaggcactggtgtgaaggaacatggccctgtatcagaggtggcggtgtctccggctccaaggtttacaggcttgcaggctacacacggcagttgtgtcgacycctccacgctggttggcagagcggcttggcctttttgaggagctgtgggctgctcaggtaaagagattagcaagcatggcacagaaggaaccccggactattaagatatcacttcctggaggccagaaaattgatgctgtggcatggaacacaaccccctaccaactagcccggcagatcagttcaacactggcagatactgcagtggctgctcaagtgaatggagaaccttatgatctggagcggcccttggagacagattctgacctcagatttctgacattcgattccccagaggggaaagcagtgttytggcactccagcacccatgtcctgggggcagcagctgaacaattcctaggtgctgttctctgcagaggtccaagtacagaatatggcttttaccatgatttcttcctgggaaaggagaggacaatccggggctcagagctgcctgttttggagcggatttgccaggaacttacagctgctgctcgacccttccggaggctagaggcttcacgggatcagcttcgccagttgttcaaggctgagtatgcccatcgtggtttctccgaggtgaaaactcccacactgttttctaygaagctctgggaacagtcagggcactgggagcattatcaggaagacatgtttgccgtgcagcccccaggctctgacaggcctcccagctcccagagtgacgattctaccaggcatatcacrgatacactcgccctcaagcctatgaactgccctgcacactgcctgatgttcgcccaccggcccagatcctggcgggaactgcccctgcgactagctgactttggggctctacaccgggcygaagcctctggtggtctggggggactgacccgactgcggtgcttccagcaggatgacgctcacatcttctgtacaacagatcagctggaagcagagatccaaagctgtcttgatttcctccgttccgtctatgccgttcttggcttctccttccgcctggcactgtccacccggccatctggcttcctgggggacccttgcctttgggaccaggccgaacaggtccttaaacaggccctgaaggaatttggagaaccctgggacctcaactctggagatggtgccttctatggacctaagattgacgtgcacctccacgatgccctgggccggccacatcagtgtgggacaattcagcttgacttccaactgcccctgagatttgacctccagtataaggggcaggcgggtgccctggagcgtccagtcctcattcaccgagcagtgctcggttctgtggaaagactgttgggagtgctggcagaaagctgcggggggaaatggccactgtggctgtccccgttccaggtggtggtcatccctgtggggagtgagcaagaggaatacgccaaagaggcacagcagagcctgcgggctgcaggactggtcagtgacctggatgcagactctggactgaccctcagccggagaatccgccgggcccagcttgcccactacaattttcagtttgtggttggccagaaagagcaaagtaagagaacagtgaacattcggactcgagataatcgtcgccttggggagtgggacttgcctgaggctgtgcagcgactggtggagctacagaacacgagggtcccaaatgccgaagaaattttctgagcctttgtacatagatgaggcaaaaacctgcgagtgccatcagcctccctcacatgggagaccccaacccagctgacaatgtggagcccccagaacttcagaactgtgtggaggcacatgtctgctctcctgaaaagagacttggtttggggaccccacaaaaggagggaagctgtagctgtttggatgtgaggagaatgaaactacaaaaaaaaataaattgggccaggcgcagtggctcatgcctgtaatcccagcactctgggaggctgaggcggacggatcatgaggtcaggagatcaagaccaccctggctaacacggtgaaaccctgtctctactaaaaatacaaaaaattagcygggcatggtggcacacgcctgtaatcccagctactcaggaggctgaggcaggagaatcgcttgaacccgggaggtrgaggttgcagtgagctgagattgcgccactgcacccccctaggcgacagagcgagactctgtctctaaataaataaataaataaataaatacaaactg

SEQ ID NO: 2812 - DNA, 2730 bp, Homo sapiens
taatctgtttgaggatrtaggcactggtgtgaaggaacatggccctgtatcagaggtggcggtgtctccggctccaaggtttacaggcttgcaggctacacacggcagttgtgtcgacycctccacgctggttggcagagcggcttggcctttttgaggagctgtgggctgctcaggtaaagagattagcaagcatggcacagaaggaaccccggactattaagatatcacttcctggaggccagaaaattgatgctgtggcatggaacacaaccccctaccaactagcccggcagatcagttcaacactggcagatactgcagtggctgctcaagtgaatggagaaccttatgatctggagcggcccttggagacagattctgacctcagatttctgacattcgattccccagaggggaaagcagtgttytggcactccagcacccatgtcctgggggcagcagctgaacaattcctaggtgctgttctctgcagaggtccaagtacagaatatggcttttaccatgatttcttcctgggaaaggagaggacaatccggggctcagagctgcctgttttggagcggatttgccaggaacttacagctgctgctcgacccttccggaggctagaggcttcacgggatcagcttcgccagttgttcaaggataacccctttaagcttcacttgattgaggagaaagtgacaggtccaacagcaacagtatatgggtgtggcacattggttgacctttgccagggcccccaccttcggcatactggacagattggaggactgaagctgctatcgaactcatcatccttatggaggtcttcaggggccccagagacactgcagagagtgtcagggatttccttccccacaacagaattgctgagggtctgggaagcatggagggaggaagcagaattgcgggaccaccggcgcattgggaaggaacaggagctcttcttcttccatgaactgagccctgggagctgcttcttcctgccacgagggacaagggtgtataatgcactagtggcgtttatcagggctgagtatgcccatcgtggtttctccgaggtgaaaactcccacactgttttctaygaagctctgggaacagtcagggcactgggagcattatcaggaagacatgtttgccgtgcagcccccaggctctgacaggcctcccagctcccagagtgacgattctaccaggcatatcacrgatacactcgccctcaagcctatgaactgccctgcacactgcctgatgttcgcccaccggcccagatcctggcgggaactgcccctgcgactagctgactttggggctctacaccgggcygaagcctctggtggtctggggggactgacccgactgcggtgcttccagcaggatgacgctcacatcttctgtacaacagatcagctggaagcagagatccaaagctgtcttgatttcctccgttccgtctatgccgttcttggcttctccttccgcctggcactgtccacccggccatctggcttcctgggggacccttgcctttgggaccaggccgaacaggtccttaaacaggccctgaaggaatttggagaaccctgggacctcaactctggagatggtgccttctatggacctaagattgacgtgcacctccacgatgccctgggccggccacatcagtgtgggacaattcagcttgacttccaactgcccctgagatttgacctccagtataaggggcaggcgggtgccctggagcgtccagtcctcattcaccgagcagtgctcggttctgtggaaagactgttgggagtgctggcagaaagctgcggggggaaatggccactgtggctgtccccgttccaggtggtggtcatccctgtggggagtgagcaagaggaatacgccaaagaggcacagcagagcctgcgggctgcaggactggtcagtgacctggatgcagactctggactgaccctcagccggagaatccgccgggcccagcttgcccactacaattttcagtttgtggttggccagaaagagcaaagtaagagaacagtgaacattcggactcgagataatcgtcgccttggggagtgggacttgcctgaggctgtgcagcgactggtggagctacagaacacgagggtcccaaatgccgaagaaattttctgagcctttgtacatagatgaggcaaaaacctgcgagtgccatcagcctccctcacatgggagaccccaacccagctgacaatgtggagcccccagaacttcagaactgtgtggaggcacatgtctgctctcctgaaaagagacttggtttggggaccccacaaaaggagggaagctgtagctgtttggatgtgaggagaatgaaactacaaaaaaaaataaattgggccaggcgcagtggctcatgcctgtaatcccagcactctgggaggctgaggcggacggatcatgaggtcaggagatcaagaccaccctggctaacacggtgaaaccctgtctctactaaaaatacaaaaaattagcygggcatggtggcacacgcctgtaatcccagctactcaggaggctgaggcaggagaatcgcttgaacccgggaggtrgaggttgcagtgagctgagattgcgccactgcacccccctaggcgacagagcgagactctgtctctaaataaataaataaataaataaatacaaactg

SEQ ID NO: 2813 - DNA, 3672 bp, Homo sapiens
gctggggcccgggctgcccagccatgctttgggcactctggccaaggtggctggcagacaagatgctgcccctcctgggggcagtgctgcttcagaagagagagaagagggkccctctgtggaggcactggcggcgggaaacctacccatactatgacctccaggtgaaggtgctgagggccacaaacatccggggcacagacctgctgtccaaagccgactgctatgtgcaactgtggctgcccacggcgtccccaagccctgcccagactaggatagtggccaactgcagtgaccccgagtggaatgagaccttccactaccagatccatggtgctgtgaagaacgtcctggagctcaccctytatgacaaggacatcctgggcagcgaccagctctcyctgctcctgtttgacctgagaagcctcaagtgtggccaacctcacaaacacaccttcccactcaaccaccaggattcacaagagctgcaggtggaatttgttctggagaagagccaggtgcctgcatctgaagtcatcaccaacggggttctggtggctcacccctgtctgagaatccagggcacgctccggggagatgggacagccccacgggaagagtacggctctaggcagctccagctggcagtgcctggagcctacgagaagccacagctcttgcccctgcagcctcccacagagccaggcctcccacccacctttaccttccacgtgaacccagtgctgagctccaggctacacgtggagctgatggagctgctggcagctgtgcagagtggccccagcgcagagttggaggctcagaccagcaagctgggcgaggggggcatcctgctctcctctctgcccctaggccaggaggaacagtgttctgtggccctgggggagggccaggaggtggctctgagcatgaaggtggaaatgagctccggggacctagacctacgccttggctttgacctctctgacggggagcaggagtttctggacaggaggaagcaggtcgtgtccaaggccctgcagcaagtgctgggattgagtgaggctctggacagtggccaggtgcctgtagtggctgtgttgggttccgggggtggaacccgagccatgtcttctctgtacggcagcctggcagggttgcaggagctcggccttctagacactgtgacctacctgagtggggtctctgggtctacctggtgcatctccacactctacagggacccagcctggtcccaggtggccttgcagggccccattgagcgtgcccaggttcacgtctgcagcagtaagatgggagctttgtccacggagcggctacagtactacactcaggaactgggggtccgggagcgcagtggccacagygtgtccctcatcgacctctggggcctccttgttgagtatctcctgtaccaggaggagaaccctgccaagctgtctgaccaacaggaggcggtccgccagggtcagaacccttaccccatttacaccagtgtcaacgtccgcaccaacttgagtggggaagattttgcagagtggtgcgagttcacgccctatgaggttggcttccccaagtacggggcttatgttcccaccgagctcttcggctcagaactcttcatgggacgattgctgcagctccagcctgaaccccggatctgttacctgcaaggtatgtggggcagcgcctttgccaccagcctggatgagatcttcctaaagaccgccggctcgggcctcagcttcctggagtggtacagaggcagtgtgaatatcacagggaggaggagggatgtggggagggctcactgttggggaggggcacccctgaactataaggaccactgggcaaaggaggatgccactttcccctctatttcactgtcccgcccctgtctagacgactgccagaagcctcagctgcacaacccctcgaggctgcgaacgaggctcctcaccccacaggggcccttctcccaggctgtgctggacatattcacctcccgcttcacttccgcccagagctttaacttcacccggggtctctgcttgcacaaggactatgtggctggcagggagttcgtggcctggaaagtaactgcattcgtccctgtgcgtacacatgggttccttgcagacacacacccggacgccttccccaaccagctcacccccatgcgggactgcctgtacctggtggacggaggctttgccatcaactctccgttcccactggctctgctgcctcagagagcagtggacctcattctgtcctttgactattccttggaagccccttttgagaggcttgctcctgctcaggtcttgaagatgacagagaagtactgcctggaccgaggaatccccttccctagcatcgaggtgggccctgaggacrtggaggaggcccgtgagtgctatctgtttgccaaggctgaggacccccgctcccccattgtgctgcacttccccctggttaaccgtaccttccgcacacacctggccccaggtgtggagcgacaaacagctgaggagaaggcctttggggactttgtcatcaacaggccagacaccccctatggcatgatgaacttcacctatgagccccaggacttttatcggctggtggccctcagtcgatacaacgtcctgaacaaygtggagaccttgaagtgcgccctccagctggctctggaccggcaccaggctcgggagagggcaggggcctgaccaaggcaggaagcggaggactgtgacagagaggagacacactgctcatggtcagggcttgtagagggaggagcgatggggactctgtgcaggatctgcttcccttctctccaggacctgcctcgaggtgccccaggccccggaaagctcttgcagaattgcagcttggactggggcagggctctccttgtgtgtttttggagaagatgggcagtagatcgctccagggactcttggggatgtagggcagaagagaacagcactcatttcacagcggggtgtggagagaatcaggtgagccacagagcccaccccagacacagaaggacctcagagggcccaagtcctcagacccacacagaacaggggctgagggcacygagaagccagctgtcctccttacactgagatggaaagcagagatgcatccatccacacttcctgcagagcggcccaagccccaaccccacctcgagctcctggatgcactgctatcaagaacaatgaggggctgaggggatggccagcctatgttgctgactccatcatcctaaccctccttctgccttctggtctcctcgtgcctcctcccagatcacccttctcttcccagcgccctaaagcctgtggggtgatgtcccattctggctgctccaggtgggagatgtgcgcgtgtctccctgccagttacccaggcttcactcttcgaacctggaccacagtctctggtgatgtgtgtagtggccacatcatgcaaatatagtctcaccattcctaggagctaaatgggtgtgtctagwaggggcatcagttcatcgggggagaggtgtgcacctgtatgkggggcaggagggtgtgcaagttcctggaggtgggttactccaaggcatgggcagtgcagagggagcctcgcctgggc

SEQ ID NO: 2814 - DNA, 11078 bp, Homo sapiens
gtaatggcgctgcgattgggcttcacgccgtcttttttcccctccccaatacgcgcgttcattggacgagagccgaagatcgagcgttctgattgggtgctagcaaaggcggtccgtttgaacgaagccaagagctgcataagggcaggaagctggactgctaggatcaggcgactacaaggagttgtgaagcgacttgcaccgacctgggggcagcaagaggccccggggctgctttccgctgttcgactctggcaggctcagccaatcactgaaggagggaacgatttgagcgatggagccactctggccgagtgtgattcccttcagtacggcggcaccgtggaagtgcagactttcacagggggtgtggtctcagctcacacaggtgctccagaggctggtggacctgagcggaggctgggacgccctggtgggccccgggccctggaaggcgggtcccggtggccggtggcccagaatgaggccagctcccagcatgccctgcagccggacgccagcccctcggccagcagtactggtgataacaacccagtcattcttcaggcatccaagggggagcctgggagtgggaccatgcagagcagcccctcccctgctcaccctcagctcccagtcctacagacacagatggtgtcggacggcatgacaggcagcaatcctgtgtcccctgcctcatccagttccccagcctctagtggggcaggcggcatctccccgcagcacatagctcaagattcctcactggatggacctccaggccccccagatggtgccacagtgcccctggaggggttcagcttatcccaggctgctgacctggctaacaagggcccgaagtgggagaagagccatgccgaaattgcagaacaggccaagcatgaggccgagatcgagactcggattgctgagctgcggaaggagggtttctggtcactgaagaggctgcctaaggtgccagagccccctcgccccaaaggtcactgggactatttgtgcgaagagatgcagtggctctctgctgactttgctcaggagcgccgttggaaacggggtgtggcccggaaggtggtgcgcatggtgatccggcaccacgaggagcagcggcagaaagaggaacgggcccggagggaggagcaggccaagctgcgtcgaattgcttccaccatggccaaggatgtcaggcagttctggagcaatgtggagaaggtggtgcaattcaagcaacagtcccggcttgaggaaaagcgcaaaaaagccctggacctgcatttggacttcattgtggggcaaactgaaaagtactcggaccttctgtctcagagcctcaaccagccattaacctccagcaaagcaggctcttccccttgcctcggctcttcctcagctgcctccagtcctccaccccctgcttctcgcctggatgatgaagatggggactttcaaccccaagaggatgaggaagaggatgatgaggaaacgattgaagttgaagaacaacaggaaggcaatgatgcagaggcccagaggcgtgagattgagctgcttcgccgtgagggagaattgccactggaagagctgctccgttcccttccccctcagctgttggaagggccttccagcccctctcaaaccccctcatctcatgatagtgacacccgagatgggcctgaagaaggtgctgaagaagagccccctcaggtgttggagataaagcccccaccctctgctgtcacacagcgcaacaaacagccttggcatccagatgaagatgatgaagagtttactgccaacgaagaggaagcggaggatgaagaggatactatagcagctgaggaacagttggaaggggaggtggatcatgccatggagctgagcgagttggctcgagaaggtgagctttccatggaggagctattgcagcagtatgcaggagcctatgccccaggctctgggagcagtgaagatgaggatgaagatgaggttgatgctaatagctctgactgtgaaccagaggggcccgtggaagcggaagagcctcctcaggaggatagtagcagtcagtcagactctgtggaggaccggagtgaggatgaggaagatgaacattcagaggaggaagaaacaagtggaagttcagcatcagaggaatctgagtctgaagagtctgaggatgcccaatcacagagccaagcagatgaagaggaggaagatgatgattttggggtggagtacttgcttgccagggatgaagagcagagtgaggcagatgcaggcagtgggcctcctactccagggcccactactctaggtccaaagaaagaaattactgacattgctgcagcagctgaaagtctccagcccaagggttacacgctggccacgacccaggtaaagacgcccattcccctgcttctgcggggccagctccgggagtaccagcacattgggctagactggctggttaccatgtatgagaagaagcttaatggcattcttgctgatgagatggggcttgggaagaccatccagaccatctctctgcttgcccacttggcttgtgagaaaggtaactggggtccccatttaatcattgttcccaccagcgtgatgttgaactgggagatggagttgaaacgktggtgccccagctttaaaatcctcacttactatggagcccagaaagagaggaagctcaagcggcagggctggaccaagcccaatgcctttcatgtgtgtatcacatcttacaagctggtgctgcaggaccaccaggccttccgtcgcaagaactggcgctatctcattctggatgaggcgcagaacatcaagaacttcaagtcacagcgctggcagtcactcctcaacttcaacagccagagacgcctgctcctgacaggaactcccttgcagaacagcctcatggagctgtggtccttgatgcactttttgatgccccatgtcttccagtctcatcgcgagttcaaggagtggttctctaatcccctaactggcatgattgagggcagccaagagtataatgaaggtctagtcaaacgcctccacaaggttttgaggccttttttactgcgccgagttaaggtggatgttgagaagcagatgcccaaaaagtacgagcatgttatccrctgcaggctctccaagcgtcaacgctgtctctatgatgacttcatggcacagaccacaactaaggagacactagccacaggccatttcatgagcgtcatcaacattttgatgcagctgagaaaagtttgcaatcatccaaatctgttcgaccctcgaccggttacctcccctttcatcaccccaggcatctgcttcagcaccgcctctctggtgctaagggccacggatgtccatcccctccagcggatagacatgggtcgatttgaccttattggcctggaaggtcgtgtctctcgatatgaggcagacacatttctgccccggcaccgcctctctcgccgggtactgttagaagtggctactgctcctgaccccccaccccggcccaagccagtcaagatgaaggtcaacaggatgctgcagccagtacctaagcaagaaggccggacagtggtggtggtgaacaacccacgggcgcccctgggccctgtcccagttcgacctcctccaggtcctgagctctcagcccagcccacccctggcccagtcccccaagtgctgccagcatcactgatggtttcagcctcacctgccgggcccccgcttattcctgcatctcggcctcctggccctgtcctcttgcctccactgcagcccaacagtggttctctcccccaggtgttgccatcccccctgggggtcctgagtgggacctcacggcctcccacgccaaccttgtccctaaagccaacaccacctgccccagttcgcctgagcccagccccacctccaggctcctctagcctgttgaagcccctgacagtgccaccaggctacaccttccctcctgctgctgccaccaccacttctaccaccacggcaactgctaccaccacagcagtgccagctccgactcctgcaccacagcgcctcattctatctcccgatatgcaggctcgcctgccctcaggcgaagtggtcagcatcgggcagttagcctcactggcacaacgtccagtggctaatgcagggggaagcaaacctctcaccttccaaatccagggcaacaagctgactttgactggtgcccaggtgcgccagcttgctgtggggcagccccgcccrctgcaaatgccaccaaccatggtgaataatacaggcgtggtgaagattgtagtgagacaagcccctcgggatggactgactcctgttcctccattggccccagcaccccggcctccgagctctgggcttccagctgtgttgaatccacgccccacgttaacccctggccggctacccacacctactctgggtactgctcgagcccccatgcccacacccactctggtgaggcctcttctcaagctggtccacagtccttcacctgaagtcagtgcttcagcccccggagctgcccccttgaccatctcttctcctctccacgtgccatcctcmctccctgggccagcctcttctccaatgccaattcccaactcctctccccttgctagtcctgtgtcctctacagtctcagttccattgtcatcttcactccccatctctgtccccaccacacttcctgccccagcctcggctccactcaccatccccatctcagcccccttgactgtttctgcttcgggcccagctctgttgaccagtgtgactccaccattggcacctgttgtcccagcggctcctggacctccctccttggcaccatctggtgcttccccgtcagcatcagccttgactctaggtttggccacagctccatccctgtcttcatctcagacacctggtcaccctctgttgttggctcccacctcttcacatgttccagggttgaactcaaccgtggccccagcatgctcacctgtcctggtgccagcttcggctctggccagtccttttccgtcagcaccaaatccagctccagctcaggcttcccttctggctccagcatcttctgcatctcaggctctagccacccctctggctcctatggcggctccacagacagcaattctggctccttctccagctcctcctctggctcctcttccggtcctggcaccatcgccaggtgctgctcctgtcctggcttcatcacagactcyggttccagttatggctccatcgtctactccaggaacctctttagcctcagcttcaccggtaccagctccaacccctgtgttggctccatcatcaactcaaactatgctaccagccccggttccgtcacctctcccgagcccggcttctacgcagacactggccctagccccagctttagcacccactcttggaggctcatctccatctcagacactctctttgggaacggggaacccccagggaccctttccaactcagacattgtcattaactccagcatcatccctggtaccaactccagcccagacactgtctttggcaccaggaccaccactgggtccaactcagacgctgtctctggctccagcaccccctctggctccagcttctccagtgggcccagccccagctcacacgctgactttggctccagcatcgtcatctgcttcactcctggccccagcttcagtgcagacactgaccttgagccctgccccagttcctaccctgggcccggccgcagctcagaccttggcgctggccccagcctccacacagtccccagcttcccaggcatcttcccttgtggtttcggcatctggtgccgctcccttgcctgtcaccatggtatcccggctgcctgtttccaaggatgagcctgacacactgacattgcgctctggtccccccagccctccctccactgctacctcgtttggtggcccccggcctcgacgccagccccccccaccacctcgttcccctttttatctggactccctggaggaaaagcggaagcggcagcggtctgaacgcctggaacggattttccaacttagtgaggctcatggggccctggcacctgtgtatgggactgaagtcctggatttctgtaccctgccccaacctgttgccagccccatcggccctcgttctcctggccccagccaccccaccttttggacttataccgaggctgcccaccgggctgtactgtttccccagcagcgactagaccagctgtcagaaatcattgagaggttcatctttgtcatgcctcctgtggaggcacctcccccttccctgcatgcctgccacccacctccttggctggccccacgtcaggcagccttccaggagcaattggcctctgagctctggccccgggctcgtcctttgcaccgtattgtgtgtaacatgcgcacccagttccctgacttaagactcatccagtatgattgcggaaagttgcagacgttggcagtgctgttgcggcagctcaaggcagagggccaccgagtgctcatcttcacccagatgacccgaatgctggatgtattggagcagtttctcacctaccatggccatctctacctgcgcctggatggatctactagagttgaacagagacaggccttgatggaacggttcaatgcagacaaacgcatattctgcttcatcctttcaactcggagtgggggtgtgggcgtgaacctgacaggagcagacactgttgttttttatgacagcgactggaatcccaccatggatgctcaggcccaggaccgctgtcaccgaattggccagacccgggatgtccacatatataggcttatcagtgaacggacagtggaggagaacatcctaaaaaaggcaaatcagaagagaatgttgggggacatggccattgagggaggcaacttcaccacagcctatttcaaacagcagaccatccgagagctgtttgatatgcccctggaggaaccttctagctcatccgtgccctctgcccctgaagaggaggaagagactgtggccagcaagcagactcatattctggagcaggcattgtgtcgggcagaagatgaagaggatatccgtgcagccacccaggccaaggctgaacaggtggctgagcttgcagaatttaatgagaacgatgggtttcctgctggtgagggagaggaagctggccggcctggggctgaggatgaggagatgtcccgggctgagcaggaaattgctgccctcgtagaacagctgacccccattgagcgctatgccatgaaattcctggaggcctcactggaggaggtgagccgagaggagctcaaacaggcagaagagcaagtggaagctgcccgcaaagacctggaccaagccaaggaggaggtgttccgcctaccccaagaggaggaggaggggccgggggctggggatgagagttcctgtgggactggtggaggcacccaccggcgcagtaaaaaggccaaagcccctgagaggccggggactcgtgtcagtgagcgtcttcgtggagcccgggctgagactcaaggggcaaaccacactcctgtcatatccgcccatcaaactcgcagcaccaccacaccaccccgctgcagtcctgccagggagcgagttcccaggccagcacctaggcctcgacccactccagcttcagctccggctgcaattcctgcccttgttcctgtcccagtttctgccccagtacccatttcagccccaaatccaataaccattctccctgtccatatcttgccttctcctccccctccttcacagattcctccttgttcttctcctgcctgcacccctcctcctgcctgtacccctccaccagctcatacacckcctccagcccaaacctgtcttgtaactccttcctctcctctcttgcttggtccaccttctgtgcccatctctgcctcagtcactaatctccccttgggcttgaggcctgaggcagagctgtgtgcccaggcattggcatctccagagtccctggagctggcttctgtggccagttcagaaacctcctcactttctcttgtgccccctaaagatctgttgccagttgctgtggagatcctgcctgtgtcagagaagaacctttctctcaccccttctgcacccagcctgaccttggaggctggcagcatccccaatggtcaagagcaggaggcaccagattctgctgaggggaccacccttacagtgctgcctgaaggtgaggagttgcccctgtgtgtgagtgagagcaatggcctggagctcccaccctcagcagcatctgatgagccacttcaggagccactggaggctgacaggacctcggaagagctgacagaggccaagaccccaacctccagcccagagaagccacaggaactcgttacagctgaggttgcagctccatccacctcatcttcagccacttcctcgcctgagggtccttcacctgcccgacctcctcggcgtcgcaccagtgctgatgtggaaattaggggtcaagggactggtcggccaggacaaccaccaggccccaaagtgcttcgaaagctgccaggacggctggtaactgtggtagaggaaaaggaactggtgcggcggcggcggcagcagcggggagctgccagcaccctagtgcctggggtctctgagactagtgccagcccgggaagcccgtctgtccgcagcatgtcagggccagaatcctcccctcccattggtgggccctgtgaagctgctccttcatcctcactgcccactccaccccagcagcccttcattgctcgccgtcacattgagctgggggtgactggtggtggcagccccgagaatggagacggagcactgctcgccatcaccccacctgctgtgaaacgtcggagggggaggccccccaagaagaacaggtctccagcagatgctgggagaggtgtggatgaggcaccctcatccaccttgaagggaaaaaccaatggggctgacccagtccctgggcctgagaccctrattgttgcagatcctgtcctggaaccacagcttattcctgggccccagcctcttggaccccagccagttcacagacccaatcccctcctgtcacctgtggagaaaagaaggcgaggacgaccccctaaagcacgagatttgcccatccctgggaccatttcctctgcaggggatggcaactccgaaagtcggacacagccacccccacacccatcacccctaaccccactcccaccactgctagtttgtcccactgctactgttgccaacactgtcaccactgtcaccatttcaacgtccccacccaaacggaagaggggccgacctcccaagaatcctccatcacctcggcccagccagctccccgtcttggaccgtgacagcacttctgttctcgagagctgtggattggggaggcgacggcaaccccagggccaaggggagagtgagggtagttcctctgatgaggatggaagccgccccctcacccgcctggcccgccttcggcttgaagcagaaggaatgcgaggacggaagagtggagggtccatggtggtggctgtaattcaggatgacctggacttagcagatagcgggccaggcgggttggaattgacaccacctgtggtctcactaaccccaaaactgcgctcgacccggctgcgtccagggtctctagtccccccactagagactgagaagttgcctcgcaaacgagcaggggccccagttggtgggagtcctgggctggcaaagcggggccgcctacagcccccaagtcccctggggcctgagggttcagtagaggagtctgaggctgaagcctcaggtgaggaggaggaaggggatgggaccccacgccgacgtcctggcccccgccggcttgttgggaccaccaaccaaggggaccagcgcatcctgcgcagcagcgcccctccctccctggctggccctgctgttagtcacagaggccgcaaggccaagacgtgagtgggctgcccctccacctaggctttccaccgtggccactccctccatgaccaggcctgactctgttaaccactacttgaagtcttgagggggaaagcctccagggagacataggggccttctcccttcttcccaccaaagtagggggtaggcaactggttgtcatggaaatggggatcatcacagtccccttccccttcaccccacgtggctgggcagtgttaagggtggcaagatagtctctgtccccacccccttgtacttgattccccagctgtctttcacacagccccccacccttaggggaagggggaggggcttctctacaatgaggtttttttcttttttttttttttttaagaagaaaaaataataaacttagtttctgtatgagcatccgcgtaaggaggcttctgattttctggtctggtggagggttgggtgggaacttgggcatcgtttttctcctccctcttgttcttgcaaagatcctagcacctgatctctagcccaggactatatgttccaggcagaaatctacccaagaagagggaagattggtgaatttgatgtggtagggtgcctttccccagtcagtttgaagtcacagatatccttttcctctcatttcttttccctcggttcctagacgttcctcggagctctttgatgcctcagacctttcccttttatccctcttgctcaggtgcttcctttcacaactttttccagagggcaggcgtcctagctccagttgctccatcccttgggccctcccctgctcttcatctagccaaactggtttgagtcagccacaccccttcccagctccctgggctcttcacgtggtggctggccactcaaccccacccctgggcttggcttggagccctgagtcagctccatcaccacccaagccaaaccaaagctgaggcaggagccgaaactcagagtccttcaaggcctatagccag

SEQ ID NO: 2815 - DNA, 11570 bp, Homo sapiens
gcggccgagacggcggcggccattttggtgaggcctcgggagcggcagcggcggttcgctgggagtagcgtctgccctttttcccacccaccgtccgcatctgtgtgctgcgcgaagaggcagtggaggcaaggcggtggcagtagccgcagtctccaggggagtttaaaggccgcgaaggcggtggccaagagggggccctcccccctcctaggcgggagggggggtggtgcgcacgcccccgaggacgcaggtgtgattcccttcagtacggcggcaccgtggaagtgcagactttcacagggggtgtggtctcagctcacacaggtgctccagaggctggtggacctgagcggaggctgggacgccctggtgggccccgggccctggaaggcgggtcccggtggccggtggcccagaatgaggccagctcccagcatgccctgcagccggacgccagcccctcggccagcagtactggtgataacaacccagtcattcttcaggcatccaagggggagcctgggagtgggaccatgcagagcagcccctcccctgctcaccctcagctcccagtcctacagacacagatggtgtcggacggcatgacaggcagcaatcctgtgtcccctgcctcatccagttccccagcctctagtggggcaggcggcatctccccgcagcacatagctcaagattcctcactggatggacctccaggccccccagatggtgccacagtgcccctggaggggttcagcttatcccaggctgctgacctggctaacaagggcccgaagtgggagaagagccatgccgaaattgcagaacaggccaagcatgaggccgagatcgagactcggattgctgagctgcggaaggagggtttctggtcactgaagaggctgcctaaggtgccagagccccctcgccccaaaggtcactgggactatttgtgcgaagagatgcagtggctctctgctgactttgctcaggagcgccgttggaaacggggtgtggcccggaaggtggtgcgcatggtgatccggcaccacgaggagcagcggcagaaagaggaacgggcccggagggaggagcaggccaagctgcgtcgaattgcttccaccatggccaaggatgtcaggcagttctggagcaatgtggagaaggtggtgcaattcaagcaacagtcccggcttgaggaaaagcgcaaaaaagccctggacctgcatttggacttcattgtggggcaaactgaaaagtactcggaccttctgtctcagagcctcaaccagccattaacctccagcaaagcaggctcttccccttgcctcggctcttcctcagctgcctccagtcctccaccccctgcttctcgcctggatgatgaagatggggactttcaaccccaagaggatgaggaagaggatgatgaggaaacgattgaagttgaagaacaacaggaaggcaatgatgcagaggcccagaggcgtgagattgagctgcttcgccgtgagggagaattgccactggaagagctgctccgttcccttccccctcagctgttggaagggccttccagcccctctcaaaccccctcatctcatgatagtgacacccgagatgggcctgaagaaggtgctgaagaagagccccctcaggtgttggagataaagcccccaccctctgctgtcacacagcgcaacaaacagccttggcatccagatgaagatgatgaagagtttactgccaacgaagaggaagcggaggatgaagaggatactatagcagctgaggaacagttggaaggggaggtggatcatgccatggagctgagcgagttggctcgagaaggtgagctttccatggaggagctattgcagcagtatgcaggagcctatgccccaggctctgggagcagtgaagatgaggatgaagatgaggttgatgctaatagctctgactgtgaaccagaggggcccgtggaagcggaagagcctcctcaggaggatagtagcagtcagtcagactctgtggaggaccggagtgaggatgaggaagatgaacattcagaggaggaagaaacaagtggaagttcagcatcagaggaatctgagtctgaagagtctgaggatgcccaatcacagagccaagcagatgaagaggaggaagatgatgattttggggtggagtacttgcttgccagggatgaagagcagagtgaggcagatgcaggcagtgggcctcctactccagggcccactactctaggtccaaagaaagaaattactgacattgctgcagcagctgaaagtctccagcccaagggttacacgctggccacgacccaggtaaagacgcccattcccctgcttctgcggggccagctccgggagtaccagcacattgggctagactggctggttaccatgtatgagaagaagcttaatggcattcttgctgatgagatggggcttgggaagaccatccagaccatctctctgcttgcccacttggcttgtgagaaaggtaactggggtccccatttaatcattgttcccaccagcgtgatgttgaactgggagatggagttgaaacgktggtgccccagctttaaaatcctcacttactatggagcccagaaagagaggaagctcaagcggcagggctggaccaagcccaatgcctttcatgtgtgtatcacatcttacaagctggtgctgcaggaccaccaggccttccgtcgcaagaactggcgctatctcattctggatgaggcgcagaacatcaagaacttcaagtcacagcgctggcagtcactcctcaacttcaacagccagagacgcctgctcctgacaggaactcccttgcagaacagcctcatggagctgtggtccttgatgcactttttgatgccccatgtcttccagtctcatcgcgagttcaaggagtggttctctaatcccctaactggcatgattgagggcagccaagagtataatgaaggtctagtcaaacgcctccacaaggttttgaggccttttttactgcgccgagttaaggtggatgttgagaagcagatgcccaaaaagtacgagcatgttatccrctgcaggctctccaagcgtcaacgctgtctctatgatgacttcatggcacagaccacaactaaggagacactagccacaggccatttcatgagcgtcatcaacattttgatgcagctgagaaaagtttgcaatcatccaaatctgttcgaccctcgaccggttacctcccctttcatcaccccaggcatctgcttcagcaccgcctctctggtgctaagggccacggatgtccatcccctccagcggatagacatgggtcgatttgaccttattggcctggaaggtcgtgtctctcgatatgaggcagacacatttctgccccggcaccgcctctctcgccgggtactgttagaagtggctactgctcctgaccccccaccccggcccaagccagtcaagatgaaggtcaacaggatgctgcagccagtacctaagcaagaaggccggacagtggtggtggtgaacaacccacgggcgcccctgggccctgtcccagttcgacctcctccaggtcctgagctctcagcccagcccacccctggcccagtcccccaagtgctgccagcatcactgatggtttcagcctcacctgccgggcccccgcttattcctgcatctcggcctcctggccctgtcctcttgcctccactgcagcccaacagtggttctctcccccaggtgttgccatcccccctgggggtcctgagtgggacctcacggcctcccacgccaaccttgtccctaaagccaacaccacctgccccagttcgcctgagcccagccccacctccaggctcctctagcctgttgaagcccctgacagtgccaccaggctacaccttccctcctgctgctgccaccaccacttctaccaccacggcaactgctaccaccacagcagtgccagctccgactcctgcaccacagcgcctcattctatctcccgatatgcaggctcgcctgccctcaggcgaagtggtcagcatcgggcagttagcctcactggcacaacgtccagtggctaatgcagggggaagcaaacctctcaccttccaaatccagggcaacaagctgactttgactggtgcccaggtgcgccagcttgctgtggggcagccccgcccrctgcaaatgccaccaaccatggtgaataatacaggcgtggtgaagattgtagtgagacaagcccctcgggatggactgactcctgttcctccattggccccagcaccccggcctccgagctctgggcttccagctgtgttgaatccacgccccacgttaacccctggccggctacccacacctactctgggtactgctcgagcccccatgcccacacccactctggtgaggcctcttctcaagctggtccacagtccttcacctgaagtcagtgcttcagcccccggagctgcccccttgaccatctcttctcctctccacgtgccatcctcmctccctgggccagcctcttctccaatgccaattcccaactcctctccccttgctagtcctgtgtcctctacagtctcagttccattgtcatcttcactccccatctctgtccccaccacacttcctgccccagcctcggctccactcaccatccccatctcagcccccttgactgtttctgcttcgggcccagctctgttgaccagtgtgactccaccattggcacctgttgtcccagcggctcctggacctccctccttggcaccatctggtgcttccccgtcagcatcagccttgactctaggtttggccacagctccatccctgtcttcatctcagacacctggtcaccctctgttgttggctcccacctcttcacatgttccagggttgaactcaaccgtggccccagcatgctcacctgtcctggtgccagcttcggctctggccagtccttttccgtcagcaccaaatccagctcctcctctggctcctcttccggtcctggcaccatcgccaggtgctgctcctgtcctggcttcatcacagactcyggttccagttatggctccatcgtctactccaggaacctctttagcctcagcttcaccggtaccagctccaacccctgtgttggctccatcatcaactcaaactatgctaccagccccggttccgtcacctctcccgagcccggcttctacgcagacactggccctagccccagctttagcacccactcttggaggctcatctccatctcagacactctctttgggaacggggaacccccagggaccctttccaactcagacattgtcattaactccagcatcatccctggtaccaactccagcccagacactgtctttggcaccaggaccaccactgggtccaactcagacgctgtctctggctccagcaccccctctggctccagcttctccagtgggcccagccccagctcacacgctgactttggctccagcatcgtcatctgcttcactcctggccccagcttcagtgcagacactgaccttgagccctgccccagttcctaccctgggcccggccgcagctcagaccttggcgctggccccagcctccacacagtccccagcttcccaggcatcttcccttgtggtttcggcatctggtgccgctcccttgcctgtcaccatggtatcccggctgcctgtttccaaggatgagcctgacacactgacattgcgctctggtccccccagccctccctccactgctacctcgtttggtggcccccggcctcgacgccagccccccccaccacctcgttcccctttttatctggactccctggaggaaaagcggaagcggcagcggtctgaacgcctggaacggattttccaacttagtgaggctcatggggccctggcacctgtgtatgggactgaagtcctggatttctgtaccctgccccaacctgttgccagccccatcggccctcgttctcctggccccagccaccccaccttttggacttataccgaggctgcccaccgggctgtactgtttccccagcagcgactagaccagctgtcagaaatcattgagaggttcatctttgtcatgcctcctgtggaggcacctcccccttccctgcatgcctgccacccacctccttggctggccccacgtcaggcagccttccaggagcaattggcctctgagctctggccccgggctcgtcctttgcaccgtattgtgtgtaacatgcgcacccagttccctgacttaagactcatccagtatgattgcggaaagttgcagacgttggcagtgctgttgcggcagctcaaggcagagggccaccgagtgctcatcttcacccagatgacccgaatgctggatgtattggagcagtttctcacctaccatggccatctctacctgcgcctggatggatctactagagttgaacagagacaggccttgatggaacggttcaatgcagacaaacgcatattctgcttcatcctttcaactcggagtgggggtgtgggcgtgaacctgacaggagcagacactgttgttttttatgacagcgactggaatcccaccatggatgctcaggcccaggaccgctgtcaccgaattggccagacccgggatgtccacatatataggcttatcagtgaacggacagtggaggagaacatcctaaaaaaggcaaatcagaagagaatgttgggggacatggccattgagggaggcaacttcaccacagcctatttcaaacagcagaccatccgagagctgtttgatatgcccctggaggaaccttctagctcatccgtgccctctgcccctgaagaggaggaagagactgtggccagcaagcagactcatattctggagcaggcattgtgtcgggcagaagatgaagaggatatccgtgcagccacccaggccaaggctgaacaggtggctgagcttgcagaatttaatgagaacgatgggtttcctgctggtgagggagaggaagctggccggcctggggctgaggatgaggagatgtcccgggctgagcaggaaattgctgccctcgtagaacagctgacccccattgagcgctatgccatgaaattcctggaggcctcactggaggaggtgagccgagaggagctcaaacaggcagaagagcaagtggaagctgcccgcaaagacctggaccaagccaaggaggaggtgttccgcctaccccaagaggaggaggaggggccgggggctggggatgagagttcctgtgggactggtggaggcacccaccggcgcagtaaaaaggccaaagcccctgagaggccggggactcgtgtcagtgagcgtcttcgtggagcccgggctgagactcaaggggcaaaccacactcctgtcatatccgcccatcaaactcgcagcaccaccacaccaccccgctgcagtcctgccagggagcgagttcccaggccagcacctaggcctcgacccactccagcttcagctccggctgcaattcctgcccttgttcctgtcccagtttctgccccagtacccatttcagccccaaatccaataaccattctccctgtccatatcttgccttctcctccccctccttcacagattcctccttgttcttctcctgcctgcacccctcctcctgcctgtacccctccaccagctcatacacckcctccagcccaaacctgtcttgtaactccttcctctcctctcttgcttggtccaccttctgtgcccatctctgcctcagtcactaatctccccttgggcttgaggcctgaggcagagctgtgtgcccaggcattggcatctccagagtccctggagctggcttctgtggccagttcagaaacctcctcactttctcttgtgccccctaaagatctgttgccagttgctgtggagatcctgcctgtgtcagagaagaacctttctctcaccccttctgcacccagcctgaccttggaggctggcagcatccccaatggtcaagagcaggaggcaccagattctgctgaggggaccacccttacagtgctgcctgaaggtgaggagttgcccctgtgtgtgagtgagagcaatggcctggagctcccaccctcagcagcatctgatgagccacttcaggagccactggaggctgacaggacctcggaagagctgacagaggccaagaccccaacctccagcccagagaagccacaggaactcgttacagctgaggttgcagctccatccacctcatcttcagccacttcctcgcctgagggtccttcacctgcccgacctcctcggcgtcgcaccagtgctgatgtggaaattaggggtcaagggactggtcggccaggacaaccaccaggccccaaagtgcttcgaaagctgccaggacggctggtaactgtggtagaggaaaaggaactggtgcggcggcggcggcagcagcggggagctgccagcaccctagtgcctggggtctctgagactagtgccagcccgggaagcccgtctgtccgcagcatgtcagggccagaatcctcccctcccattggtgggccctgtgaagctgctccttcatcctcactgcccactccaccccagcagcccttcattgctcgccgtcacattgagctgggggtgactggtggtggcagccccgagaatggagacggagcactgctcgccatcaccccacctgctgtgaaacgtcggagggggaggccccccaagaagaacaggtctccagcagatgctgggagaggtgtggatgaggcaccctcatccaccttgaagggaaaaaccaatggggctgacccagtccctgggcctgagaccctrattgttgcagatcctgtcctggaaccacagcttattcctgggccccagcctcttggaccccagccagttcacagacccaatcccctcctgtcacctgtggagaaaagaaggcgaggacgaccccctaaagcacgagatttgcccatccctgggaccatttcctctgcaggggatggcaactccgaaagtcggacacagccacccccacacccatcacccctaaccccactcccaccactgctagtttgtcccactgctactgttgccaacactgtcaccactgtcaccatttcaacgtccccacccaaacggaagaggggccgacctcccaagaatcctccatcacctcggcccagccagctccccgtcttggaccgtgacagcacttctgttctcgagagctgtggattggggaggcgacggcaaccccagggccaaggggagagtgagggtagttcctctgatgaggatggaagccgccccctcacccgcctggcccgccttcggcttgaagcagaaggaatgcgaggacggaagagtggagggtccatggtggtggctgtaattcaggatgacctggacttagcagatagcgggccaggcgggttggaattgacaccacctgtggtctcactaaccccaaaactgcgctcgacccggctgcgtccagggtctctagtccccccactagagactgagaagttgcctcgcaaacgagcaggggccccagttggtgggagtcctgggctggcaaagcggggccgcctacagcccccaagtcccctggggcctgagggttcagtagaggagtctgaggctgaagcctcaggtgaggaggaggaaggggatgggaccccacgccgacgtcctggcccccgccggcttgttgggaccaccaaccaaggggaccagcgcatcctgcgcagcagcgcccctccctccctggctggccctgctgttagtcacagaggccgcaaggccaagacgtgagtgggctgcccctccacctaggctttccaccgtggccactccctccatgaccaggcctgactctgttaaccactacttgaagtcttgagggggaaagcctccagggagacataggggccttctcccttcttcccaccaaagtagggggtaggcaactggttgtcatggaaatggggatcatcacagtccccttccccttcaccccacgtggctgggcagtgttaagggtggcaagatagtctctgtccccacccccttgtacttgattccccagctgtctttcacacagccccccacccttaggggaagggggaggggcttctctacaatgaggtttttttcttttttttttttttttaagaagaaaaaataataaacttagtttctgtatgagcatccgcgtaaggaggcttctgattttctggtctggtggagggttgggtgggaacttgggcatcgtttttctcctccctcttgttcttgcaaagatcctagcacctgatctctagcccaggactatatgttccaggcagaaatctacccaagaagagggaagattggtgaatttgatgtggtagggtgcctttccccagtcagtttgaagtcacagatatccttttcctctcatttcttttccctcggttcctagacgttcctcggagctctttgatgcctcagacctttcccttttatccctcttgctcaggtgcttcctttcacaactttttccagagggcaggcgtcctagctccagttgctccatcccttgggccctcccctgctcttcatctagccaaactggtttgagtcagccacaccccttcccagctccctgggctcttcacgtggtggctggccactcaaccccacccctgggcttggcttggagccctgagtcagctccatcaccacccaagccaaaccaaagctgaggcaggagccgaaactcagagtccttcaaggcctatagccaggtgatggaggacgaggagaaggcagtggagatcttgggcaacacggaagctgctcatcctccatcccccatccgctgctgctggctccgcctccgctgcttggcagctactagcattatctgtggctgctcttgcctgggagtcatggctctggtgtttgccatcaaggcggaagagcggcataaagcaggccggtccgaggaggcagtgcgctggggggcccgggcccggaaactcatcctggccagctttgctgtctggcttgctgtcctcattctgggtcccctgctgctgtggttgctctcctacgccatcgctcaggctgagtgaccctggatggcctctgctgagagccagccgagacctcctggatcctgcaatgcggcattgctaaggtcctgtgacagcagtggttggaaggatcctggttggaaggatggggactctctcaaggggctttggaagagctcttctagccctttataaaaggagggcagcagctgagactgatgagaggagggcagcctgctctgttctttcagggccccccacccccatctcccctaccctagcccaccctagggcctctacccagcgggaggggttgaagaccaggcctggttttattagaattcattttgtaataaaagccttttttagtggt

SEQ ID NO: 2816 - DNA, 11742 bp, Homo sapiens
gtaatggcgctgcgattgggcttcacgccgtcttttttcccctccccaatacgcgcgttcattggacgagagccgaagatcgagcgttctgattgggtgctagcaaaggcggtccgtttgaacgaagccaagagctgcataagggcaggaagctggactgctaggatcaggcgactacaaggagttgtgaagcgacttgcaccgacctgggggcagcaagaggccccggggctgctttccgctgttcgactctggcaggctcagccaatcactgaaggagggaacgatttgagcgatggagccactctggccgagtgtgattcccttcagtacggcggcaccgtggaagtgcagactttcacagggggtgtggtctcagctcacacaggtgctccagaggctggtggacctgagcggaggctgggacgccctggtgggccccgggccctggaaggcgggtcccggtggccggtggcccagaatgaggccagctcccagcatgccctgcagccggacgccagcccctcggccagcagtactggtgataacaacccagtcattcttcaggcatccaagggggagcctgggagtgggaccatgcagagcagcccctcccctgctcaccctcagctcccagtcctacagacacagatggtgtcggacggcatgacaggcagcaatcctgtgtcccctgcctcatccagttccccagcctctagtggggcaggcggcatctccccgcagcacatagctcaagattcctcactggatggacctccaggccccccagatggtgccacagtgcccctggaggggttcagcttatcccaggctgctgacctggctaacaagggcccgaagtgggagaagagccatgccgaaattgcagaacaggccaagcatgaggccgagatcgagactcggattgctgagctgcggaaggagggtttctggtcactgaagaggctgcctaaggtgccagagccccctcgccccaaaggtcactgggactatttgtgcgaagagatgcagtggctctctgctgactttgctcaggagcgccgttggaaacggggtgtggcccggaaggtggtgcgcatggtgatccggcaccacgaggagcagcggcagaaagaggaacgggcccggagggaggagcaggccaagctgcgtcgaattgcttccaccatggccaaggatgtcaggcagttctggagcaatgtggagaaggtggtgcaattcaagcaacagtcccggcttgaggaaaagcgcaaaaaagccctggacctgcatttggacttcattgtggggcaaactgaaaagtactcggaccttctgtctcagagcctcaaccagccattaacctccagcaaagcaggctcttccccttgcctcggctcttcctcagctgcctccagtcctccaccccctgcttctcgcctggatgatgaagatggggactttcaaccccaagaggatgaggaagaggatgatgaggaaacgattgaagttgaagaacaacaggaaggcaatgatgcagaggcccagaggcgtgagattgagctgcttcgccgtgagggagaattgccactggaagagctgctccgttcccttccccctcagctgttggaagggccttccagcccctctcaaaccccctcatctcatgatagtgacacccgagatgggcctgaagaaggtgctgaagaagagccccctcaggtgttggagataaagcccccaccctctgctgtcacacagcgcaacaaacagccttggcatccagatgaagatgatgaagagtttactgccaacgaagaggaagcggaggatgaagaggatactatagcagctgaggaacagttggaaggggaggtggatcatgccatggagctgagcgagttggctcgagaaggtgagctttccatggaggagctattgcagcagtatgcaggagcctatgccccaggctctgggagcagtgaagatgaggatgaagatgaggttgatgctaatagctctgactgtgaaccagaggggcccgtggaagcggaagagcctcctcaggaggatagtagcagtcagtcagactctgtggaggaccggagtgaggatgaggaagatgaacattcagaggaggaagaaacaagtggaagttcagcatcagaggaatctgagtctgaagagtctgaggatgcccaatcacagagccaagcagatgaagaggaggaagatgatgattttggggtggagtacttgcttgccagggatgaagagcagagtgaggcagatgcaggcagtgggcctcctactccagggcccactactctaggtccaaagaaagaaattactgacattgctgcagcagctgaaagtctccagcccaagggttacacgctggccacgacccaggtaaagacgcccattcccctgcttctgcggggccagctccgggagtaccagcacattgggctagactggctggttaccatgtatgagaagaagcttaatggcattcttgctgatgagatggggcttgggaagaccatccagaccatctctctgcttgcccacttggcttgtgagaaaggtaactggggtccccatttaatcattgttcccaccagcgtgatgttgaactgggagatggagttgaaacgktggtgccccagctttaaaatcctcacttactatggagcccagaaagagaggaagctcaagcggcagggctggaccaagcccaatgcctttcatgtgtgtatcacatcttacaagctggtgctgcaggaccaccaggccttccgtcgcaagaactggcgctatctcattctggatgaggcgcagaacatcaagaacttcaagtcacagcgctggcagtcactcctcaacttcaacagccagagacgcctgctcctgacaggaactcccttgcagaacagcctcatggagctgtggtccttgatgcactttttgatgccccatgtcttccagtctcatcgcgagttcaaggagtggttctctaatcccctaactggcatgattgagggcagccaagagtataatgaaggtctagtcaaacgcctccacaaggttttgaggccttttttactgcgccgagttaaggtggatgttgagaagcagatgcccaaaaagtacgagcatgttatccrctgcaggctctccaagcgtcaacgctgtctctatgatgacttcatggcacagaccacaactaaggagacactagccacaggccatttcatgagcgtcatcaacattttgatgcagctgagaaaagtttgcaatcatccaaatctgttcgaccctcgaccggttacctcccctttcatcaccccaggcatctgcttcagcaccgcctctctggtgctaagggccacggatgtccatcccctccagcggatagacatgggtcgatttgaccttattggcctggaaggtcgtgtctctcgatatgaggcagacacatttctgccccggcaccgcctctctcgccgggtactgttagaagtggctactgctcctgaccccccaccccggcccaagccagtcaagatgaaggtcaacaggatgctgcagccagtacctaagcaagaaggccggacagtggtggtggtgaacaacccacgggcgcccctgggccctgtcccagttcgacctcctccaggtcctgagctctcagcccagcccacccctggcccagtcccccaagtgctgccagcatcactgatggtttcagcctcacctgccgggcccccgcttattcctgcatctcggcctcctggccctgtcctcttgcctccactgcagcccaacagtggttctctcccccaggtgttgccatcccccctgggggtcctgagtgggacctcacggcctcccacgccaaccttgtccctaaagccaacaccacctgccccagttcgcctgagcccagccccacctccaggctcctctagcctgttgaagcccctgacagtgccaccaggctacaccttccctcctgctgctgccaccaccacttctaccaccacggcaactgctaccaccacagcagtgccagctccgactcctgcaccacagcgcctcattctatctcccgatatgcaggctcgcctgccctcaggcgaagtggtcagcatcgggcagttagcctcactggcacaacgtccagtggctaatgcagggggaagcaaacctctcaccttccaaatccagggcaacaagctgactttgactggtgcccaggtgcgccagcttgctgtggggcagccccgcccrctgcaaatgccaccaaccatggtgaataatacaggcgtggtgaagattgtagtgagacaagcccctcgggatggactgactcctgttcctccattggccccagcaccccggcctccgagctctgggcttccagctgtgttgaatccacgccccacgttaacccctggccggctacccacacctactctgggtactgctcgagcccccatgcccacacccactctggtgaggcctcttctcaagctggtccacagtccttcacctgaagtcagtgcttcagcccccggagctgcccccttgaccatctcttctcctctccacgtgccatcctcmctccctgggccagcctcttctccaatgccaattcccaactcctctccccttgctagtcctgtgtcctctacagtctcagttccattgtcatcttcactccccatctctgtccccaccacacttcctgccccagcctcggctccactcaccatccccatctcagcccccttgactgtttctgcttcgggcccagctctgttgaccagtgtgactccaccattggcacctgttgtcccagcggctcctggacctccctccttggcaccatctggtgcttccccgtcagcatcagccttgactctaggtttggccacagctccatccctgtcttcatctcagacacctggtcaccctctgttgttggctcccacctcttcacatgttccagggttgaactcaaccgtggccccagcatgctcacctgtcctggtgccagcttcggctctggccagtccttttccgtcagcaccaaatccagctccagctcaggcttcccttctggctccagcatcttctgcatctcaggctctagccacccctctggctcctatggcggctccacagacagcaattctggctccttctccagctcctcctctggctcctcttccggtcctggcaccatcgccaggtgctgctcctgtcctggcttcatcacagactcyggttccagttatggctccatcgtctactccaggaacctctttagcctcagcttcaccggtaccagctccaacccctgtgttggctccatcatcaactcaaactatgctaccagccccggttccgtcacctctcccgagcccggcttctacgcagacactggccctagccccagctttagcacccactcttggaggctcatctccatctcagacactctctttgggaacggggaacccccagggaccctttccaactcagacattgtcattaactccagcatcatccctggtaccaactccagcccagacactgtctttggcaccaggaccaccactgggtccaactcagacgctgtctctggctccagcaccccctctggctccagcttctccagtgggcccagccccagctcacacgctgactttggctccagcatcgtcatctgcttcactcctggccccagcttcagtgcagacactgaccttgagccctgccccagttcctaccctgggcccggccgcagctcagaccttggcgctggccccagcctccacacagtccccagcttcccaggcatcttcccttgtggtttcggcatctggtgccgctcccttgcctgtcaccatggtatcccggctgcctgtttccaaggatgagcctgacacactgacattgcgctctggtccccccagccctccctccactgctacctcgtttggtggcccccggcctcgacgccagccccccccaccacctcgttcccctttttatctggactccctggaggaaaagcggaagcggcagcggtctgaacgcctggaacggattttccaacttagtgaggctcatggggccctggcacctgtgtatgggactgaagtcctggatttctgtaccctgccccaacctgttgccagccccatcggccctcgttctcctggccccagccaccccaccttttggacttataccgaggctgcccaccgggctgtactgtttccccagcagcgactagaccagctgtcagaaatcattgagaggttcatctttgtcatgcctcctgtggaggcacctcccccttccctgcatgcctgccacccacctccttggctggccccacgtcaggcagccttccaggagcaattggcctctgagctctggccccgggctcgtcctttgcaccgtattgtgtgtaacatgcgcacccagttccctgacttaagactcatccagtatgattgcggaaagttgcagacgttggcagtgctgttgcggcagctcaaggcagagggccaccgagtgctcatcttcacccagatgacccgaatgctggatgtattggagcagtttctcacctaccatggccatctctacctgcgcctggatggatctactagagttgaacagagacaggccttgatggaacggttcaatgcagacaaacgcatattctgcttcatcctttcaactcggagtgggggtgtgggcgtgaacctgacaggagcagacactgttgttttttatgacagcgactggaatcccaccatggatgctcaggcccaggaccgctgtcaccgaattggccagacccgggatgtccacatatataggcttatcagtgaacggacagtggaggagaacatcctaaaaaaggcaaatcagaagagaatgttgggggacatggccattgagggaggcaacttcaccacagcctatttcaaacagcagaccatccgagagctgtttgatatgcccctggaggaaccttctagctcatccgtgccctctgcccctgaagaggaggaagagactgtggccagcaagcagactcatattctggagcaggcattgtgtcgggcagaagatgaagaggatatccgtgcagccacccaggccaaggctgaacaggtggctgagcttgcagaatttaatgagaacgatgggtttcctgctggtgagggagaggaagctggccggcctggggctgaggatgaggagatgtcccgggctgagcaggaaattgctgccctcgtagaacagctgacccccattgagcgctatgccatgaaattcctggaggcctcactggaggaggtgagccgagaggagctcaaacaggcagaagagcaagtggaagctgcccgcaaagacctggaccaagccaaggaggaggtgttccgcctaccccaagaggaggaggaggggccgggggctggggatgagagttcctgtgggactggtggaggcacccaccggcgcagtaaaaaggccaaagcccctgagaggccggggactcgtgtcagtgagcgtcttcgtggagcccgggctgagactcaaggggcaaaccacactcctgtcatatccgcccatcaaactcgcagcaccaccacaccaccccgctgcagtcctgccagggagcgagttcccaggccagcacctaggcctcgacccactccagcttcagctccggctgcaattcctgcccttgttcctgtcccagtttctgccccagtacccatttcagccccaaatccaataaccattctccctgtccatatcttgccttctcctccccctccttcacagattcctccttgttcttctcctgcctgcacccctcctcctgcctgtacccctccaccagctcatacacckcctccagcccaaacctgtcttgtaactccttcctctcctctcttgcttggtccaccttctgtgcccatctctgcctcagtcactaatctccccttgggcttgaggcctgaggcagagctgtgtgcccaggcattggcatctccagagtccctggagctggcttctgtggccagttcagaaacctcctcactttctcttgtgccccctaaagatctgttgccagttgctgtggagatcctgcctgtgtcagagaagaacctttctctcaccccttctgcacccagcctgaccttggaggctggcagcatccccaatggtcaagagcaggaggcaccagattctgctgaggggaccacccttacagtgctgcctgaaggtgaggagttgcccctgtgtgtgagtgagagcaatggcctggagctcccaccctcagcagcatctgatgagccacttcaggagccactggaggctgacaggacctcggaagagctgacagaggccaagaccccaacctccagcccagagaagccacaggaactcgttacagctgaggttgcagctccatccacctcatcttcagccacttcctcgcctgagggtccttcacctgcccgacctcctcggcgtcgcaccagtgctgatgtggaaattaggggtcaagggactggtcggccaggacaaccaccaggccccaaagtgcttcgaaagctgccaggacggctggtaactgtggtagaggaaaaggaactggtgcggcggcggcggcagcagcggggagctgccagcaccctagtgcctggggtctctgagactagtgccagcccgggaagcccgtctgtccgcagcatgtcagggccagaatcctcccctcccattggtgggccctgtgaagctgctccttcatcctcactgcccactccaccccagcagcccttcattgctcgccgtcacattgagctgggggtgactggtggtggcagccccgagaatggagacggagcactgctcgccatcaccccacctgctgtgaaacgtcggagggggaggccccccaagaagaacaggtctccagcagatgctgggagaggtgtggatgaggcaccctcatccaccttgaagggaaaaaccaatggggctgacccagtccctgggcctgagaccctrattgttgcagatcctgtcctggaaccacagcttattcctgggccccagcctcttggaccccagccagttcacagacccaatcccctcctgtcacctgtggagaaaagaaggcgaggacgaccccctaaagcacgagatttgcccatccctgggaccatttcctctgcaggggatggcaactccgaaagtcggacacagccacccccacacccatcacccctaaccccactcccaccactgctagtttgtcccactgctactgttgccaacactgtcaccactgtcaccatttcaacgtccccacccaaacggaagaggggccgacctcccaagaatcctccatcacctcggcccagccagctccccgtcttggaccgtgacagcacttctgttctcgagagctgtggattggggaggcgacggcaaccccagggccaaggggagagtgagggtagttcctctgatgaggatggaagccgccccctcacccgcctggcccgccttcggcttgaagcagaaggaatgcgaggacggaagagtggagggtccatggtggtggctgtaattcaggatgacctggacttagcagatagcgggccaggcgggttggaattgacaccacctgtggtctcactaaccccaaaactgcgctcgacccggctgcgtccagggtctctagtccccccactagagactgagaagttgcctcgcaaacgagcaggggccccagttggtgggagtcctgggctggcaaagcggggccgcctacagcccccaagtcccctggggcctgagggttcagtagaggagtctgaggctgaagcctcaggtgaggaggaggaaggggatgggaccccacgccgacgtcctggcccccgccggcttgttgggaccaccaaccaaggggaccagcgcatcctgcgcagcagcgcccctccctccctggctggccctgctgttagtcacagaggccgcaaggccaagacgtgagtgggctgcccctccacctaggctttccaccgtggccactccctccatgaccaggcctgactctgttaaccactacttgaagtcttgagggggaaagcctccagggagacataggggccttctcccttcttcccaccaaagtagggggtaggcaactggttgtcatggaaatggggatcatcacagtccccttccccttcaccccacgtggctgggcagtgttaagggtggcaagatagtctctgtccccacccccttgtacttgattccccagctgtctttcacacagccccccacccttaggggaagggggaggggcttctctacaatgaggtttttttcttttttttttttttttaagaagaaaaaataataaacttagtttctgtatgagcatccgcgtaaggaggcttctgattttctggtctggtggagggttgggtgggaacttgggcatcgtttttctcctccctcttgttcttgcaaagatcctagcacctgatctctagcccaggactatatgttccaggcagaaatctacccaagaagagggaagattggtgaatttgatgtggtagggtgcctttccccagtcagtttgaagtcacagatatccttttcctctcatttcttttccctcggttcctagacgttcctcggagctctttgatgcctcagacctttcccttttatccctcttgctcaggtgcttcctttcacaactttttccagagggcaggcgtcctagctccagttgctccatcccttgggccctcccctgctcttcatctagccaaactggtttgagtcagccacaccccttcccagctccctgggctcttcacgtggtggctggccactcaaccccacccctgggcttggcttggagccctgagtcagctccatcaccacccaagccaaaccaaagctgaggcaggagccgaaactcagagtccttcaaggcctatagccaggtgatggaggacgaggagaaggcagtggagatcttgggcaacacggaagctgctcatcctccatcccccatccgctgctgctggctccgcctccgctgcttggcagctactagcattatctgtggctgctcttgcctgggagtcatggctctggtgtttgccatcaaggcggaagagcggcataaagcaggccggtccgaggaggcagtgcgctggggggcccgggcccggaaactcatcctggccagctttgctgtctggcttgctgtcctcattctgggtcccctgctgctgtggttgctctcctacgccatcgctcaggctgagtgaccctggatggcctctgctgagagccagccgagacctcctggatcctgcaatgcggcattgctaaggtcctgtgacagcagtggttggaaggatcctggttggaaggatggggactctctcaaggggctttggaagagctcttctagccctttataaaaggagggcagcagctgagactgatgagaggagggcagcctgctctgttctttcagggccccccacccccatctcccctaccctagcccaccctagggcctctacccagcgggaggggttgaagaccaggcctggttttattagaattcattttgtaataaaagccttttttagtggt

SEQ ID NO: 2817 - DNA, 10175 bp, Homo sapiens
gaggccgagatcgagactcggattgctgagctgcggaaggagggtttctggtcactgaagaggctgcctaaggtgccagagccccctcgccccaaaggtcactgggactatttgtgcgaagagatgcagtggctctctgctgactttgctcaggagcgccgttggaaacggggtgtggcccggaaggtggtgcgcatggtgatccggcaccacgaggagcagcggcagaaagaggaacgggcccggagggaggagcaggccaagctgcgtcgaattgcttccaccatggccaaggatgtcaggcagttctggagcaatgtggagaaggtggtgcaattcaagcaacagtcccggcttgaggaaaagcgcaaaaaagccctggacctgcatttggacttcattgtggggcaaactgaaaagtactcggaccttctgtctcagagcctcaaccagccattaacctccagcaaagcaggctcttccccttgcctcggctcttcctcagctgcctccagtcctccaccccctgcttctcgcctggatgatgaagatggggactttcaaccccaagaggatgaggaagaggatgatgaggaaacgattgaagttgaagaacaacaggaaggcaatgatgcagaggcccagaggcgtgagattgagctgcttcgccgtgagggagaattgccactggaagagctgctccgttcccttccccctcagctgttggaagggccttccagcccctctcaaaccccctcatctcatgatagtgacacccgagatgggcctgaagaaggtgctgaagaagagccccctcaggtgttggagataaagcccccaccctctgctgtcacacagcgcaacaaacagccttggcatccagatgaagatgatgaagagtttactgccaacgaagaggaagcggaggatgaagaggatactatagcagctgaggaacagttggaaggggaggtggatcatgccatggagctgagcgagttggctcgagaaggtgagctttccatggaggagctattgcagcagtatgcaggagcctatgccccaggctctgggagcagtgaagatgaggatgaagatgaggttgatgctaatagctctgactgtgaaccagaggggcccgtggaagcggaagagcctcctcaggaggatagtagcagtcagtcagactctgtggaggaccggagtgaggatgaggaagatgaacattcagaggaggaagaaacaagtggaagttcagcatcagaggaatctgagtctgaagagtctgaggatgcccaatcacagagccaagcagatgaagaggaggaagatgatgattttggggtggagtacttgcttgccagggatgaagagcagagtgaggcagatgcaggcagtgggcctcctactccagggcccactactctaggtccaaagaaagaaattactgacattgctgcagcagctgaaagtctccagcccaagggttacacgctggccacgacccaggtaaagacgcccattcccctgcttctgcggggccagctccgggagtaccagcacattgggctagactggctggttaccatgtatgagaagaagcttaatggcattcttgctgatgagatggggcttgggaagaccatccagaccatctctctgcttgcccacttggcttgtgagaaaggtaactggggtccccatttaatcattgttcccaccagcgtgatgttgaactgggagatggagttgaaacgktggtgccccagctttaaaatcctcacttactatggagcccagaaagagaggaagctcaagcggcagggctggaccaagcccaatgcctttcatgtgtgtatcacatcttacaagctggtgctgcaggaccaccaggccttccgtcgcaagaactggcgctatctcattctggatgaggcgcagaacatcaagaacttcaagtcacagcgctggcagtcactcctcaacttcaacagccagagacgcctgctcctgacaggaactcccttgcagaacagcctcatggagctgtggtccttgatgcactttttgatgccccatgtcttccagtctcatcgcgagttcaaggagtggttctctaatcccctaactggcatgattgagggcagccaagagtataatgaaggtctagtcaaacgcctccacaaggttttgaggccttttttactgcgccgagttaaggtggatgttgagaagcagatgcccaaaaagtacgagcatgttatccrctgcaggctctccaagcgtcaacgctgtctctatgatgacttcatggcacagaccacaactaaggagacactagccacaggccatttcatgagcgtcatcaacattttgatgcagctgagaaaagtttgcaatcatccaaatctgttcgaccctcgaccggttacctcccctttcatcaccccaggcatctgcttcagcaccgcctctctggtgctaagggccacggatgtccatcccctccagcggatagacatgggtcgatttgaccttattggcctggaaggtcgtgtctctcgatatgaggcagacacatttctgccccggcaccgcctctctcgccgggtactgttagaagtggctactgctcctgaccccccaccccggcccaagccagtcaagatgaaggtcaacaggatgctgcagccagtacctaagcaagaaggccggacagtggtggtggtgaacaacccacgggcgcccctgggccctgtcccagttcgacctcctccaggtcctgagctctcagcccagcccacccctggcccagtcccccaagtgctgccagcatcactgatggtttcagcctcacctgccgggcccccgcttattcctgcatctcggcctcctggccctgtcctcttgcctccactgcagcccaacagtggttctctcccccaggtgttgccatcccccctgggggtcctgagtgggacctcacggcctcccacgccaaccttgtccctaaagccaacaccacctgccccagttcgcctgagcccagccccacctccaggctcctctagcctgttgaagcccctgacagtgccaccaggctacaccttccctcctgctgctgccaccaccacttctaccaccacggcaactgctaccaccacagcagtgccagctccgactcctgcaccacagcgcctcattctatctcccgatatgcaggctcgcctgccctcaggcgaagtggtcagcatcgggcagttagcctcactggcacaacgtccagtggctaatgcagggggaagcaaacctctcaccttccaaatccagggcaacaagctgactttgactggtgcccaggtgcgccagcttgctgtggggcagccccgcccrctgcaaatgccaccaaccatggtgaataatacaggcgtggtgaagattgtagtgagacaagcccctcgggatggactgactcctgttcctccattggccccagcaccccggcctccgagctctgggcttccagctgtgttgaatccacgccccacgttaacccctggccggctacccacacctactctgggtactgctcgagcccccatgcccacacccactctggtgaggcctcttctcaagctggtccacagtccttcacctgaagtcagtgcttcagcccccggagctgcccccttgaccatctcttctcctctccacgtgccatcctcmctccctgggccagcctcttctccaatgccaattcccaactcctctccccttgctagtcctgtgtcctctacagtctcagttccattgtcatcttcactccccatctctgtccccaccacacttcctgccccagcctcggctccactcaccatccccatctcagcccccttgactgtttctgcttcgggcccagctctgttgaccagtgtgactccaccattggcacctgttgtcccagcggctcctggacctccctccttggcaccatctggtgcttccccgtcagcatcagccttgactctaggtttggccacagctccatccctgtcttcatctcagacacctggtcaccctctgttgttggctcccacctcttcacatgttccagggttgaactcaaccgtggccccagcatgctcacctgtcctggtgccagcttcggctctggccagtccttttccgtcagcaccaaatccagctccagctcaggcttcccttctggctccagcatcttctgcatctcaggctctagccacccctctggctcctatggcggctccacagacagcaattctggctccttctccagctcctcctctggctcctcttccggtcctggcaccatcgccaggtgctgctcctgtcctggcttcatcacagactcyggttccagttatggctccatcgtctactccaggaacctctttagcctcagcttcaccggtaccagctccaacccctgtgttggctccatcatcaactcaaactatgctaccagccccggttccgtcacctctcccgagcccggcttctacgcagacactggccctagccccagctttagcacccactcttggaggctcatctccatctcagacactctctttgggaacggggaacccccagggaccctttccaactcagacattgtcattaactccagcatcatccctggtaccaactccagcccagacactgtctttggcaccaggaccaccactgggtccaactcagacgctgtctctggctccagcaccccctctggctccagcttctccagtgggcccagccccagctcacacgctgactttggctccagcatcgtcatctgcttcactcctggccccagcttcagtgcagacactgaccttgagccctgccccagttcctaccctgggcccggccgcagctcagaccttggcgctggccccagcctccacacagtccccagcttcccaggcatcttcccttgtggtttcggcatctggtgccgctcccttgcctgtcaccatggtatcccggctgcctgtttccaaggatgagcctgacacactgacattgcgctctggtccccccagccctccctccactgctacctcgtttggtggcccccggcctcgacgccagccccccccaccacctcgttcccctttttatctggactccctggaggaaaagcggaagcggcagcggtctgaacgcctggaacggattttccaacttagtgaggctcatggggccctggcacctgtgtatgggactgaagtcctggatttctgtaccctgccccaacctgttgccagccccatcggccctcgttctcctggccccagccaccccaccttttggacttataccgaggctgcccaccgggctgtactgtttccccagcagcgactagaccagctgtcagaaatcattgagaggttcatctttgtcatgcctcctgtggaggcacctcccccttccctgcatgcctgccacccacctccttggctggccccacgtcaggcagccttccaggagcaattggcctctgagctctggccccgggctcgtcctttgcaccgtattgtgtgtaacatgcgcacccagttccctgacttaagactcatccagtatgattgcggaaagttgcagacgttggcagtgctgttgcggcagctcaaggcagagggccaccgagtgctcatcttcacccagatgacccgaatgctggatgtattggagcagtttctcacctaccatggccatctctacctgcgcctggatggatctactagagttgaacagagacaggccttgatggaacggttcaatgcagacaaacgcatattctgcttcatcctttcaactcggagtgggggtgtgggcgtgaacctgacaggagcagacactgttgttttttatgacagcgactggaatcccaccatggatgctcaggcccaggaccgctgtcaccgaattggccagacccgggatgtccacatatataggcttatcagtgaacggacagtggaggagaacatcctaaaaaaggcaaatcagaagagaatgttgggggacatggccattgagggaggcaacttcaccacagcctatttcaaacagcagaccatccgagagctgtttgatatgcccctggaggaaccttctagctcatccgtgccctctgcccctgaagaggaggaagagactgtggccagcaagcagactcatattctggagcaggcattgtgtcgggcagaagatgaagaggatatccgtgcagccacccaggccaaggctgaacaggtggctgagcttgcagaatttaatgagaacgatgggtttcctgctggtgagggagaggaagctggccggcctggggctgaggatgaggagatgtcccgggctgagcaggaaattgctgccctcgtagaacagctgacccccattgagcgctatgccatgaaattcctggaggcctcactggaggaggtgagccgagaggagctcaaacaggcagaagagcaagtggaagctgcccgcaaagacctggaccaagccaaggaggaggtgttccgcctaccccaagaggaggaggaggggccgggggctggggatgagagttcctgtgggactggtggaggcacccaccggcgcagtaaaaaggccaaagcccctgagaggccggggactcgtgtcagtgagcgtcttcgtggagcccgggctgagactcaaggggcaaaccacactcctgtcatatccgcccatcaaactcgcagcaccaccacaccaccccgctgcagtcctgccagggagcgagttcccaggccagcacctaggcctcgacccactccagcttcagctccggctgcaattcctgcccttgttcctgtcccagtttctgccccagtacccatttcagccccaaatccaataaccattctccctgtccatatcttgccttctcctccccctccttcacagattcctccttgttcttctcctgcctgcacccctcctcctgcctgtacccctccaccagctcatacacckcctccagcccaaacctgtcttgtaactccttcctctcctctcttgcttggtccaccttctgtgcccatctctgcctcagtcactaatctccccttgggcttgaggcctgaggcagagctgtgtgcccaggcattggcatctccagagtccctggagctggcttctgtggccagttcagaaacctcctcactttctcttgtgccccctaaagatctgttgccagttgctgtggagatcctgcctgtgtcagagaagaacctttctctcaccccttctgcacccagcctgaccttggaggctggcagcatccccaatggtcaagagcaggaggcaccagattctgctgaggggaccacccttacagtgctgcctgaaggtgaggagttgcccctgtgtgtgagtgagagcaatggcctggagctcccaccctcagcagcatctgatgagccacttcaggagccactggaggctgacaggacctcggaagagctgacagaggccaagaccccaacctccagcccagagaagccacaggaactcgttacagctgaggttgcagctccatccacctcatcttcagccacttcctcgcctgagggtccttcacctgcccgacctcctcggcgtcgcaccagtgctgatgtggaaattaggggtcaagggactggtcggccaggacaaccaccaggccccaaagtgcttcgaaagctgccaggacggctggtaactgtggtagaggaaaaggaactggtgcggcggcggcggcagcagcggggagctgccagcaccctagtgcctggggtctctgagactagtgccagcccgggaagcccgtctgtccgcagcatgtcagggccagaatcctcccctcccattggtgggccctgtgaagctgctccttcatcctcactgcccactccaccccagcagcccttcattgctcgccgtcacattgagctgggggtgactggtggtggcagccccgagaatggagacggagcactgctcgccatcaccccacctgctgtgaaacgtcggagggggaggccccccaagaagaacaggtctccagcagatgctgggagaggtgtggatgaggcaccctcatccaccttgaagggaaaaaccaatggggctgacccagtccctgggcctgagaccctrattgttgcagatcctgtcctggaaccacagcttattcctgggccccagcctcttggaccccagccagttcacagacccaatcccctcctgtcacctgtggagaaaagaaggcgaggacgaccccctaaagcacgagatttgcccatccctgggaccatttcctctgcaggggatggcaactccgaaagtcggacacagccacccccacacccatcacccctaaccccactcccaccactgctagtttgtcccactgctactgttgccaacactgtcaccactgtcaccatttcaacgtccccacccaaacggaagaggggccgacctcccaagaatcctccatcacctcggcccagccagctccccgtcttggaccgtgacagcacttctgttctcgagagctgtggattggggaggcgacggcaaccccagggccaaggggagagtgagggtagttcctctgatgaggatggaagccgccccctcacccgcctggcccgccttcggcttgaagcagaaggaatgcgaggacggaagagtggagggtccatggtggtggctgtaattcaggatgacctggacttagcagatagcgggccaggcgggttggaattgacaccacctgtggtctcactaaccccaaaactgcgctcgacccggctgcgtccagggtctctagtccccccactagagactgagaagttgcctcgcaaacgagcaggggccccagttggtgggagtcctgggctggcaaagcggggccgcctacagcccccaagtcccctggggcctgagggttcagtagaggagtctgaggctgaagcctcaggtgaggaggaggaaggggatgggaccccacgccgacgtcctggcccccgccggcttgttgggaccaccaaccaaggggaccagcgcatcctgcgcagcagcgcccctccctccctggctggccctgctgttagtcacagaggccgcaaggccaagacgtgagtgggctgcccctccacctaggctttccaccgtggccactccctccatgaccaggcctgactctgttaaccactacttgaagtcttgagggggaaagcctccagggagacataggggccttctcccttcttcccaccaaagtagggggtaggcaactggttgtcatggaaatggggatcatcacagtccccttccccttcaccccacgtggctgggcagtgttaagggtggcaagatagtctctgtccccacccccttgtacttgattccccagctgtctttcacacagccccccacccttaggggaagggggaggggcttctctacaatgaggtttttttcttttttttttttttttaagaagaaaaaataataaacttagtttctgtatgagcatccgcgtaaggaggcttctgattttctggtctggtggagggttgggtgggaacttgggcatcgtttttctcctccctcttgttcttgcaaagatcctagcacctgatctctagcccaggactatatgttccaggcagaaatctacccaagaagagggaagattggtgaatttgatgtggtagggtgcctttccccagtcagtttgaagtcacagatatccttttcctctcatttcttttccctcggttcctagacgttcctcggagctctttgatgcctcagacctttcccttttatccctcttgctcaggtgcttcctttcacaactttttccagagggcaggcgtcctagctccagttgctccatcccttgggccctcccctgctcttcatctagccaaactggtttgagtcagccacaccccttcccagctccctgggctcttcacgtggtggctggccactcaaccccacccctgggcttggcttggagccctgagtcagctccatcaccacccaagccaaaccaaagctgaggcaggagccgaaactcagagtccttcaaggcctatagccag

SEQ ID NO: 2818 - DNA, 11681 bp, Homo sapiens
gcggccgagacggcggcggccattttggtgaggcctcgggagcggcagcggcggttcgctgggagtagcgtctgccctttttcccacccaccgtccgcatctgtgtgctgcgcgaagaggcagtggaggcaaggcggtggcagtagccgcagtctccaggggagtttaaaggccgcgaaggcggtggccaagagggggccctcccccctcctaggcgggagggggggtggtgcgcacgcccccgaggacgcaggtgtgattcccttcagtacggcggcaccgtggaagtgcagactttcacagggggtgtggtctcagctcacacaggtgctccagaggctggtggacctgagcggaggctgggacgccctggtgggccccgggccctggaaggcgggtcccggtggccggtggcccagaatgaggccagctcccagcatgccctgcagccggacgccagcccctcggccagcagtactggtgataacaacccagtcattcttcaggcatccaagggggagcctgggagtgggaccatgcagagcagcccctcccctgctcaccctcagctcccagtcctacagacacagatggtgtcggacggcatgacaggcagcaatcctgtgtcccctgcctcatccagttccccagcctctagtggggcaggcggcatctccccgcagcacatagctcaagattcctcactggatggacctccaggccccccagatggtgccacagtgcccctggaggggttcagcttatcccaggctgctgacctggctaacaagggcccgaagtgggagaagagccatgccgaaattgcagaacaggccaagcatgaggccgagatcgagactcggattgctgagctgcggaaggagggtttctggtcactgaagaggctgcctaaggtgccagagccccctcgccccaaaggtcactgggactatttgtgcgaagagatgcagtggctctctgctgactttgctcaggagcgccgttggaaacggggtgtggcccggaaggtggtgcgcatggtgatccggcaccacgaggagcagcggcagaaagaggaacgggcccggagggaggagcaggccaagctgcgtcgaattgcttccaccatggccaaggatgtcaggcagttctggagcaatgtggagaaggtggtgcaattcaagcaacagtcccggcttgaggaaaagcgcaaaaaagccctggacctgcatttggacttcattgtggggcaaactgaaaagtactcggaccttctgtctcagagcctcaaccagccattaacctccagcaaagcaggctcttccccttgcctcggctcttcctcagctgcctccagtcctccaccccctgcttctcgcctggatgatgaagatggggactttcaaccccaagaggatgaggaagaggatgatgaggaaacgattgaagttgaagaacaacaggaaggcaatgatgcagaggcccagaggcgtgagattgagctgcttcgccgtgagggagaattgccactggaagagctgctccgttcccttccccctcagctgttggaagggccttccagcccctctcaaaccccctcatctcatgatagtgacacccgagatgggcctgaagaaggtgctgaagaagagccccctcaggtgttggagataaagcccccaccctctgctgtcacacagcgcaacaaacagccttggcatccagatgaagatgatgaagagtttactgccaacgaagaggaagcggaggatgaagaggatactatagcagctgaggaacagttggaaggggaggtggatcatgccatggagctgagcgagttggctcgagaaggtgagctttccatggaggagctattgcagcagtatgcaggagcctatgccccaggctctgggagcagtgaagatgaggatgaagatgaggttgatgctaatagctctgactgtgaaccagaggggcccgtggaagcggaagagcctcctcaggaggatagtagcagtcagtcagactctgtggaggaccggagtgaggatgaggaagatgaacattcagaggaggaagaaacaagtggaagttcagcatcagaggaatctgagtctgaagagtctgaggatgcccaatcacagagccaagcagatgaagaggaggaagatgatgattttggggtggagtacttgcttgccagggatgaagagcagagtgaggcagatgcaggcagtgggcctcctactccagggcccactactctaggtccaaagaaagaaattactgacattgctgcagcagctgaaagtctccagcccaagggttacacgctggccacgacccaggtaaagacgcccattcccctgcttctgcggggccagctccgggagtaccagcacattgggctagactggctggttaccatgtatgagaagaagcttaatggcattcttgctgatgagatggggcttgggaagaccatccagaccatctctctgcttgcccacttggcttgtgagaaaggtaactggggtccccatttaatcattgttcccaccagcgtgatgttgaactgggagatggagttgaaacgktggtgccccagctttaaaatcctcacttactatggagcccagaaagagaggaagctcaagcggcagggctggaccaagcccaatgcctttcatgtgtgtatcacatcttacaagctggtgctgcaggaccaccaggccttccgtcgcaagaactggcgctatctcattctggatgaggcgcagaacatcaagaacttcaagtcacagcgctggcagtcactcctcaacttcaacagccagagacgcctgctcctgacaggaactcccttgcagaacagcctcatggagctgtggtccttgatgcactttttgatgccccatgtcttccagtctcatcgcgagttcaaggagtggttctctaatcccctaactggcatgattgagggcagccaagagtataatgaaggtctagtcaaacgcctccacaaggttttgaggccttttttactgcgccgagttaaggtggatgttgagaagcagatgcccaaaaagtacgagcatgttatccrctgcaggctctccaagcgtcaacgctgtctctatgatgacttcatggcacagaccacaactaaggagacactagccacaggccatttcatgagcgtcatcaacattttgatgcagctgagaaaagtttgcaatcatccaaatctgttcgaccctcgaccggttacctcccctttcatcaccccaggcatctgcttcagcaccgcctctctggtgctaagggccacggatgtccatcccctccagcggatagacatgggtcgatttgaccttattggcctggaaggtcgtgtctctcgatatgaggcagacacatttctgccccggcaccgcctctctcgccgggtactgttagaagtggctactgctcctgaccccccaccccggcccaagccagtcaagatgaaggtcaacaggatgctgcagccagtacctaagcaagaaggccggacagtggtggtggtgaacaacccacgggcgcccctgggccctgtcccagttcgacctcctccaggtcctgagctctcagcccagcccacccctggcccagtcccccaagtgctgccagcatcactgatggtttcagcctcacctgccgggcccccgcttattcctgcatctcggcctcctggccctgtcctcttgcctccactgcagcccaacagtggttctctcccccaggtgttgccatcccccctgggggtcctgagtgggacctcacggcctcccacgccaaccttgtccctaaagccaacaccacctgccccagttcgcctgagcccagccccacctccaggctcctctagcctgttgaagcccctgacagtgccaccaggctacaccttccctcctgctgctgccaccaccacttctaccaccacggcaactgctaccaccacagcagtgccagctccgactcctgcaccacagcgcctcattctatctcccgatatgcaggctcgcctgccctcaggcgaagtggtcagcatcgggcagttagcctcactggcacaacgtccagtggctaatgcagggggaagcaaacctctcaccttccaaatccagggcaacaagctgactttgactggtgcccaggtgcgccagcttgctgtggggcagccccgcccrctgcaaatgccaccaaccatggtgaataatacaggcgtggtgaagattgtagtgagacaagcccctcgggatggactgactcctgttcctccattggccccagcaccccggcctccgagctctgggcttccagctgtgttgaatccacgccccacgttaacccctggccggctacccacacctactctgggtactgctcgagcccccatgcccacacccactctggtgaggcctcttctcaagctggtccacagtccttcacctgaagtcagtgcttcagcccccggagctgcccccttgaccatctcttctcctctccacgtgccatcctcmctccctgggccagcctcttctccaatgccaattcccaactcctctccccttgctagtcctgtgtcctctacagtctcagttccattgtcatcttcactccccatctctgtccccaccacacttcctgccccagcctcggctccactcaccatccccatctcagcccccttgactgtttctgcttcgggcccagctctgttgaccagtgtgactccaccattggcacctgttgtcccagcggctcctggacctccctccttggcaccatctggtgcttccccgtcagcatcagccttgactctaggtttggccacagctccatccctgtcttcatctcagacacctggtcaccctctgttgttggctcccacctcttcacatgttccagggttgaactcaaccgtggccccagcatgctcacctgtcctggtgccagcttcggctctggccagtccttttccgtcagcaccaaatccagctccagctcaggcttcccttctggctccagcatcttctgcatctcaggctctagccacccctctggctcctatggcggctccacagacagcaattctggctccttctccagctcctcctctggctcctcttccggtcctggcaccatcgccaggtgctgctcctgtcctggcttcatcacagactcyggttccagttatggctccatcgtctactccaggaacctctttagcctcagcttcaccggtaccagctccaacccctgtgttggctccatcatcaactcaaactatgctaccagccccggttccgtcacctctcccgagcccggcttctacgcagacactggccctagccccagctttagcacccactcttggaggctcatctccatctcagacactctctttgggaacggggaacccccagggaccctttccaactcagacattgtcattaactccagcatcatccctggtaccaactccagcccagacactgtctttggcaccaggaccaccactgggtccaactcagacgctgtctctggctccagcaccccctctggctccagcttctccagtgggcccagccccagctcacacgctgactttggctccagcatcgtcatctgcttcactcctggccccagcttcagtgcagacactgaccttgagccctgccccagttcctaccctgggcccggccgcagctcagaccttggcgctggccccagcctccacacagtccccagcttcccaggcatcttcccttgtggtttcggcatctggtgccgctcccttgcctgtcaccatggtatcccggctgcctgtttccaaggatgagcctgacacactgacattgcgctctggtccccccagccctccctccactgctacctcgtttggtggcccccggcctcgacgccagccccccccaccacctcgttcccctttttatctggactccctggaggaaaagcggaagcggcagcggtctgaacgcctggaacggattttccaacttagtgaggctcatggggccctggcacctgtgtatgggactgaagtcctggatttctgtaccctgccccaacctgttgccagccccatcggccctcgttctcctggccccagccaccccaccttttggacttataccgaggctgcccaccgggctgtactgtttccccagcagcgactagaccagctgtcagaaatcattgagaggttcatctttgtcatgcctcctgtggaggcacctcccccttccctgcatgcctgccacccacctccttggctggccccacgtcaggcagccttccaggagcaattggcctctgagctctggccccgggctcgtcctttgcaccgtattgtgtgtaacatgcgcacccagttccctgacttaagactcatccagtatgattgcggaaagttgcagacgttggcagtgctgttgcggcagctcaaggcagagggccaccgagtgctcatcttcacccagatgacccgaatgctggatgtattggagcagtttctcacctaccatggccatctctacctgcgcctggatggatctactagagttgaacagagacaggccttgatggaacggttcaatgcagacaaacgcatattctgcttcatcctttcaactcggagtgggggtgtgggcgtgaacctgacaggagcagacactgttgttttttatgacagcgactggaatcccaccatggatgctcaggcccaggaccgctgtcaccgaattggccagacccgggatgtccacatatataggcttatcagtgaacggacagtggaggagaacatcctaaaaaaggcaaatcagaagagaatgttgggggacatggccattgagggaggcaacttcaccacagcctatttcaaacagcagaccatccgagagctgtttgatatgcccctggaggaaccttctagctcatccgtgccctctgcccctgaagaggaggaagagactgtggccagcaagcagactcatattctggagcaggcattgtgtcgggcagaagatgaagaggatatccgtgcagccacccaggccaaggctgaacaggtggctgagcttgcagaatttaatgagaacgatgggtttcctgctggtgagggagaggaagctggccggcctggggctgaggatgaggagatgtcccgggctgagcaggaaattgctgccctcgtagaacagctgacccccattgagcgctatgccatgaaattcctggaggcctcactggaggaggtgagccgagaggagctcaaacaggcagaagagcaagtggaagctgcccgcaaagacctggaccaagccaaggaggaggtgttccgcctaccccaagaggaggaggaggggccgggggctggggatgagagttcctgtgggactggtggaggcacccaccggcgcagtaaaaaggccaaagcccctgagaggccggggactcgtgtcagtgagcgtcttcgtggagcccgggctgagactcaaggggcaaaccacactcctgtcatatccgcccatcaaactcgcagcaccaccacaccaccccgctgcagtcctgccagggagcgagttcccaggccagcacctaggcctcgacccactccagcttcagctccggctgcaattcctgcccttgttcctgtcccagtttctgccccagtacccatttcagccccaaatccaataaccattctccctgtccatatcttgccttctcctccccctccttcacagattcctccttgttcttctcctgcctgcacccctcctcctgcctgtacccctccaccagctcatacacckcctccagcccaaacctgtcttgtaactccttcctctcctctcttgcttggtccaccttctgtgcccatctctgcctcagtcactaatctccccttgggcttgaggcctgaggcagagctgtgtgcccaggcattggcatctccagagtccctggagctggcttctgtggccagttcagaaacctcctcactttctcttgtgccccctaaagatctgttgccagttgctgtggagatcctgcctgtgtcagagaagaacctttctctcaccccttctgcacccagcctgaccttggaggctggcagcatccccaatggtcaagagcaggaggcaccagattctgctgaggggaccacccttacagtgctgcctgaaggtgaggagttgcccctgtgtgtgagtgagagcaatggcctggagctcccaccctcagcagcatctgatgagccacttcaggagccactggaggctgacaggacctcggaagagctgacagaggccaagaccccaacctccagcccagagaagccacaggaactcgttacagctgaggttgcagctccatccacctcatcttcagccacttcctcgcctgagggtccttcacctgcccgacctcctcggcgtcgcaccagtgctgatgtggaaattaggggtcaagggactggtcggccaggacaaccaccaggccccaaagtgcttcgaaagctgccaggacggctggtaactgtggtagaggaaaaggaactggtgcggcggcggcggcagcagcggggagctgccagcaccctagtgcctggggtctctgagactagtgccagcccgggaagcccgtctgtccgcagcatgtcagggccagaatcctcccctcccattggtgggccctgtgaagctgctccttcatcctcactgcccactccaccccagcagcccttcattgctcgccgtcacattgagctgggggtgactggtggtggcagccccgagaatggagacggagcactgctcgccatcaccccacctgctgtgaaacgtcggagggggaggccccccaagaagaacaggtctccagcagatgctgggagaggtgtggatgaggcaccctcatccaccttgaagggaaaaaccaatggggctgacccagtccctgggcctgagaccctrattgttgcagatcctgtcctggaaccacagcttattcctgggccccagcctcttggaccccagccagttcacagacccaatcccctcctgtcacctgtggagaaaagaaggcgaggacgaccccctaaagcacgagatttgcccatccctgggaccatttcctctgcaggggatggcaactccgaaagtcggacacagccacccccacacccatcacccctaaccccactcccaccactgctagtttgtcccactgctactgttgccaacactgtcaccactgtcaccatttcaacgtccccacccaaacggaagaggggccgacctcccaagaatcctccatcacctcggcccagccagctccccgtcttggaccgtgacagcacttctgttctcgagagctgtggattggggaggcgacggcaaccccagggccaaggggagagtgagggtagttcctctgatgaggatggaagccgccccctcacccgcctggcccgccttcggcttgaagcagaaggaatgcgaggacggaagagtggagggtccatggtggtggctgtaattcaggatgacctggacttagcagatagcgggccaggcgggttggaattgacaccacctgtggtctcactaaccccaaaactgcgctcgacccggctgcgtccagggtctctagtccccccactagagactgagaagttgcctcgcaaacgagcaggggccccagttggtgggagtcctgggctggcaaagcggggccgcctacagcccccaagtcccctggggcctgagggttcagtagaggagtctgaggctgaagcctcaggtgaggaggaggaaggggatgggaccccacgccgacgtcctggcccccgccggcttgttgggaccaccaaccaaggggaccagcgcatcctgcgcagcagcgcccctccctccctggctggccctgctgttagtcacagaggccgcaaggccaagacgtgagtgggctgcccctccacctaggctttccaccgtggccactccctccatgaccaggcctgactctgttaaccactacttgaagtcttgagggggaaagcctccagggagacataggggccttctcccttcttcccaccaaagtagggggtaggcaactggttgtcatggaaatggggatcatcacagtccccttccccttcaccccacgtggctgggcagtgttaagggtggcaagatagtctctgtccccacccccttgtacttgattccccagctgtctttcacacagccccccacccttaggggaagggggaggggcttctctacaatgaggtttttttcttttttttttttttttaagaagaaaaaataataaacttagtttctgtatgagcatccgcgtaaggaggcttctgattttctggtctggtggagggttgggtgggaacttgggcatcgtttttctcctccctcttgttcttgcaaagatcctagcacctgatctctagcccaggactatatgttccaggcagaaatctacccaagaagagggaagattggtgaatttgatgtggtagggtgcctttccccagtcagtttgaagtcacagatatccttttcctctcatttcttttccctcggttcctagacgttcctcggagctctttgatgcctcagacctttcccttttatccctcttgctcaggtgcttcctttcacaactttttccagagggcaggcgtcctagctccagttgctccatcccttgggccctcccctgctcttcatctagccaaactggtttgagtcagccacaccccttcccagctccctgggctcttcacgtggtggctggccactcaaccccacccctgggcttggcttggagccctgagtcagctccatcaccacccaagccaaaccaaagctgaggcaggagccgaaactcagagtccttcaaggcctatagccaggtgatggaggacgaggagaaggcagtggagatcttgggcaacacggaagctgctcatcctccatcccccatccgctgctgctggctccgcctccgctgcttggcagctactagcattatctgtggctgctcttgcctgggagtcatggctctggtgtttgccatcaaggcggaagagcggcataaagcaggccggtccgaggaggcagtgcgctggggggcccgggcccggaaactcatcctggccagctttgctgtctggcttgctgtcctcattctgggtcccctgctgctgtggttgctctcctacgccatcgctcaggctgagtgaccctggatggcctctgctgagagccagccgagacctcctggatcctgcaatgcggcattgctaaggtcctgtgacagcagtggttggaaggatcctggttggaaggatggggactctctcaaggggctttggaagagctcttctagccctttataaaaggagggcagcagctgagactgatgagaggagggcagcctgctctgttctttcagggccccccacccccatctcccctaccctagcccaccctagggcctctacccagcgggaggggttgaagaccaggcctggttttattagaattcattttgtaataaaagccttttttagtggt

SEQ ID NO: 2819 - DNA, 1925 bp, Homo sapiens
agggaatggggtttatcaagtcctcggcgagctgcccaacgggcagcagctggcgcaagtagcctagctggagaggctcaccccaggaaggagggaggccaccgacctactgggccgacggactcccacacagttcctgagctggtgccaggcaggtgacacctsctgcagcccccagcatgcgggcaggcccaggccccaccgttacattggccctggtgctggcggtgkcatgggccatggagctcaagcccacagcaccacccatcttcactggccggccctttgtggtagcgtgggacgtgcccacacaggactgtggcccacgcctcaaggtgccactggacctgaatgcctttgatgtgcaggcctcacctaatgagggttttgtgaaccagaatattaccatcttctaccgcgaccgtctaggcctgtatccacgcttcgattctgccggaaggtctgtgcatggtggtgtgccacagaatgtcagcctttgggcacaccggaagatgctgcagaaacgtgtggagcactacattcggacacaggagtctgcggggctggcggtcatcgactgggaggactggcgacctgtgtgggtgcgcaactggcaggacaaagatgtgtatcgccggttatcacgccagctagtggccagtcgtcaccctgactggcctccagaccgcatagtcaaacaggcacaatatgagtttgagttcgcagcacagcagttcatgctggagacactgcgttatgtcaaggcagtgcggccccggcacctctggggcttctacctctttcctgactgctacaatcatgattatgtgcagaackgggagagctacacaggccgctgccctgatgttgaggtggcccgcaatgaccagctggcctggctgtgggctgagagcacggccctcttcccgtctgtctacctggacgagacacttgcttcckccckccatggccgcaactttgtgagcttccgtgttcaggaggcccttcgtgtggctcgcacccaccatgccaaccatgcactcccagtctacgtcttcacacgacccacctacagccgcaggctcacggggcttagtgagatggacctcatctctaccattggcgagagtgcggccctgggcgcagctggtgtcatcctctggggtgacgcggggtacaccacaagcacggagacctgccagtacctcaaagattacctgacacggctgctggtcccctacgtggtcaatgtgtcctgggccacccaatattgcagccgggcccagtgccatggccatgggcgctgtgtgcgccgcaaccccagtgccagtaccttcctgcatctcagcaccaacagtttccgcctagtgcctggccatgcacctggtgaaccccagctgcgacctgtgggggagctcagttgggccgacmttgaccacctgcagacacacttccgctgccagtgctacttgggctggagtggtgagcaatgccagtgggaccataggcaggcagctggaggtgccagcgaggcctgggctgggtcccacctcaccagtctgctggctctggcagccctggcctttacctggaccttgtaggggtctcctgcctagctgcctagcaagctggcctctaccacaagggctctyttaggcatktaggaccctgcagggggtggacaaactggagtytggagtgggcagagcccccaggaarcccaggagggcatccataccagctcgcacccccctgttytaagggggaggggaagtccctgggaggccccttctctccctgccaraggggaaggagggtacagctgggctgggkaggacctgaccctactcccttgccctagatagtttattattattattattttggggtctcttttgtaaattaaacataaaacaattgcttct

SEQ ID NO: 2820 - DNA, 2055 bp, Homo sapiens
cggtggagggaagggccgggcggccggcgccgccgtgggaggtccgctgcccctttgtcccyacggggcctcctccaagccgggagagtgtcagcgctcgagagaaagtccggagagcctcactcttctgccgggcgagtgttacacggatagaagcctcccggcagcgttccttccagtttcgtagcctcttgacgagctgttccctgctttacccaaatgctgtcgtttctctggatcaagggttcttcacggtgtacaggttcctgagctggtgccaggcaggtgacacctsctgcagcccccagcatgcgggcaggcccaggccccaccgttacattggccctggtgctggcggtgkcatgggccatggagctcaagcccacagcaccacccatcttcactggccggccctttgtggtagcgtgggacgtgcccacacaggactgtggcccacgcctcaaggtgccactggacctgaatgcctttgatgtgcaggcctcacctaatgagggttttgtgaaccagaatattaccatcttctaccgcgaccgtctaggcctgtatccacgcttcgattctgccggaaggtctgtgcatggtggtgtgccacagaatgtcagcctttgggcacaccggaagatgctgcagaaacgtgtggagcactacattcggacacaggagtctgcggggctggcggtcatcgactgggaggactggcgacctgtgtgggtgcgcaactggcaggacaaagatgtgtatcgccggttatcacgccagctagtggccagtcgtcaccctgactggcctccagaccgcatagtcaaacaggcacaatatgagtttgagttcgcagcacagcagttcatgctggagacactgcgttatgtcaaggcagtgcggccccggcacctctggggcttctacctctttcctgactgctacaatcatgattatgtgcagaackgggagagctacacaggccgctgccctgatgttgaggtggcccgcaatgaccagctggcctggctgtgggctgagagcacggccctcttcccgtctgtctacctggacgagacacttgcttcckccckccatggccgcaactttgtgagcttccgtgttcaggaggcccttcgtgtggctcgcacccaccatgccaaccatgcactcccagtctacgtcttcacacgacccacctacagccgcaggctcacggggcttagtgagatggacctcatctctaccattggcgagagtgcggccctgggcgcagctggtgtcatcctctggggtgacgcggggtacaccacaagcacggagacctgccagtacctcaaagattacctgacacggctgctggtcccctacgtggtcaatgtgtcctgggccacccaatattgcagccgggcccagtgccatggccatgggcgctgtgtgcgccgcaaccccagtgccagtaccttcctgcatctcagcaccaacagtttccgcctagtgcctggccatgcacctggtgaaccccagctgcgacctgtgggggagctcagttgggccgacmttgaccacctgcagacacacttccgctgccagtgctacttgggctggagtggtgagcaatgccagtgggaccataggcaggcagctggaggtgccagcgaggcctgggctgggtcccacctcaccagtctgctggctctggcagccctggcctttacctggaccttgtaggggtctcctgcctagctgcctagcaagctggcctctaccacaagggctctyttaggcatktaggaccctgcagggggtggacaaactggagtytggagtgggcagagcccccaggaarcccaggagggcatccataccagctcgcacccccctgttytaagggggaggggaagtccctgggaggccccttctctccctgccaraggggaaggagggtacagctgggctgggkaggacctgaccctactcccttgccctagatagtttattattattattattttggggtctcttttgtaaattaaacataaaacaattgcttct

SEQ ID NO: 2821 - DNA, 2270 bp, Homo sapiens
aagtagcctagctggagaggctcaccccaggaaggagggaggccaccgacctactgggccgacggactcccacacagggctggcggcgccgcggagctgggaggactgaaccaccggcctcgggctgcaggggaaacatttcaggctgactggcgctcgtggctgagactcccatagaaagcccggctcagaggggcattagggtcctaaatgggcggccacgtccctctgcagaggacctggggctcttcgagcccgaaacgaggcaccggcaccgagaaaggtggaccacaccttcccgccccgtccgcaagtccaatcccgggcccacctccgcactggagtcttaaagggccagcgtgcctgggggcggagccagcagaggcgctgagccgggccgcgcctgggcgaacggccggagcgggctgggctgggcccgggatggcggtggccctggcgccggtcccggtggcgccccgcgcgagttcctgagctggtgccaggcaggtgacacctsctgcagcccccagcatgcgggcaggcccaggccccaccgttacattggccctggtgctggcggtgkcatgggccatggagctcaagcccacagcaccacccatcttcactggccggccctttgtggtagcgtgggacgtgcccacacaggactgtggcccacgcctcaaggtgccactggacctgaatgcctttgatgtgcaggcctcacctaatgagggttttgtgaaccagaatattaccatcttctaccgcgaccgtctaggcctgtatccacgcttcgattctgccggaaggtctgtgcatggtggtgtgccacagaatgtcagcctttgggcacaccggaagatgctgcagaaacgtgtggagcactacattcggacacaggagtctgcggggctggcggtcatcgactgggaggactggcgacctgtgtgggtgcgcaactggcaggacaaagatgtgtatcgccggttatcacgccagctagtggccagtcgtcaccctgactggcctccagaccgcatagtcaaacaggcacaatatgagtttgagttcgcagcacagcagttcatgctggagacactgcgttatgtcaaggcagtgcggccccggcacctctggggcttctacctctttcctgactgctacaatcatgattatgtgcagaackgggagagctacacaggccgctgccctgatgttgaggtggcccgcaatgaccagctggcctggctgtgggctgagagcacggccctcttcccgtctgtctacctggacgagacacttgcttcckccckccatggccgcaactttgtgagcttccgtgttcaggaggcccttcgtgtggctcgcacccaccatgccaaccatgcactcccagtctacgtcttcacacgacccacctacagccgcaggctcacggggcttagtgagatggacctcatctctaccattggcgagagtgcggccctgggcgcagctggtgtcatcctctggggtgacgcggggtacaccacaagcacggagacctgccagtacctcaaagattacctgacacggctgctggtcccctacgtggtcaatgtgtcctgggccacccaatattgcagccgggcccagtgccatggccatgggcgctgtgtgcgccgcaaccccagtgccagtaccttcctgcatctcagcaccaacagtttccgcctagtgcctggccatgcacctggtgaaccccagctgcgacctgtgggggagctcagttgggccgacmttgaccacctgcagacacacttccgctgccagtgctacttgggctggagtggtgagcaatgccagtgggaccataggcaggcagctggaggtgccagcgaggcctgggctgggtcccacctcaccagtctgctggctctggcagccctggcctttacctggaccttgtaggggtctcctgcctagctgcctagcaagctggcctctaccacaagggctctyttaggcatktaggaccctgcagggggtggacaaactggagtytggagtgggcagagcccccaggaarcccaggagggcatccataccagctcgcacccccctgttytaagggggaggggaagtccctgggaggccccttctctccctgccaraggggaaggagggtacagctgggctgggkaggacctgaccctactcccttgccctagatagtttattattattattattttggggtctcttttgtaaattaaacataaaacaat

SEQ ID NO: 2822 - DNA, 2542 bp, Homo sapiens
cgccgcgctcgggcgccgagtctgcgcgctgacgtccgacgctccaggtactttccccacggccgacagggcttggcgtgggggcggggcgcggcgcgcagcgcgcatgcgccgcagcgccagcgctctccccggatcgtgcggggcctgagcctctccgccggcgcaggctctgctcgcgccagctcgctcccgcagccatgcccaccaccatcgagcgggagttcgaagagttggatactcagcgtcgctggcagccgctgtacttggaaattcgaaatgagtcccatgactatcctcatagagtggccaagtttccagaaaacagaaatcgaaacagatacagagatgtaagcccatatgatcacagtcgtgttaaactgcaaaatgctgagaatgattatattaatgccagtttagttgacatagaagaggcacaaaggagttacatcttaacacaggcaaggtccacttcctaacacatgctgccatttctggcttatggtttggcagcagaagaccaaagcagttgtcatgctgaaccgcattgtggagaaagaatcggttaaatgtgcacagtactggccaacagatgaccaagagatgctgtttaaagaaacaggattcagtgtgaagctcttgtcagaagatgtgaagtcgtattatacagtacatctactacaattagaaaatatcaatagtggtgaaaccagaacaatatctcactttcattatactacctggccagattttggagtccctgaatcaccagcttcatttctcaatttcttgtttaaagtgagagaatctggctccttgaaccctgaccatgggcctgcggtgatccactgtagtgcaggcattgggcgctctggcaccttctctctggtagacacttgtcttgttttgatggaaaaaggagatgatattaacataaaacaartgttactgaacatgagaaaataccgaatgggtcttattcagaccccagatcaactgagattctcatacatggctataatagaaggagcaaaatgtataaagggagattctagtatacagaaacgatggaaagaactttctaaggaagacttatctcctgcctttgatcattcaccaaacaaaataatgactgaaaaatacaatgggaacagaataggtctagaagaagaaaaactgacaggtgaccgatgtacaggactttcctctaaaatgcaagatacaatggaggagaacagtgagagtgctctacggaaacgtattcgagaggacagaaaggccaccacagctcagaaggtgcagcagatgaaacagaggctaaatgagaatgaacgaaaaagaaaaaggtggttatattggcaacctattctcactaagatggggtttatgtcagtcattttggttggcgcttttgttggctggacactgttttttcagcaaaatgccctataaacaattaattttgcccagcaagcttctgcactagtaactgacagtgctacattaatcataggggtttgtctgcagcaaacgcctcatatcccaaaaacggtgcagtagaatagacatcaaccagataagtgatatttacagtcacaagcccaacatctcaggactcttgactgcaggttcctctgaaccccaaactgtaaatggctgtctaaaataaagacattcatgtttgttaaaaactggtaaattttgcaactgtattcatacatgtcaaacacagtatttcacctgaccaacattgagatatcctttatcacaggatttgtttttggaggctatctggattttaacctgcacttgatataagcaataaatattgtggttttatctacgttattggaaagaaaatgacatttaaataatgtgtgtaatgtataatgtactattgacatgggcatcaacacttttattcttaagcatttcagggtaaatatattttataagtatctatttaatcttttgtagttaactgtactttttaagagctcaatttgaaaaatctgttactaaaaaaataaattgtatgtcgattgaattgtactggatacattttccatttttctaaagagaagtttgatatgagcagttagaagttggaataagcaatttctactatatattgcatttcttttatgttttacagttttccccattttaaaaagaaaagcaaacaaagaaacaaaagtttttcctaaaaatatctttgaaggaaaattctccttactgggatagtcaggtaaacagttggtcaagactttgtaaagaaattggtttctgtaaatcccattattgatatgtttatttttcatgaaaatttcaatgtagttggggtagattatgatttaggaagcaaaagtaagaagcagcattttatgattcataatttcagtttactagactgaagttttgaagtaaacacttttcagtttctttctacttcaataaatagtatgattatatgcaaaccttacattgtcattttaacttaatgaatattttttaaagcaaactgtttaatgaatttaactgc

SEQ ID NO: 2823 - DNA, 1598 bp, Homo sapiens
cgccgcgctcgggcgccgagtctgcgcgctgacgtccgacgctccaggtactttccccacggccgacagggcttggcgtgggggcggggcgcggcgcgcagcgcgcatgcgccgcagcgccagcgctctccccggatcgtgcggggcctgagcctctccgccggcgcaggctctgctcgcgccagctcgctcccgcagccatgcccaccaccatcgagcgggagttcgaagagttggatactcagcgtcgctggcagccgctgtacttggaaattcgaaatgagtcccatgactatcctcatagagtggccaagtttccagaaaacagaaatcgaaacagatacagagatgtaagcccatatgatcacagtcgtgttaaactgcaaaatgctgagaatgattatattaatgccagtttagttgacatagaagaggcacaaaggagttacatcttaacacagggtccacttcctaacacatgctgccatttctggcttatggtttggcagcagaagaccaaagcagttgtcatgctgaaccgcattgtggagaaagaatcggttaaatgtgcacagtactggccaacagatgaccaagagatgctgtttaaagaaacaggattcagtgtgaagctcttgtcagaagatgtgaagtcgtattatacagtacatctactacaattagaaaatatcaatagtggtgaaaccagaacaatatctcactttcattatactacctggccagattttggagtccctgaatcaccagcttcatttctcaatttcttgtttaaagtgagagaatctggctccttgaaccctgaccatgggcctgcggtgatccactgtagtgcaggcattgggcgctctggcaccttctctctggtagacacttgtcttgttttgatggaaaaaggagatgatattaacataaaacaartgttactgaacatgagaaaataccgaatgggtcttattcagaccccagatcaactgagattctcatacatggctataatagaaggagcaaaatgtataaagggagattctagtatacagaaacgatggaaagaactttctaaggaagacttatctcctgcctttgatcattcaccaaacaaaataatgactgaaaaatacaatgggaacagaataggtctagaagaagaaaaactgacaggtgaccgatgtacaggactttcctctaaaatgcaagatacaatggaggagaacagtgagaggccaagattgacagacacctaatattcatgacttgagaatattctgcagctataaattttgaaccattgatgtgcaaagcaagacctgaagcccactccggaaactaaagtgaggctcgctaaccctctagattgcctcacagttgtttgtttacaaagtaaactttacatccaggggatgaagagcacccaccagcagaagactttgcagaacctttaattggatgtgttaagtgtttttaatgagtgtatgaaatgtagaaagatgtacaagaaataaattaggrgagattactttgtattgtactgccattcctactgtatttttatactttttggcagcattaaatatttttgt

SEQ ID NO: 2824 - DNA, 285 bp, Homo sapiens
atgacagttgtggtttatcattctctattttcagatgatcacagtcgtgttaaactgcaaaatgctgagaatgattatattaatgccagtttagttgacatagaagaggcacaaaggagttacatcttaacacaggcaatgtcttcttttctcttcccataccctgtggcaaaaccagaggccctggacagctcttctgtagctccccstgcctcgcatatatcttcagagagtacaccaagccctggatggtgtctggtcgtcttcaaggacctgagcgggtgc

SEQ ID NO: 2825 - DNA, 1712 bp, Homo sapiens
cgccgcgctcgggcgccgagtctgcgcgctgacgtccgacgctccaggtactttccccacggccgacagggcttggcgtgggggcggggcgcggcgcgcagcgcgcatgcgccgcagcgccagcgctctccccggatcgtgcggggcctgagcctctccgccggcgcaggctctgctcgcgccagctcgctcccgcagccatgcccaccaccatcgagcgggagttcgaagagttggatactcagcgtcgctggcagccgctgtacttggaaattcgaaatgagtcccatgactatcctcatagagtggccaagtttccagaaaacagaaatcgaaacagatacagagatgtaagcccatatgatcacagtcgtgttaaactgcaaaatgctgagaatgattatattaatgccagtttagttgacatagaagaggcacaaaggagttacatcttaacacagggtccacttcctaacacatgctgccatttctggcttatggtttggcagcagaagaccaaagcagttgtcatgctgaaccgcattgtggagaaagaatcggttaaatgtgcacagtactggccaacagatgaccaagagatgctgtttaaagaaacaggattcagtgtgaagctcttgtcagaagatgtgaagtcgtattatacagtacatctactacaattagaaaatatcaatagtggtgaaaccagaacaatatctcactttcattatactacctggccagattttggagtccctgaatcaccagcttcatttctcaatttcttgtttaaagtgagagaatctggctccttgaaccctgaccatgggcctgcggtgatccactgtagtgcaggcattgggcgctctggcaccttctctctggtagacacttgtcttgttttgatggaaaaaggagatgatattaacataaaacaartgttactgaacatgagaaaataccgaatgggtcttattcagaccccagatcaactgagattctcatacatggctataatagaaggagcaaaatgtataaagggagattctagtatacagaaacgatggaaagaactttctaaggaagacttatctcctgcctttgatcattcaccaaacaaaataatgactgaaaaatacaatgggaacagaataggtctagaagaagaaaaactgacaggtgaccgatgtacaggactttcctctaaaatgcaagatacaatggaggagaacagtgagagtgctctacggaaacgtattcgagaggacagaaaggccaccacagctcagaaggtgcagcagatgaaacagaggctaaatgagaatgaacgaaaaagaaaaaggccaagattgacagacacctaatattcatgacttgagaatattctgcagctataaattttgaaccattgatgtgcaaagcaagacctgaagcccactccggaaactaaagtgaggctcgctaaccctctagattgcctcacagttgtttgtttacaaagtaaactttacatccaggggatgaagagcacccaccagcagaagactttgcagaacctttaattggatgtgttaagtgtttttaatgagtgtatgaaatgtagaaagatgtacaagaaataaattaggrgagattactttgtattgtactgccattcctactgtatttttatactttttggcagcattaaatatttttgttaaatagtcttt

SEQ ID NO: 2826 - DNA, 1612 bp, Homo sapiens
cgccgcgctcgggcgccgagtctgcgcgctgacgtccgacgctccaggtactttccccacggccgacagggcttggcgtgggggcggggcgcggcgcgcagcgcgcatgcgccgcagcgccagcgctctccccggatcgtgcggggcctgagcctctccgccggcgcaggctctgctcgcgccagctcgctcccgcagccatgcccaccaccatcgagcgggagttcgaagagttggatactcagcgtcgctggcagccgctgtacttggaaattcgaaatgagtcccatgactatcctcatagagtggccaagtttccagaaaacagaaatcgaaacagatacagagatgtaagcccatatgatcacagtcgtgttaaactgcaaaatgctgagaatgattatattaatgccagtttagttgacatagaagaggcacaaaggagttacatcttaacacagggtccacttcctaacacatgctgccatttctggcttatggtttggcagcagaagaccaaagcagttgtcatgctgaaccgcattgtggagaaagaatcggttaaatgtgcacagtactggccaacagatgaccaagagatgctgtttaaagaaacaggattcagtgtgaagctcttgtcagaagatgtgaagtcgtattatacagtacatctactacaattagaaaatatcaattgagagaatctggctccttgaaccctgaccatgrgcctgcggtgatccactgtagtgcaggcattgggcgctctggcaccttctctctggtagacacttgtcttgttttgatggaaaaaggagatgatattaacataaaacaagtgttactgaacatgagaaaataccgaatgggtcttattcagaccccagatcaactgagattctcatacatggctataatagaaggagcaaaatgtataaagggagattctagtatacagaaacgatggaaagaactttctaaggaagacttatctcctgcctttgatcattcaccaaacaaaataatgactgaaaaatacaatgggaacagaataggtctagaagaagaaaaactgacaggtgaccgatgtacaggactttcctctaaaatgcaagatacaatggaggagaacagtgagagtgctctacggaaacgtattcgagaggacagaaaggccaccacagctcagaaggtgcagcagatgaaacagaggctaaatgagaatgaacgaaaaagaaaaaggccaagattgacagacacctaatattcatgacttgagaatattctgcagctataaattttgaaccattgatgtgcaaagcaagacctgaagcccactccggaaactaaagtgaggctcgctaaccctctagattgcctcacagttgtttgtttacaaagtaaactttacatccaggrgatgaagagcacccaccagcagaagactttgcagaacctttaattggatgtgttaagtgtttttaatgagtgtatgaaatgtagaaagatgtacaagaaataaattaggagagattactttgtattgtactgccattcctactgtatttttatactttttggcagcattaaatatttttgttaaatagtcttt

SEQ ID NO: 2827 - DNA, 2299 bp, Homo sapiens
tgagcctctccgccggcgcaggctctgctcgcgccagctcgctcccgcagccatgcccaccaccatcgagcgggagttcgaagagttggatactcagcgtcgctggcagccgctgtacttgatgatcacagtcgtgttaaactgcaaaatgctgagaatgattatattaatgccagtttagttgacatagaagaggcacaaaggagttacatcttaacacagggtccacttcctaacacatgctgccatttctggcttatggtttggcagcagaagaccaaagcagttgtcatgctgaaccgcattgtggagaaagaatcggttaaatgtgcacagtactggccaacagatgaccaagagatgctgtttaaagaaacaggattcagtgtgaagctcttgtcagaagatgtgaagtcgtattatacagtacatctactacaattagaaaatatcaatagtggtgaaaccagaacaatatctcactttcattatactacctggccagattttggagtccctgaatcaccagcttcatttctcaatttcttgtttaaagtgagagaatctggctccttgaaccctgaccatgggcctgcggtgatccactgtagtgcaggcattgggcgctctggcaccttctctctggtagacacttgtcttgttttgatggaaaaaggagatgatattaacataaaacaartgttactgaacatgagaaaataccgaatgggtcttattcagaccccagatcaactgagattctcatacatggctataatagaaggagcaaaatgtataaagggagattctagtatacagaaacgatggaaagaactttctaaggaagacttatctcctgcctttgatcattcaccaaacaaaataatgactgaaaaatacaatgggaacagaataggtctagaagaagaaaaactgacaggtgaccgatgtacaggactttcctctaaaatgcaagatacaatggaggagaacagtgagagtgctctacggaaacgtattcgagaggacagaaaggccaccacagctcagaaggtgcagcagatgaaacagaggctaaatgagaatgaacgaaaaagaaaaaggtggttatattggcaacctattctcactaagatggggtttatgtcagtcattttggttggcgcttttgttggctggacactgttttttcagcaaaatgccctataaacaattaattttgcccagcaagcttctgcactagtaactgacagtgctacattaatcataggggtttgtctgcagcaaacgcctcatatcccaaaaacggtgcagtagaatagacatcaaccagataagtgatatttacagtcacaagcccaacatctcaggactcttgactgcaggttcctctgaaccccaaactgtaaatggctgtctaaaataaagacattcatgtttgttaaaaactggtaaattttgcaactgtattcatacatgtcaaacacagtatttcacctgaccaacattgagatatcctttatcacaggatttgtttttggaggctatctggattttaacctgcacttgatataagcaataaatattgtggttttatctacgttattggaaagaaaatgacatttaaataatgtgtgtaatgtataatgtactattgacatgggcatcaacacttttattcttaagcatttcagggtaaatatattttataagtatctatttaatcttttgtagttaactgtactttttaagagctcaatttgaaaaatctgttactaaaaaaataaattgtatgtcgattgaattgtactggatacattttccatttttctaaagagaagtttgatatgagcagttagaagttggaataagcaatttctactatatattgcatttcttttatgttttacagttttccccattttaaaaagaaaagcaaacaaagaaacaaaagtttttcctaaaaatatctttgaaggaaaattctccttactgggatagtcaggtaaacagttggtcaagactttgtaaagaaattggtttctgtaaatcccattattgatatgtttatttttcatgaaaatttcaatgtagttggggtagattatgatttaggaagcaaaagtaagaagcagcattttatgattcataatttcagtttactagactgaagttttgaagtaaacacttttcagtttctttctacttcaataaatagtatgattatatgcaaaccttacattgtcattttaacttaatgaatattttttaaagcaaactgtttaatgaatttaactgc

SEQ ID NO: 2828 - DNA, 1632 bp, Homo sapiens
tgagcctctccgccggcgcaggctctgctcgcgccagctcgctcccgcagccatgcccaccaccatcgagcgggagttcgaagagttggatactcagcgtcgctggcagccgctgtacttgatgatcacagtcgtgttaaactgcaaaatgctgagaatgattatattaatgccagtttagttgacatagaagaggcacaaaggagttacatcttaacacagggtccacttcctaacacatgctgccatttctggcttatggtttggcagcagaagaccaaagcagttgtcatgctgaaccgcattgtggagaaagaatcggttaaatgtgcacagtactggccaacagatgaccaagagatgctgtttaaagaaacaggattcagtgtgaagctcttgtcagaagatgtgaagtcgtattatacagtacatctactacaattagaaaatatcaatgtgtagaggaaatacccaatgaagaggttgaaaatgtgttgagttttacaattgactggagctttctaggggccacaataaaggcaattgtatattgagaacttgtggatcacactgtatttgaaattattaatgctggatgttaaaaggtcactaaaaagtggtgaaaccagaacaatatctcactttcattatactacctggccagattttggagtccctgaatcaccagcttcatttctcaatttcttgtttaaagtgagagaatctggctccttgaaccctgaccatgggcctgcggtgatccactgtagtgcaggcattgggcgctctggcaccttctctctggtagacacttgtcttgttttgatggaaaaaggagatgatattaacataaaacaartgttactgaacatgagaaaataccgaatgggtcttattcagaccccagatcaactgagattctcatacatggctataatagaaggagcaaaatgtataaagggagattctagtatacagaaacgatggaaagaactttctaaggaagacttatctcctgcctttgatcattcaccaaacaaaataatgactgaaaaatacaatgggaacagaataggtctagaagaagaaaaactgacaggtgaccgatgtacaggactttcctctaaaatgcaagatacaatggaggagaacagtgagagtgctctacggaaacgtattcgagaggacagaaaggccaccacagctcagaaggtgcagcagatgaaacagaggctaaatgagaatgaacgaaaaagaaaaaggccaagattgacagacacctaatattcatgacttgagaatattctgcagctataaattttgaaccattgatgtgcaaagcaagacctgaagcccactccggaaactaaagtgaggctcgctaaccctctagattgcctcacagttgtttgtttacaaagtaaactttacatccaggggatgaagagcacccaccagcagaagactttgcagaacctttaattggatgtgttaagtgtttttaatgagtgtatgaaatgtagaaagatgtacaagaaataaattaggrgagattactttgtattgtactgccattcctactgtatttttatactttttggcagcattaaatatttttgttaaatagtcttt

SEQ ID NO: 2829 - DNA, 2538 bp, Homo sapiens
cgccgcgctcgggcgccgagtctgcgcgctgacgtccgacgctccaggtactttccccacggccgacagggcttggcgtgggggcggggcgcggcgcgcagcgcgcatgcgccgcagcgccagcgctctccccggatcgtgcggggcctgagcctctccgccggcgcaggctctgctcgcgccagctcgctcccgcagccatgcccaccaccatcgagcgggagttcgaagagttggatactcagcgtcgctggcagccgctgtacttggaaattcgaaatgagtcccatgactatcctcatagagtggccaagtttccagaaaacagaaatcgaaacagatacagagatgtaagcccatatgatcacagtcgtgttaaactgcaaaatgctgagaatgattatattaatgccagtttagttgacatagaagaggcacaaaggagttacatcttaacacagggtccacttcctaacacatgctgccatttctggcttatggtttggcagcagaagaccaaagcagttgtcatgctgaaccgcattgtggagaaagaatcggttaaatgtgcacagtactggccaacagatgaccaagagatgctgtttaaagaaacaggattcagtgtgaagctcttgtcagaagatgtgaagtcgtattatacagtacatctactacaattagaaaatatcaatagtggtgaaaccagaacaatatctcactttcattatactacctggccagattttggagtccctgaatcaccagcttcatttctcaatttcttgtttaaagtgagagaatctggctccttgaaccctgaccatgggcctgcggtgatccactgtagtgcaggcattgggcgctctggcaccttctctctggtagacacttgtcttgttttgatggaaaaaggagatgatattaacataaaacaartgttactgaacatgagaaaataccgaatgggtcttattcagaccccagatcaactgagattctcatacatggctataatagaaggagcaaaatgtataaagggagattctagtatacagaaacgatggaaagaactttctaaggaagacttatctcctgcctttgatcattcaccaaacaaaataatgactgaaaaatacaatgggaacagaataggtctagaagaagaaaaactgacaggtgaccgatgtacaggactttcctctaaaatgcaagatacaatggaggagaacagtgagagtgctctacggaaacgtattcgagaggacagaaaggccaccacagctcagaaggtgcagcagatgaaacagaggctaaatgagaatgaacgaaaaagaaaaaggtggttatattggcaacctattctcactaagatggggtttatgtcagtcattttggttggcgcttttgttggctggacactgttttttcagcaaaatgccctataaacaattaattttgcccagcaagcttctgcactagtaactgacagtgctacattaatcataggggtttgtctgcagcaaacgcctcatatcccaaaaacggtgcagtagaatagacatcaaccagataagtgatatttacagtcacaagcccaacatctcaggactcttgactgcaggttcctctgaaccccaaactgtaaatggctgtctaaaataaagacattcatgtttgttaaaaactggtaaattttgcaactgtattcatacatgtcaaacacagtatttcacctgaccaacattgagatatcctttatcacaggatttgtttttggaggctatctggattttaacctgcacttgatataagcaataaatattgtggttttatctacgttattggaaagaaaatgacatttaaataatgtgtgtaatgtataatgtactattgacatgggcatcaacacttttattcttaagcatttcagggtaaatatattttataagtatctatttaatcttttgtagttaactgtactttttaagagctcaatttgaaaaatctgttactaaaaaaataaattgtatgtcgattgaattgtactggatacattttccatttttctaaagagaagtttgatatgagcagttagaagttggaataagcaatttctactatatattgcatttcttttatgttttacagttttccccattttaaaaagaaaagcaaacaaagaaacaaaagtttttcctaaaaatatctttgaaggaaaattctccttactgggatagtcaggtaaacagttggtcaagactttgtaaagaaattggtttctgtaaatcccattattgatatgtttatttttcatgaaaatttcaatgtagttggggtagattatgatttaggaagcaaaagtaagaagcagcattttatgattcataatttcagtttactagactgaagttttgaagtaaacacttttcagtttctttctacttcaataaatagtatgattatatgcaaaccttacattgtcattttaacttaatgaatattttttaaagcaaactgtttaatgaatttaactgc

SEQ ID NO: 2830 - DNA, 4593 bp, Homo sapiens
cgcaggctgcctgctcgaggagggcctctgcggagcgtccgaggcctgtgtgaacgatggagtgtttggaaggtgccagaaggttccggcaatggacttttaccgctacgaggtgtcgcccgtggccctgcagcgcctgcgcgtggcgttgcagaagctttccggcacaggtttcacgtggcaggatgactatactcagtatgtgatggaccaggaacttgcagacctcccgaaaacctacctgaggcgtcctgaagcatccagcccagccaggccctcaaaacacagcgttggcagcgagaggaggtacastcgggagggcggtgctgccctggccaacgccctccgacgccacctgcccttcctggaggccctgtcccaggccccagcctcagacgtgctcgccaggacccatacggcgcaggacagaccccccgctgagggtgatgaccgcttctccgagagcatcctgacctatgtggcccacacgtctgcgctgacctaccctcccgggycccggacccagctccrcgaggacctcctgccrcggaccctcggccagctccagccagatgagctcagccctaaggtggacagtggtgtggacagacaccatctgatggcggccctcagtgcctatgctgcccagaggcccccagctccccccggggagggcagcctggagccacagtaccttctgcgtgcaccctcaagaatgcccaggcctttgctggcaccagccgccccccagaagtggccttcacctctgggagattccgaagacccctccagcacaggcgatggagcacggattcataccctcctgaaggacctgcagaggcagccggctgaggtgaggggcctgartggcctggagctggacggcatggcygagctgatggctggcctgatgcaaggcrtggaccatggagtagctcgaggcagccctgggagagcggccctgggagagtctggagaacaggcggatggccccaaggccaccctccgtggagacagctttccagatgacggagtgcaggacgacgatgatagactttaccaagaggtccatcgtctgagtgccacactcgggggcctcctgcaggaccacgggtctcgactcttacctggagccctcccctttgcaaggcccctcgacatggagaggaagaagtccgagcaccctgagtcttccctgtcttcagaagaggagactgccggagtggagaacgtcaagagccagacgtattccaaagatctgctggggcagcagccgcattcggagcccggggccgctgcgtttggggagctccaaaaccagatgcctgggccctcgaaggaggagcagagccttccagcgggtgctcaggaggccctcagcgacggcctgcaattggaggtccagccttccgaggaagaggcgcggggctacatcgtgacagacagagaccccctgcgccccgaggaaggaaggcggctggtggaggacgtcgcccgcctcctgcaggtgcccagcagygcgttcgctgacgtggaggttctcggaccagcagtgaccttcaaagtgagcgccaatgtccaaaacgtgaccactgaggatgtggagaaggccacagttgacaacaaagacaaactggaggaaacctctggactgaaaattcttcaaaccggagtcgggtcgaaaagcaaactcaagttcctgcctcctcaggcggagcaagaagactccaccaagttcatcgcgctcaccctggtctccctcgcctgcatcctgggcgtcctcctggcctctggcctcatctactgcctccgccatagctctcagcacaggctgaaggagaagctctcgggactagggggcgacccaggtgcagatgccactgccgcctaccaggagctgtgccgccagcgtatggccacgcggccaccagaccgacctgagggcccgcacacgtcacgcatcagcagcgtctcatcccagttcagcgacgggccgatccccagcccctccgcacgcagcagcgcctcatcctggtccgaggagcctgtgcagtccaacatggacatctccaccggccacatgatcctgtcctacatggaggaccacctgaagaacaagaaccggctggagaaggagtgggaagcgctgtgcgcctaccaggcggagcccaacagctcgttcgtggcccagagggaggagaacgtgcccaagaaccgctccctggccgtgctgacctatgaccactcccgggtcctgctgaaggcggagaacagccacagccactcagactacatcaacgctagccccatcatggatcacgacccgaggaaccccgcgtacatcgccacccagggaccgctgcccgccaccgtggctgacttttggcagatggtgtgggagagcggctgcgtggtgatcgtcatgctgacacccctcgcggagaacggcgtccggcagtgctaccactactggccggatgaaggctccaatctctaccacatctatgaggtgaacctggtctccgagcacatctggtgtgaggacttcctggtgaggagcttctatctgaagaacctgcagaccaacgagacgcgcaccgtgacgcagttccacttcctgagttggtatgaccgaggagtcccttcctcctcaaggtccctcctggacttccgcagaaaagtaaacaagtgctacaggggccgttcttgtccaataattgttcattgcagtgacggtgcaggccggagcggcacctacgtcctgatcgacatggttctcaacaagatggccaaaggtgctaaagagattgatatcgcagcgaccctggagcacttgagggaccagagacccggcatggtccagacgaaggagcagtttgagttcgcgctgacagccgtggctgaggaggtgaacgccatcctcaaggcccttccccagtgagcggcagcctcrggggcctcaggggagccccyaccccacggatgttgtcaggaatcatgatctgactttaattgtgtgtcttctattataactgcatagtaatagggcccttagctctcccgtagtcagcgcagtttagcagttaaaagtgtatttttgtttaatcaaacaataataaagagagatttgtggaaaaatccagttacgggtggaggggaatcggttcatcaattttcacttgcttaaaaaaaatactttttcttaaagcacccgttcaccttcttggttgaagttgtgttaacaatgcagtagccagcacgttcgaggcggtttccaggaagagtgtgcttgtcatctgccactttcgggagggtggatccactgtgcaggagtggccggggaagctggcagcactcagtgaggccgcccggcacacaaggcacgtttggcatttctctttgagagagtttatcattgggagaagccgcrgggacagaactgaacgtcctgcagcttcggggcaagtgagacaatcacagctcctcgctgcgtctccatcaacactgcgccgggtaccatggacggccccgtcagccacacctgtcagcccaagcagagtgattcaggggctccccgggggcagacacctgtgcaccccatgagtagtgcccacttgaggctggcactcccctgacctcacctttgcaaagttacagatgcaccccaacattgagatgtgtttttaatgttaaaatattgatttctacgttatgaaaacagatgcccccgtgaatgcttacctgtgagataaccacaaccaggaagaacaaatctgggcattgagcaagctatgagggtccccgggagcacacgaaccctgccaggcccccgctggctcctccaggcacgtcccggacctgtggggccccagagaggggacatttccctcctgggagagaaggagatcagggcaactcggagagggctgcgagcatttccctcccgggagaratcagggcgacctgcacgcactgcgtagagcctggaagggaagtgagaaaccagccgaccgkccctgcccctcttcccgggatcacttaatgaaccacgtgttttgacatcatgtaaacctaagcacgtagagatgattcggatttgacaaaataacatttgagtatccgattcgccatcaccccctaccccagaaataggacaattcacttcattgaccargatgatcacatggaaggcggcrcagaggcagctgtgtgggctgcagatttcctgtgtggggttcagcrtagaaaacgcacctccatcccgcccttcccacagcattcctccatcttagatagatggtactctccaaaggccctaccagagggaacacggcctactgagcggacagaatgatgccaaaatattgcttatgtctctacatggtattgtaatgaatatctgctttaatatagctatcatttcttttccaaaattacttctctytatctggaatttaattaatcgaaatgaatttatctgaatataggaagcayatgcctacttgtaatttctaactmcttatgtttgaagagaaacctccggtgtgagatatacaaatatatttaattgtgtcatattaaacttctgatttc

SEQ ID NO: 2831 - DNA, 1066 bp, Homo sapiens
cgcaggctgcctgctcgaggagggcctctgcggagcgtccgaggcctgtgtgaacgatggagtgtttggaaggtgccagaaggttccggcaatggacttttaccgctacgaggtgtcgcccgtggccctgcagcgcctgcgcgtggcgttgcagaagctttccggcacaggtttcacgtggcaggatgactatactcagtatgtgatggaccaggaacttgcagacctcccgaaaacctacctgaggcgtcctgaagcatccagcccagccaggccctcaaaacacagcgttggcagcgagaggaggtacastcgggagggcggtgctgccctggccaacgccctccgacgccacctgcccttcctggaggccctgtcccaggccccagcctcagacgtgctcgccaggacccatacggcgcaggacagaccccccgctgagggtgatgaccgcttctccgagagcatcctgacctatgtggcccacacgtctgcgctgacctaccctcccgggycccggacccagctccrcgaggacctcctgccrcggaccctcggccagctccagccagatgagctcagccctaaggtggacagtggtgtggacagacaccatctgatggcggccctcagtgcctatgctgcccagaggcccccagctccccccggggagggcagcctggagccacagtaccttctgcgtgcaccctcaagaatgcccaggcctttgctggcaccagccgccccccagaagtggccttcacctctgggagattccgaagacccctccagcacaggcgatggagcacggattcataccctcctgaaggacctgcagaggcagccggctgaggtgaggggcctgartggcctggagctggacggcatggcygagctgatggctggcctgatgcaaggcrtggaccatggagtagctcgaggcagccctgggagagcggccctgggagagtctggagaacaggcggatggccccaaggccaccctccgtggagacagctttccagatgacggagtgcaggacgacgatgatagactttaccaagag

SEQ ID NO: 2832 - DNA, 4506 bp, Homo sapiens
cgcaggctgcctgctcgaggagggcctctgcggagcgtccgaggcctgtgtgaacgatggagtgtttggaaggtgccagaaggttccggcaatggacttttaccgctacgaggtgtcgcccgtggccctgcagcgcctgcgcgtggcgttgcagaagctttccggcacaggtttcacgtggcaggatgactatactcagtatgtgatggaccaggaacttgcagacctcccgaaaacctacctgaggcgtcctgaagcatccagcccagccaggccctcaaaacacagcgttggcagcgagaggaggtacastcgggagggcggtgctgccctggccaacgccctccgacgccacctgcccttcctggaggccctgtcccaggccccagcctcagacgtgctcgccaggacccatacggcgcaggacagaccccccgctgagggtgatgaccgcttctccgagagcatcctgacctatgtggcccacacgtctgcgctgacctaccctcccgggycccggacccagctccrcgaggacctcctgccrcggaccctcggccagctccagccagatgagctcagccctaaggtggacagtggtgtggacagacaccatctgatggcggccctcagtgcctatgctgcccagaggcccccagctccccccggggagggcagcctggagccacagtaccttctgcgtgcaccctcaagaatgcccaggcctttgctggcaccagccgccccccagaagtggccttcacctctgggagattccgaagacccctccagcacaggcgatggagcacggattcataccctcctgaaggacctgcagaggcagccggctgaggtgaggggcctgartggcctggagctggacggcatggcygagctgatggctggcctgatgcaaggcrtggaccatggagtagctcgaggcagccctgggagagcggccctgggagagtctggagaacaggcggatggccccaaggccaccctccgtggagacagctttccagatgacggagtgcaggacgacgatgatagactttaccaagaggtccatcgtctgagtgccacactcgggggcctcctgcaggaccacgggtctcgactcttacctggagccctcccctttgcaaggcccctcgacatggagaggaagaagtccgagcaccctgagtcttccctgtcttcagaagaggagactgccggagtggagaacgtcaagagccagacgtattccaaagatctgctggggcagcagccgcattcggagcccggggccgctgcgtttggggagctccaaaaccagatgcctgggccctcgaaggaggagcagagccttccagcgggtgctcaggaggccctcagcgacggcctgcaattggaggtccagccttccgaggaagaggcgcggggctacatcgtgacagacagagaggttctcggaccagcagtgaccttcaaagtgagcgccaatgtccaaaacgtgaccactgaggatgtggagaaggccacagttgacaacaaagacaaactggaggaaacctctggactgaaaattcttcaaaccggagtcgggtcgaaaagcaaactcaagttcctgcctcctcaggcggagcaagaagactccaccaagttcatcgcgctcaccctggtctccctcgcctgcatcctgggcgtcctcctggcctctggcctcatctactgcctccgccatagctctcagcacaggctgaaggagaagctctcgggactagggggcgacccaggtgcagatgccactgccgcctaccaggagctgtgccgccagcgtatggccacgcggccaccagaccgacctgagggcccgcacacgtcacgcatcagcagcgtctcatcccagttcagcgacgggccgatccccagcccctccgcacgcagcagcgcctcatcctggtccgaggagcctgtgcagtccaacatggacatctccaccggccacatgatcctgtcctacatggaggaccacctgaagaacaagaaccggctggagaaggagtgggaagcgctgtgcgcctaccaggcggagcccaacagctcgttcgtggcccagagggaggagaacgtgcccaagaaccgctccctggccgtgctgacctatgaccactcccgggtcctgctgaaggcggagaacagccacagccactcagactacatcaacgctagccccatcatggatcacgacccgaggaaccccgcgtacatcgccacccagggaccgctgcccgccaccgtggctgacttttggcagatggtgtgggagagcggctgcgtggtgatcgtcatgctgacacccctcgcggagaacggcgtccggcagtgctaccactactggccggatgaaggctccaatctctaccacatctatgaggtgaacctggtctccgagcacatctggtgtgaggacttcctggtgaggagcttctatctgaagaacctgcagaccaacgagacgcgcaccgtgacgcagttccacttcctgagttggtatgaccgaggagtcccttcctcctcaaggtccctcctggacttccgcagaaaagtaaacaagtgctacaggggccgttcttgtccaataattgttcattgcagtgacggtgcaggccggagcggcacctacgtcctgatcgacatggttctcaacaagatggccaaaggtgctaaagagattgatatcgcagcgaccctggagcacttgagggaccagagacccggcatggtccagacgaaggagcagtttgagttcgcgctgacagccgtggctgaggaggtgaacgccatcctcaaggcccttccccagtgagcggcagcctcrggggcctcaggggagccccyaccccacggatgttgtcaggaatcatgatctgactttaattgtgtgtcttctattataactgcatagtaatagggcccttagctctcccgtagtcagcgcagtttagcagttaaaagtgtatttttgtttaatcaaacaataataaagagagatttgtggaaaaatccagttacgggtggaggggaatcggttcatcaattttcacttgcttaaaaaaaatactttttcttaaagcacccgttcaccttcttggttgaagttgtgttaacaatgcagtagccagcacgttcgaggcggtttccaggaagagtgtgcttgtcatctgccactttcgggagggtggatccactgtgcaggagtggccggggaagctggcagcactcagtgaggccgcccggcacacaaggcacgtttggcatttctctttgagagagtttatcattgggagaagccgcrgggacagaactgaacgtcctgcagcttcggggcaagtgagacaatcacagctcctcgctgcgtctccatcaacactgcgccgggtaccatggacggccccgtcagccacacctgtcagcccaagcagagtgattcaggggctccccgggggcagacacctgtgcaccccatgagtagtgcccacttgaggctggcactcccctgacctcacctttgcaaagttacagatgcaccccaacattgagatgtgtttttaatgttaaaatattgatttctacgttatgaaaacagatgcccccgtgaatgcttacctgtgagataaccacaaccaggaagaacaaatctgggcattgagcaagctatgagggtccccgggagcacacgaaccctgccaggcccccgctggctcctccaggcacgtcccggacctgtggggccccagagaggggacatttccctcctgggagagaaggagatcagggcaactcggagagggctgcgagcatttccctcccgggagaratcagggcgacctgcacgcactgcgtagagcctggaagggaagtgagaaaccagccgaccgkccctgcccctcttcccgggatcacttaatgaaccacgtgttttgacatcatgtaaacctaagcacgtagagatgattcggatttgacaaaataacatttgagtatccgattcgccatcaccccctaccccagaaataggacaattcacttcattgaccargatgatcacatggaaggcggcrcagaggcagctgtgtgggctgcagatttcctgtgtggggttcagcrtagaaaacgcacctccatcccgcccttcccacagcattcctccatcttagatagatggtactctccaaaggccctaccagagggaacacggcctactgagcggacagaatgatgccaaaatattgcttatgtctctacatggtattgtaatgaatatctgctttaatatagctatcatttcttttccaaaattacttctctytatctggaatttaattaatcgaaatgaatttatctgaatataggaagcayatgcctacttgtaatttctaactmcttatgtttgaagagaaacctccggtgtgagatatacaaatatatttaattgtgtcatattaaacttctgatttc

SEQ ID NO: 2833 - DNA, 2024 bp, Homo sapiens
tgggaaggyacctgagggtggggtcaagggaggccccaaaacagtctacacagcaggagggatggctggggctcttgagctataagtggcacctcagggccctgacgggcgtctygccatgctgctcctgggcctgctgctgctgctgcccctgctggctggcrcccgcctgctgtggaactggtgraagctccggagcctccacctcchgcctcttgcccygggcttcttgcacytgctgcagcccgacctcccmatctatctgcttggcctgactcagaaattcgggcccatctacaggctccwccttgrgctgcaagamaagctggtgtctargaactacccsgacctktccttgggagactactccctgctctggaaagcccacaagaagctcacccgctcagccctgctgctgggcatccgtgactccatggagccagtggtggagcagctgacccaggagttctgtgagcgcatgagagcccagcccggcacccctgtggccattgaggaggaattctctctcctcacctgcagcatcawctgttacctcaccttcgsagacaagatcaaggasgacaacttaatgcctgcctattacaaatgtatccaggaggtgttaaaaacctggagccactggtccatccaaattgtggacvtgattccctttctcaggttcttccccaatccaggtctccggaggytgaagcaggccatagagaagagggaycacatcgwggagawgcagctgaggcagcacaaggagagcctsgtggcaggccagtggagggacatgatggactacatgcycyaaggggtggcgcagcygascatggaagagggctcyggacagctcctggaagggcacbkgcacatggctgcagtggacctcctgatcdgtggcactgagaccacagcaaacaccctctcctgggccgtggtttttttgcttcaccaccctgagattcagcagygamtgyaggaggagctagaccacgaactgggccctggtgcctccagctcccgggtcccctacaaggaccrtgcayggctgcccttgctcaatgccaccatcgccgaggtgctgyrcctgyvgcccgttgtgcccttagccttgccccaccgcaccacacggcccagcagcatctcyggctacgacatccctgagggcacagtcatcattccgaacctccaaggcgcccacctggatgagacggtctgggagaggccacatgagttctrgcctgatygcttcctggagccaggcaagaactccagagctctggccttcggctgcrgtgcccrcgtgtgcytgggcgagccgctggcgygcctggagctcttcgtggtgctgacccgactgctgcaggccttcacgctgctgycctccggggacgccctgccctccctgcagcccctgccccactgcagtgtcatcctcaagatgcagcctttccaagtgcggctgcagccccsggggatgggggcccacagcccrggccagarccagtgatggggcaggacyratgccagccgggtacctcagtttctcctttattgctccygtacgaacccctcccctcccccctgtaaacacagtgctgcgagatcgctggcagagaaggcttcctccagcggctgggtggtgaaggaccctggctcttctctcggggcgacccctcagtgctyggcagtcatactggggtgcgagagaggtgggcagcagctcagcctccccccgctggggagcgaaagtttcttggtctcagcttcatttccgtgaagggcaccgagaactcgaagcccttccagtggtaccagctcactccctgggaaaggggttgtcaagagagagtcaaagccggatgtcccatctgctcytcccrttccccttaaggaggtagctcccagcactcaaccaacctccccgcagagctcccttcctgaccctccgctgcagaggattgaggcttaattctgagctggycctttccagccaataaatcaactccagctccctc

SEQ ID NO: 2834 - DNA, 2114 bp, Homo sapiens
tgggaaggyacctgagggtggggtcaagggaggccccaaaacagtctacacagcaggagggatggctggggctcttgagctataagtggcacctcagggccctgacgggcgtctygccatgctgctcctgggcctgctgctgctgctgcccctgctggctggcrcccgcctgctgtggaactggtgraagctccggagcctccacctcchgcctcttgcccygggcttcttgcacytgctgcagcccgacctcccmatctatctgcttggcctgactcagaaattcgggcccatctacaggctccwccttgrgctgcaagatgtggtggtgctgaactccwagaggaccattgaggaagccatggtcaaaaagtgggcagactttgctggcagacctgagccacttacctamaagctggtgtctargaactacccsgacctktccttgggagactactccctgctctggaaagcccacaagaagctcacccgctcagccctgctgctgggcatccgtgactccatggagccagtggtggagcagctgacccaggagttctgtgagcgcatgagagcccagcccggcacccctgtggccattgaggaggaattctctctcctcacctgcagcatcawctgttacctcaccttcgsagacaagatcaaggasgacaacttaatgcctgcctattacaaatgtatccaggaggtgttaaaaacctggagccactggtccatccaaattgtggacvtgattccctttctcaggttcttccccaatccaggtctccggaggytgaagcaggccatagagaagagggaycacatcgwggagawgcagctgaggcagcacaaggagagcctsgtggcaggccagtggagggacatgatggactacatgcycyaaggggtggcgcagcygascatggaagagggctcyggacagctcctggaagggcacbkgcacatggctgcagtggacctcctgatcdgtggcactgagaccacagcaaacaccctctcctgggccgtggtttttttgcttcaccaccctgagattcagcagygamtgyaggaggagctagaccacgaactgggccctggtgcctccagctcccgggtcccctacaaggaccrtgcayggctgcccttgctcaatgccaccatcgccgaggtgctgyrcctgyvgcccgttgtgcccttagccttgccccaccgcaccacacggcccagcagcatctcyggctacgacatccctgagggcacagtcatcattccgaacctccaaggcgcccacctggatgagacggtctgggagaggccacatgagttctrgcctgatygcttcctggagccaggcaagaactccagagctctggccttcggctgcrgtgcccrcgtgtgcytgggcgagccgctggcgygcctggagctcttcgtggtgctgacccgactgctgcaggccttcacgctgctgycctccggggacgccctgccctccctgcagcccctgccccactgcagtgtcatcctcaagatgcagcctttccaagtgcggctgcagccccsggggatgggggcccacagcccrggccagarccagtgatggggcaggacyratgccagccgggtacctcagtttctcctttattgctccygtacgaacccctcccctcccccctgtaaacacagtgctgcgagatcgctggcagagaaggcttcctccagcggctgggtggtgaaggaccctggctcttctctcggggcgacccctcagtgctyggcagtcatactggggtgcgagagaggtgggcagcagctcagcctccccccgctggggagcgaaagtttcttggtctcagcttcatttccgtgaagggcaccgagaactcgaagcccttccagtggtaccagctcactccctgggaaaggggttgtcaagagagagtcaaagccggatgtcccatctgctcytcccrttccccttaaggaggtagctcccagcactcaaccaacctccccgcagagctcccttcctgaccctccgctgcagaggattgaggcttaattctgagctggycctttccagccaataaatcaactccagctccctc

SEQ ID NO: 2835 - DNA, 2052 bp, Homo sapiens
cacctagggcgcaatggaatattccattgcccctcctgtcctgggtctgtgttgcggggaacgctcgcgcggttgccagagaaagccccggacgtgacggatttgcgcgaccccaagcagcccgcccttccccctcccatccgtcattcccctgcgytctctttcctcacccttccccccgccaccgtgggttccagacttgggataagtaaacagcgggtggagcgaggcctacggacccaggccaggtgggagtctgcactcttcaaggggcctgggctgctgctcacgggtattaaagaactccgcgttgttcatggctgaggcgatgcattaggaagatcctggacctagagaacaagtcccccgaacgctgagttggaggcgggacttcgggtgcgcgttggcgggagcatgctggggctctgsgggcagcggctccccgcggcgtgggtcctgcttctgttgcctttcctgccgctgctgctgcttgcagcccccgcgccccaccgcgmgtcctacaagccggtcatcgtggtgcatgggctcttcgacagctcgtacagcttccgccacctgctggaatacatcaatgagacacaccccgggactgtggtgacagtgctcgatctcttcgatgggagagagagcttgcgacccctgtgggaacaggtgcaagggttccgagaggctgtggtccccatcatggcaaaggcccctcaaggggtgcatctcatctgctactcgcaggggggccttgtgtgccgggctctgctttctgtcatggatgatcacaacgtggattctttcatctccctctcctctccacagatgggacagtatggagacacggactacttgaagtggctgttccccacctccatgcggtctaacctctatcggatctgctatagcccctggggccaggaattctccatctgcaactactggcatgatccccaccacgatgacttgtacctcaatgccagcagcttcctggccctgatcaatggggaaagagaccatcccaatgccacagtatggcggaagaactttctgcgtgtgggccacctggtgctgattgggggccctgatgatggtgttattactccctggcagtccagcttctttggtttctatgatgcaaatgagaccgtcctggagatggaggagcaactggtttatctgcgggattcttttgggttgaagactctattggcccggggggccatagtgaggtgtccaatggccggtatctcccacacagcctggcactccaaccgtaccctttatgagacctgcattgaaccttggctctcctgaggatatattcaggggtccccaggaactcctcggtccagagaccaagtggtggccttggaaagcagatgtcaggctttggtgtgcctgtgaccacctcattgctcccatattatcccccatttttagtagagacggggttttagtagagacttggcctcccagaacccccttcctctgctcctccatgaatgacaattccaggcctccccsacctcatgtcctctcatttgggggattgctccgtgctgtccctttctctcaaggccgaagttgggaagtgagaaaccatgtttttaacttgtggctgcttttgctgctgctrctcctccgtatctggctgtatgggtggagaacccaccccctgcccaccacaggggtctccttccaggccactcaggacatttttagcttctctcctccccatgttcccttttttctctaaagtcycctgacatcagccctcccaactcctaagagggactacccatgagagtggggtthtgaggctcccctatggggacagttccgttcttgaagtgtcagtgttggggaatatctgtggcctatgaggcccatctcaggtttggggatcccccagtccctatgatcagtgttggagtacccccctgggagagcctagtttctttgaggccccaggccctcttttaactacctttgaataggtgttatccctgtatttatggaaataaagttccatttcctcagtgt

SEQ ID NO: 2836 - DNA, 1761 bp, Homo sapiens
ctcccatccgtcattcccctgcgytctctttcctcacccttccccccgccaccgtgggttccagacttgggataagtaaacagcgggtggagcgaggcctacggacccaggccaggcgggagcatgctggggctctgsgggcagcggctccccgcggcgtgggtcctgcttctgttgcctttcctgccgctgctgctgcttgcagcccccgcgccccaccgcgmgtcctacaagccggtcatcgtggtgcatgggctcttcgacagctcgtacagcttccgccacctgctggaatacatcaatgagacacaccccgggactgtggtgacagtgctcgatctcttcgatgggagagagagcttgcgacccctgtgggaacaggtgcaagggttccgagaggctgtggtccccatcatggcaaaggcccctcaaggggtgcatctcatctgctactcgcaggggggccttgtgtgccgggctctgctttctgtcatggatgatcacaacgtggattctttcatctccctctcctctccacagatgggacagtatggagacacggactacttgaagtggctgttccccacctccatgcggtctaacctctatcggatctgctatagcccctggggccaggaattctccatctgcaactactggcatgatccccaccacgatgacttgtacctcaatgccagcagcttcctggccctgatcaatggggaaagagaccatcccaatgccacagtatggcggaagaactttctgcgtgtgggccacctggtgctgattgggggccctgatgatggtgttattactccctggcagtccagcttctttggtttctatgatgcaaatgagaccgtcctggagatggaggagcaactggtttatctgcgggattcttttgggttgaagactctattggcccggggggccatagtgaggtgtccaatggccggtatctcccacacagcctggcactccaaccgtaccctttatgagacctgcattgaaccttggctctcctgaggatatattcaggggtccccaggaactcctcggtccagagaccaagtggtggccttggaaagcagatgtcaggctttggtgtgcctgtgaccacctcattgctcccatattatcccccatttttagtagagacggggttttagtagagacttggcctcccagaacccccttcctctgctcctccatgaatgacaattccaggcctccccsacctcatgtcctctcatttgggggattgctccgtgctgtccctttctctcaaggccgaagttgggaagtgagaaaccatgtttttaacttgtggctgcttttgctgctgctrctcctccgtatctggctgtatgggtggagaacccaccccctgcccaccacaggggtctccttccaggccactcaggacatttttagcttctctcctccccatgttcccttttttctctaaagtcycctgacatcagccctcccaactcctaagagggactacccatgagagtggggtthtgaggctcccctatggggacagttccgttcttgaagtgtcagtgttggggaatatctgtggcctatgaggcccatctcaggtttggggatcccccagtccctatgatcagtgttggagtacccccctgggagagcctagtttctttgaggccccaggccctcttttaactacctttgaataggtgttatccctgtatttatggaaataaagttccatttcctcagtgt

SEQ ID NO: 2837 - DNA, 3974 bp, Homo sapiens
gtacagcgttattagtctttttatttgcttattgcatcttgggagcgcgtgggtgggtgaagggagcgaggataggaagtctatggagatttacaccagtttttttttttttttaaacaaaaacacagccagataatyatwattcttcccttacgtccccccagcccccacctggggcagtcgctctcccggctgcgtcccttttcgtccatgtcctagcagagactacagagcagtacagaggctctcgctgaaaccagtcccaggctccacagagtcagatcacggcttcacaccagtcgttctggtcacttaggcgttcgcgtgagcgctcaaccccttaccgccacctcatcgtcactctacaccattctgagcgcaaaaatgttttgattgagacaaatttagaccaagcaatgaccttgtaaacagagagaggggctcagacatgctgagaaatccttatctctagagaaacgtctttaaatgctaagtaaaagccctagcaagtaaaagccctgaggcactagggtgtcggttaggggtcacaggcggagaggtggggcgcctgggggtttcggtagggagccacccacagataactcagacagccagattctgggggtcgttcaggttgaaagactggtcgaaattacgcgggcatgagtcagcgcatccctacgcgccctccgccccttgagggtgggtcgcttatagggaggggagtagagtagggcaggagaaactgggccaggctgcacttagctcaaggggcctcgaggactctctgcgtctctggagacaagggcactacacgcacttcagaatgaagagttacttgggataagtaaacagcgggtggagcgaggcctacggacccaggccaggtgggagtctgcactcttcaaggggcctgggctgctgctcacgggtattaaagaactccgcgttgttcatggctgaggcgatgcattaggaagatcctggacctagagaacaagtcccccgaacgctgagttggaggcgggacttcgggtgcgcgttggcgggagcatgctggggctctgsgggcagcggctccccgcggcgtgggtcctgcttctgttgcctttcctgccgctgctgctgcttgcagcccccgcgccccaccgcgmgtcctacaagccggtcatcgtggtgcatgggctcttcgacagctcgtacagcttccgccacctgctggaatacatcaatgagggggccttgtgtgccgggctctgctttctgtcatggatgatcacaacgtggattctttcatctccctctcctctccacagatgggacagtatggagacacggactacttgaagtggctgttccccacctccatgcggtctaacctctatcggatctgctatagcccctggggccaggaattctccatctgcaactactggcatgatccccaccacgatgacttgtacctcaatgccagcagcttcctggccctgatcaatggggaaagagaccatcccaatgccacagtatggcggaagaactttctgcgtgtgggccacctggtgctgattgggggccctgatgatggtgttattactccctggcagtccagcttctttggtttctatgatgcaaatgagaccgtcctggagatggaggagcaactgcctgccaggcccacccaccagtctgagctgcttctgctgaggctggtctgcttgaagcctcccaggagaaagaagccaggtgggaatggagagagagaggaagcctgtagggtccagcgtcaaagcgaatcatggggtccagggctgagctgtgcactctcttaggcggattctccttcctcctgctactgataccaggcgagggggccaagggtggatccctcagagagagtcagggagtctgctccaagcagacactggtggtcccgctccactacaacgagtcctacagccaaccagtgtacaagccctacctgaccttgtgcgctgggaggcgcatctgcagcacttacaggaccatgtaccgcgttatgtggcgggaggtgargcgggaggttcagcagacccatgcagtgtgctgccagggctggaagaagcggcacccgggggcgctcacctgtgaagccatctgcgccaagccttgcctgaacggaggcgtctgcgttaggcctgaccagtgcgagtgcgcccccggctggggagggaagcactgtcatgtggacgtggatgaatgtaggaccagcatcaccctctgctcgcaccattgttttaatacggcaggcagcttcacctgcggctgcccccatgacctagtgctaggcgtggacgggcgcacctgcatggaggggtccccagagcccccaaccagtgccagcatactcagcgtggccgttcgggaggmrgaaaaagatgagcgcgctctgaagcaggagattcacgagctgcgagggcgcctggagcggctggagcagtgggccggtcaggctggggcctgggtcagagcggtgctgcccgtgccgcctgaagagctgcagccagaacaggtggctgagctgtggggccggggtgaccggatcgaatctctcagcgaccaggtgctgctgctggaggagaggctakgtgcctgctcctgtgaggacaacagcctgggcctcggcgtcaatcatcgataagaagcctctacagcacccctgccccctaatttatacagaaaccggacccactaatcctctgggattggccgactgtgagctgcagataaggctatcagccaccaaagagcaatgaacaatggaaacttcagagagctgaagaaasggggaggcctgtgttcttggcctgcccctgagtcttctggctgggggcaggttgcctgggcaagaactgcttcttcaattccttaacaaatgcaaccaccaacacccagatctctctctctctttattttcagtttttttgctgttatccrrataattaataaaaaccaaccacgcaaaactgggtcccaccctctccttttgctcccagcctacctccccagttgkgggaacaggtctggagtgagaggcagggagtggctaatgccaccaggaaraaatgaaaactggctcagagagggggaagcctcaacagaaaaagaaataaattaaaagccctcctatcccctccagccagggttcgttcctttccccaactccccagggggcaraagtgagtgcagcacctgatgtctgcttcttccccttgtgtctggtgagatggtgcagcagggctgcagggggctgggtggggtcatgtccactgaagaactgtactatggggacagaaaaccagaaatgtggagactgaactggtatcccagagagtgcacgaccctgggcatctgggcaagggcaggcatgagacctctgaattagaagggtccagcccccactgacaggaggctacactgggagggaaggtgaaggtgctgaggaaagctcccakgatgagcctgggagtgcttcaggtatcagcttccagccagagggcgagaagtcctcctcacaaatggatgagtccattgaatccatggactttggagtgggggggatttgttccaaagaatggatgagtccactggccaatgtggggtagaggggtagagaagaccacataggaagagactccactggggatggaatgttcccctcccttgtgtaggctgagtcactggagatgagggggaggcaactgtcccacagacaagacagtaggaggtgggggtcaagagtggaractgcaccgaggcaagagtccatggatggggccaagagggggcaggagtggcgctgtatccacattcacttcagaagttgaagattccaaakaggagaataagtggggagaggggagacaaggaagagggtttggccctgcttcagggcccactgggtgggtaggtgtggggaggaagatggggacagatgg

SEQ ID NO: 2838 - DNA, 3801 bp, Homo sapiens
gtacagcgttattagtctttttatttgcttattgcatcttgggagcgcgtgggtgggtgaagggagcgaggataggaagtctatggagatttacaccagtttttttttttttttaaacaaaaacacagccagataatyatwattcttcccttacgtccccccagcccccacctggggcagtcgctctcccggctgcgtcccttttcgtccatgtcctagcagagactacagagcagtacagaggctctcgctgaaaccagtcccaggctccacagagtcagatcacggcttcacaccagtcgttctggtcacttaggcgttcgcgtgagcgctcaaccccttaccgccacctcatcgtcactctacaccattctgagcgcaaaaatgttttgattgagacaaatttagaccaagcaatgaccttgtaaacagagagaggggctcagacatgctgagaaatccttatctctagagaaacgtctttaaatgctaagtaaaagccctagcaagtaaaagccctgaggcactagggtgtcggttaggggtcacaggcggagaggtggggcgcctgggggtttcggtagggagccacccacagataactcagacagccagattctgggggtcgttcaggttgaaagactggtcgaaattacgcgggcatgagtcagcgcatccctacgcgccctccgccccttgagggtgggtcgcttatagggaggggagtagagtagggcaggagaaactgggccaggctgcacttagctcaaggggcctcgaggactctctgcgtctctggagacaagggcactacacgcacttcagaatgaagagttgcgggagcatgctggggctctgsgggcagcggctccccgcggcgtgggtcctgcttctgttgcctttcctgccgctgctgctgcttgcagcccccgcgccccaccgcgmgtcctacaagccggtcatcgtggtgcatgggctcttcgacagctcgtacagcttccgccacctgctggaatacatcaatgagacacaccccgggactgtggtgacagtgctcgatctcttcgatgggagagagagcttgcgacccctgtgggaacaggtgcaagggttccgagaggctgtggtccccatcatggcaaaggcccctcaaggggtgcatctcatctgctactcgcaggggggccttgtgtgccgggctctgctttctgtcatggatgatcacaacgtggattctttcatctccctctcctctccacagatgggacagtatggagacacggactacttgaagtggctgttccccacctccatgcggtctaacctctatcggatctgctatagcccctggggccaggaattctccatctgcaactactggcatgatccccaccacgatgacttgtacctcaatgccagcagcttcctggccctgatcaatggggaaagagaccatcccaatgccacagtatggcggaagaactttctgcgtgtgggccacctggtgctgattgggggccctgatgatggtgttattactccctggcagtccagcttctttggtttctatgatgcaaatgagaccgtcctggagatggaggagcaactgcctgccaggcccacccaccagtctgagctgcttctgctgaggctggtctgcttgaagcctcccaggagaaagaagccagcctgtagggtccagcgtcaaagcgaatcatggggtccagggctgagctgtgcactctcttaggcggattctccttcctcctgctactgataccagtcagggagtctgctccaagcagacactggtggtcccgctccactacaacgagtcctacagccaaccagtgtacaagccctacctgaccttgtgcgctgggaggcgcatctgcagcacttacaggaccatgtaccgcgttatgtggcgggaggtgargcgggaggttcagcagacccatgcagtgtgctgccagggctggaagaagcggcacccgggggcgctcacctgtgaagccatctgcgccaagccttgcctgaacggaggcgtctgcgttaggcctgaccagtgcgagtgcgcccccggctggggagggaagcactgtcatgtgggcagcttcacctgcggctgcccccatgacctagtgctaggcgtggacgggcgcacctgcatggaggggtccccagagcccccaaccagtgccagcatactcagcgtggccgttcgggaggmrgaaaaagatgagcgcgctctgaagcaggagattcacgagctgcgagggcgcctggagcggctggagcagtgggccggtcaggctggggcctgggtcagagcggtgctgcccgtgccgcctgaagagctgcagccagaacaggtggctgagctgtggggccggggtgaccggatcgaatctctcagcgaccaggtgctgctgctggaggagaggctakgtgcctgctcctgtgaggacaacagcctgggcctcggcgtcaatcatcgataagaagcctctacagcacccctgccccctaatttatacagaaaccggacccactaatcctctgggattggccgactgtgagctgcagataaggctatcagccaccaaagagcaatgaacaatggaaacttcagagagctgaagaaasggggaggcctgtgttcttggcctgcccctgagtcttctggctgggggcaggttgcctgggcaagaactgcttcttcaattccttaacaaatgcaaccaccaacacccagatctctctctctctttattttcagtttttttgctgttatccrrataattaataaaaaccaaccacgcaaaactgggtcccaccctctccttttgctcccagcctacctccccagttgkgggaacaggtctggagtgagaggcagggagtggctaatgccaccaggaaraaatgaaaactggctcagagagggggaagcctcaacagaaaaagaaataaattaaaagccctcctatcccctccagccagggttcgttcctttccccaactccccagggggcaraagtgagtgcagcacctgatgtctgcttcttccccttgtgtctggtgagatggtgcagcagggctgcagggggctgggtggggtcatgtccactgaagaactgtactatggggacagaaaaccagaaatgtggagactgaactggtatcccagagagtgcacgaccctgggcatctgggcaagggcaggcatgagacctctgaattagaagggtccagcccccactgacaggaggctacactgggagggaaggtgaaggtgctgaggaaagctcccakgatgagcctgggagtgcttcaggtatcagcttccagccagagggcgagaagtcctcctcacaaatggatgagtccattgaatccatggactttggagtgggggggatttgttccaaagaatggatgagtccactggccaatgtggggtagaggggtagagaagaccacataggaagagactccactggggatggaatgttcccctcccttgtgtaggctgagtcactggagatgagggggaggcaactgtcccacagacaagacagtaggaggtgggggtcaagagtggaractgcaccgaggcaagagtccatggatggggccaagagggggcaggagtggcgctgtatccacattcacttcagaagttgaagattccaaakaggagaataagtggggagaggggagacaaggaagagggtttggccctgcttcagggcccactgggtgggtaggtgtggggaggaagatggggacagatgg

SEQ ID NO: 2839 - DNA, 3514 bp, Homo sapiens
gtacagcgttattagtctttttatttgcttattgcatcttgggagcgcgtgggtgggtgaagggagcgaggataggaagtctatggagatttacaccagtttttttttttttttaaacaaaaacacagccagataatyatwattcttcccttacgtccccccagcccccacctggggcagtcgctctcccggctgcgtcccttttcgtccatgtcctagcagagactacagagcagtacagaggctctcgctgaaaccagtcccaggctccacagagtcagatcacggcttcacaccagtcgttctggtcacttaggcgttcgcgtgagcgctcaaccccttaccgccacctcatcgtcactctacaccattctgagcgcaaaaatgttttgattgagacaaatttagaccaagcaatgaccttgtaaacagagagaggggctcagacatgctgagaaatccttatctctagagaaacgtctttaaatgctaagtaaaagccctagcaagtaaaagccctgaggcactagggtgtcggttaggggtcacaggcggagaggtggggcgcctgggggtttcggtagggagccacccacagataactcagacagccagattctgggggtcgttcaggttgaaagactggtcgaaattacgcgggcatgagtcagcgcatccctacgcgccctccgccccttgagggtgggtcgcttatagggaggggagtagagtagggcaggagaaactgggccaggctgcacttagctcaaggggcctcgaggactctctgcgtctctggagacaagggcactacacgcacttcagaatgaagagttacttgggataagtaaacagcgggtggagcgaggcctacggacccaggccaggtgggagtctgcactcttcaaggggcctgggctgctgctcacgggtattaaagaactccgcgttgttcatggctgaggcgatgcattaggaagatcctggacctagagaacaagtcccccgaacgctgagttggaggcgggacttcgggtgcgcgttggcgggagcatgctggggctctgsgggcagcggctccccgcggcgtgggtcctgcttctgttgcctttcctgccgctgctgctgcttgcagcccccgcgccccaccgcgmgtcctacaagccggtcatcgtggtgcatgggctcttcgacagctcgtacagcttccgccacctgctggaatacatcaatgagacacaccccgggactgtggtgacagtgctcgatctcttcgatgggagagagagcttgcgacccctgtgggaacaggtgcaagggttccgagaggctgtggtccccatcatggcaaaggcccctcaaggggtgcatctcatctgctactcgcaggggggccttgtgtgccgggctctgctttctgtcatggatgatcacaacgtggattctttcatctccctctcctctccacagatgggacagtatggagacacggactacttgaagtggctgttccccacctccatgcggtctaacctctatcggatctgctatagcccctggggccaggaattctccatctgcaactactggcatgatccccaccacgatgacttgtacctcaatgccagcagcttcctggccctgatcaatggggaaagagaccatcccaatgccacagtatggcggaagaactttctgcgtgtgggccacctggtgctgattgggggccctgatgatggtgttattactccctggcagtccagcttctttggtttctatgatgcaaatgagaccgtcctggagatggaggagcaactgcctgccaggcccacccaccagtctgagctgcttctgctgaggctggtctgcttgaagcctcccaggagaaagaagccaggtgggaatggagagagagaggaagcctgtagggtccagcgtcaaagcgaatcatggggtccagggctgagctgtgcactctcttaggcggattctccttcctcctgctactgataccaggcgagggggccaagggtggatccctcagagagagtcagggagtctgctccaagcagacactggtggtcccgctccactacaacgagtcctacagccaaccagtgtacaagccctacctgaccttgtgcgctgggaggcgcatctgcagcacttacaggaccatgtaccgcgttatgtggcgggaggtgargcgggaggttcagcagacccatgcagtgtgctgccagggctggaagaagcggcacccgggggcgctcacctgtgaagccatctgcgccaagccttgcctgaacggaggcgtctgcgttaggcctgaccagtgcgagtgcgcccccggctggggagggaagcactgtcatgtggacgtggatgaatgtaggaccagcatcaccctctgctcgcaccattgttttaatacggcaggcagcttcacctgcggctgcccccatgacctagtgctaggcgtggacgggcgcacctgcatggaggggtccccagagcccccaaccagtgccagcatactcagcgtggccgttcgggaggmrgaaaaagatgagcgcgctctgaagcaggagattcacgagctgcgagggcgcctggagcggctggagcagtgggccggtcaggctggggcctgggtcagagcggtgctgcccgtgccgcctgaagagctgcagccagaacaggtggctgagctgtggggccggggtgaccggatcgaatctctcagcgaccaggtgctgctgctggaggagaggctakgtgcctgctcctgtgaggacaacagcctgggcctcggcgtcaatcatcgataagaagcctctacagcacccctgccccctaatttatacagaaaccggacccactaatcctctgggattggccgactgtgagctgcagataaggctatcagccaccaaagagcaatgaacaatggaaacttcagagagctgaagaaasggggaggcctgtgttcttggcctgcccctgagtcttctggctgggggcaggttgcctgggcaagaactgcttcttcaattccttaacaaatgcaaccaccaacacccagatctctctctctctttattttcagtttttttgctgttatccrrataattaataaaaaccaaccacgcaaaactgggtcccaccctctccttttgctcccagcctacctccccagttgkgggaacaggtctggagtgagaggcagggagtggctaatgccaccaggaaraaatgaaaactggctcagagagggggaagcctcaacagaaaaagaaataaattaaaagccctcctatcccctccagccagggttcgttcctttccccaactccccagggggcaraagtgagtgcagcacctgatgtctgcttcttcagatagtcaccaccaccccggccatcagtggagatttcccggaaaacagtgagcatggagtgccggactctgtcagccagagctgggacgtcatctggtgtcagcccttccgtgg

SEQ ID NO: 2840 - DNA, 2482 bp, Homo sapiens
gtacagcgttattagtctttttatttgcttattgcatcttgggagcgcgtgggtgggtgaagggagcgaggataggaagtctatggagatttacaccagtttttttttttttttaaacaaaaacacagccagataatyatwattcttcccttacgtccccccagcccccacctggggcagtcgctctcccggctgcgtcccttttcgtccatgtcctagcagagactacagagcagtacagaggctctcgctgaaaccagtcccaggctccacagagtcagatcacggcttcacaccagtcgttctggtcacttaggcgttcgcgtgagcgctcaaccccttaccgccacctcatcgtcactctacaccattctgagcgcaaaaatgttttgattgagacaaatttagaccaagcaatgaccttgtaaacagagagaggggctcagacatgctgagaaatccttatctctagagaaacgtctttaaatgctaagtaaaagccctagcaagtaaaagccctgaggcactagggtgtcggttaggggtcacaggcggagaggtggggcgcctgggggtttcggtagggagccacccacagataactcagacagccagattctgggggtcgttcaggttgaaagactggtcgaaattacgcgggcatgagtcagcgcatccctacgcgccctccgccccttgagggtgggtcgcttatagggaggggagtagagtagggcaggagaaactgggccaggctgcacttagctcaaggggcctcgaggactctctgcgtctctggagacaagggcactacacgcacttcagaatgaagagttgcgggagcatgctggggctctgsgggcagcggctccccgcggcgtgggtcctgcttctgttgcctttcctgccgctgctgctgcttgcagcccccgcgccccaccgcgmgtcctacaagccggtcatcgtggtgcatgggctcttcgacagctcgtacagcttccgccacctgctggaatacatcaatgagacacaccccgggactgtggtgacagtgctcgatctcttcgatgggagagagagcttgcgacccctgtgggaacaggtgcaagggttccgagaggctgtggtccccatcatggcaaaggcccctcaaggggtgcatctcatctgctactcgcaggggggccttgtgtgccgggctctgctttctgtcatggatgatcacaacgtggattctttcatctccctctcctctccacagatgggacagtatggagacacggactacttgaagtggctgttccccacctccatgcggtctaacctctatcggatctgctatagcccctggggccaggaattctccatctgcaactactggcatgatccccaccacgatgacttgtacctcaatgccagcagcttcctggccctgatcaatggggaaagagaccatcccaatgccacagtatggcggaagaactttctgcgtgtgggccacctggtgctgattgggggccctgatgatggtgttattactccctggcagtccagcttctttggtttctatgatgcaaatgagaccgtcctggagatggaggagcaactggtttatctgcgggattcttttgggttgaagactctattggcccggggggccatagtgaggtgtccaatggccggtatctcccacacagcctggcactccaaccgtaccctttatgagacctgcattgaaccttggctctcctgaggatatattcaggggtccccaggaactcctcggtccagagaccaagtggtggccttggaaagcagatgtcaggctttggtgtgcctgtgaccacctcattgctcccatattatcccccatttttagtagagacggggttttagtagagacttggcctcccagaacccccttcctctgctcctccatgaatgacaattccaggcctccccsacctcatgtcctctcatttgggggattgctccgtgctgtccctttctctcaaggccgaagttgggaagtgagaaaccatgtttttaacttgtggctgcttttgctgctgctrctcctccgtatctggctgtatgggtggagaacccaccccctgcccaccacaggggtctccttccaggccactcaggacatttttagcttctctcctccccatgttcccttttttctctaaagtcycctgacatcagccctcccaactcctaagagggactacccatgagagtggggtthtgaggctcccctatggggacagttccgttcttgaagtgtcagtgttggggaatatctgtggcctatgaggcccatctcaggtttggggatcccccagtccctatgatcagtgttggagtacccccctgggagagcctagtttctttgaggccccaggccctcttttaactacctttgaataggtgttatccctgtatttatggaaataaagttccatttcctcagtgt

SEQ ID NO: 2841 - DNA, 2264 bp, Homo sapiens
cttgaagcctcccaggagaaagaagccaggtgggaatggagagagagaggaaggcaacctgtagggtccagcgtcaaagcgaatcatggggtccagggctgagctgtgcactctcttaggcggattctccttcctcctgctactgataccaggcgagggggccaagggtggatccctcagagagagtcagggagtctgctccaagcagacactggtggtcccgctccactacaacgagtcctacagccaaccagtgtacaagccctacctgaccttgtgcgctgggaggcgcatctgcagcacttacaggaccatgtaccgcgttatgtggcgggaggtgargcgggaggttcagcagacccatgcagtgtgctgccagggctggaagaagcggcacccgggggcgctcacctgtgaagccatctgcgccaagccttgcctgaacggaggcgtctgcgttaggcctgaccagtgcgagtgcgcccccggctggggagggaagcactgtcatgtggacgtggatgaatgtaggaccagcatcaccctctgctcgcaccattgttttaatacggcaggcagcttcacctgcggctgcccccatgacctagtgctaggcgtggacgggcgcacctgcatggaggggtccccagagcccccaaccagtgccagcatactcagcgtggccgttcgggaggmrgaaaaagatgagcgcgctctgaagcaggagattcacgagctgcgagggcgcctggagcggctggagcagtgggccggtcaggctggggcctgggtcagagcggtgctgcccgtgccgcctgaagagctgcagccagaacaggtggctgagctgtggggccggggtgaccggatcgaatctctcagcgaccaggtgctgctgctggaggagaggctakgtgcctgctcctgtgaggacaacagcctgggcctcggcgtcaatcatcgataagaagcctctacagcacccctgccccctaatttatacagaaaccggacccactaatcctctgggattggccgactgtgagctgcagataaggctatcagccaccaaagagcaatgaacaatggaaacttcagagagctgaagaaasggggaggcctgtgttcttggcctgcccctgagtcttctggctgggggcaggttgcctgggcaagaactgcttcttcaattccttaacaaatgcaaccaccaacacccagatctctctctctctttattttcagtttttttgctgttatccrrataattaataaaaaccaaccacgcaaaactgggtcccaccctctccttttgctcccagcctacctccccagttgkgggaacaggtctggagtgagaggcagggagtggctaatgccaccaggaaraaatgaaaactggctcagagagggggaagcctcaacagaaaaagaaataaattaaaagccctcctatcccctccagccagggttcgttcctttccccaactccccagggggcaraagtgagtgcagcacctgatgtctgcttcttccccttgtgtctggtgagatggtgcagcagggctgcagggggctgggtggggtcatgtccactgaagaactgtactatggggacagaaaaccagaaatgtggagactgaactggtatcccagagagtgcacgaccctgggcatctgggcaagggcaggcatgagacctctgaattagaagggtccagcccccactgacaggaggctacactgggagggaaggtgaaggtgctgaggaaagctcccakgatgagcctgggagtgcttcaggtatcagcttccagccagagggcgagaagtcctcctcacaaatggatgagtccattgaatccatggactttggagtgggggggatttgttccaaagaatggatgagtccactggccaatgtggggtagaggggtagagaagaccacataggaagagactccactggggatggaatgttcccctcccttgtgtaggctgagtcactggagatgagggggaggcaactgtcccacagacaagacagtaggaggtgggggtcaagagtggaractgcaccgaggcaagagtccatggatggggccaagagggggcaggagtggcgctgtatccacattcacttcagaagttgaagattccaaakaggagaataagtggggagaggggagacaaggaagagggtttggccctgcttcagggcccactgggtgggtaggtgtggggaggaagatggggacagatgg

SEQ ID NO: 2842 - DNA, 2888 bp, Homo sapiens
gtacagcgttattagtctttttatttgcttattgcatcttgggagcgcgtgggtgggtgaagggagcgaggataggaagtctatggagatttacaccagtttttttttttttttaaacaaaaacacagccagataatyatwattcttcccttacgtccccccagcccccacctggggcagtcgctctcccggctgcgtcccttttcgtccatgtcctagcagagactacagagcagtacagaggctctcgctgaaaccagtcccaggctccacagagtcagatcacggcttcacaccagtcgttctggtcacttaggcgttcgcgtgagcgctcaaccccttaccgccacctcatcgtcactctacaccattctgagcgcaaaaatgttttgattgagacaaatttagaccaagcaatgaccttgtaaacagagagaggggctcagacatgctgagaaatccttatctctagagaaacgtctttaaatgctaagtaaaagccctagcaagtaaaagccctgaggcactagggtgtcggttaggggtcacaggcggagaggtggggcgcctgggggtttcggtagggagccacccacagataactcagacagccagattctgggggtcgttcaggttgaaagactggtcgaaattacgcgggcatgagtcagcgcatccctacgcgccctccgccccttgagggtgggtcgcttatagggaggggagtagagtagggcaggagaaactgggccaggctgcacttagctcaaggggcctcgaggactctctgcgtctctggagacaagggcactacacgcacttcagaatgaagagttcacctagggcgcaatggaatattccattgcccctcctgtcctgggtctgtgttgcggggaacgctcgcgcggttgccagagaaagccccggacgtgacggatttgcgcgaccccaagcagcccgcccttccccctcccatccgtcattcccctgcgytctctttcctcacccttccccccgccaccgtgggttccagacttgggataagtaaacagcgggtggagcgaggcctacggacccaggccaggtgggagtctgcactcttcaaggggcctgggctgctgctcacgggtattaaagaactccgcgttgttcatggctgaggcgatgcattaggaagatcctggacctagagaacaagtcccccgaacgctgagttggaggcgggacttcgggtgcgcgttggcgggagcatgctggggctctgsgggcagcggctccccgcggcgtgggtcctgcttctgttgcctttcctgccgctgctgctgcttgcagcccccgcgccccaccgcgmgtcctacaagccggtcatcgtggtgcatgggctcttcgacagctcgtacagcttccgccacctgctggaatacatcaatgagacacaccccgggactgtggtgacagtgctcgatctcttcgatgggagagagagcttgcgacccctgtgggaacaggtgcaagggttccgagaggctgtggtccccatcatggcaaaggcccctcaaggggtgcatctcatctgctactcgcaggggggccttgtgtgccgggctctgctttctgtcatggatgatcacaacgtggattctttcatctccctctcctctccacagatgggacagtatggagacacggactacttgaagtggctgttccccacctccatgcggtctaacctctatcggatctgctatagcccctggggccaggaattctccatctgcaactactggcatgatccccaccacgatgacttgtacctcaatgccagcagcttcctggccctgatcaatggggaaagagaccatcccaatgccacagtatggcggaagaactttctgcgtgtgggccacctggtgctgattgggggccctgatgatggtgttattactccctggcagtccagcttctttggtttctatgatgcaaatgagaccgtcctggagatggaggagcaactggtttatctgcgggattcttttgggttgaagactctattggcccggggggccatagtgaggtgtccaatggccggtatctcccacacagcctggcactccaaccgtaccctttatgagacctgcattgaaccttggctctcctgaggatatattcaggggtccccaggaactcctcggtccagagaccaagtggtggccttggaaagcagatgtcaggctttggtgtgcctgtgaccacctcattgctcccatattatcccccatttttagtagagacggggttttagtagagacttggcctcccagaacccccttcctctgctcctccatgaatgacaattccaggcctccccsacctcatgtcctctcatttgggggattgctccgtgctgtccctttctctcaaggccgaagttgggaagtgagaaaccatgtttttaacttgtggctgcttttgctgctgctrctcctccgtatctggctgtatgggtggagaacccaccccctgcccaccacaggggtctccttccaggccactcaggacatttttagcttctctcctccccatgttcccttttttctctaaagtcycctgacatcagccctcccaactcctaagagggactacccatgagagtggggtthtgaggctcccctatggggacagttccgttcttgaagtgtcagtgttggggaatatctgtggcctatgaggcccatctcaggtttggggatcccccagtccctatgatcagtgttggagtacccccctgggagagcctagtttctttgaggccccaggccctcttttaactacctttgaataggtgttatccctgtatttatggaaataaagttccatttcctcagtgt

SEQ ID NO: 2843 - DNA, 3950 bp, Homo sapiens
gtacagcgttattagtctttttatttgcttattgcatcttgggagcgcgtgggtgggtgaagggagcgaggataggaagtctatggagatttacaccagtttttttttttttttaaacaaaaacacagccagataatyatwattcttcccttacgtccccccagcccccacctggggcagtcgctctcccggctgcgtcccttttcgtccatgtcctagcagagactacagagcagtacagaggctctcgctgaaaccagtcccaggctccacagagtcagatcacggcttcacaccagtcgttctggtcacttaggcgttcgcgtgagcgctcaaccccttaccgccacctcatcgtcactctacaccattctgagcgcaaaaatgttttgattgagacaaatttagaccaagcaatgaccttgtaaacagagagaggggctcagacatgctgagaaatccttatctctagagaaacgtctttaaatgctaagtaaaagccctagcaagtaaaagccctgaggcactagggtgtcggttaggggtcacaggcggagaggtggggcgcctgggggtttcggtagggagccacccacagataactcagacagccagattctgggggtcgttcaggttgaaagactggtcgaaattacgcgggcatgagtcagcgcatccctacgcgccctccgccccttgagggtgggtcgcttatagggaggggagtagagtagggcaggagaaactgggccaggctgcacttagctcaaggggcctcgaggactctctgcgtctctggagacaagggcactacacgcacttcagaatgaagagttacttgggataagtaaacagcgggtggagcgaggcctacggacccaggccaggtgggagtctgcactcttcaaggggcctgggctgctgctcacgggtattaaagaactccgcgttgttcatggctgaggcgatgcattaggaagatcctggacctagagaacaagtcccccgaacgctgagttggaggcgggacttcgggtgcgcgttggcgggagcatgctggggctctgsgggcagcggctccccgcggcgtgggtcctgcttctgttgcctttcctgccgctgctgctgcttgcagcccccgcgccccaccgcgmgtcctacaagccggtcatcgtggtgcatgggctcttcgacagctcgtacagcttccgccacctgctggaatacatcaatgagggggccttgtgtgccgggctctgctttctgtcatggatgatcacaacgtggattctttcatctccctctcctctccacagatgggacagtatggagacacggactacttgaagtggctgttccccacctccatgcggtctaacctctatcggatctgctatagcccctggggccaggaattctccatctgcaactactggcatgatccccaccacgatgacttgtacctcaatgccagcagcttcctggccctgatcaatggggaaagagaccatcccaatgccacagtatggcggaagaactttctgcgtgtgggccacctggtgctgattgggggccctgatgatggtgttattactccctggcagtccagcttctttggtttctatgatgcaaatgagaccgtcctggagatggaggagcaactgcctgccaggcccacccaccagtctgagctgcttctgctgaggctggtctgcttgaagcctcccaggagaaagaagccagcctgtagggtccagcgtcaaagcgaatcatggggtccagggctgagctgtgcactctcttaggcggattctccttcctcctgctactgataccaggcgagggggccaagggtggatccctcagagagagtcagggagtctgctccaagcagacactggtggtcccgctccactacaacgagtcctacagccaaccagtgtacaagccctacctgaccttgtgcgctgggaggcgcatctgcagcacttacaggaccatgtaccgcgttatgtggcgggaggtgargcgggaggttcagcagacccatgcagtgtgctgccagggctggaagaagcggcacccgggggcgctcacctgtgaagccatctgcgccaagccttgcctgaacggaggcgtctgcgttaggcctgaccagtgcgagtgcgcccccggctggggagggaagcactgtcatgtggacgtggatgaatgtaggaccagcatcaccctctgctcgcaccattgttttaatacggcaggcagcttcacctgcggctgcccccatgacctagtgctaggcgtggacgggcgcacctgcatggaggggtccccagagcccccaaccagtgccagcatactcagcgtggccgttcgggaggmrgaaaaagatgagcgcgctctgaagcaggagattcacgagctgcgagggcgcctggagcggctggagcagtgggccggtcaggctggggcctgggtcagagcggtgctgcccgtgccgcctgaagagctgcagccagaacaggtggctgagctgtggggccggggtgaccggatcgaatctctcagcgaccaggtgctgctgctggaggagaggctakgtgcctgctcctgtgaggacaacagcctgggcctcggcgtcaatcatcgataagaagcctctacagcacccctgccccctaatttatacagaaaccggacccactaatcctctgggattggccgactgtgagctgcagataaggctatcagccaccaaagagcaatgaacaatggaaacttcagagagctgaagaaasggggaggcctgtgttcttggcctgcccctgagtcttctggctgggggcaggttgcctgggcaagaactgcttcttcaattccttaacaaatgcaaccaccaacacccagatctctctctctctttattttcagtttttttgctgttatccrrataattaataaaaaccaaccacgcaaaactgggtcccaccctctccttttgctcccagcctacctccccagttgkgggaacaggtctggagtgagaggcagggagtggctaatgccaccaggaaraaatgaaaactggctcagagagggggaagcctcaacagaaaaagaaataaattaaaagccctcctatcccctccagccagggttcgttcctttccccaactccccagggggcaraagtgagtgcagcacctgatgtctgcttcttccccttgtgtctggtgagatggtgcagcagggctgcagggggctgggtggggtcatgtccactgaagaactgtactatggggacagaaaaccagaaatgtggagactgaactggtatcccagagagtgcacgaccctgggcatctgggcaagggcaggcatgagacctctgaattagaagggtccagcccccactgacaggaggctacactgggagggaaggtgaaggtgctgaggaaagctcccakgatgagcctgggagtgcttcaggtatcagcttccagccagagggcgagaagtcctcctcacaaatggatgagtccattgaatccatggactttggagtgggggggatttgttccaaagaatggatgagtccactggccaatgtggggtagaggggtagagaagaccacataggaagagactccactggggatggaatgttcccctcccttgtgtaggctgagtcactggagatgagggggaggcaactgtcccacagacaagacagtaggaggtgggggtcaagagtggaractgcaccgaggcaagagtccatggatggggccaagagggggcaggagtggcgctgtatccacattcacttcagaagttgaagattccaaakaggagaataagtggggagaggggagacaaggaagagggtttggccctgcttcagggcccactgggtgggtaggtgtggggaggaagatggggacagatgg

SEQ ID NO: 2844 - DNA, 2207 bp, Homo sapiens
cctgtagggtccagcgtcaaagcgaatcatggggtccagggctgagctgtgcactctcttaggcggattctccttcctcctgctactgataccaggcgagggggccaagggtggatccctcagagagagtcagggagtctgctccaagcagacactggtggtcccgctccactacaacgagtcctacagccaaccagtgtacaagccctacctgaccttgtgcgctgggaggcgcatctgcagcacttacaggaccatgtaccgcgttatgtggcgggaggtgargcgggaggttcagcagacccatgcagtgtgctgccagggctggaagaagcggcacccgggggcgctcacctgtgaagccatctgcgccaagccttgcctgaacggaggcgtctgcgttaggcctgaccagtgcgagtgcgcccccggctggggagggaagcactgtcatgtggacgtggatgaatgtaggaccagcatcaccctctgctcgcaccattgttttaatacggcaggcagcttcacctgcggctgcccccatgacctagtgctaggcgtggacgggcgcacctgcatggaggggtccccagagcccccaaccagtgccagcatactcagcgtggccgttcgggaggmrgaaaaagatgagcgcgctctgaagcaggagattcacgagctgcgagggcgcctggagcggctggagcagtgggccggtcaggctggggcctgggtcagagcggtgctgcccgtgccgcctgaagagctgcagccagaacaggtggctgagctgtggggccggggtgaccggatcgaatctctcagcgaccaggtgctgctgctggaggagaggctakgtgcctgctcctgtgaggacaacagcctgggcctcggcgtcaatcatcgataagaagcctctacagcacccctgccccctaatttatacagaaaccggacccactaatcctctgggattggccgactgtgagctgcagataaggctatcagccaccaaagagcaatgaacaatggaaacttcagagagctgaagaaasggggaggcctgtgttcttggcctgcccctgagtcttctggctgggggcaggttgcctgggcaagaactgcttcttcaattccttaacaaatgcaaccaccaacacccagatctctctctctctttattttcagtttttttgctgttatccrrataattaataaaaaccaaccacgcaaaactgggtcccaccctctccttttgctcccagcctacctccccagttgkgggaacaggtctggagtgagaggcagggagtggctaatgccaccaggaaraaatgaaaactggctcagagagggggaagcctcaacagaaaaagaaataaattaaaagccctcctatcccctccagccagggttcgttcctttccccaactccccagggggcaraagtgagtgcagcacctgatgtctgcttcttccccttgtgtctggtgagatggtgcagcagggctgcagggggctgggtggggtcatgtccactgaagaactgtactatggggacagaaaaccagaaatgtggagactgaactggtatcccagagagtgcacgaccctgggcatctgggcaagggcaggcatgagacctctgaattagaagggtccagcccccactgacaggaggctacactgggagggaaggtgaaggtgctgaggaaagctcccakgatgagcctgggagtgcttcaggtatcagcttccagccagagggcgagaagtcctcctcacaaatggatgagtccattgaatccatggactttggagtgggggggatttgttccaaagaatggatgagtccactggccaatgtggggtagaggggtagagaagaccacataggaagagactccactggggatggaatgttcccctcccttgtgtaggctgagtcactggagatgagggggaggcaactgtcccacagacaagacagtaggaggtgggggtcaagagtggaractgcaccgaggcaagagtccatggatggggccaagagggggcaggagtggcgctgtatccacattcacttcagaagttgaagattccaaakaggagaataagtggggagaggggagacaaggaagagggtttggccctgcttcagggcccactgggtgggtaggtgtggggaggaagatggggacagatgg

SEQ ID NO: 2845 - DNA, 2577 bp, Homo sapiens
gtacagcgttattagtctttttatttgcttattgcatcttgggagcgcgtgggtgggtgaagggagcgaggataggaagtctatggagatttacaccagtttttttttttttttaaacaaaaacacagccagataatyatwattcttcccttacgtccccccagcccccacctggggcagtcgctctcccggctgcgtcccttttcgtccatgtcctagcagagactacagagcagtacagaggctctcgctgaaaccagtcccaggctccacagagtcagatcacggcttcacaccagtcgttctggtcacttaggcgttcgcgtgagcgctcaaccccttaccgccacctcatcgtcactctacaccattctgagcgcaaaaatgttttgattgagacaaatttagaccaagcaatgaccttgtaaacagagagaggggctcagacatgctgagaaatccttatctctagagaaacgtctttaaatgctaagtaaaagccctagcaagtaaaagccctgaggcactagggtgtcggttaggggtcacaggcggagaggtggggcgcctgggggtttcggtagggagccacccacagataactcagacagccagattctgggggtcgttcaggttgaaagactggtcgaaattacgcgggcatgagtcagcgcatccctacgcgccctccgccccttgagggtgggtcgcttatagggaggggagtagagtagggcaggagaaactgggccaggctgcacttagctcaaggggcctcgaggactctctgcgtctctggagacaagggcactacacgcacttcagaatgaagagttacttgggataagtaaacagcgggtggagcgaggcctacggacccaggccaggtgggagtctgcactcttcaaggggcctgggctgctgctcacgggtattaaagaactccgcgttgttcatggctgaggcgatgcattaggaagatcctggacctagagaacaagtcccccgaacgctgagttggaggcgggacttcgggtgcgcgttggcgggagcatgctggggctctgsgggcagcggctccccgcggcgtgggtcctgcttctgttgcctttcctgccgctgctgctgcttgcagcccccgcgccccaccgcgmgtcctacaagccggtcatcgtggtgcatgggctcttcgacagctcgtacagcttccgccacctgctggaatacatcaatgagacacaccccgggactgtggtgacagtgctcgatctcttcgatgggagagagagcttgcgacccctgtgggaacaggtgcaagggttccgagaggctgtggtccccatcatggcaaaggcccctcaaggggtgcatctcatctgctactcgcaggggggccttgtgtgccgggctctgctttctgtcatggatgatcacaacgtggattctttcatctccctctcctctccacagatgggacagtatggagacacggactacttgaagtggctgttccccacctccatgcggtctaacctctatcggatctgctatagcccctggggccaggaattctccatctgcaactactggcatgatccccaccacgatgacttgtacctcaatgccagcagcttcctggccctgatcaatggggaaagagaccatcccaatgccacagtatggcggaagaactttctgcgtgtgggccacctggtgctgattgggggccctgatgatggtgttattactccctggcagtccagcttctttggtttctatgatgcaaatgagaccgtcctggagatggaggagcaactggtttatctgcgggattcttttgggttgaagactctattggcccggggggccatagtgaggtgtccaatggccggtatctcccacacagcctggcactccaaccgtaccctttatgagacctgcattgaaccttggctctcctgaggatatattcaggggtccccaggaactcctcggtccagagaccaagtggtggccttggaaagcagatgtcaggctttggtgtgcctgtgaccacctcattgctcccatattatcccccatttttagtagagacggggttttagtagagacttggcctcccagaacccccttcctctgctcctccatgaatgacaattccaggcctccccsacctcatgtcctctcatttgggggattgctccgtgctgtccctttctctcaaggccgaagttgggaagtgagaaaccatgtttttaacttgtggctgcttttgctgctgctrctcctccgtatctggctgtatgggtggagaacccaccccctgcccaccacaggggtctccttccaggccactcaggacatttttagcttctctcctccccatgttcccttttttctctaaagtcycctgacatcagccctcccaactcctaagagggactacccatgagagtggggtthtgaggctcccctatggggacagttccgttcttgaagtgtcagtgttggggaagcctagtttctttgaggccccaggccctcttttaactacctttgaataggtgttatccctgt

SEQ ID NO: 2846 - DNA, 1337 bp, Homo sapiens
attttccgkcaagttttagccaatgagttgatttggagccatacgctccaaagtccaatagcaatccggacattctctaraagaggaagcgaaggaaagaaaggggcttatagtgggcgaggtctataggtagtcccgagcaaattgcttatggctttggttatgactgacaactactcagacgaataaagccctccttggccaggsgacagsgtgtagcgagttattaccaatcccttggcattgcacattgacttagaccgtatcagccaatagccattgtgcgaaggcaggactgcactaaccttttcccgcccctaccctttgggccaatcctttcttttgaattctttgtgactggcaggcattcagaccaatagtgattaggaaaccttgaagcctgcccaacgatcgtgggcaggaggtggtttctggtttgttggggcgtgtgtatgtgtatttggggggactgaagggtacgtggggcgaaacaaaaccggccatggcagcagcggaggaggaggacgggggccccgaagggccaaatcgcgagcggggcggggcgggcgcgaccttcgaatgtaatatatgtttggagactgctcgggaagctgtggtcagtgtgtgtggccacctgtactgttggccatgtcttcatcagtggctggagacacggccagaacggcaagagtgtccagtatgtaaagctggkatcagcagagagaaggttgtcccgctttatgggcgagggagccagaagccccaggatcccagattraaaactccaccccgcccccagggccagagaccagctccrgagagcagagggggattccagccatttggtgataccgggggcttccacttctcatttggtgttggtgcttttccctttggctttttcaccaccgtcttcaatgcccatgagcctttccgccggggtacaggtgtggatctgggacagggtcacccrgcctccagctggcaggattccctcttcctgtttctcgccatcttcttctttttttggctgctcagtatttgagctatgtctgcttcctgcccacctccagccagagaagaatcagtattgagggggaaggaggatggattgagagaatgtctttctcctctcctaagtctttgctttccctgatttcttgatttsatcttcaaaggtgggcaaagttccctytgactcttcccccactccccatcttactgatttaatttaatttttcactccccagagtctaatatggattytgactyttaagtgcttccgccccctcactacctcctttaatacaaattcaataaaaaaggtgaaatatatt

SEQ ID NO: 2847 - DNA, 1516 bp, Homo sapiens
attttccgkcaagttttagccaatgagttgatttggagccatacgctccaaagtccaatagcaatccggacattctctaraagaggaagcgaaggaaagaaaggggcttatagtgggcgaggtctataggtagtcccgagcaaattgcttatggctttggttatgactgacaactactcagacgaataaagccctccttggccaggsgacagsgtgtagcgagttattaccaatcccttggcattgcacattgacttagaccgtatcagccaatagccattgtgcgaaggcaggactgcactaaccttttcccgcccctaccctttgggccaatcctttcttttgaattctttgtgactggcaggcattcagaccaatagtgattaggaaaccttgaagcctgcccaacgatcgtgggcaggaggtggtttctggtttgttggggcgtgtgtatgtgtatttggggggactgaagggtacgtggggcgaaacaaaaccggccatggcagcagcggaggaggaggacgggggccccgaagggccaaatcgcgagcggggcggggcgggcgcgaccttcgaatgtaatatatgtttggagactgctcgggaagctgtggtcagtgtgtgtggccacctgtactgttggccatgtcttcatcagtggctggagacacggccagaacggcaagagtgtccagtatgtaaagctggkatcagcagagagaaggttgtcccgctttatgggcgagggagccagaagccccaggatcccagattraaaactccaccccgcccccagggccagagaccagctccrgagagcagagggggattccagccatttggtgataccgggggcttccacttctcatttggtgttggtgcttttccctttggctttttcaccaccgtcttcaatgcccatgagcctttccgccggggtacaggtgtggatctgggacagggtcacccrgcctccagctggcaggattccctcttcctgtttctcgccatcttcttctttttttggctgctcagtatttgagctatgtctgcttcctgcccacctccagccagagaagaatcagtattgagggtccctgctgacccttccktactcctggacccccttgacccctctatttctgttggctaaggccagccytggacattgtccaggaaggcctggggaggaggagtgaagtctgtgcatagatgggagagccttctgctcagaggctcactcagtaacgttgtttaattctctgccctggggaaggaggatggattgagagaatgtctttctcctctcctaagtctttgctttccctgatttcttgatttsatcttcaaaggtgggcaaagttccctytgactcttcccccactccccatcttactgatttaatttaatttttcactccccagagtctaatatggattytgactyttaagtgcttccgccccctcactacctcctttaatacaaattcaataaaaaaggtgaaatatattga

SEQ ID NO: 2848 - DNA, 1511 bp, Homo sapiens
attttccgkcaagttttagccaatgagttgatttggagccatacgctccaaagtccaatagcaatccggacattctctaraagaggaagcgaaggaaagaaaggggcttatagtgggcgaggtctataggtagtcccgagcaaattgcttatggctttggttatgactgacaactactcagacgaataaagccctccttggccaggsgacagsgtgtagcgagttattaccaatcccttggcattgcacattgacttagaccgtatcagccaatagccattgtgcgaaggcaggactgcactaaccttttcccgcccctaccctttgggccaatcctttcttttgaattctttgtgactggcaggcattcagaccaatagtgattaggaaaccttgaagcctgcccaacgatcgtgggcaggaggtggtttctggtttgttggggcgtgtgtatgtgtatttggggggactgaagggtacgtggggcgaaacaaaaccggccatggcagcagcggaggaggaggacgggggccccgaagggccaaatcgcgagcggggcggggcgggcgcgaccttcgaatgtaatatatgtttggagactgctcgggaagctgtggtcagtgtgtgtggccacctgtactggtgagaatccccagtggctggagacacggccagaacggcaagagtgtccagtatgtaaagctggkatcagcagagagaaggttgtcccgctttatgggcgagggagccagaagccccaggatcccagattraaaactccaccccgcccccagggccagagaccagctccrgagagcagagggggattccagccatttggtgataccgggggcttccacttctcatttggtgttggtgcttttccctttggctttttcaccaccgtcttcaatgcccatgagcctttccgccggggtacaggtgtggatctgggacagggtcacccrgcctccagctggcaggattccctcttcctgtttctcgccatcttcttctttttttggctgctcagtatttgagctatgtctgcttcctgcccacctccagccagagaagaatcagtattgagggtccctgctgacccttccktactcctggacccccttgacccctctatttctgttggctaaggccagccytggacattgtccaggaaggcctggggaggaggagtgaagtctgtgcatagatgggagagccttctgctcagaggctcactcagtaacgttgtttaattctctgccctggggaaggaggatggattgagagaatgtctttctcctctcctaagtctttgctttccctgatttcttgatttsatcttcaaaggtgggcaaagttccctytgactcttcccccactccccatcttactgatttaatttaatttttcactccccagagtctaatatggattytgactyttaagtgcttccgccccctcactacctcctttaatacaaattcaataaaaaaggtgaaatatattga

SEQ ID NO: 2849 - DNA, 2099 bp, Homo sapiens
cttcttagccaaagtaagcagtagccaacttgtcagggtgggagtcatattacaaaaccgagggcagtgaagaagctgaagaagaacaagaagagaaccttgaagcaagaggagactataaatattcagaaagagatagtttgatttttttggttgatgcctccaaggctatgtttgaatctcctagtgaagatgaattgacaccttttgacatgagcatccagtgtattcaaagtgtgtacatcagtaagatcataagcagtgatcgagatctcttggctgtggtgttctacggtaccgagaaagacaaaaattcagtgaattttaaaaatatttatgtcttataggagctggataatccaggtgcaaaatgaattctagagcttgaccagtttaaggggcagcagggacaaaaacgtttccaagacctgatgggccatggatctgactactcactcagtgaagtgctgtgggtccgtgccaacctctttagtgatgtccaattcaagatgagtcatacgaagatcacgctcttcaccaatgaagacaacccccatggcaatgagagtgccaaagccagccaggccaggaccaaagccggtgatctccgagatacaggcatcttccttgacttgatgcatctgaagaaacctggaggctttgacatatccttgttctacagagatatcatcagcatagcagaggatgaggacctcagggttcactttgaggaatccagcaagctagaagacctgttgcagaaggttcacgccaaagagaccaggaagcgagcactcagcaggttaaagctgaagctcaacaaagatatagtgatctctgtgggcatttataatctggtccagaaggctctcaagcctcctccaataaagctctatagggaaataaatgaaccagtgaaaaccaagacccggacctttaatacaagtacagacgatttgcttctgcctagcgataccaagtggtctcagatctatgggagtcgtcagattatactggagaaagaggaaacagaagagctaaaacggtttgatgatccaggtttgatgctcatgggtttcaagccattggtactgctgaagaaacgccattacctgaggccctccctgtctgtgtacccagaggagtcgctggtgattgggagctcaaccctgttcagtgctctgctcatcaagtgtctggagaaggaggttgcagcattgtgcagatacacaccccgcaggaacatccccccttattttgtggctttggtgacacaggaagaagtgttggatgaccagaaaattcaggtgactcctccgggcttccagctggtctttttaccctttgctgatgataaaaggaagatgccctttactgaaaaagtcacggcaactccagagcaggtggacaagatgaaggctatcattgagaagcttcgcttcacgtacagaagtgacagctttgagaaccccgtgctgcagcagcacttcaggaacctggaggccttggccttggatttgatggagccagaacaagcagtggacctgacattgcccaaggttgaagcaataaatagaagactgggctccctggtggatgagtttaaggagcttgttcacccaccagattacaatcytgaagggaaagttaccaagagaaaacatgataatgaaggttctggaagcaaaaggcccaaggtggagtattcagaagaggagctgaagacccacattagcaagggcacgctgggcaagttcactgtgcccatgttgaaagaggcctgccgggcttacgggctgaagagtggkctgaagaagcaggagctgctggaagccctcaccaagcacttccaggattgaccagaggccatgcgtccagctgcccttccacagtgaggccaggctgcctggccttgtcctcagccagttaaaatgtgtttctcctgagctaggaagagtctacccgacataagtcgagggactttatgtttttgaggctttctgttgccatggtgatggtgtagccctcccactttgctgttccttactttactacctgaataaagagccctaagtttgtactaaaaagaaagaaagaaa

SEQ ID NO: 2850 - DNA, 966 bp, Homo sapiens
atggtgaccggcgagcggcatgcgacgcmgcctctgtggcctgtggaggcccgcttggcggcgctgcttcccgacctactggtctttcggaagcctcggggatgggaacccgagctcgccacggcccagggcgtcctcctaggcgtccatgtgacggggtttacagcattaatggacaggttcaccctgacctacaagtcggaacgtgacatggacaaactggcccatatcttcagttattacattagtgacatcgtggagcggaacatrctcctggcactctggagagtagaacaaaatcaactgagtgacatcattaccttggtggcaaaatgcagtctggagatacaggagaaatttgggatctatcataccagggaaggccaggacctgcagttaaagataggtctacctgcaagtcggatttcccaggttattgttggagatgagcggcagcaatacctcttggtgattgggcagttagctcagcgtttggctcaggcgaatgaaattgtcctatcctggaactgctggatgctttgcragcagtatatgtttgaagtggcaatcatgagggaggatgaagctgtgaagttaagagatatgtggatcattgatccatttgattttgatgagcattttgacaagtgcctcaattatctaccacattaccgtacgagtgctgagttccacaggacagcgtggatgttgcatttgtgtcatcttatccaggaggctgccttatacatctccacagtcattgagaaagggggcggccagctgagtcggatctttatgtttgagaaagtaagtacaagggaacttgacccatcagcattaaagggctgcatgttcctctgtgttttcggccttcctggtgataagaagccagacgagtgtgcacatgccctggagagctccttcagcatcttcagcttctgctgggagaatcttgctaagaccaac

SEQ ID NO: 2851 - DNA, 987 bp, Homo sapiens
ctagtctcgagttcccaacctcaggtcatctgcccgtctcagcctcccaaagtgctgggattacaggcgtgagccaccgtgcctggccgtaaggtattatttttaaaggttagctcacctaagacttccgcagctgagggcagtaacaagataggcatgatgcacagagccaygtggggattccagacccctcctgttgcatagtttcccagttgaatttgactcttctccatttatctcatytttttctggataggtctacctgcaagtcggatttcccaggttattgttggagatgagcggcagcaatacctcttggtgattgggcaggttgtagtgatgtccagttagctcagcgtttggctcaggcgaatgaaattgtcctatcctggaactgctggatgctttgcragcagtatatgtttgaagtggcaatcatgagggaggatgaagctgtgaaggtaggaggctagcttcctstactgccattctgaaaaggccttcctagtacacagcgcaatgctctggtagtgttcacatattgcctggccaaaccaatgaccattggaactcaatttaggagggaggctgggaatattctcctrtgaagatagatgaggtagaacagtgaggctgaggagataaaaggcaaacaagggcaatagaatcctcagcctttcttgtgtgggggcacagaattaaacagtttcctttctgtagttaagagatatgtggatcattgatccatttgattttgatgagcattttgacaagtgcctcaattatctaccacattaccgtacgagtgctggtaagttactttgtccttcctacctaagccccaaattttaaacattaattttccacatggccagggacattttgtttttcttttctcagagactcttaagaactgcactggaattggatccacactctgaacttgaccaaaagctgcagaagcacataatgaaaaaccttttgaag

SEQ ID NO: 2852 - DNA, 1426 bp, Homo sapiens
atgtggacagctctttctgagctggatgatttagtgaagcagctgtgggggacacaggaggggagatttggaagaaggacgcagtgggctgagggaggactattcaccccctatttgcaatgctggacactaatgagtatggacagtgaagtcctctattgtcgcacatgctccatgaggacctggggatgttctcagccagcaaggaccagcgggatggctgcttcttcctcaagcatccctcaagtttcactcatgactgtcattgaagggtttactgagtcccgcatcacccagggtccactgagatctccctgctcttcagctttggggaagatggcctcaattccactcaygcttaagccctgccctgwgaaaatccaaagtcttcctcaagttgtctgtgaattcctcaagagkgcggcggccactggaccctcgttttggctggrgaaggaaaccctgaaggtgccactggcgctctttgccttgaaccggcagcgccggtgtgagcggctgcggaagaaccctgctgtgcaggccggctcagagtccttctttcactgcgcattcggtgtcaccgagccaggctgctacggcttcatcgacgctgacactgkgaagtcggccctgtttgtgcccaggcttcctgccagccatgccacctggatgggaaagatccattccaaggagcacttcaaggagaagtatgccgtggacgacgtccaggacgcagatgagattgccattgtcctgacgtcacagaagccctctgtcctcctcactttgcgtggcgtcaacacagacagcagcagcgtctgcagggaggcttccttcgagggcatcagcaagttcaaagtcaacaacaccattcttcacccagagatcgtttagwgccgagtgtttaagacggacatagagctggaggttctgcactacaccaataaaatctccagtgagacccactgtgagttctggaatataaaggagagaaggctgaaaagtgaagggtgcaacctaagactctgaccagtgactaggagttttccagaggaggaagaacgggaaaggcatttcaggaaaaggccagcatgaacacgcatatgaagctgcacgcaggtgcagaaaaagggagtggcagcctattttttctgactgtaaaatggactacaagagaaaattcctgctcagagggtgccctctcttgcagtaaaaatcctttttgaagatggtcaataacatgaggacatagagcagaatcacattctgtttctacaaaacacccccaccaccattttaaactacaaatctgccaaacaaaagatcatccaaaagacactttttgagtgcattgcagaactgggagggtatcttcttccgaagtaatttcatttttcaggcttgcaataataaaatgatcttaaga

SEQ ID NO: 2853 - DNA, 1587 bp, Homo sapiens
ctggtgtctctgaggggcagagctggagtcgtggactcctgggtcctgagagaggaagggacagggggcttggacttataggtctctgggaagaagggatagagaacctgatccctcggtctgagagtggagggggctgggccaggattcccgggtctgagggaggaaggggtgggaccctgactcctgggtctgagggaggagggactgggaggctggactcccgggtctgagggaggaggggctgggaccctgactcctgggtctgagggaggaggggctgggaggctggactcccgrgtctgagggaggaggggctgggaggctggactcccgagtctgwgggaggagggrctgggggcctggactcccgagtctgagggaggagggactgaggcttctggattcctgggtctgtgggaggagggactggggctcctggattcctgggtctgtgggaagagaggagtgtctgagggaggaggggctggggacaaacttccaggtctctagccttcctggcaacgccccccgaggccggacttccaggatccagcctctattgaggatttgatgcgacggcctcacggggctttggaggtgaaagaggcccagagtagagagagagagagaccgacgtacacgggatggctacgggaacgcgctatgccgggaaggtggtggtcgtgaccgggggcgggcgcggcatcggagctgggatcgtgcgcgccttcgtgaacagcggggcccgagtggttatctgcgacaaggatgagtctgggggccgggccctggagcaggagctccctggagctgtctttatcctctgtgatgtgactcaggaagatgatgtgaagaccctggtttctgagaccatccgccgatttggccgcctggattgtgttgtcaacaacgctggccaccacccacccccacagaggcctgaggagacctctgcccagggattccgccagctgctggagctgaacctactggggacgtacaccttgaccaagaatgtcatcaacatctccagcctggtgggggcaatcggccaggcccaggcagttccctatgtggccaccaagggggcagtaacagccatgaccaaagctttggccctggatgaaagtccatatggtgtccgagtcaactgtatctccccaggaaacatctggaccccgctgtgggaggagctggcagccttaatgccagaccctagggccacaatccgagagggcatgctggcccagccactgggccgcatgggccagcccgctgaggtcggggctgcggcagtgttcctggcctccgaagccaacttctgcacgggcattgaactgctcgtgacggggggtgcagagctggggtacgggtgcaaggccagtcggagcacccccgtggacgcccccgatatcccttcctgatttytctcatttytacttggggcccccttcctaggactctcccaccccaaactccaacctgtatcagatgcagcccccaagcccttagactytaagcccagttagcaaggtgccgggtcaccctgcaggttcccataaaaacgatttgcagccagaagga

SEQ ID NO: 2854 - DNA, 1511 bp, Homo sapiens
ataaacaagagaccaaaacagtgggattgagaatgtgcaagtatgaggatcttggcttttagatggtcccttacctggtcctgctgctcctctgcttcaaggtgtccattcatctgctggtcctctgctctgttacatcaacgggaccctggccctgggtcttaagccatagtaggctggtaggagcaaggagtcaggtctcactgtcctggcctgaccttcagctctgtggaggagaggtcagggaagggccatctaggggccgggggagaaggagaagcggaactcaaaggatgggaatacaggatgctatagattgaggtgcagcaagatcatctcgggttagaccttaagtaggacttcccaagcagcggctgcgcctacgaagtgcagcgcgagatcagggagcggtgaacctgataaggaaacgcccgaagcgtggggtcggaaatttccagatgccccgactagccctgccagccccgcctcctcacctccaacactgggcccgccgggtcctccgggagccactgagaggccgtcggygtcgggccagagcgtcaccgcgcgacgcatcgtgctagctacacgcatctcgctcccagatccctttcttccggaaagctatcgagaacacggcctgggtagggccagagaggcccccgacgtgctggcccttccctcttggacgttgcgcttgttcctgcgctctatgctctctgccgttatcgcccggctagtcagtcgtccaactcaccacagagaagtccggatcgtggtagagcgccgcgtcgcacccatgtgacgtcacggcggcgccactcgcttgaggctttccccgcccaccccagcccgttctctctttccggacctggccgagcaggaggcgccatcatgggagtggacatccgccataacaaggaccgaaaggttcggcgcaaggagcccaagagccaggatatctacctgaggctgttggtcaagttatacaggtttctggccagaagaaccaactccacattcaaccwggttgtgttgaagaggttgtttatgagtcgcaccaaccggccgcctctgtccctttcccggatgatccggaagatgaagcttcctggccgggaaaacaagacggccgtggttgtggggaccataactgatgatgtgcgggttcaggaggtacccaaactgaaggtatgtgcactgcgcgtgaccagccgggcccgcagccrcatcctcagggcagggkgcaagatcctcactttcgaccagctggccctggactcccctaagggctgtggcactgtcctgctctccggtcctcgcaagggccgagaggtgtaccggcatttcggcaaggccccaggaaccccgcacagccacaccaaaccctacgtccgctccaagggccggaagttcgagcgtgccagaggccgacgggccagccgaggctacaaaaactaaccctggatcctactctcttattaaaaagatttttgctgamartgctctgt

SEQ ID NO: 2855 - DNA, 4626 bp, Homo sapiens
ggcgcagctccgacttcggacatggcgcacgctggcggtggcagcggtggcagcggtgccggcggccccgcgggccgggggctgagcggcgcccgctggggtcgctcgggctccgcaggccacgagaagctgccggtgcacgtagaagacgccctcacctatctggaccaggtgaagatccgctttggcagcgaccctgccacctacaacggcttcctggagatcatgaaggagttcaaaagccagagcatcgatactcctggagtcatcagacgtgtctcgcagctcttccacgagcaccctgacctcattgttggattcaacgcttttcttcccctcggatatagaatagacattcccaagaatggcaagttaaacatacagtygcctctgacaagccaggagaattcgcacaaccacggggacggtgcagaggacttcaagcagcaggtgccgtataaagaggacaaaccccaggtgcccctggagtccgattccgtggaattcaacaacgccatcagctatgtgaataagattaaaacccgcttcctagaccacccagaaatctacaggtcattcctggagatcctgcacacgtaccagaaggagcagctgaacacgaggggccggccattccgaggcatgtctgaagaggaggtgttcaccgaggtggccaacctcttccggggccaggaggacctgctctcagagtttggacagttcctgcccgaagccaagcggtctctgttcacaggaaacgggccgtgcgagatgcacagcgtgcagaagaacgagcacgacaagaccccggagcacagcaggaagcgctcccggccctcgctcctccgccccgtgtctgcacccgccaagaaaaaaatgaaacttcgtggtaccaaagacctgtccatcgctgcagtggggaagtacgggactctgcaggaattttctttctttgacaaggtccgccgggtgctgaagagccaggaggtgtatgaaaacttcctccgctgcatcgcactcttcaaccaggagctggtgtctggctctgagctcctgcagctcgtcagcccatttctggggaaatttccagaactctttgcacagttcaagtccttcctgggggtaaaagagctgtccttcgcgccacccatgagcgacagatccggggacgggataagccgggaaattgattatgcatcctgcaagcgcataggatccagctaccgggcactccccaaaacctaccagcagcccaagtgcagtgggaggacagccatctgcaaggaggtactgaacgacacctgggtctccttcccttcctggtctgaggactccacrttcgtcagctccaagaagacaccgtacgaggagcagcttcaccgctgtgaggacgagcgcttcgagttagacgttgtcctggagacgaacctggccacaatccgtgtgttggaaagtgtgcagaagaagctrtcycggatggcgccggaagaccaggagaagttccggctggacgactccctgggaggcacgtcggaggtgatccagcgccgtgccatttatcgcatctatggcgacaaggccccggagatcatcgagagcctcaagaagaaccctgtcaccgctgtccccgttgtcctgaaaagactgaaggccaaggaagaggagtggcgggaggcccagcagggcttcaacaagatctggcgggagcagtatgagaaggcgtacctcaagtcccttgaccaccaggctgtgaacttcaagcagaacgacaccaaggccctgcgctccaagagcttgctcaacgagatcgagagcgtctacgacgagcaccaggagcagcactcggagggccgcagtgccccctctagcgagccgcacctcatctttgtgtacgaggaccggcagatcctggaggacgcagcagcgctcatcagctactacgtgaagcggcagccggccatccagaaggaggaccagggcaccatccaccagctgctgcaccagttcgtgcccagcctcttcttctctcagcagctggacctgggcgcctccgaggagtcagctgatgaggaccgggacagcccccaggggcagaccacagaccccagtgagcggaagaagccggcgccaggaccccacagtagccccccagaggagaagggggccttcggggatgccccggccactgagcagccacccctgccgcccccagccccgcacaagcccctggacgatgtctacagcctattttttgccaacaacaactggtacttcttcctgcgcctgcaccagaccctgtgctccaggctgctgaagatctaccgccaggcgcagaagcagcttctggagtatcggaccgagaaggagcgggagaagctgctgtgtgagggccgcagggagaagggcagcgaccccgccatggagctgcggctgaagcagcccagtgaagtggagctggaggagtactacccggccttcctggacatggtgcggagcctgctggagggcagcatcgaccccacgcagtacgaggacaccctacgygagatgttcaccatccatgcctacgtgggcttcaccatggacaagctggtgcagaacattgcgcggcagctgcaccacctcgtgagcgatgacgtctgcctgaaggtggtggagctctacctgaacgagaagaagcggggtgccgctggtgggaacctgtcctcccgctgcgtccgcgctgctagggagaccagctaccagtggaaggctgagcgctgcatggccgacgagaactgcttcaaggtgatgttcctgcagcgcaaagggcaggtgatcatgaccatcgagctcctggacaccgaggaggcccagacggaggaccctgtggaggtccagcacctggctcggtacgtggagcagtatgtggggaccgagggcgcgtccagctcgcccactgagggcttcctcctgaaacctgtgttcctgcagaggaacctcaagaagttccgccgccggtggcagagcgagcaggcgcgggccctgcgcggtgaggccaggagctcctggaagcggctggtgggcgtggagagcgcctgcgacgtggactgccgcttcaagctcagcactcacaagatggtgttcatcgtgaactccgaggactacatgtaccgtcgcgggaccctctgccgggccaagcaggtgcagcccctggtcctgctccgccaccaccagcactttgaggagtggcacagccgctggctggaggacaatgtgacggtggaggcggctagcctggtgcaggactggctgatgggtgaggaggacgaggacatggtaccctgcaagacgctgtgtgagacagtgcacgtgcacggcctgcccgtgacccgctaccgcgtgcagtacagccgccgcccggcctcgccctgacccgccctcatgggcaccgggcaggcgcctcacagagcacagacgtgccctcggccttggtcgtgtcggggccgttttcttgaacgacgtgagaggcatctcccagcccctctgctgccggacagcgcactccagggcaggacgccgcccccgtggctcccggtctcctgtgggcctgctgtgtgccaaacctgagctacctgcacccgagccctggggctcagccccaccacaggggcgggtggacgtgctggccgaggaacaagcaatcatgtttgcgtccccgtccgtcacatgtgccaaatccctggcaggcagatggctcctgccccatattcttgccgtgtcttggaaaagtcacaggtgacagccctcctgaggcccacactttggagggggtccatgtccaagagaccctgacaaggaaggagttgagccctgggtaggcttgcttgaaaagtgagtccttccagaatattctcagagctgccagaaacatcatctgagggtttgggcatcagctctgcctggctggtgttcaggccctcagtcactttggaagtgagaagaacccttcagccaaacctttgggatcccatccagtattccctcagagccggcacgaccctgctgtggggcggcgggcccagtcgtgttcctgcagtgggcaccctaggcgtatgtgtatacaygcacagatatttattcctttcgcttttagtggttgttatttctgtagcagccaagtcctgcggctccctggggctgagatctccctttgtggaactccgagagccgccctgacagtcccagccgccacccaaggagccccatccgcccacccaccctgggacccacgcggccactccagggatcattgttgtccttttgtgaggggctgaggcgactgtcccatggaggcatccaaggctttctgtgccaagaatcccaagtgactggggctggggaccacttctccaggcctctctccccgaccatgagagcccctggccctggcccctgcacaccagtrggcccagaataaccgccacccttgccatcctgcaacagctggactcaagtttccaggaagtggagatgtgtttctagaagtttcctgtggaacctggaggctcctgaygcctttgactccagggcctgtaatcccagcactttaagaggccaaggcggatggatcacttgagcccagga

SEQ ID NO: 2856 - DNA, 2035 bp, Homo sapiens
ggcgcagctccgacttcggacatggcgcacgctggcggtggcagcggtggcagcggtgccggcggccccgcgggccgggggctgagcggcgcccgctggggtcgctcgggctccgcaggccacgagaagctgccggtgcacgtagaagacgccctcacctatctggaccaggtgaagatccgctttggcagcgaccctgccacctacaacggcttcctggagatcatgaaggagttcaaaagccagagcatcgatactcctggagtcatcagacgtgtctcgcagctcttccacgagcaccctgacctcattgttggattcaacgcttttcttcccctcggatatagaatagacattcccaagaatggcaagttaaacatacagtygcctctgacaagccaggagaattcgcacaaccacggggacggtgcagaggacttcaagcagcaggtgccgtataaagaggacaaaccccaggtgcccctggagtccgattccgtggaattcaacaacgccatcagctatgtgaataagattaaaacccgcttcctagaccacccagaaatctacaggtcattcctggagatcctgcacacgtaccagaaggagcagctgaacacgaggggccggccattccgaggcatgtctgaagaggaggtgttcaccgaggtggccaacctcttccggggccaggaggacctgctctcagagtttggacagttcctgcccgaagccaagcggtctctgttcacaggaaacgggccgtgcgagatgcacagcgtgcagaagaacgagcacgacaagaccccggagcacagcaggaagcgctcccggccctcgctcctccgccccgtgtctgcacccgccaagaaaaaaatgaaacttcgtggtaccaaagacctgtccatcgctgcagtggggaagtacgggactctgcaggaattttctttctttgacaaggtccgccgggtgctgaagagccaggaggtgtatgaaaacttcctccgctgcatcgcactcttcaaccaggagctggtgtctggctctgagctcctgcagctcgtcagcccatttctggggtgagcagctgacttcccagggctccctaggggggttctgttcctgtcaactccatctacttggtttttagttactgtttttgagcaatgattgtgcttttctaaaatcctgtttattaattgacgtgattgatawaattattgattcccatgcatttgtaaggagcaatacaccacctgggtaccctccagctggttcctttaccagtaacatctgtagtcagtatcctcaccagaatacagtgggtcctcgagtaatgccttttcatttaacactgttttaacaccgatgagaaaagaagacattcatttctggtctgagtggagtttgcacgttctccccatgtctgcgtggattttctcccacatcccaaagatgtgcatgttaggttaagtctaggttaagcggtgagtctccgtggtcccagcctgagtgagtgtggcggggtgagcgccctgcagtggggtggcgtcctgtccagggtgggtgccccactggtgctctgagctgctgggatagggtccggccacccaagatcctgaactggaataattgggtaaattgttattttacttgtttttactcatctttcttatctgtatgtgtggcttgcatttatttcagtgtttaatattagaagtgttttggtctctctttagaaatttggtgattgttttgtgaccaaaaatacgccgtaggaacgtcattcttgtttatgtgtcaattagcttgtggcaaaattggttttgttacacatcttttcaacttaaagacacagctttctaacacctgttgatgatgttgagtgaggacttactgtactgactctcacacaacccccgttctttccagactctccgtgttcctcatacacgtctggtgtgtgtgtttttatacagctttctcactgtggagggttgtgcgtccgccacagtgaagatactgaacggctcca

SEQ ID NO: 2857 - DNA, 4838 bp, Homo sapiens
ctcccacgggctggctggcaagyggccctggtgggtctgygggggcaggggcagccttcctggtttatctcyaccggcgcgatctgctcgtccgcctcggctccagaagctggggctcagggtccrgcgaggcaggaagcctgaggccacagcccagagcagcctgagtgcagtcatgtgggggcgactgctcctgtggcccctggtgctggggttcagcctgtctggcggcacccagacccccagcgtctacgacgagagcgggagcaccggaggtggtgatgacagcacgccctcaatcctgcctgccccccgcggctacccaggccaagtctgtgccaatgacagtgacaccctggagctcccggacagctcacgggcactgcttctgggctgggtgcccaccaggctggtgcccgccctctatgggctggtcctggtggtggggctgccggccaatgggctggcgctgtgggtgctggccacgcaggcacctcggctgccctccaccatgctgctgatgaacctcgcgrctgctgacctcctgctggccctggcgctgcccccgcggatcgcctaccacctgcgtggccagcgctggcccttcggggaggccgcctgccgcctggccacggccgcactctatggtcacatgtatggctcagtgctgctgctggccgccgtcagcctggatcgctacctggccctggtgcacccgctgcgggcccgcgccctgcgtggccggcgcctggcccttggactctgcatggctgcttggctcatggcggccgccctggcactgcccctgacactgcagcrgcagaccttccggctggcgcgctccgatcgcgtgctctgccatgacgcgctgcccctggacgcacaggcctcccactggcaaccggccttcacctgcctggcgctgttgggctgtttcctgcccctkctggccatgctgctgtgctacggggccaccctgcacacgctggcggccagcggccggcgctacggccacgcgctgaggctgaccgcagtggtgctggcctccgccgtggccttcktcgtgcccagcaacctgctgctgctgctgcattactcggaccygagccccagcgcctggggcaacctctatggtgcctaygtgcccagcctggcgctgagcaccctcaacagctgcgtggatcccttcatctactactacgtgtcggccgagttcagggacaaggtgcgggcagggctcttccaacggtcgccrggggacaccgtggcctccaaggcctctgcggaagggggcagccggggcatgggcacccactcctctttgctccagtgacacaaagtggggaaggctgtactgggtcgaacagggtcccttcccccacttcacgtccttcctgggacctcagaatgtgaccttatttggaaatagggttgttacaactgtcactagcrgaggtcactttggagaagggtgggccttacatccagtgtgggtggtgtcctcataagataaggagaggccaggcctggtggctcacgcctgtaatcccagcactttaagaggccaaggcggatggatcacttgagcccaggagttcaacaccagcctgagcaacatggtaaaaccccatctctaccaaaaatacaaaaattagctgggcttggtggctggcgcctgtaatcccagctactcaggagactgaggcagaaggatcgcttgaacctgggaggcagaggttgcagtgagccgagattgcgccactggactccagcctgcgtgacagagagcctgtctctaaattaattaattaattaatttaattcaattttaaaaagacgaaaagtgacggccaggtgcagtggctcacgcctataatctcagcactctgggaggccaagatggaggattgcttgaagccaggagtttgggaccagcctgggcaacatagggggatcccatctctacacacaaaaaaattttttaatgaaccaggcattgtggcatgcgcctatagtcccagccactcaagaggcacaggcgggaggatcacttgagcctgggaggttgtggttgcagtgagctatgattgtaccactgcactccagcctgggcaacagagcaagaccttgtctcaaaaataaacaaactaaaattaaaaaaagaagacgagagatagtgggtgtggtggctcacacctgcaatcccagcactttggaaggccgaggtgggcagatcatctgaggccaggagttcaagaccagcctggctaacatggtgaaatcctatctctaccaaaaatacaaaaattagccaggcgtggtggtgggcacctgtactggggaggtgcccacccagctactggggaggctgagtcaggagaatcgcttgaacctgggaggcggaggttgcggtcagctgagatggtgccactgcactccagcctgggcgaaagagcgactctgtctccaaaaaaaagagaagaggagaggacacagagacacacagagaagaaagccatgtggcggcagaggcagagatgggagtgatgcggacggacacaaactaagggatgccacgatgccaagcacagccaacagccaccagcagccaggagacaggcctgggacgggctctccctcacagcctccagagggaaccagccctgccaccaccttgaccctggacttctggcctgcagaactgtgagacaataaactctcattgttttaagctgcctggcatgtggcactttgtcagggcagcccaggaatctgaaacaggatcaaactctgcttcctgggccctgccagcatctctggctcggctttctgggctggatgcagcccacgacgcactggtgtctgagatggggctggagctggggctggggctgcaktccctggagactcactgcaagttcctgcccaggaggctgagggcaccccatcctcagtgcccaatgctgtggccccaccaggcccagagcctggttggccattctcatgcccaccagcttctggctttgggatgtctcttgagcaaccagaatagcacccccaactctgctccccaaaacccatcactagcacggctcagcctcctgctatcccctgactgctggggaccctcgccttccctcctctcacctgcaggctgatccttcttttcactttctgtcaatgtcaccagggataaggtgggacaatggggggtgggggtggacagtgtgtgctggggggttcgggtgctgcagacctggaactcccttctgccaggatgtyggcagccggttgtaagccttgcaygggacagaccacacccaccgcaacctcatcccctcagcactaaccacatccactctcaaccccgtccccttcgcactgaccacacccaccccgttcggccccgccccccgcactgaacacwcccgccctcaaccccgcaccctccgcactcacctccccctcgccgctcgaccccgccctcaccacactgaccaccctcaacccattgcgcccagtccccaccacagtgaccacaccctcactggctcggccctgcccccagtatactgaccattccccagccacttcccttccgcacttaccactcccccagccacgcccctccccgctgaccgctcctccagccccgcctcccccgtacaggcagagcgcccgcccacctctatgctgcgttctcctgactttacgttggcccctcctctgccaagcccccaggggagccctccctggcgtccgagggtgggagtcggggtgtggcaggccgcggtggggggcggcagtggctccgcgcactcacccgggccccgggcaggggcgcgctccacttcgttgcacgcgggtccggcgcacagttcccgggcgagtgggctgtgsgtgctgacgttgtagaagcgagtggcctcgaaggctacgggacgagggtggcgggtgaccaagtgcaggcgcgacgggtcagggaccgggccgggccgggggtgcgggcgcgcgggcctaccgggttcgtagtagtcgtacacggagactggcagcgccgacgtcctgcccaccacgcactcccggagagcacggaaccgcacgcacgtcaggcaccggctggggatctgtggggcagcggcgggcgcaggctcgacccgggccaggaggcccggggcgctgagctcaggcccagaactggctgatttcagggatacccaggacgcgtgaaacacagaagaaacgtgatcccattttctttttttcttttacttttctttttttttttttttcctgagacagagtctcgcgctgttgcccaggctggagtgcagtggcgtgatctcggctcactgcaagctcggcctcctgggttcaaatgattctcctgcctcagcctcccaagtagctgggataacaggcgcccaccaccgcaccctgctaattttttgtatttttgatcaagacggagtttcaccatgttggccaggctggtctccaactcctgccctcaagtgatccgcctcggtcccattttttattctttgggtccttccatcccactgggaaaacgtctcaggtggcctctgaaacaccactcctttttgtgtgtgtgcacgcatggctgagcatgtgtgggtgggagtcagcacattcacgatactgtgcaatcatcacctctgtctagttacagracggtttctttctcccccaaagaaaccccatcgccatcagcactcactccccactcccccagcccctggcaaccacaaatctttccaactctacggatttgcctgttctgggcatttcatgtcaatggawtcatgtactctgtg

SEQ ID NO: 2858 - DNA, 2647 bp, Homo sapiens
gagctgtaagtaggtgggtgtggtgggagcctctgcaatcccagcattcccttcgtgccgctaccaagatggcggcgcccatcttgcggtccttttcctggggccggtggtctggtaccctaaatctctcagtattgttgcccttggggctgcgtaaggcccactcgggcgctcaggggttactggcagcgcagaaggctcgaggtctgttcaaggacttcttcccggagacggggacgaaaatagagctcccagagctcttcgaccgtggcacggcgagttttccccaaaccatttactgtggcttcgaccccacggcagactcgcttcatgtgggtcatctacttgcgctgctgggyctgtttcatttgcagcgagcgggccacaacgtgatcgcgctggtgggaggcgccacggcgcgcctgggagacccgagcggccgtaccaaggaacgcgaggcgctggagacagagcgcgtgcgagccaacgcgcgagctctgcgcctagggcttgaggccctggcggctaatcaccagcagcttttcactgatgggcgctcctggggcagcttcactgtgctggacaactcggcctggtaccagaagcagcacctggtggacttcctggcggcagtgggggktcacttccgcatggggacgctgctgagccggcagagcgtgcagctgcggctcaagagccccgagggcatgagcttggccgagttcttttaccaggtgctccaggcctatgacttctattacctcttccagcgttatggatgcagggtccagctgggcggatctgatcaactaggcaacatcatgtccggatatgagttcatcaacaagttgactggagaagatgtatttggaatcaccgttcctctaattacaagtacaactggagcaaagctgggaaagtctgctggcaacgctgtttggctaaacagagataagacatctccatttgaattgtatcaattctttgtcaggcaaccggacgattcagtggaaaggtacctgaagctgttcactttcctgccccttccagagattgatcatatcatgcagctgcatgtcaaagagccagaaagrcggggtcctcagaaacgactggcagcagaagtaacaaagcttgttcatggacgagaaggattggattctgctaaaaggtgtacacaagccctttatcacagtagcatagatgcactggaggtcatgtctgatcaggagttaaaagagttgtttaaagaagctccattttctgaattttttctcgatcctggaacaagtgtcctagatacttgccgcaaagcaaatgccattccagatggtccccgagggtatcgaatgataacagaaggcggagtcagcataaatcaccaacaagtaacaaatcctgagagtgttttaattgttggacaacatattctcaagaatggactttccttacttaaaataggaaaaagaaatttctacattataaaatggcttcagttgtgatgaaaagtccttctggttgtccaaataaacttacccatcattcattctcaagacctctgaagggttggctccagaacttagacctttgcttatgcaaatcagaaaaacagaatggactaggactcagtgtgagtaacttcattatttttatgggccggttaataaatatttgtttaataatgggatgttttattttctgatgtacaaagcttgattaccatagaaaaccatgattttcagggttaatctctttttaaaattatacttcagaagagaaagaaatgctgctttcctatcttacccttcctgctctcctttttgtagtgatgaggaacaatgaaaaagaggtagtgtaaggaattgtgaggctgggcatgcctggtgtaagtgctccactttagagatgtaccttaattactactgtatttgcaaattaagggaaatttaggtcatcatttgattttctgaaatctaaaaggaactgaccatcattaccaagtcttwctagataatcaagggtagatggctgtttttaatgtaggaattaatgtaggcattcctgctttcaggtttaagtatgaatcaaagcatattttaatttgctagtgcaaatggacccagaattggaagggctatgtaactacacartatgcacaccacagccatgtcagtgtcacagatcctcttgtgcattcagctttcttaaaaacacatcaaaggctgcaaagaagctcagaaaaaactaaattgaaggacaggtggaatacaatgactctatgtgaggaacttgccaactcacatctttcaaagccagatcagcttatatagtacatgcattatagtcatatgaaatgttgtcttggtgctttcttcttggaggactatggcagcagctttaagactactaacaaagattattacacaggtcatcttatccacaggcaaactgctttgcacaactagaacattaacagttstttttaagttaagttcagatgaaactgtcacaagacagacttgatgtattttatatatactgggaaactttagaaacagccatttattatttggattaaatgtgtgatgtgttctgcaatttggaatacacttttcagtttatagccagtctccacatgagcagattc

SEQ ID NO: 2859 - DNA, 2713 bp, Homo sapiens
gagctgtaagtaggtgggtgtggtgggagcctctgcaatcccagcattcccttcgtgccgctaccaagatggcggcgcccatcttgcggtccttttcctggggccggtggtctggtaccctaaatctctcagtattgttgcccttggggctgcgtaaggcccactcgggcgctcaggggttactggcagcgcagaaggctcgaggtctgttcaaggacttcttcccggagacggggacgaaaatagagctcccagagctcttcgaccgtggcacggcgagttttccccaaaccatttactgtggcttcgaccccacggcagactcgcttcatgtgggtcatctacttgcgctgctgggyctgtttcatttgcagcgagcgggccacaacgtgatcgcgctggtgggaggcgccacggcgcgcctgggagacccgagcggccgtaccaaggaacgcgaggcgctggagacagagcgcgtgcgagccaacgcgcgagctctgcgcctagggcttgaggccctggcggctaatcaccagcagcttttcactgatgggcgctcctggggcagcttcactgtgctggacaactcggcctggtaccagaagcagcacctggtggacttcctggcggcagtgggggktcacttccgcatggggacgctgctgagccggcagagcgtgcagctgcggctcaagagccccgagggcatgagcttggccgagttcttttaccaggtgctccaggcctatgacttctattacctcttccagcgttatggatgcagggtccagctgggcggatctgatcaactaggcaacatcatgtccggatatgagttcatcaacaagttgactggagaagatgtatttggaatcaccgttcctctaattacaagtacaactggagcaaagctgggaaagtctgctggcaacgctgtttggctaaacagagataagacatctccatttgaattgtatcaattctttgtcaggcaaccggacgattcagtggaaaggtacctgaagctgttcactttcctgccccttccagagattgatcatatcatgcagctgcatgtcaaagagccagaaagrcggggtcctcagaaacgactggcagcagaagtaacaaagcttgttcatggacgagaaggattggattctgctaaaaggtgtacacaagccctttatcacagtagcatagatgcactggaggtcatgtctgatcaggagttaaaagagttgtttaaagaagctccattttctgaattttttctcgatcctggaacaagtgtcctagatacttgccgcaaagcaaatgccattccagatggtccccgagggtatcgaatgataacagaaggcggagtcagcataaatcaccaacaagtaacaaatcctgagagtgttttaattgttggacaacatattctcaagaatggactttccttacttaaaataggaaaaagaaatttctacattataaaatggcttcagttrtgatgaaaagtccttctggttgtccaaataaacttacccatcattcattctcaagacctctgaagggttggctccagaacttagacctttgcttatgcaaatcagaaaaacagaatggactaggactcagtgtgaggtctctttttttagctcactgcctgcacagctccagccgcctggcttctcatagtagccactgatatttggagttcttacaacatggcagacattgacaacctgcctagctagggtagttaaaagaggagtgaatgctctcaaaaacctgcaagttaaaggtgcacagatagaagccaaattctatgaggaagttcaygatcttgaaaggaagtatgctgttctctatcagcctctatttgataagcaatctgagattactaatacaatttatgaacctacagaggaagaatgtgaatggaaaccagatgaagaagatgagatttcagaggmgttgaaagaaaaggccaagactgaagatgagaaaaacgatgaagaaaaagaagaccccaaaggaattcctgaattttggttayctgtttttaagaatgttgacttgctcagtgatatgcttcagaaacatgatgaacctattctgaagcatgtgaaagataccaaagtgaagttctcagatgctggcctgcctatgagttttgtcttagaatttcaatttgaacccagtaaatattttacaaatgaagtgctgacaaagacatataggatgagttcctgagagtggagatctggatgatgmtgctgaagctatccttgctgcagacttcaaaattggtcactttttacgtgagcatacaatcccaagatcagtgttatagtttactggagaagctactgaagatgatgatgatgagtatgatgaagaaggtgaagaagcagatgaggaagaggacaaaggagatgaggaaaatgatccagactatgacccgaagaaggatcaaaacccagcagagtgcaagcagcagtgaagcaggatatatgtggccttgaggataacctgcactggtctaccttctgcttccctggaaaggatgaacttacatcatttgacaagacctgttttcaagttatttgttgtttgtttgcttgtttttgtagcctaaaataaaaatttcaaatacaattttagttcttacaagatgtcttaattttgtaccaattcaggtagaaggagaggcctagct

SEQ ID NO: 2860 - DNA, 6617 bp, Homo sapiens
ggaggctttcgactgagggctagcgaggggagcasggctggagcagggctggagcagggctggagcagggctggagcagggctgaagcagggccgcggaccccgcacgctcctgcgggccccgcggagccattgcggccgaggcctcggcaggcgccagcggagagctagccgcatcttcgggggcagcccggcagctgccggcggcgcggcgagagagcggctgacagaggggatgcgaggtcctccagcagcctgacctgagtgggttagtgatccagagaaaccagcaggccaacttggtcaggaaggttcgggaagctgttggagcagtgtggggaatttcccaccaggatgagtatgattggctgtgattttagatcgtaaagctgaaaattgaaatcatgaaagtagacaggactaaactgaagaagacacctactgaggctcctgcagactgcagagccttaatagacaaactcaaagtttgtaatgatgagcarcttctcttggaactgcagcagatcaaaacatggaacattggaaagtgcgagttatatcactgggtggacctgttggaccgcttcgatggaatactggcagatgctggacagacagtggagaatatgtcatggatgctcgtatgtgataggccagaaagagagcaactgaaaatgcttctcttggctgtgttgaacttcacagccttgctcattgagtacagcttttcccggcatctgtacagttccatagagcatttgacaactttattggcttcctctgatatgcaagtggtgctggcagtcctcaatctcctatatgtatttagcaaaagatcaaactacatcactcgtctgggatctgacaagaggaccccgctgctaactcggctacaacatttggcagagagctggggtggaaaggagaatggctttggacttgcagaatgttgcagagacttgcatatgatgaaatatccacccagtgcaactacactacactttgaattctatgcagatcctggggccgaggtcaaaattgagaaaaggacaactagtaacacactacattatattcacatagagcaacttgacaagatttcagaaagcccttctgaaatcatggaatctcttaccaaaatgtacagcattcctaaggataagcagatgctgttatttacacacatacgactggcccatggcttttctaatcacaggaagcgattgcaggcagttcaggccagactgcatgcaatatctatattagtgtattccaatgccttgcaggaatcagcaaacagtatcttgtataatggcttgatagaggagttggtagatgtccttcagataacggataagcagcttatggagattaaagcagcttctttacgaacattaacatcaattgtccacttggagagaactcccaaactcagcagtattattgactgtactggaactgcctcctaccatggatttttgccagtgcttgtaaggaactgtatccaggccatgattgatccttccatggatccataccctcaccagtttgccactgctctcttctcttttttataccatctggccagctacgatgctggtggtgaagccttggtctcctgtggaatgatggaagccttattgaaggtcataaagtttcttggcgatgaacaggaccagataacatttgtcaccagagccgtcagagtggttgaccttatcaccaacctggatatggcagcttttcaatcccatagtggactttctatcttcatttatagacttgagttgtctgaagagctggaggcaatattaggaggtatcagtctccctgaaggtgtggacccctcttttctggctgccctgcctgatgacatccgtcgggaagttctacagaaccagctaggcattcgtccaccaacccggactgccccctccacaaatagctcagcgcctgcagtggtggggaatcctggtgtgactgaagtgagccctgagtttctggctgccctgcctccagccattcaggaggaagtactggcacagcagagagctgagcagcagcgacgagaactagcacagaatgccagctcagacacccctatggaccctgtgaccttcatccagactctgccctcagacctgcgccgtagtgtcctagaggatatggaggacagtgtgttagctgtgatgccacctgacattgcagctgaggctcaagccctgagacgagagcaagaagcccggcagcgacagctcatgcatgagcgtctgtttgggcacagtagcacctccgcrctctctgctattctccgaagcccggagcgagactccatctcaacaaaaagctggtgggggtggggggcttcattctctaagctgtacagcagccctgaaaggatgatgtacagtcattgtaaagtgcctggtacatagccttctggcagtaatgtagatactctcctccgcctccgaggacggctccttctggaccacgaagccctttcttgtctcttggtcctactttttgtggatgagccaaagctcaatactagccgtctacaccgagtactgagaaatctctgctaccatgcccagacccgccactgggtcatcygcagtctgctctccatcttgcagcgcagcagtgagagtgagctatgcattgaaacacccaaactcactacaatatccatggatgcagccctaggctgcaggactaatatatttcagatccagcgttcaggggggcgtaaacataccgagaagcatgcaagcggtggctccaccgtccacatccatccccaagctgctcctgttgtctgcagacacgttttggatacactcattcaattggccaagttatctccattttataagtgcgagactaaagctcaggaaaagtttgctcttgtcttttccctatcaggaaggctcatcctctgtgaagacgtcctagaccaagccttgtcctccttttcccggcaggtatttcccagccacttcacacagcagcggaccaaagaaacaaactgtgagagtgatcgggaaagrggcaataaggcctgtagcccatgctcctcacagtcctccagcagtggcatttgcacagacttctgggacttattggtaaaactggacaacatgaatgtcagccggaaaggcaagaactccgtgaagtcagtgccagtgagcgctggcggtgagggggaaacctctccatacagcctcgaggcctctccactggggcagctcatgaacatgttgtcacacccagtcatccgccggagctctctcttaactgagaaactcctcagactcctttctctcatctcaattgctctcccagaaaacaaggtgtcagaagcacaggctaattctggcagcggtgcttcctccaccaccactgccacctcaaccacatctaccaccaccaccactgccgcctccaccacgcccacaccccctactgcacccacccctgtcacttctgctccagccctkgttgctgccacggctatttccaccattgtcgtagctgcttcgaccacagtgactacccccacgactgctaccactactgtttcaagctggggcttactccttctgtcttctttttctcaggtgttgacatcccactcttgttctgaggaaggcttagaggatgcagccaacgtactactgcagctctcccggggggactctgggacccgggacactgttctcaagctgctactgaatggagcccgccatctgggttataccctttgtaaacaaataggtaccctgctggccgagctgcgggaatacaacctcgagcagcagcggcgagcccaatgtgaaaccctctctcctgatggcctgcctgaggagcagccacagaccaccaagctgaagggcaaaatgcagagcaggtttgacatggctgagaatgtggtaattgtggcatctcagaagcgacctttgggtggccgggagctccagctgccttctatgtccatgttgacatccaagacatctacccagaagttcttcttgagggtactacaggtcatcatccagctccgggacgacacgcgccgggctaacaagaaagccaagcagacaggcaggctaggttcctccggtttaggctcagctagcagcatccaggcagctgttcggcagctggaggctgaggctgatgccattatacaaatgtcggagtctagccagtcagaggcgtctgtccggagggaggaatcacccatggatgtggaccagccatctcccagtgctcaagatactcaatccattgcctccgatggaaccccacagggggagaaggaaaaggaagaaagaccacctgagttacccctgctcagcgagcagctgagtttggacgagctgtgggacatgcttggggagtgtctaaaggaactagaggaatcccatgaccagcatgcggtgctagtgctacagcctgctgtcgaggccttctttctggtccatgccacagagcgggagagcaagcctcctgtccgagacacccgtgagagccagctggcacacatcaaggacgagcctcctccactctcccctgcccccttaaccccagccacgccttcctcccttgacccattcttctcccgggagccctcatctatgcacatctcctcaagcctgccccctgacacacagaagttccttcgctttgcagagactcaccgcactgtgttaaaccagatcctacggcagtccacgacccaccttgctgatgggccttttgctgtcctggtagactacattcgtgtcctcgactttgatgtcaagcgcaaatatttccgccaagagctggagcgtttagatgaggggctccggaaagaagacatggctgtgcatgtccgtcgtgaccatgtgtttgaagactcctatcgtgagctgcatcgcaaatcccccgaagaaatgaagaatcgattgtatatagtatttgaaggagaagaagggcaggatgctggygggctcctgcgggagtggtatatgatcatctctcgagagatgtttaaccctatgtatgccttgttccgtacctcacctggtgatcgagtcacstacaccatcaatccatcttcccactgcaaccccaaccacctcagctacttcaagtttgtcggacgcattgtggccaaagctgtatatgacaaccgtcttctggagtgctactttactcgatccttttacaaacacatcttgggcaagtcagtcagatatacagatatggagagtgaagattaccacttctaccaaggtctggtttatctgctggaaaatgatgtctccacactaggctatgacctcaccttcagcactgaggtccaagagtttggagtttgtgaagttcgtgacctcaaacccaatggggccaacatcttggtaacagaggagaataagaaggagtatgtacacctggtatgccagatgagaatgacaggagccatccgcaagcagttggcggctttcttagaaggcttctatgagatcattccaaagcgcctcatttccatcttcactgagcaggagttagagctgcttatatcaggactgcccaccattgacatcgatgatctgaaatccaacactgaataccacaagtaccagtccaactctattcagatccagtggttctggagagcattgcgttctttcgatcaagctgaccgtgccaagttcctccagtttgtcacrggtacttccaaggtacccctgcaaggctttgctgccctcgaaggcatgaatggcattcagaagtttcagatccatcgagatgacaggtccacagatcgcctgccttcagctcacacatgttttaatcagctggatctgcctgcctatgagagctttgagaagctccgccacatgctactgttggctatccaggagtgctctgaaggctttgggctggcctaataaggccctgcccaactccgtggggttttttttaccattgttggacctggggaggggggagttaaaaaaagaaccagaaagaaattgtcaaaaaccaataaatgaaatccmccaactcaccgtgtgtgtcccagctgccccatcttccccagcgcatacctgttcctcttctcattctctccccgccgcctgtttcctcaccttctctcccctttccatgccgtccatgatccccaccccatgtgttttaaaaaggcagtagcctttgcagggacctgtctgtcccaactgtttgaacagtgtgctcctcagattctgtgttcagaaggatttgctgcattgagacttgaaacctttggataggggaaaaaattatatatatatatatttttttgttctgtttgcatttcttaatttgtgcttggaatgtgttgatgtgcacagctaatgattcaatgcgagacaagattggcgtctgtgttgtggaggtttcaaataaagagcactcttcataactcacttttcacaatggagtttttttcaaacttaaaaaaaaaaacaaaaaactcttaagcacatgctaggcatctggagaaaagatkgattctccaggaaaccatccctgccctacccgcttgcccacctgcctccaccactggtgcaacttcctcct

SEQ ID NO: 2861 - DNA, 11772 bp, Homo sapiens
cagatgcaacgactgccatcatcaagttacttgaagaaatctgtaatcttggaagggaccccaaatacatctgtcagaagccatcratccagaaggcagatggcactgccactgctcctcccccaaggtctaatcatgccgcagaagaagcctctagtgaggatgaggaggaagaggaagtacaggccatgcagagctttaattctacccagcaaaatgaaactgagcctaatcagcaggttgttggtacagaggaacgtattcctattcccctcatggattacatccttaatgtgatgaaatttgtggaatctattctgagcaacaatacaacagatgaccactgccaggaatttgtgaatcagaaaggactgttgcctttggttaccattttgggtcttcccaatctgcccattgactttcccacatctgctgcctgtcaggctgttgcaggtgtctgcaaatccatattgacactgtcacatgaacccaaagtccttcaagagggtctccttcagttggactccatcctctcctccctggagcccttacaccgccccattgaatcccctgggggctcagtgttgttgcgagaactggcttgcgcaggcaatgttgctgatgctaccctctcagcccaggccacacctctgctgcatgcactcactgctgcccatgcctacatcatgatgtttgttcatacttgcagagttggacagagtgaaattcgttccatctccgtaaaccagtggggctctcaattgggtctgagtgttttgagcaagctgagccagttatactgttccctggtgtgggaaagcactgtcctcctctctctgtgtaccccaaacagcctaccatctgggtgtgaatttggccaggcagatatgcagaaactggttccaaaggatgagaaggcaggtacgacccagggcggaaaaagatcagatggggaacaggatggagcagctggaagtatggatgcttctacccagggcttattagaaggcattgggctagatggtgacacattggctcccatggagacagatgaacctactgcttcagactctaagggcaaatctaaaatcacaccagcaatggctgccagaattaagcaaatcaagcctttgttatcagcttcctccagattaggccgagcacttgctgagctatttggacttcttgttaaactttgtgtgggatctcctgtccgccagagaaggagccatcatgctgccagcaccactacagcaccgacacctgccgcgcgatcaacagcctcagctctcactaagctcttgactaaggggttatcttggcagcccccaccatatacacctactccccgattcaggctgacattcttcatctgttcagttggtttcacatccccaatgctgtttgatgagaggaagtatccctaccacctcatgctgcaaaaatttctctgctccggaggccacaatgctctttttgaaactttcaactgggctctgtccatgggaggtaaagttcctgtttctgagggattggaacactcagacttgcctgatggcacaggagaattcctagatgcctggcttatgctggtggagaagatggtgaatcccaccacggtgcttgaatctccacattcgctgcctgccaaattgcctggaggtgtccagaactttccccagttcagtgcactgcgcttccttgtggtaactcagaaagcagcctttacttgcatcaaaaacttatggaaccggaaacccctgaaggtatatggtggacgaatggctgaatcgatgctggccattctatgccacatcctccgaggagaacctgtgattcgagagagactaagcaaggagaaggaggggtctcgaggagaagaggatacagggcaagaggaaggtggctcccgccgggaacctcaagtcaaccagcaacaactgcaacagctcatggacatgggcttcacaagggaacatgcaatggaggcactgttgaacaccagcaccatggagcaggccacagagtaccttttaacccaccctcctccaatcatgggaggagttgttcgggatctcagcatgtctgaagaggaccagatgatgagagcaattgctatgtctctgggacaggatattccaatggatcaaagggcagagtcacctgaggaagttgcttgccggaaggaggaagaggaacggaaagctcgggaaaagcaggaggaggaagaggctaaatgtctagagaagttccaggatgctgacccgttggaacaagatgagctccacactttcacagatactatgttgccaggctgcttccaccttcttgatgagctgccagacacagtataccgtgtgtgtgacctgatcatgacagcaatcaaacgtaatggagcagattatcgtgacatgattctgaagcaagtagtcaatcaggtgtgggaagctgctgatgtattgatcaaagctgctcttcccctgacaacaagtgacacaaaaaccgtgtcagagtggataagtcagatggccacactgccccaggcctccaatttggctactagaatcttgcttttaacgctactttttgaggagttgaagctaccttgtgcttgggtggttgaatcaagtggcatccttaatgtcctaatcaaactcttggaagtggttcagccctgcctccaggcagccaaggagcagaaggaagtccagaccccaaagtggatcacaccagtgttgctcctgattgatttctatgaaaagacagccatctcctcaaaaaggagagcccagatgactaagtacctgcaatccaacagcaacaactggcgctggtttgatgatcgctctgggcgttggtgtagttacagtgcaagcaacaatagcactattgattctgcctggaaatctggagagacaagcgtgcgattcactgcaggccgaagaagatacacggtccaattcactacaatggtgcaggttaatgaggaaacagggaaccgacgccctgtgatgctgactctcctcagggtacctcggctgaataaaaattcaaaaaacagcaatggacaggaactagagaagacgctggaagaaagcaaagaaatggatatcaaacgtaaagaaaataaaggcaatgatacccctttggccctagagagtacaaacactgaaaaggagacaagcctggaggaaacaaaaatcggggagatcctgatccagggcttgacagaagatatggtgactgttttaatccgggcctgcgtgagcatgctgggagtccctgtggacccagatactttgcatgccacccttcgtctctgtctgaggctcacccgggaccacaaatatgccatgatgtttgcagaactgaagagtacccgcatgatcttgaatttgacccagagctcaggcttcaatgggtttactcccctggtcacccttctcttaagacacatcattgaggacccctgtacccttcgtcataccatggaaaaggttgttcgctcagcagctacaagtggagctggtagcactacctctggtgttgtgtctggcagcctcggctctcgggagatcaactacatccttcgtgtccttgggccagccgcatgccgcaatccagacatattcacagaagtggccaactgctgtatccgcatcgcccttcctgcccctcgaggctcaggaactgcttcagatgatgaatttgagaatcttagaattaaaggccctaatgctgtacagctggtgaagaccacccctttgaagccctcacctctgcctgtcatccctgatactatcaaggaagtgatctatgatatgctgaatgctctggctgcataccatgctccagaggaagataaatctgatcctaaacctggggttatgacccaagaggttggccagctcctgcaagacatgggtgatgatgtataccagcagtaccggtcacttacgcgtcagagcagtgactttgatacgcagtcaggtttttccattaatagtcaggtctttgctgcagatggtgcctccactgagacttccgcatctgggacctcccaaggagaggcttcaactccagaggagtctcgagatgggaagaaagataaagaaggggaccgggcctctgaggaaggcaaacagaaaggcaagggcagcaaacctttaatgcctacctccactatccttcgtcttctggcagagttggtgaggtcctatgttggtattgctaccctgattgccaactacagctacactgtgggccagtctgaactgatcaaagaggactgcagtgtgctagcttttgttctggaccacctgctcccacatacccagaatgcagaagacaaggacacccctgccttggcccgcctgttcctcgcaagcctggctgctgcagggagtggcacagatgcccaggtggccctagtgaatgaagtaaaagcagcccttggacgggcactggctatggctgagagtacagagaaacatgccaggcttcaggcagtgatgtgtatcatcagtactatcatggagtcctgcccctccacctccagcttctacagcagtgccacagcgaagacccagcacaatggcatgaacaacatcattcggcttttcctgaagaagggactggttaatgacctggccagagtacctcacagcttagacctgtccagtcccaacatggccaacacagtcaatgctgctctgaagcctttggaaacactttcccggattgtgaaccagcccagtagcctttttggcagcaagagtgcttctagcaagaacaagtctgagcaggatgcccaaggagcctctcaagattccagtagcaaccagcaggacccaggcgagcctggggaagcagaagtgcaggaggaggatcatgatgtcactcagacagaggtggcagatggggatatcatggatggggaggctgaaaccgactcagtggtgattgctgggcagcctgaggtgctcagttcacaagagatgcaggttgagaatgagctggaggacctgatagatgagttgcttgagagggatggcggatctgggaacagtacaattatagtgagcagaagtggagaggatgaatcacaagaggacgtgctgatggatgaagctccttccaacctcagccaagcttccaccttgcaggccaaccgagaagattccatgaatatcctggaccctgaggatgaggaggagcacactcaggaagaggacagcagtggcagtaacgaggatgaggatgatagtcaggatgaagaggaggaggaggaggaagatgaggaagatgatcaggaggatgatgaaggtgaagagggagatgaagacgatgacgacgatggctctgagatggaattggatgaggattatcctgatatgaacgcttctcccttggtccgatttgagcgctttgaccgggaggatgatctcatcattgagtttgacaacatgttctccagtgctacagacatccccccatccccaggaaatatccctaccacccatccactgatggtgcgccatgcagaccacagttctctgacactgggcagtggctcttcaacaactcgtctcacccagggcatcgggcgcagtcagaggaccctaaggcagctgacggccaatactggccacaccattcatgttcactaccctgggaatcgccagcccaaccctcctcttatactgcagaggttgcttggtccctcagctgctgctgacatccttcagctgagcagcagccttcccctacaaagccggggtcgggcccgcctcctggtaggcaacgatgacgtccacatcatcgcccgttctgatgatgagctgctggatgactttttccatgatcagagcacagctaccagccaagcaggcaagtttgtgtgcatccccacagccctgacccgctggacagaagaatgcaaagttctcgatgctgagagcatgcatgactgtgtttcagtggttaaagtgtccattgtcaatcacctggaattcctgagggatgaggagctggaagaaaggcgagagaagcgcaggaaacaactggctgaggaagaaacaaagataactgataaaggcaaagaagataaggagaacagggatcagagtgcacagtgtactgcatctaagtcaaatgactccactgaacagaatctctcagatgggacgcctatgcctgacagctacccaacaaccccatcttcaactgatgcagctacatctgagtccaaggagacccttggcactctgcaatcctcacaacagcaaccaacactcccaaccccaccagctttgggagaggttcctcaggagctgcagtctccagctggagaagggggcagctctacacagctattgatgcctgtagagccagaggaattgggtcccacaaggccaagtggggaagcagaaacaactcagatggagttatccccagctcccactataacctcactttccccagagagagctgaggattctgatgcactgacggctgtcagcagtcagctagaaggctctcctatggatacaagcagcctggcttcctgtaccttagaggaggctgtgggtgacacttcagcagctggcagttctgagcagcccagagcaggcagctccactcctggggatgccccaccagctgtggcrgaagtgcaaggcaggagtgatgggtcaggggaatctgcccagccacctgaggacagctccccacctgcatcctctgagagctcttccaccagagattctgccgtggccatttctggagcagattcccgaggaatcctagaagagccgttgccttcaacaagcagtgaagaagaagatccccttgcgggtatcagtctccctgaaggtgtggacccctcttttctggctgccctgcctgatgacatccgtcgggaagttctacagaaccagctaggcattcgtccaccaacccggactgccccctccacaaatagctcagcgcctgcagtggtggggaatcctggtgtgactgaagtgagccctgagtttctggctgccctgcctccagccattcaggaggaagtactggcacagcagagagctgagcagcagcgacgagaactagcacagaatgccagctcagacacccctatggaccctgtgaccttcatccagactctgccctcagacctgcgccgtagtgtcctagaggatatggaggacagtgtgttagctgtgatgccacctgacattgcagctgaggctcaagccctgagacgagagcaagaagcccggcagcgacagctcatgcatgagcgtctgtttgggcacagtagcacctccgcrctctctgctattctccgaagcccggctttcaccagtcgcttaagtggcaaccgtggggtccagtatactcgccttgctgtgcagagaggtggcaccttccagatggggggtagcagcagccataacaggccttctggcagtaatgtagatactctcctccgcctccgaggacggctccttctggaccacgaagccctttcttgtctcttggtcctactttttgtggatgagccaaagctcaatactagccgtctacaccgagtactgagaaatctctgctaccatgcccagacccgccactgggtcatcygcagtctgctctccatcttgcagcgcagcagtgagagtgagctatgcattgaaacacccaaactcactacaagtgaggaaaagggcaaaaagtcgagcaagagctgtgggtcaagtagccatgagaaccgtcccctggacctgctacacaagatggagtcaaagagctccaaccagctttcctggctctcagtatccatggatgcagccctaggctgcaggactaatatatttcagatccagcgttcaggggggcgtaaacataccgagaagcatgcaagcggtggctccaccgtccacatccatccccaagctgctcctgttgtctgcagacacgttttggatacactcattcaattggccaaggtatttcccagccacttcacacagcagcggaccaaagaaacaaactgtgagagtgatcgggaaagrggcaataaggcctgtagcccatgctcctcacagtcctccagcagtggcatttgcacagacttctgggacttattggtaaaactggacaacatgaatgtcagccggaaaggcaagaactccgtgaagtcagtgccagtgagcgctggcggtgagggggaaacctctccatacagcctcgaggcctctccactggggcagctcatgaacatgttgtcacacccagtcatccgccggagctctctcttaactgagaaactcctcagactcctttctctcatctcaattgctctcccagaaaacaaggtgtcagaagcacaggctaattctggcagcggtgcttcctccaccaccactgccacctcaaccacatctaccaccaccaccactgccgcctccaccacgcccacaccccctactgcacccacccctgtcacttctgctccagccctkgttgctgccacggctatttccaccattgtcgtagctgcttcgaccacagtgactacccccacgactgctaccactactgtttcaatttctcccactactaagggcagcaaatctccagcgaaggtgagtgatgggggcagcagcagtacagactttaagatggtgtcctctggcctcactgaaaaccagctacagctctctgtagaggtgttgacatcccactcttgttctgaggaaggcttagaggatgcagccaacgtactactgcagctctcccggggggactctgggacccgggacactgttctcaagctgctactgaatggagcccgccatctgggttataccctttgtaaacaaataggtaccctgctggccgagctgcgggaatacaacctcgagcagcagcggcgagcccaatgtgaaaccctctctcctgatggcctgcctgaggagcagccacagaccaccaagctgaagggcaaaatgcagagcaggtttgacatggctgagaatgtggtaattgtggcatctcagaagcgacctttgggtggccgggagctccagctgccttctatgtccatgttgacatccaagacatctacccagaagttcttcttgagggtactacaggtcatcatccagctccgggacgacacgcgccgggctaacaagaaagccaagcagacaggcaggctaggttcctccggtttaggctcagctagcagcatccaggcagctgttcggcagctggaggctgaggctgatgccattatacaaatggtacgtgagggtcaaagggcgcggagacagcaacaagcagcaacgtcggagtctagccagtcagaggcgtctgtccggagggaggaatcacccatggatgtggaccagccatctcccagtgctcaagatactcaatccattgcctccgatggaaccccacagggggagaaggaaaaggaagaaagaccacctgagttacccctgctcagcgagcagctgagtttggacgagctgtgggacatgcttggggagtgtctaaaggaactagaggaatcccatgaccagcatgcggtgctagtgctacagcctgctgtcgaggccttctttctggtccatgccacagagcgggagagcaagcctcctgtccgagacacccgtgagagccagctggcacacatcaaggacgagcctcctccactctcccctgcccccttaaccccagccacgccttcctcccttgacccattcttctcccgggagccctcatctatgcacatctcctcaagcctgccccctgacacacagaagttccttcgctttgcagagactcaccgcactgtgttaaaccagatcctacggcagtccacgacccaccttgctgatgggccttttgctgtcctggtagactacattcgtgtcctcgactttgatgtcaagcgcaaatatttccgccaagagctggagcgtttagatgaggggctccggaaagaagacatggctgtgcatgtccgtcgtgaccatgtgtttgaagactcctatcgtgagctgcatcgcaaatcccccgaagaaatgaagaatcgattgtatatagtatttgaaggagaagaagggcaggatgctggygggctcctgcgggagtggtatatgatcatctctcgagagatgtttaaccctatgtatgccttgttccgtacctcacctggtgatcgagtcacstacaccatcaatccatcttcccactgcaaccccaaccacctcagctacttcaagtttgtcggacgcattgtggccaaagctgtatatgacaaccgtcttctggagtgctactttactcgatccttttacaaacacatcttgggcaagtcagtcagatatacagatatggagagtgaagattaccacttctaccaaggtctggtttatctgctggaaaatgatgtctccacactaggctatgacctcaccttcagcactgaggtccaagagtttggagtttgtgaagttcgtgacctcaaacccaatggggccaacatcttggtaacagaggagaataagaaggagtatgtacacctggtatgccagatgagaatgacaggagccatccgcaagcagttggcggctttcttagaaggcttctatgagatcattccaaagcgcctcatttccatcttcactgagcaggagttagagctgcttatatcaggactgcccaccattgacatcgatgatctgaaatccaacactgaataccacaagtaccagtccaactctattcagatccagtggttctggagagcattgcgttctttcgatcaagctgaccgtgccaagttcctccagtttgtcacrggtacttccaaggtacccctgcaaggctttgctgccctcgaaggcatgaatggcattcagaagtttcagatccatcgagatgacaggtccacagatcgcctgccttcagctcacacatgttttaatcagctggatctgcctgcctatgagagctttgagaagctccgccacatgctactgttggctatccaggagtgctctgaaggctttgggctggcctaataaggccctgcccaactccgtggggttttttttaccattgttggacctggggaggggggagttaaaaaaagaaccagaaagaaattgtcaaaaaccaataaatgaaatccmccaactcaccgtgtgtgtcccagctgccccatcttccccagcgcatacctgttcctcttctcattctctccccgccgcctgtttcctcaccttctctcccctttccatgccgtccatgatccccaccccatgtgttttaaaaaggcagtagcctttgcagggacctgtctgtcccaactgtttgaacagtgtgctcctcagattctgtgttcagaaggatttgctgcattgagacttgaaacctttggataggggaaaaaattatatatatatatatttttttgttctgtttgcatttcttaatttgtgcttggaatgtgttgatgtgcacagctaatgattcaatgcgagacaagattggcgtctgtgttgtggaggtttcaaataaagagcactcttcataactcacttttcacaatggagtttttttcaaacttaaaaaaaaaaacaaaaaactcttaagcacatgctaggcatctggagaaaagatkgattctccaggaaaccatccctgccctacccgcttgcccacctgcctccaccactggtgcaacttcctcct

SEQ ID NO: 2862 - DNA, 1657 bp, Homo sapiens
ggaggctttcgactgagggctagcgaggggagcasggctggagcagggctggagcagggctggagcagggctggagcagggctgaagcagggccgcggaccccgcacgctcctgcgggccccgcggagccattgcggccgaggcctcggcaggcgccagcggagagctagccgcatcttcgggggcagcccggcagctgccggcggcgcggcgagagagcggctgacagaggggatgcgaggtcctccagcagcctgacctgagtgggttagtgatccagagaaaccagcaggccaacttggtcaggaaggttcgggaagctgttggagcagtgtggggaatttcccaccaggatgagtatgattggctgtgattttagatcgtaaagctgaaaattgaaatcatgaaagtagacaggactaaactgaagaagacacctactgaggctcctgcagactgcagagccttaatagacaaactcaaagtttgtaatgatgagcarcttctcttggaactgcagcagatcaaaacatggaacattggaaagtgcgagttatatcactgggtggacctgttggaccgcttcgatggaatactggcagatgctggacagacagtggagaatatgtcatggatgctcgtatgtgataggccagaaagagagcaactgaaaatgcttctcttggctgtgttgaacttcacagccttgctcattgagtacagcttttcccggcatctgtacagttccatagagcatttgacaactttattggcttcctctgatatgcaagtggtgctggcagtcctcaatctcctatatgtatttagcaaaagatcaaactacatcactcgtctgggatctgacaagaggaccccgctgctaactcggctacaacatttggcagagagctggggtggaaaggagaatggctttggacttgcagaatgttgcagagacttgcatatgatgaaatatccacccagtgcaactacactacactttgaattctatgcagatcctggggccgaggtcaaaattgagaaaaggacaactagtaacacactacattatattcacatagagcaacttgacaagatttcagaaagcccttctgaaatcatggaatctcttaccaaaatgtacagcattcctaaggataagcagatgctgttatttacacacatacgactggcccatggcttttctaatcacaggaagcgattgcaggcagttcaggccagactgcatgcaatatctatattagtgtattccaatgccttgcaggaatcagcaaacagtatcttgtataatggcttgatagaggagttggtagatgtccttcagataacggataagcagcttatggagattaaagcagcttctttacgaacattaacatcaattgtccacttggagagaactcccaaactcagcagtattattgactgtactggaactgcctcctaccatggatttttgccagtgcttgtaaggaactgtatccaggccatgattgatccttccatggatccataccctcaccagtttgccactgctctcttctcttttttataccatctggccagctacgatgctggtggtgaagccttggtctcctgtggaatgatggaagccttattgaaggtgctgtacttt

SEQ ID NO: 2863 - DNA, 10950 bp, Homo sapiens
cagatgcaacgactgccatcatcaagttacttgaagaaatctgtaatcttggaagggaccccaaatacatctgtcagaagccatcratccagaaggcagatggcactgccactgctcctcccccaaggtctaatcatgccgcagaagaagcctctagtgaggatgaggaggaagaggaagtacaggccatgcagagctttaattctacccagcaaaatgaaactgagcctaatcagcaggttgttggtacagaggaacgtattcctattcccctcatggattacatccttaatgtgatgaaatttgtggaatctattctgagcaacaatacaacagatgaccactgccaggaatttgtgaatcagaaaggactgttgcctttggttaccattttgggtcttcccaatctgcccattgactttcccacatctgctgcctgtcaggctgttgcaggtgtctgcaaatccatattgacactgtcacatgaacccaaagtccttcaagagggtctccttcagttggactccatcctctcctccctggagcccttacaccgccccattgaatcccctgggggctcagtgttgttgcgagaactggcttgcgcaggcaatgttgctgatgctaccctctcagcccaggccacacctctgctgcatgcactcactgctgcccatgcctacatcatgatgtttgttcatacttgcagagttggacagagtgaaattcgttccatctccgtaaaccagtggggctctcaattgggtctgagtgttttgagcaagctgagccagttatactgttccctggtgtgggaaagcactgtcctcctctctctgtgtaccccaaacagcctaccatctgggtgtgaatttggccaggcagatatgcagaaactggttccaaaggatgagaaggcaggtacgacccagggcggaaaaagatcagatggggaacaggatggagcagctggaagtatggatgcttctacccagggcttattagaaggcattgggctagatggtgacacattggctcccatggagacagatgaacctactgcttcagactctaagggcaaatctaaaatcacaccagcaatggctgccagaattaagcaaatcaagcctttgttatcagcttcctccagattaggccgagcacttgctgagctatttggacttcttgttaaactttgtgtgggatctcctgtccgccagagaaggagccatcatgctgccagcaccactacagcaccgacacctgccgcgcgatcaacagcctcagctctcactaagctcttgactaaggggttatcttggcagcccccaccatatacacctactccccgattcaggctgacattcttcatctgttcagttggtttcacatccccaatgctgtttgatgagaggaagtatccctaccacctcatgctgcaaaaatttctctgctccggaggccacaatgctctttttgaaactttcaactgggctctgtccatgggaggtaaagttcctgtttctgagggattggaacactcagacttgcctgatggcacaggagaattcctagatgcctggcttatgctggtggagaagatggtgaatcccaccacggtgcttgaatctccacattcgctgcctgccaaattgcctggaggtgtccagaactttccccagttcagtgcactgcgcttccttgtggtaactcagaaagcagcctttacttgcatcaaaaacttatggaaccggaaacccctgaaggtatatggtggacgaatggctgaatcgatgctggccattctatgccacatcctccgaggagaacctgtgattcgagagagactaagcaaggagaaggaggggtctcgaggagaagaggatacagggcaagaggaaggtggctcccgccgggaacctcaagtcaaccagcaacaactgcaacagctcatggacatgggcttcacaagggaacatgcaatggaggcactgttgaacaccagcaccatggagcaggccacagagtaccttttaacccaccctcctccaatcatgggaggagttgttcgggatctcagcatgtctgaagaggaccagatgatgagagcaattgctatgtctctgggacaggatattccaatggatcaaagggcagagtcacctgaggaagttgcttgccggaaggaggaagaggaacggaaagctcgggaaaagcaggaggaggaagaggctaaatgtctagagaagttccaggatgctgacccgttggaacaagatgagctccacactttcacagatactatgttgccaggctgcttccaccttcttgatgagctgccagacacagtataccgtgtgtgtgacctgatcatgacagcaatcaaacgtaatggagcagattatcgtgacatgattctgaagcaagtagtcaatcaggtgtgggaagctgctgatgtattgatcaaagctgctcttcccctgacaacaagtgacacaaaaaccgtgtcagagtggataagtcagatggccacactgccccaggcctccaatttggctactagaatcttgcttttaacgctactttttgaggagttgaagctaccttgtgcttgggtggttgaatcaagtggcatccttaatgtcctaatcaaactcttggaagtggttcagccctgcctccaggcagccaaggagcagaaggaagtccagaccccaaagtggatcacaccagtgttgctcctgattgatttctatgaaaagacagccatctcctcaaaaaggagagcccagatgactaagtacctgcaatccaacagcaacaactggcgctggtttgatgatcgctctgggcgttggtgtagttacagtgcaagcaacaatagcactattgattctgcctggaaatctggagagacaagcgtgcgattcactgcaggccgaagaagatacacggtccaattcactacaatggtgcaggttaatgaggaaacagggaaccgacgccctgtgatgctgactctcctcagggtacctcggctgaataaaaattcaaaaaacagcaatggacaggaactagagaagacgctggaagaaagcaaagaaatggatatcaaacgtaaagaaaataaaggcaatgatacccctttggccctagagagtacaaacactgaaaaggagacaagcctggaggaaacaaaaatcggggagatcctgatccagggcttgacagaagatatggtgactgttttaatccgggcctgcgtgagcatgctgggagtccctgtggacccagatactttgcatgccacccttcgtctctgtctgaggctcacccgggaccacaaatatgccatgatgtttgcagaactgaagagtacccgcatgatcttgaatttgacccagagctcaggcttcaatgggtttactcccctggtcacccttctcttaagacacatcattgaggacccctgtacccttcgtcataccatggaaaaggttgttcgctcagcagctacaagtggagctggtagcactacctctggtgttgtgtctggcagcctcggctctcgggagatcaactacatccttcgtgtccttgggccagccgcatgccgcaatccagacatattcacagaagtggccaactgctgtatccgcatcgcccttcctgcccctcgaggctcaggaactgcttcagatgatgaatttgagaatcttagaattaaaggccctaatgctgtacagctggtgaagaccacccctttgaagccctcacctctgcctgtcatccctgatactatcaaggaagtgatctatgatatgctgaatgctctggctgcataccatgctccagaggaagataaatctgatcctaaacctggggttatgacccaagaggttggccagctcctgcaagacatgggtgatgatgtataccagcagtaccggtcacttacgcgtcagagcagtgactttgatacgcagtcaggtttttccattaatagtcaggtctttgctgcagatggtgcctccactgagacttccgcatctgggacctcccaaggagaggcttcaactccagaggagtctcgagatgggaagaaagataaagaaggggaccgggcctctgaggaaggcaaacagaaaggcaagggcagcaaacctttaatgcctacctccactatccttcgtcttctggcagagttggtgaggtcctatgttggtattgctaccctgattgccaactacagctacactgtgggccagtctgaactgatcaaagaggactgcagtgtgctagcttttgttctggaccacctgctcccacatacccagaatgcagaagacaaggacacccctgccttggcccgcctgttcctcgcaagcctggctgctgcagggagtggcacagatgcccaggtggccctagtgaatgaagtaaaagcagcccttggacgggcactggctatggctgagagtacagagaaacatgccaggcttcaggcagtgatgtgtatcatcagtactatcatggagtcctgcccctccacctccagcttctacagcagtgccacagcgaagacccagcacaatggcatgaacaacatcattcggcttttcctgaagaagggactggttaatgacctggccagagtacctcacagcttagacctgtccagtcccaacatggccaacacagtcaatgctgctctgaagcctttggaaacactttcccggattgtgaaccagcccagtagcctttttggcagcaagagtgcttctagcaagaacaagtctgagcaggatgcccaaggagcctctcaagattccagtagcaaccagcaggacccaggcgagcctggggaagcagaagtgcaggaggaggatcatgatgtcactcagacagaggtggcagatggggatatcatggatggggaggctgaaaccgactcagtggtgattgctgggcagcctgaggtgctcagttcacaagagatgcaggttgagaatgagctggaggacctgatagatgagttgcttgagagggatggcggatctgggaacagtacaattatagtgagcagaagtggagaggatgaatcacaagaggacgtgctgatggatgaagctccttccaacctcagccaagcttccaccttgcaggccaaccgagaagattccatgaatatcctggaccctgaggatgaggaggagcacactcaggaagaggacagcagtggcagtaacgaggatgaggatgatagtcaggatgaagaggaggaggaggaggaagatgaggaagatgatcaggaggatgatgaaggtgaagagggagatgaagacgatgacgacgatggctctgagatggaattggatgaggattatcctgatatgaacgcttctcccttggtccgatttgagcgctttgaccgggaggatgatctcatcattgagtttgacaacatgttctccagtgctacagacatccccccatccccaggaaatatccctaccacccatccactgatggtgcgccatgcagaccacagttctctgacactgggcagtggctcttcaacaactcgtctcacccagggcatcgggcgcagtcagaggaccctaaggcagctgacggccaatactggccacaccattcatgttcactaccctgggaatcgccagcccaaccctcctcttatactgcagaggttgcttggtccctcagctgctgctgacatccttcagctgagcagcagccttcccctacaaagccggggtcgggcccgcctcctggtaggcaacgatgacgtccacatcatcgcccgttctgatgatgagctgctggatgactttttccatgatcagagcacagctaccagccaagcaggaaccctgtccagcatccccacagccctgacccgctggacagaagaatgcaaagttctcgatgctgagagcatgcatgactgtgtttcagtggttaaagtgtccattgtcaatcacctggaattcctgagggatgaggagctggaagaaaggcgagagaagcgcaggaaacaactggctgaggaagaaacaaagataactgataaaggcaaagaagataaggagaacagggatcagagtgcacagtgtactgcatctaagtcaaatgactccactgaacagaatctctcagatgggacgcctatgcctgacagctacccaacaaccccatcttcaactgatgcagctacatctgagtccaaggagacccttggcactctgcaatcctcacaacagcaaccaacactcccaaccccaccagctttgggagaggttcctcaggagctgcagtctccagctggagaagggggcagctctacacagctattgatgcctgtagagccagaggaattgggtcccacaaggccaagtggggaagcagaaacaactcagatggagttatccccagctcccactataacctcactttccccagagagagctgaggattctgatgcactgacggctgtcagcagtcagctagaaggctctcctatggatacaagcagcctggcttcctgtaccttagaggaggctgtgggtgacacttcagcagctggcagttctgagcagcccagagcaggcagctccactcctggggatgccccaccagctgtggcrgaagtgcaaggcaggagtgatgggtcaggggaatctgcccagccacctgaggacagctccccacctgcatcctctgagagctcttccaccagagattctgccgtggccatttctggagcagattcccgaggaatcctagaagagccgttgccttcaacaagcagtgaagaagaagatccccttgcgggtatcagtctccctgaaggtgtggacccctcttttctggctgccctgcctgatgacatccgtcgggaagttctacagaaccagctaggcattcgtccaccaacccggactgccccctccacaaatagctcagcgcctgcagtggtggggaatcctggtgtgactgaagtgagccctgagtttctggctgccctgcctccagccattcaggaggaagtactggcacagcagagagctgagcagcagcgacgagaactagcacagaatgccagctcagacacccctatggaccctgtgaccttcatccagactctgccctcagacctgcgccgtagtgtcctagaggatatggaggacagtgtgttagctgtgatgccacctgacattgcagctgaggctcaagccctgagacgagagcaagaagcccggcagcgacagctcatgcatgagcgtctgtttgggcacagtagcacctccgcrctctctgctattctccgaagcccggctttcaccagtcgcttaagtggcaaccgtggggtccagtatactcgccttgctgtgcagagaggtggcaccttccagatggggggtagcagcagccataacaggccttctggcagtaatgtagatactctcctccgcctccgaggacggctccttctggaccacgaagccctttcttgtctcttggtcctactttttgtggatgagccaaagctcaatactagccgtctacaccgagtactgagaaatctctgctaccatgcccagacccgccactgggtcatcygcagtctgctctccatcttgcagcgcagcagtgagagtgagctatgcattgaaacacccaaactcactacaagtgaggaaaagggcaaaaagtcgagcaagagctgtgggtcaagtagccatgagaaccgtcccctggacctgctacacaagatggagtcaaagagctccaaccagctttcctggctctcagtatccatggatgcagccctaggctgcaggactaatatatttcagatccagcgttcaggggggcgtaaacataccgagaagcatgcaagcggtggctccaccgtccacatccatccccaagctgctcctgttgtctgcagacacgttttggatacactcattcaattggccaaggtatttcccagccacttcacacagcagcggaccaaagaaacaaactgtgagagtgatcgggaaagrggcaataaggcctgtagcccatgctcctcacagtcctccagcagtggcatttgcacagacttctgggacttattggtaaaactggacaacatgaatgtcagccggaaaggcaagaactccgtgaagtcagtgccagtgagcgctggcggtgagggggaaacctctccatacagcctcgaggcctctccactggggcagctcatgaacatgttgtcacacccagtcatccgccggagctctctcttaactgagaaactcctcagactcctttctctcatctcaattgctctcccagaaaacaaggtgtcagaagcacaggctaattctggcagcggtgcttcctccaccaccactgccacctcaaccacatctaccaccaccaccactgccgcctccaccacgcccacaccccctactgcacccacccctgtcacttctgctccagccctkgttgctgccacggctatttccaccattgtcgtagctgcttcgaccacagtgactacccccacgactgctaccactactgtttcaatttctcccactactaagggcagcaaatctccagcgaaggtgagtgatgggggcagcagcagtacagactttaagatggtgtcctctggcctcactgaaaaccagctacagctctctgtagaggtgttgacatcccactcttgttctgaggaaggcttagaggatgcagccaacgtactactgcagctctcccggggggactctgggacccgggacactgttctcaagctgctactgaatggagcccgccatctgggttataccctttgtaaacaaataggtaccctgctggccgagctgcgggaatacaacctcgagcagcagcggcgagcccaatgtgaaaccctctctcctgatggcctgcctgaggagcagccacagaccaccaagctgaagggcaaaatgcagagcaggttcctccggtttaggctcagctagcagcatccaggcagctgttcggcagctggaggctgaggctgatgccattatacaaatgtcggagtctagccagtcagaggcgtctgtccggagggaggaatcacccatggatgtggaccagccatctcccagtgctcaagatactcaatccattgcctccgatggaaccccacagggggagaaggaaaaggaagaaagaccacctgagttacccctgctcagcgagcagctgagtttggacgagctgtgggacatgcttggggagtgtctaaaggaactagaggaatcccatgaccagcatgcggtgctagtgctacagcctgctgtcgaggccttctttctggtccatgccacagagcgggagagcaagcctcctgtccgagacacccgtgagagccagctggcacacatcaaggacgagcctcctccactctcccctgcccccttaaccccagccacgccttcctcccttgacccattcttctcccgggagccctcatctatgcacatctcctcaagcctgccccctgacacacagaagttccttcgctttgcagagactcaccgcactgtgttaaaccagatcctacggcagtccacgacccaccttgctgatgggccttttgctgtcctggtagactacattcgtgtcctcgactttgatgtcaagcgcaaatatttccgccaagagctggagcgtttagatgaggggctccggaaagaagacatggctgtgcatgtccgtcgtgaccatgtgtttgaagactcctatcgtgagctgcatcgcaaatcccccgaagaaatgaagaatcgattgtatatagtatttgaaggagaagaagggcaggatgctggygggctcctgcgggagtggtatatgatcatctctcgagagatgtttaaccctatgtatgccttgttccgtacctcacctggtgatcgagtcacstacaccatcaatccatcttcccactgcaaccccaaccacctcagctacttcaagtttgtcggacgcattgtggccaaagctgtatatgacaaccgtcttctggagtgctactttactcgatccttttacaaacacatcttgggcaagtcagtcagatatacagatatggagagtgaagattaccacttctaccaaggtctggtttatctgctggaaaatgatgtctccacactaggctatgacctcaccttcagcactgaggtccaagagtttggagtttgtgaagttcgtgacctcaaacccaatggggccaacatcttggtaacagaggagaataagaaggagtatgtacacctggtatgccagatgagaatgacaggagccatccgcaagcagttggcggctttcttagaaggcttctatgagatcattccaaagcgcctcatttccatcttcactgagcaggagttagagctgcttatatcaggactgcccaccattgacatcgatgatctgaaatccaacactgaataccacaagtaccagtccaactctattcagatccagtggttctggagagcattgcgttctttcgatcaagctgaccgtgccaagttcctccagtttgtcacrggtacttccaaggtacccctgcaaggctttgctgccctcgaaggcatgaatggcattcagaagtttcagatccatcgagatgacaggaccctacccaagattgggaacacaaatgtggctgagtcctggaccttgggtaactcacaatttggtgtttctatggaggtgatgtttgagatgagatgtgctagacacagtgggggctggggagacactgtcagttttaatcagctggatctgcctgcctatgagagctttgagaagctccgccacatgctactgttggctatccaggagtgctctgaaggctttgggctggcc

SEQ ID NO: 2864 - DNA, 1786 bp, Homo sapiens
ggaggctttcgactgagggctagcgaggggagcasggctggagcagggctggagcagggctggagcagggctggagcagggctgaagcagggccgcggaccccgcacgctcctgcgggccccgcggagccattgcggccgaggcctcggcaggcgccagcggagagctagccgcatcttcgggggcagcccggcagctgccggcggcgcggcgagagagcggctgacagaggggatgcgaggtcctccagcagcctgacctgagtgggttagtgatccagagaaaccagcaggccaacttggtcaggaaggttcgggaagctgttggagcagtgtggggaatttcccaccaggatgagtatgattggctgtgattttagatcgtaaagctgaaaattgaaatcatgaaagtagacaggactaaactgaagaagacacctactgaggctcctgcagactgcagagccttaatagacaaactcaaagtttgtaatgatgagcarcttctcttggaactgcagcagatcaaaacatggaacattggaaagtgcgagttatatcactgggtggacctgttggaccgcttcgatggaatactggcagatgctggacagacagtggagaatatgtcatggatgctcgtatgtgataggccagaaagagagcaactgaaaatgcttctcttggctgtgttgaacttcacagccttgctcattgagtacagcttttcccggcatctgtacagttccatagagcatttgacaactttattggcttcctctgatatgcaagtggtgctggcagtcctcaatctcctatatgtatttagcaaaagatcaaactacatcactcgtctgggatctgacaagaggaccccgctgctaactcggctacaacatttggcagagagctggggtggaaaggagaatggctttggacttgcagaatgttgcagagacttgcatatgatgaaatatccacccagtgcaactacactacactttgaattctatgcagatcctggggccgaggtcaaaattgagaaaaggacaactagtaacacactacattatattcacatagagcaacttgacaagatttcagaaagcccttctgaaatcatggaatctcttaccaaaatgtacagcattcctaaggataagcagatgctgttatttacacacatacgactggcccatggcttttctaatcacaggaagcgattgcaggcagttcaggccagactgcatgcaatatctatattagtgtattccaatgccttgcaggaatcagcaaacagtatcttgtataatggcttgatagaggagttggtagatgtccttcagataacggataagcagcttatggagattaaagcagcttctttacgaacattaacatcaattgtccacttggagagaactcccaaactcagcagtattattgactgtactggaactgcctcctaccatggatttttgccagtgcttgtaaggaactgtatccaggccatgattgatccttccatggatccataccctcaccagtttgccactgctctcttctcttttttataccatctggccagctacgatgctggtggtgaagccttggtctcctgtggaatgatggaagccttattgaaggtcataaagtttcttggcgatgaacaggaccagataacatttgtcaccagagccgtcagagtggttgaccttatcaccaacctggatatggcagcttttcaatcccatagtggactttctatcttcatttatagacttgag

SEQ ID NO: 2865 - DNA, 11216 bp, Homo sapiens
cagatgcaacgactgccatcatcaagttacttgaagaaatctgtaatcttggaagggaccccaaatacatctgtcagaagccatcratccagaaggcagatggcactgccactgctcctcccccaaggtctaatcatgccgcagaagaagcctctagtgaggatgaggaggaagaggaagtacaggccatgcagagctttaattctacccagcaaaatgaaactgagcctaatcagcaggttgttggtacagaggaacgtattcctattcccctcatggattacatccttaatgtgatgaaatttgtggaatctattctgagcaacaatacaacagatgaccactgccaggaatttgtgaatcagaaaggactgttgcctttggttaccattttgggtcttcccaatctgcccattgactttcccacatctgctgcctgtcaggctgttgcaggtgtctgcaaatccatattgacactgtcacatgaacccaaagtccttcaagagggtctccttcagttggactccatcctctcctccctggagcccttacaccgccccattgaatcccctgggggctcagtgttgttgcgagaactggcttgcgcaggcaatgttgctgatgctaccctctcagcccaggccacacctctgctgcatgcactcactgctgcccatgcctacatcatgatgtttgttcatacttgcagagttggacagagtgaaattcgttccatctccgtaaaccagtggggctctcaattgggtctgagtgttttgagcaagctgagccagttatactgttccctggtgtgggaaagcactgtcctcctctctctgtgtaccccaaacagcctaccatctgggtgtgaatttggccaggcagatatgcagaaactggttccaaaggatgagaaggcaggtacgacccagggcggaaaaagatcagatggggaacaggatggagcagctggaagtatggatgcttctacccagggcttattagaaggcattgggctagatggtgacacattggctcccatggagacagatgaacctactgcttcagactctaagggcaaatctaaaatcacaccagcaatggctgccagaattaagcaaatcaagcctttgttatcagcttcctccagattaggccgagcacttgctgagctatttggacttcttgttaaactttgtgtgggatctcctgtccgccagagaaggagccatcatgctgccagcaccactacagcaccgacacctgccgcgcgatcaacagcctcagctctcactaagctcttgactaaggggttatcttggcagcccccaccatatacacctactccccgattcaggctgacattcttcatctgttcagttggtttcacatccccaatgctgtttgatgagaggaagtatccctaccacctcatgctgcaaaaatttctctgctccggaggccacaatgctctttttgaaactttcaactgggctctgtccatgggaggtaaagttcctgtttctgagggattggaacactcagacttgcctgatggcacaggagaattcctagatgcctggcttatgctggtggagaagatggtgaatcccaccacggtgcttgaatctccacattcgctgcctgccaaattgcctggaggtgtccagaactttccccagttcagtgcactgcgcttccttgtggtaactcagaaagcagcctttacttgcatcaaaaacttatggaaccggaaacccctgaaggtatatggtggacgaatggctgaatcgatgctggccattctatgccacatcctccgaggagaacctgtgattcgagagagactaagcaaggagaaggaggggtctcgaggagaagaggatacagggcaagaggaaggtggctcccgccgggaacctcaagtcaaccagcaacaactgcaacagctcatggacatgggcttcacaagggaacatgcaatggaggcactgttgaacaccagcaccatggagcaggccacagagtaccttttaacccaccctcctccaatcatgggaggagttgttcgggatctcagcatgtctgaagaggaccagatgatgagagcaattgctatgtctctgggacaggatattccaatggatcaaagggcagagtcacctgaggaagttgcttgccggaaggaggaagaggaacggaaagctcgggaaaagcaggaggaggaagaggctaaatgtctagagaagttccaggatgctgacccgttggaacaagatgagctccacactttcacagatactatgttgccaggctgcttccaccttcttgatgagctgccagacacagtataccgtgtgtgtgacctgatcatgacagcaatcaaacgtaatggagcagattatcgtgacatgattctgaagcaagtagtcaatcaggtgtgggaagctgctgatgtattgatcaaagctgctcttcccctgacaacaagtgacacaaaaaccgtgtcagagtggataagtcagatggccacactgccccaggcctccaatttggctactagaatcttgcttttaacgctactttttgaggagttgaagctaccttgtgcttgggtggttgaatcaagtggcatccttaatgtcctaatcaaactcttggaagtggttcagccctgcctccaggcagccaaggagcagaaggaagtccagaccccaaagtggatcacaccagtgttgctcctgattgatttctatgaaaagacagccatctcctcaaaaaggagagcccagatgactaagtacctgcaatccaacagcaacaactggcgctggtttgatgatcgctctgggcgttggtgtagttacagtgcaagcaacaatagcactattgattctgcctggaaatctggagagacaagcgtgcgattcactgcaggccgaagaagatacacggtccaattcactacaatggtgcaggttaatgaggaaacagggaaccgacgccctgtgatgctgactctcctcagggtacctcggctgaataaaaattcaaaaaacagcaatggacaggaactagagaagacgctggaagaaagcaaagaaatggatatcaaacgtaaagaaaataaaggcaatgatacccctttggccctagagagtacaaacactgaaaaggagacaagcctggaggaaacaaaaatcggggagatcctgatccagggcttgacagaagatatggtgactgttttaatccgggcctgcgtgagcatgctgggagtccctgtggacccagatactttgcatgccacccttcgtctctgtctgaggctcacccgggaccacaaatatgccatgatgtttgcagaactgaagagtacccgcatgatcttgaatttgacccagagctcaggcttcaatgggtttactcccctggtcacccttctcttaagacacatcattgaggacccctgtacccttcgtcataccatggaaaaggttgttcgctcagcagctacaagtggagctggtagcactacctctggtgttgtgtctggcagcctcggctctcgggagatcaactacatccttcgtgtccttgggccagccgcatgccgcaatccagacatattcacagaagtggccaactgctgtatccgcatcgcccttcctgcccctcgaggctcaggaactgcttcagatgatgaatttgagaatcttagaattaaaggccctaatgctgtacagctggtgaagaccacccctttgaagccctcacctctgcctgtcatccctgatactatcaaggaagtgatctatgatatgctgaatgctctggctgcataccatgctccagaggaagataaatctgatcctaaacctggggttatgacccaagaggttggccagctcctgcaagacatgggtgatgatgtataccagcagtaccggtcacttacgcgtcagagcagtgactttgatacgcagtcaggtttttccattaatagtcaggtctttgctgcagatggtgcctccactgagacttccgcatctgggacctcccaaggagaggcttcaactccagaggagtctcgagatgggaagaaagataaagaaggggaccgggcctctgaggaaggcaaacagaaaggcaagggcagcaaacctttaatgcctacctccactatccttcgtcttctggcagagttggtgaggtcctatgttggtattgctaccctgattgccaactacagctacactgtgggccagtctgaactgatcaaagaggactgcagtgtgctagcttttgttctggaccacctgctcccacatacccagaatgcagaagacaaggacacccctgccttggcccgcctgttcctcgcaagcctggctgctgcagggagtggcacagatgcccaggtggccctagtgaatgaagtaaaagcagcccttggacgggcactggctatggctgagagtacagagaaacatgccaggcttcaggcagtgatgtgtatcatcagtactatcatggagtcctgcccctccacctccagcttctacagcagtgccacagcgaagacccagcacaatggcatgaacaacatcattcggcttttcctgaagaagggactggttaatgacctggccagagtacctcacagcttagacctgtccagtcccaacatggccaacacagtcaatgctgctctgaagcctttggaaacactttcccggattgtgaaccagcccagtagcctttttggcagcaagagtgcttctagcaagaacaagtctgagcaggatgcccaaggagcctctcaagattccagtagcaaccagcaggacccaggcgagcctggggaagcagaagtgcaggaggaggatcatgatgtcactcagacagaggtggcagatggggatatcatggatggggaggctgaaaccgactcagtggtgattgctgggcagcctgaggtgctcagttcacaagagatgcaggttgagaatgagctggaggacctgatagatgagttgcttgagagggatggcggatctgggaacagtacaattatagtgagcagaagtggagaggatgaatcacaagaggacgtgctgatggatgaagctccttccaacctcagccaagcttccaccttgcaggccaaccgagaagattccatgaatatcctggaccctgaggatgaggaggagcacactcaggaagaggacagcagtggcagtaacgaggatgaggatgatagtcaggatgaagaggaggaggaggaggaagatgaggaagatgatcaggaggatgatgaaggtgaagagggagatgaagacgatgacgacgatggctctgagatggaattggatgaggattatcctgatatgaacgcttctcccttggtccgatttgagcgctttgaccgggaggatgatctcatcattgagtttgacaacatgttctccagtgctacagacatccccccatccccaggaaatatccctaccacccatccactgatggtgcgccatgcagaccacagttctctgacactgggcagtggctcttcaacaactcgtctcacccagggcatcgggcgcagtcagaggaccctaaggcagctgacggccaatactggccacaccattcatgttcactaccctgggaatcgccagcccaaccctcctcttatactgcagaggttgcttggtccctcagctgctgctgacatccttcagctgagcagcagccttcccctacaaagccggggtcgggcccgcctcctggtaggcaacgatgacgtccacatcatcgcccgttctgatgatgagctgctggatgactttttccatgatcagagcacagctaccagccaagcaggcaagtttgtgtgcatccccacagccctgacccgctggacagaagaatgcaaagttctcgatgctgagagcatgcatgactgtgtttcagtggttaaagtgtccattgtcaatcacctggaattcctgagggatgaggagctggaagaaaggcgagagaagcgcaggaaacaactggctgaggaagaaacaaagataactgataaaggcaaagaagataaggagaacagggatcagagtgcacagtgtactgcatctaagtcaaatgactccactgaacagaatctctcagatgggacgcctatgcctgacagctacccaacaaccccatcttcaactgatgcagctacatctgagtccaaggagacccttggcactctgcaatcctcacaacagcaaccaacactcccaaccccaccagctttgggagaggttcctcaggagctgcagtctccagctggagaagggggcagctctacacagctattgatgcctgtagagccagaggaattgggtcccacaaggccaagtggggaagcagaaacaactcagatggagttatccccagctcccactataacctcactttccccagagagagctgaggattctgatgcactgacggctgtcagcagtcagctagaaggctctcctatggatacaagcagcctggcttcctgtaccttagaggaggctgtgggtgacacttcagcagctggcagttctgagcagcccagagcaggcagctccactcctggggatgccccaccagctgtggcrgaagtgcaaggcaggagtgatgggtcaggggaatctgcccagccacctgaggacagctccccacctgcatcctctgagagctcttccaccagagattctgccgtggccatttctggagcagattcccgaggaatcctagaagagccgttgccttcaacaagcagtgaagaagaagatccccttgcgggtatcagtctccctgaaggtgtggacccctcttttctggctgccctgcctgatgacatccgtcgggaagttctacagaaccagctaggcattcgtccaccaacccggactgccccctccacaaatagctcagcgcctgcagtggtggggaatcctggtgtgactgaagtgagccctgagtttctggctgccctgcctccagccattcaggaggaagtactggcacagcagagagctgagcagcagcgacgagaactagcacagaatgccagctcagacacccctatggaccctgtgaccttcatccagactctgccctcagacctgcgccgtagtgtcctagaggatatggaggacagtgtgttagctgtgatgccacctgacattgcagctgaggctcaagccctgagacgagagcaagaagcccggcagcgacagctcatgcatgagcgtctgtttgggcacagtagcacctccgcrctctctgctattctccgaagcccggctttcaccagtcgcttaagtggcaaccgtggggtccagtatactcgccttgctgtgcagagaggtggcaccttccagatggggggtagcagcagccataacaggccttctggcagtaatgtagatactctcctccgcctccgaggacggctccttctggaccacgaagccctttcttgtctcttggtcctactttttgtggatgagccaaagctcaatactagccgtctacaccgagtactgagaaatctctgctaccatgcccagacccgccactgggtcatcygcagtctgctctccatcttgcagcgcagcagtgagagtgagctatgcattgaaacacccaaactcactacaagtgaggaaaagggcaaaaagtcgagcaagagctgtgggtcaagtagccatgagaaccgtcccctggacctgctacacaagatggagtcaaagagctccaaccagctttcctggctctcagtatccatggatgcagccctaggctgcaggactaatatatttcagatccagcgttcaggggggcgtaaacataccgagaagcatgcaagcggtggctccaccgtccacatccatccccaagctgctcctgttgtctgcagacacgttttggatacactcattcaattggccaaggtatttcccagccacttcacacagcagcggaccaaagaaacaaactgtgagagtgatcgggaaagrggcaataaggcctgtagcccatgctcctcacagtcctccagcagtggcatttgcacagacttctgggacttattggtaaaactggacaacatgaatgtcagccggaaaggcaagaactccgtgaagtcagtgccagtgagcgctggcggtgagggggaaacctctccatacagcctcgaggcctctccactggggcagctcatgaacatgttgtcacacccagtcatccgccggagctctctcttaactgagaaactcctcagactcctttctctcatctcaattgctctcccagaaaacaaggtgtcagaagcacaggctaattctggcagcggtgcttcctccaccaccactgccacctcaaccacatctaccaccaccaccactgccgcctccaccacgcccacaccccctactgcacccacccctgtcacttctgctccagccctkgttgctgccacggctatttccaccattgtcgtagctgcttcgaccacagtgactacccccacgactgctaccactactgtttcaatttctcccactactaagggcagcaaatctccagcgaaggtgagtgatgggggcagcagcagtacagactttaagatggtgtcctctggcctcactgaaaaccagctacagctctctgtagaggtgttgacatcccactcttgttctgaggaaggcttagaggatgcagccaacgtactactgcagctctcccggggggactctgggacccgggacactgttctcaagctgctactgaatggagcccgccatctgggttataccctttgtaaacaaataggtaccctgctggccgagctgcgggaatacaacctcgagcagcagcggcgagcccaatgtgaaaccctctctcctgatggcctgcctgaggagcagccacagaccaccaagctgaagggcaaaatgcagagcaggtttgacatggctgagaatgtggtaattgtggcatctcagaagcgacctttgggtggccgggagctccagctgccttctatgtccatgttgacatccaagacatctacccagaagttcttcttgagggtactacaggtcatcatccagctccgggacgacacgcgccgggctaacaagaaagccaagcagacaggcaggctaggttcctccggtttaggctcagctagcagcatccaggcagctgttcggcagctggaggctgaggctgatgccattatacaaatggtacgtgagggtcaaagggcgcggagacagcaacaagcagcaacgtcggagtctagccagtcagaggcgtctgtccggagggaggaatcacccatggatgtggaccagccatctcccagtgctcaagatactcaatccattgcctccgatggaaccccacagggggagaaggaaaaggaagaaagaccacctgagttacccctgctcagcgagcagctgagtttggacgagctgtgggacatgcttggggagtgtctaaaggaactagaggaatcccatgaccagcatgcggtgctagtgctacagcctgctgtcgaggccttctttctggtccatgccacagagcgggagagcaagcctcctgtccgagacacccgtgagagccagctggcacacatcaaggacgagcctcctccactctcccctgcccccttaaccccagccacgccttcctcccttgacccattcttctcccgggagccctcatctatgcacatctcctcaagcctgccccctgacacacagaagttccttcgctttgcagagactcaccgcactgtgttaaaccagatcctacggcagtccacgacccaccttgctgatgggccttttgctgtcctggtagactacattcgtgtcctcgactttgatgtcaagcgcaaatatttccgccaagagctggagcgtttagatgaggggctccggaaagaagacatggctgtgcatgtccgtcgtgaccatgtgtttgaagactcctatcgtgagctgcatcgcaaatcccccgaagaaatgaagaatcgattgtatatagtatttgaaggagaagaagggcaggatgctggygggctcctgcgggagtggtatatgatcatctctcgagagatgtttaaccctatgtatgccttgttccgtacctcacctggtgatcgagtcacstacaccatcaatccatcttcccactgcaaccccaaccacctcagctacttcaagtttgtcggacgcattgtggccaaagctgtatatgacaaccgtcttctggagtgctactttactcgatccttttacaaacacatcttgggcaagtcagtcagatatacagatatggagagtgaagattaccacttctaccaaggtctggtttatctgctggaaaatgatgtctccacactaggctatgacctcaccttcagcactgaggtccaagagtttggagtttgtgaagttcgtgacctcaaacccaatggggccaacatcttggtaacagaggagaataagaaggagtatgtacacctggtatgccagatgagaatgacaggagccatccgcaagcagttggcggctttcttagaaggcttctatgagatcattccaaagcgcctcatttccatcttcactgagcaggagttagagctgcttatatcaggactgcccaccattgacatcgatgatctgaaatccaacactgaataccacaagtaccagtccaactctattcagatccagtggttctggagagcattgcgttctttcgatcaagctgaccgtgccaagttcctccagtttgtcacrggtacttccaaggtacccctgcaaggctttgctgccctcgaaggcatgaatggcattcagaagtttcagatccatcgagatgacaggtccacagatcgcctgccttcagctcacacatgttttaatcagctggatctgcctgcctatgagagctttgagaagctccgccacatgctactgttggctatccaggagtgctctgaaggctttgggctggcctaataaggccctgcccaactccgtggggttttttttaccatttgccccatcttccccagcgcatacctgttcctcttctcattctctccccgccgcctgtttcctcaccttctctcccct

SEQ ID NO: 2866 - DNA, 2166 bp, Homo sapiens
tgctacagcctgctgtcgaggccttctttctggtccatgccacagagcgggagagcaagcctcctgtccgagacacccgtgagagccagctggcacacatcaaggacgagcctcctccactctcccctgcccccttaaccccagccacgccttcctcccttgacccattcttctcccgggagccctcatctatgcacatctcctcaagcctgccccctgacacacagaagttccttcgctttgcagagactcaccgcactgtgttaaaccagatcctacggcagtccacgacccaccttgctgatgggccttttgctgtcctggtagactacattcgtgtcctcgactttgatgtcaagcgcaaatatttccgccaagagctggagcgtttagatgaggggctccggaaagaagacatggctgtgcatgtccgtcgtgaccatgtgtttgaagactcctatcgtgagctgcatcgcaaatcccccgaagaaatgaagaatcgattgtatatagtatttgaaggagaagaagggcaggatgctggygggctcctgcgggagtggtatatgatcatctctcgagagatgtttaaccctatgtatgccttgttccgtacctcacctggtgatcgagtcacstacaccatcaatccatcttcccactgcaaccccaaccacctcagctacttcaagtttgtcggacgcattgtggccaaagctgtatatgacaaccgtcttctggagtgctactttactcgatccttttacaaacacatcttgggcaagtcagtcagatatacagatatggagagtgaagattaccacttctaccaaggtctggtttatctgctggaaaatgatgtctccacactaggctatgacctcaccttcagcactgaggtccaagagtttggagtttgtgaagttcgtgacctcaaacccaatggggccaacatcttggtaacagaggagaataagaaggagtatgtacacctggtatgccagatgagaatgacaggagccatccgcaagcagttggcggctttcttagaaggcttctatgagatcattccaaagcgcctcatttccatcttcactgagcaggagttagagctgcttatatcaggactgcccaccattgacatcgatgatctgaaatccaacactgaataccacaagtaccagtccaactctattcagatccagtggttctggagagcattgcgttctttcgatcaagctgaccgtgccaagttcctccagtttgtcacrggtacttccaaggtacccctgcaaggctttgctgccctcgaaggcatgaatggcattcagaagtttcagatccatcgagatgacaggtccacagatcgcctgccttcagctcacacatgttttaatcagctggatctgcctgcctatgagagctttgagaagctccgccacatgctactgttggctatccaggagtgctctgaaggctttgggctggcctaataaggccctgcccaactccgtggggttttttttaccattgttggacctggggaggggggagttaaaaaaagaaccagaaagaaattgtcaaaaaccaataaatgaaatccmccaactcaccgtgtgtgtcccagctgccccatcttccccagcgcatacctgttcctcttctcattctctccccgccgcctgtttcctcaccttctctcccctttccatgccgtccatgatccccaccccatgtgttttaaaaaggcagtagcctttgcagggacctgtctgtcccaactgtttgaacagtgtgctcctcagattctgtgttcagaaggatttgctgcattgagacttgaaacctttggataggggaaaaaattatatatatatatatttttttgttctgtttgcatttcttaatttgtgcttggaatgtgttgatgtgcacagctaatgattcaatgcgagacaagattggcgtctgtgttgtggaggtttcaaataaagagcactcttcataactcacttttcacaatggagtttttttcaaacttaaaaaaaaaaacaaaaaactcttaagcacatgctaggcatctggagaaaagatkgattctccaggaaaccatccctgccctacccgcttgcccacctgcctccaccactggtgcaacttcctcct

SEQ ID NO: 2867 - DNA, 5326 bp, Homo sapiens
cagatgcaacgactgccatcatcaagttacttgaagaaatctgtaatcttggaagggaccccaaatacatctgtcagaagccatcratccagaaggcagatggcactgccactgctcctcccccaaggtctaatcatgccgcagaagaagcctctagtgaggatgaggaggaagaggaagtacaggccatgcagagctttaattctacccagcaaaatgaaactgagcctaatcagcaggttgttggtacagaggaacgtattcctattcccctcatggattacatccttaatgtgatgaaatttgtggaatctattctgagcaacaatacaacagatgaccactgccaggaatttgtgaatcagaaaggactgttgcctttggttaccattttgggtcttcccaatctgcccattgactttcccacatctgctgcctgtcaggctgttgcaggtgtctgcaaatccatattgacactgtcacatgaacccaaagtccttcaagagggtctccttcagttggactccatcctctcctccctggagcccttacaccgccccattgaatcccctgggggctcagtgttgttgcgagaactggcttgcgcaggcaatgttgctgatgctaccctctcagcccaggccacacctctgctgcatgcactcactgctgcccatgcctacatcatgatgtttgttcatacttgcagagttggacagagtgaaattcgttccatctccgtaaaccagtggggctctcaattgggtctgagtgttttgagcaagctgagccagttatactgttccctggtgtgggaaagcactgtcctcctctctctgtgtaccccaaacagcctaccatctgggtgtgaatttggccaggcagatatgcagaaactggttccaaaggatgagaaggcaggtacgacccagggcggaaaaagatcagatggggaacaggatggagcagctggaagtatggatgcttctacccagggcttattagaaggcattgggctagatggtgacacattggctcccatggagacagatgaacctactgcttcagactctaagggcaaatctaaaatcacaccagcaatggctgccagaattaagcaaatcaagcctttgttatcagcttcctccagattaggccgagcacttgctgagctatttggacttcttgttaaactttgtgtgggatctcctgtccgccagagaaggagccatcatgctgccagcaccactacagcaccgacacctgccgcgcgatcaacagcctcagctctcactaagctcttgactaaggggttatcttggcagcccccaccatatacacctactccccgattcaggctgacattcttcatctgttcagttggtttcacatccccaatgctgtttgatgagaggaagtatccctaccacctcatgctgcaaaaatttctctgctccggaggccacaatgctctttttgaaactttcaactgggctctgtccatgggaggtaaagttcctgtttctgagggattggaacactcagacttgcctgatggcacaggagaattcctagatgcctggcttatgctggtggagaagatggtgaatcccaccacggtgcttgaatctccacattcgctgcctgccaaattgcctggaggtgtccagaactttccccagttcagtgcactgcgcttccttgtggtaactcagaaagcagcctttacttgcatcaaaaacttatggaaccggaaacccctgaaggtatatggtggacgaatggctgaatcgatgctggccattctatgccacatcctccgaggagaacctgtgattcgagagagactaagcaaggagaaggaggggtctcgaggagaagaggatacagggcaagaggaaggtggctcccgccgggaacctcaagtcaaccagcaacaactgcaacagctcatggacatgggcttcacaagggaacatgcaatggaggcactgttgaacaccagcaccatggagcaggccacagagtaccttttaacccaccctcctccaatcatgggaggagttgttcgggatctcagcatgtctgaagaggaccagatgatgagagcaattgctatgtctctgggacaggatattccaatggatcaaagggcagagtcacctgaggaagttgcttgccggaaggaggaagaggaacggaaagctcgggaaaagcaggaggaggaagaggctaaatgtctagagaagttccaggatgctgacccgttggaacaagatgagctccacactttcacagatactatgttgccaggctgcttccaccttcttgatgagctgccagacacagtataccgtgtgtgtgacctgatcatgacagcaatcaaacgtaatggagcagattatcgtgacatgattctgaagcaagtagtcaatcaggtgtgggaagctgctgatgtattgatcaaagctgctcttcccctgacaacaagtgacacaaaaaccgtgtcagagtggataagtcagatggccacactgccccaggcctccaatttggctactagaatcttgcttttaacgctactttttgaggagttgaagctaccttgtgcttgggtggttgaatcaagtggcatccttaatgtcctaatcaaactcttggaagtggttcagccctgcctccaggcagccaaggagcagaaggaagtccagaccccaaagtggatcacaccagtgttgctcctgattgatttctatgaaaagacagccatctcctcaaaaaggagagcccagatgactaagtacctgcaatccaacagcaacaactggcgctggtttgatgatcgctctgggcgttggtgtagttacagtgcaagcaacaatagcactattgattctgcctggaaatctggagagacaagcgtgcgattcactgcaggccgaagaagatacacggtccaattcactacaatggtgcaggttaatgaggaaacagggaaccgacgccctgtgatgctgactctcctcagggtacctcggctgaataaaaattcaaaaaacagcaatggacaggaactagagaagacgctggaagaaagcaaagaaatggatatcaaacgtaaagaaaataaaggcaatgatacccctttggccctagagagtacaaacactgaaaaggagacaagcctggaggaaacaaaaatcggggagatcctgatccagggcttgacagaagatatggtgactgttttaatccgggcctgcgtgagcatgctgggagtccctgtggacccagatactttgcatgccacccttcgtctctgtctgaggctcacccgggaccacaaatatgccatgatgtttgcagaactgaagagtacccgcatgatcttgaatttgacccagagctcaggcttcaatgggtttactcccctggtcacccttctcttaagacacatcattgaggacccctgtacccttcgtcataccatggaaaaggttgttcgctcagcagctacaagtggagctggtagcactacctctggtgttgtgtctggcagcctcggctctcgggagatcaactacatccttcgtgtccttgggccagccgcatgccgcaatccagacatattcacagaagtggccaactgctgtatccgcatcgcccttcctgcccctcgaggctcaggaactgcttcagatgatgaatttgagaatcttagaattaaaggccctaatgctgtacagctggtgaagaccacccctttgaagccctcacctctgcctgtcatccctgatactatcaaggaagtgatctatgatatgctgaatgctctggctgcataccatgctccagaggaagcagataaatctgatcctaaacctggggttatgacccaagaggttggccagctcctgcaagacatgggtgatgatgtataccagcagtaccggtcacttacgcgtcagagcagtgactttgatacgcagtcaggtttttccattaatagtcaggtctttgctgcagatggtgcctccactgagacttccgcatctgggacctcccaaggagaggcttcaactccagaggagtctcgagatgggaagaaagataaagaaggggaccgggcctctgaggaaggcaaacagaaaggcaagggcagcaaacctttaatgcctacctccactatccttcgtcttctggcagagttggtgaggtcctatgttggtattgctaccctgattgccaactacagctacactgtgggccagtctgaactgatcaaagaggactgcagtgtgctagcttttgttctggaccacctgctcccacatacccagaatgcagaagacaaggacacccctgccttggcccgcctgttcctcgcaagcctggctgctgcagggagtggcacagatgcccaggtggccctagtgaatgaagtaaaagcagcccttggacgggcactggctatggctgagagtacagagaaacatgccaggcttcaggcagtgatgtgtatcatcagtactatcatggagtcctgcccctccacctccagcttctacagcagtgccacagcgaagacccagcacaatggcatgaacaacatcattcggcttttcctgaagaagggactggttaatgacctggccagagtacctcacagcttagacctgtccagtcccaacatggccaacacagtcaatgctgctctgaagcctttggaaacactttcccggattgtgaaccagcccagtagcctttttggcagcaagagtgcttctagcaagaacaagtctgagcaggatgcccaaggagcctctcaagattccagtagcaaccagcaggacccaggcgagcctggggaagcagaagtgcaggaggaggatcatgatgtcactcagacagaggtggcagatggggatatcatggatggggaggctgaaaccgactcagtggtgattgctgggcagcctgaggtgctcagttcacaagagatgcaggttgagaatgagctggaggacctgatagatgagttgcttgagagggatggcggatctgggaacagtacaattatagtgagcagaagtggagaggatgaatcacaagaggacgtgctgatggatgaagctccttccaacctcagccaagcttccaccttgcaggccaaccgagaagattccatgaatatcctggaccctgaggatgaggaggagcacactcaggaagaggacagcagtggcagtaacgaggatgaggatgatagtcaggatgaagaggaggaggaggaggaagatgaggaagatgatcaggtgagggggga

SEQ ID NO: 2868 - DNA, 2178 bp, Homo sapiens
tcctttcaaccttgtcaacctgtyggcgcggcctctggtgcagtggcggcggctcctgttcctgccgcagctctctccccttcttacctccccaccagatcccggagatcgcccgccatggctttacttactgcggccgcccggctcttgggaaccaagaatgcatcttgtcttgttcttgcagcccagcatgccagtgcttcctccatgaatttgaaagacatattggctgacctcatacytaaggagcaggccagaattaagaccttcaggcagcaacatggcaagaaggtggtgggccaaatcactgtggacatgatgtatggtggcatgagaggcatgaagggattggtctatgaaacatcagttcttgatcctgatgagggcatccgtttctgaggctttagtatccctgaatgccagaaactgctacccaaggctaagggtggggaagaacccctgcctgagggcttattttggctgctggtaactggatgtatcccaacagaggaacaggtatcttggctctcaaaagagtgggcaaagagggcagctctgccttcccatgtggtcaccatgctggacaactttcccaccaatctacaccccatgtctcagctcagtgcagcygttacagccctcaacagtgaaagtaactttgcccaagcatatgcayggggtatcagccgaaccaagtactgggagttgatttatgaagactctgtggatctaatcacaaagctaccttgtgtcrcagcaaagatctaccgaaatctctatggagaaggcagtggtattggggccattgactctaacctggactggtctcacagtttcaccaacatgttaggctatactgatcatcagttccctgagctcatgcacctgtacctcactatccacagtgaccatgagggcggcaatgtaagtgcccataccagccacttggtgggcagtggcytttcagacccttacctgtcctttgcagcagccatgaacgggctggcagggcctctccatggactggcaaatcaggaagtgcttgtctggctaacacagctgcagaaggaagttggcaaagatgtgtcagatgagaagttaygagactacatctggaacacactcaactcaggacgggctgttccaggctatggccatgcagtactaaggaagactgatccacgatatacctgtcagcgagagtttgctctgaaacacctgcctaatgaccccatgtttaagttggttgctcagctatgcaagattgtgcccaatgtcctcttagagcagggtaaggccaagaatccttggcccaatgtagatgctcacagtggggtgctgctccagtattatggcatgayggagatgaattactacacrgtcctgtttggggtgtcacgagcattgggtgtactggcacagctcatctggagccgagccttaggcttccctctagaaaggcccaagtccatgagcacagagggtctgatgaagtttgtggactctaagtcagggtaaaactggagactgggggaaagtgactaccagaaagtgaggaagcctaaataaaaagtatacttttgtttcagggggcctttaaagacttaagattaaattatatctgaggcactgataatatgtttgaggttaaaatataaattaagactttaaaagatgaaaaatggtcccttcttccctaatcagctccyttcccctgcctggtatgagttgcccatcayaggcatggtcctggaggatgaccaggactaatgcatgtggtatgagtaggtttggccccctcactatctctagagtgagaatctggctcctgtttccatggstcaaagccggttgcagagaatctgyagtcacttyggagctttagcttcttctctgccaagccctcaataagccagcaaaccaggactctgccccttctgtttccataggaatcatgttggatagtcagctgtaccaagccccttggccttcccatgcacacaaacacctcctagcaagacctgttggttagctggacatgctttggcaatttttttatactgccaagtgaccataaaggcatggcatttgttgtgactggcacccaatgtttgattttttttttaaactatccaattaaaattaaggtctgggagtgttctgtttcccattacttta

SEQ ID NO: 2869 - DNA, 2455 bp, Homo sapiens
tgtgtggcagtgtatgtgtgtcgctgggcgggctgtatgtgcggtggttcccacccttgctgagtgtgggtagctctgcggggtgagacacccaatgtcactgcctgaggctttatggggctatccgcagtcgttccagcagcggggtacacttttgctgtgtggagcgctatgttgagtgtcgctgcgaatgtgtgtggctgggtgtacaacaatgtgggtggccggctccatttgaggtgagtgaacgtgtgtgtgcacgcgcgcgtgtgcagccgcgatcagctgtgcgtccctgggtggccgtccgggatcctgacccgcgagtgtgtagccgcgcccccaccccccgcggcgggcactgcgcgtgcgcgctccggcggcgggacccacccgcgcgcccgccatcgcccctttaagagctgcgcccgcgggcggcgtagaggcagcgggcgggggcgcgcgcggcgggaggaggggagcgcgcgtttcccggaacagcccgcgcggaggaaagggaggaaaaaaagccaccctgcggccggggccggagctggagccgccgctgccgccgccgccgcggccgtctggagctcccccgcgcggacgatgcctgccgtgcccgcctggggctcggggcggtgaggcccggggcgcggggtagctatggcgacggcaagcgcggcccgcggcgccgcctgacaggtgtgggccccggcggcggcggcgtggagcagcatgtacgccaaggggggcaagggttcggccgtgccctccgacagccaggcccgcgagaagttggcgctgtacgtttatgagtacctgctgcacatcggtgcccagaagtcagcccagaccttcctgtctgagatccgatgggagaagaacatcacgctgggggagccccctgggttcctgcactcctggtggtgcgtcttctgggacctgtactgcgcggcgcctgacmgaagagaggcctgcgagcactccggcgaggccaaggccttccaggactatagtgctgcagccgcccccagccccgttatggggagtatggccccaggtgacacaatggccgcaggctccatggcggctggcttcttccagcccttcatgtcaccgcgcttcccagggggcccccggcccaccctgcggatgccgagtcagcctcccgcaggcctccctggctcccagcccctcctccctggcgccatggagccctccccacgagcccaggggcatccgagcatgggcggcccaatgcagagggtgacgcctcctcgtggcatggccagcgtggggccccagagctatggaggtggcatgcgacccccacccaactccctcgccggcccaggcctgcctgccatgaacatgggcccaggagttcgtggcccgtgggccagccccagtggaaactcgatcccctactcctcctcatcccccggcagctacaccggacccccaggaggaggtgggccccctggaacacccatcatgcctagccctggagattccaccaactccagcgaaaacatgtacactatcatgaaccccatcgggcagggcgccggcagggctaatttcccgctcggccctggcccggagggccccatggccgccatgagcgcgatggagcctcaccacgtgaacggatccctgggctcgggcgacatggacgggttgccgaagagttcccccggcgccgtggccggcctgagcaacgccccgggcaccccgcgggacgacggcgagatggcggccgccgggaccttcctgcacccgttcccgagcgaaagcgtaagcgactgcgtcgactccccccccgcggcggcgtcgggccggaggggcctggcgggcaggccccggcggggcggccggggggccagagcaagaccgtgaccgcggcgggccaggtgggggggcggccgcggcatcctttccctctcctcaacctctccccaccccccaccacctcccgctcctatttcaccgtcccgatcccatccgcccccaccccgggacccgcgccccagggcggccttcccatgcatcgcccctcccccgttccctcctgtccccaccccatgtctgcccaggacccagccctgccctgtcccccattgtccctgggggcgggtcccagcctcttccggagctgaactcggcccctgcgcgctgccccctcctctctccgcagtactcgccagggatgaccatgagcgtgtgatggggcggcagccccgggcctctctgcgggcctaggcttctgcccagcgcccctgctcagggcgaggggctgaggtcacacctcgggcacctggactcctggccaatcaaggcttgcccagctgggaggccccacacgaaagactcttaccattttattaaaaacgcaaggacctcagagacgttcttttctgtatggacccttyctgccatttgtattttgtcc

SEQ ID NO: 2870 - DNA, 2523 bp, Homo sapiens
tgtgtggcagtgtatgtgtgtcgctgggcgggctgtatgtgcggtggttcccacccttgctgagtgtgggtagctctgcggggtgagacacccaatgtcactgcctgaggctttatggggctatccgcagtcgttccagcagcggggtacacttttgctgtgtggagcgctatgttgagtgtcgctgcgaatgtgtgtggctgggtgtacaacaatgtgggtggccggctccatttgaggtgagtgaacgtgtgtgtgcacgcgcgcgtgtgcagccgcgatcagctgtgcgtccctgggtggccgtccgggatcctgacccgcgagtgtgtagccgcgcccccaccccccgcggcgggcactgcgcgtgcgcgctccggcggcgggacccacccgcgcgcccgccatcgcccctttaagagctgcgcccgcgggcggcgtagaggcagcgggcgggggcgcgcgcggcgggaggaggggagcgcgcgtttcccggaacagcccgcgcggaggaaagggaggaaaaaaagccaccctgcggccggggccggagctggagccgccgctgccgccgccgccgcggccgtctggagctcccccgcgcggacgatgcctgccgtgcccgcctggggctcggggcggtgaggcccggggcgcggggtagctatggcgacggcaagcgcggcccgcggcgccgcctgacaggtgtgggccccggcggcggcggcgtggagcagcatgtacgccaaggggggcaagggttcggccgtgccctccgacagccaggcccgcgagaagttggcgctgtacgtttatgagtacctgctgcacatcggtgcccagaagtcagcccagaccttcctgtctgagatccgatgggagaagaacatcacgctgggggagccccctgggttcctgcactcctggtggtgcgtcttctgggacctgtactgcgcggcgcctgacmgaagagaggcctgcgagcactccggcgaggccaaggccttccaggactatagtgctgcagccgcccccagccccgttatggggagtatggccccaggtgacacaatggccgcaggctccatggcggctggcttcttccagcccttcatgtcaccgcgcttcccagggggcccccggcccaccctgcggatgccgagtcagcctcccgcaggcctccctggctcccagcccctcctccctggcgccatggagccctccccacgagcccaggggcatccgagcatgggcggcccaatgcagagggtgacgcctcctcgtggcatggccagcgtggggccccagagctatggaggtggcatgcgacccccacccaactccctcgccggcccaggcctgcctgccatgaacatgggcccaggagttcgtggcccgtgggccagccccagtggaaactcgatcccctactcctcctcatcccccggcagctacaccggacccccaggaggaggtgggccccctggaacacccatcatgcctagccctggagattccaccaactccagcgaaaacatgtacactatcatgaaccccatcgggcagggcgccggcagggctaatttcccgctcggccctggcccggagggccccatggccgccatgagcgcgatggagcctcaccacgtgaacggatccctgggctcgggcgacatggacgggttgccgaagagttcccccggcgccgtggccggcctgagcaacgccccgggcaccccgcgggacgacggcgagatggcggccgccgggaccttcctgcacccgttcccgagcgaaagcgtaagcgactgcgtcgactccccccccgcggcggcgtcgggccggaggggcctggcgggcaggccccggcggggcggccggggggccagagcaagaccgtgaccgcggcgggccagtactcgccagggatgaccatgagcgtgtgatggggcggcagccccgggcctctctgcgggcctaggcttctgcccagcgcccctgctcagggcgaggggctgaggtcacacctcgggcacctggactcctggccaatcaaggcttgcccagctgggaggccccacacgaaagactcttaccattttattaaaaacgcaaggacctcagagacgttcttttctgtatggacccttyctgccatttgtattttgtcccagagagaaaggctctttggggggcccctctccccaggacgtcagggggtggggcccatmaataaatggaagctggttttggtttttggtagcttgtctcagattccctctttggccttctgccaccacactctccaccctgtggtcttgttccgtccccgcccccatctagccccacctttgagaactgggggcagagcgaggctccaggttctgggctctccctgggagttggggtgatgaccatgggcagaggggrtgggactgaagctgggcgctcaagagtcggggaagtagagggaggcagagtcaggtcacaggccccaagaaccccaggtggaaggagggctga

SEQ ID NO: 2871 - DNA, 2473 bp, Homo sapiens
tgtgtggcagtgtatgtgtgtcgctgggcgggctgtatgtgcggtggttcccacccttgctgagtgtgggtagctctgcggggtgagacacccaatgtcactgcctgaggctttatggggctatccgcagtcgttccagcagcggggtacacttttgctgtgtggagcgctatgttgagtgtcgctgcgaatgtgtgtggctgggtgtacaacaatgtgggtggccggctccatttgaggtgagtgaacgtgtgtgtgcacgcgcgcgtgtgcagccgcgatcagctgtgcgtccctgggtggccgtccgggatcctgacccgcgagtgtgtagccgcgcccccaccccccgcggcgggcactgcgcgtgcgcgctccggcggcgggacccacccgcgcgcccgccatcgcccctttaagagctgcgcccgcgggcggcgtagaggcagcgggcgggggcgcgcgcggcgggaggaggggagcgcgcgtttcccggaacagcccgcgcggaggaaagggaggaaaaaaagccaccctgcggccggggccggagctggagccgccgctgccgccgccgccgcggccgtctggagctcccccgcgcggacgatgcctgccgtgcccgcctggggctcggggcggtgaggcccggggcgcggggtagctatggcgacggcaagcgcggcccgcggcgccgcctgacaggtgtgggccccggcggcggcggcgtggagcagcatgtacgccaaggggggcaagggttcggccgtgccctccgacagccaggcccgcgagaagttggcgctgtacgtttatgagtacctgctgcacatcggtgcccagaagtcagcccagaccttcctgtctgagatccgatgggagaagaacatcacgctgggggagccccctgggttcctgcactcctggtggtgcgtcttctgggacctgtactgcgcggcgcctgacmgaagagaggcctgcgagcactccggcgaggccaaggccttccaggactatagtgctgcagccgcccccagccccgttatggggagtatggccccaggtgacacaatggccgcaggctccatggcggctggcttcttccagggcccccccggctcccagccgtccccccacaaccccaacgcccccatgatggggcctcacggtcagcccttcatgtcaccgcgcttcccagggggcccccggcccaccctgcggatgccgagtcagcctcccgcaggcctccctggctcccagcccctcctccctggcgccatggagccctccccacgagcccaggggcatccgagcatgggcggcccaatgcagagggtgacgcctcctcgtggcatggccagcgtggggccccagagctatggaggtggcatgcgacccccacccaactccctcgccggcccaggcctgcctgccatgaacatgggcccaggagttcgtggcccgtgggccagccccagtggaaactcgatcccctactcctcctcatcccccggcagctacaccggacccccaggaggaggtgggccccctggaacacccatcatgcctagccctggagattccaccaactccagcgaaaacatgtacactatcatgaaccccatcgggcagggcgccggcagggctaatttcccgctcggccctggcccggagggccccatggccgccatgagcgcgatggagcctcaccacgtgaacggatccctgggctcgggcgacatggacgggttgccgaagagttcccccggcgccgtggccggcctgagcaacgccccgggcaccccgcgggacgacggcgagatggcggccgccgggaccttcctgcacccgttcccgagcgaaagctactcgccagggatgaccatgagcgtgtgatggggcggcagccccgggcctctctgcgggcctaggcttctgcccagcgcccctgctcagggcgaggggctgaggtcacacctcgggcacctggactcctggccaatcaaggcttgcccagctgggaggccccacacgaaagactcttaccattttattaaaaacgcaaggacctcagagacgttcttttctgtatggacccttyctgccatttgtattttgtcccagagagaaaggctctttggggggcccctctccccaggacgtcagggggtggggcccatmaataaatggaagctggttttggtttttggtagcttgtctcagattccctctttggccttctgccaccacactctccaccctgtggtcttgttccgtccccgcccccatctagccccacctttgagaactgggggcagagcgaggctccaggttctgggctctccctgggagttggggtgatgaccatgggcagaggggrtgggactgaagctgggcgctcaagagtcggggaagtagagggaggcagagtcaggtcacaggccccaagaaccccaggtggaaggagggctga

SEQ ID NO: 2872 - DNA, 2589 bp, Homo sapiens
tgtgtggcagtgtatgtgtgtcgctgggcgggctgtatgtgcggtggttcccacccttgctgagtgtgggtagctctgcggggtgagacacccaatgtcactgcctgaggctttatggggctatccgcagtcgttccagcagcggggtacacttttgctgtgtggagcgctatgttgagtgtcgctgcgaatgtgtgtggctgggtgtacaacaatgtgggtggccggctccatttgaggtgagtgaacgtgtgtgtgcacgcgcgcgtgtgcagccgcgatcagctgtgcgtccctgggtggccgtccgggatcctgacccgcgagtgtgtagccgcgcccccaccccccgcggcgggcactgcgcgtgcgcgctccggcggcgggacccacccgcgcgcccgccatcgcccctttaagagctgcgcccgcgggcggcgtagaggcagcgggcgggggcgcgcgcggcgggaggaggggagcgcgcgtttcccggaacagcccgcgcggaggaaagggaggaaaaaaagccaccctgcggccggggccggagctggagccgccgctgccgccgccgccgcggccgtctggagctcccccgcgcggacgatgcctgccgtgcccgcctggggctcggggcggtgaggcccggggcgcggggtagctatggcgacggcaagcgcggcccgcggcgccgcctgacaggtgtgggccccggcggcggcggcgtggagcagcatgtacgccaaggggggcaagggttcggccgtgccctccgacagccaggcccgcgagaagttggcgctgtacgtttatgagtacctgctgcacatcggtgcccagaagtcagcccagaccttcctgtctgagatccgatgggagaagaacatcacgctgggggagccccctgggttcctgcactcctggtggtgcgtcttctgggacctgtactgcgcggcgcctgacmgaagagaggcctgcgagcactccggcgaggccaaggccttccaggactatagtgctgcagccgcccccagccccgttatggggagtatggccccaggtgacacaatggccgcaggctccatggcggctggcttcttccagggcccccccggctcccagccgtccccccacaaccccaacgcccccatgatggggcctcacggtcagcccttcatgtcaccgcgcttcccagggggcccccggcccaccctgcggatgccgagtcagcctcccgcaggcctccctggctcccagcccctcctccctggcgccatggagccctccccacgagcccaggggcatccgagcatgggcggcccaatgcagagggtgacgcctcctcgtggcatggccagcgtggggccccagagctatggaggtggcatgcgacccccacccaactccctcgccggcccaggcctgcctgccatgaacatgggcccaggagttcgtggcccgtgggccagccccagtggaaactcgatcccctactcctcctcatcccccggcagctacaccggacccccaggaggaggtgggccccctggaacacccatcatgcctagccctggagattccaccaactccagcgaaaacatgtacactatcatgaaccccatcgggcagggcgccggcagggctaatttcccgctcggccctggcccggagggccccatggccgccatgagcgcgatggagcctcaccacgtgaacggatccctgggctcgggcgacatggacgggttgccgaagagttcccccggcgccgtggccggcctgagcaacgccccgggcaccccgcgggacgacggcgagatggcggccgccgggaccttcctgcacccgttcccgagcgaaagcgtaagcgactgcgtcgactccccccccgcggcggcgtcgggccggaggggcctggcgggcaggccccggcggggcggccggggggccagagcaagaccgtgaccgcggcgggccagtactcgccagggatgaccatgagcgtgtgatggggcggcagccccgggcctctctgcgggcctaggcttctgcccagcgcccctgctcagggcgaggggctgaggtcacacctcgggcacctggactcctggccaatcaaggcttgcccagctgggaggccccacacgaaagactcttaccattttattaaaaacgcaaggacctcagagacgttcttttctgtatggacccttyctgccatttgtattttgtcccagagagaaaggctctttggggggcccctctccccaggacgtcagggggtggggcccatmaataaatggaagctggttttggtttttggtagcttgtctcagattccctctttggccttctgccaccacactctccaccctgtggtcttgttccgtccccgcccccatctagccccacctttgagaactgggggcagagcgaggctccaggttctgggctctccctgggagttggggtgatgaccatgggcagaggggrtgggactgaagctgggcgctcaagagtcggggaagtagagggaggcagagtcaggtcacaggccccaagaaccccaggtggaaggagggctga

SEQ ID NO: 2873 - DNA, 2403 bp, Homo sapiens
cacagccagtgcaccggaggggcgcgctcccgagctggcgcagtttcccagcgcggtgcccgcccctcatcctcctccagtctccctcccctcgccgactgccgccccaggctccgccatggggaatgtgccatccgcggtgaagcactgcctcagctaccagcagcttctccgggagcatctctggatcggggattcagtggcaggggcgctcgaccccgcgcaggaaacatcccagttatctggactccctgagtttgttaaaatagtagaagttgggcctagggatggattgcagaatgaaaaggttatagttcctacagatataaaaattgaatttatcaatcgactttcccaaactggcttgtctgtaatagaagtgactagctttgtgtcttccagatgggtaccacagatggctgatcacactgaagtaatgaaaggcatkcatcaatatccaggagttcgctatcctgtccttactcctaatcttcagggttttcaccatgctgttgctgctggagctactgagatatcagtttttggagctgcatctgaatcctttagcaagaagaatattaactgttccattgaagaaagtatgggaaaatttgaggaggttgttaagtctgcaagacacatgaatattccagcacgagggtatgtgtcttgtgctctgggctgtccatatgaaggaagtattacaccgcaaaaagtgacagaagtgtctaagagattgtacggcatgggttgttatgagatctctctaggagacacaattggagtgggaactccaggaagtatgaaaagaatgttggaaagtgtgatgaaagaaatcccaccaggtgctcttgctgttcactgtcatgacacatacggacaagccttagcaaatatccttacggcccttcagatgggaattaatgtggtggactccgcagtatccggattaggtggctgcccttatgcaaaaggtgcttctgggaatgtagccactgaggatttgatatatatgcttaatggcctggggctcaatacaggtgtgaatctatacaaagtgatggaagctggtgactttatttgcaaagctgtgaataaaaccacaaactctaaagtagcacaagcctccttcaatgcttgacttgaatggatttatgacgtaccgttgagaagatcaatttcagctacaatactcatctgaaaatcattaatgccaacttgctctgatatgtgaagtaatggacaagagtgggaaaaaagagatccttttcaaaaagattataactggatagattaagtcaacaaaatgcaatatcagtcatcaggtaaattgcaagctgaggataaataataaaacttgtcataattttgaacttggaaaaaagtttcttttgctctcatagaaataactttttaatttagtagatgggaaaattgacttcgtatttccccaagtatcaaatactgtgttaatacttaatcaagcaggcttaacactgtgtacatattgtcagtagtttatgagctcctgcatagtatgcagagtgtgtggcctcaatattatacattatgcctctggatctcaactactcatttgccaagtcagttatgttatggaccaaaagccaaatctccatctgaccctacataattttagcaatagaacttttatatttcaagtatggytaacatctgttaactatttcagtgactttatctggttccaagaggctgtggccaatggcaagatgccatatcctggaaacatattacgacctcccatgtttgttacatgcatccagtttaccacactttacctgtcatcagttatagtaaaaaccagcatggtgttactcaactattgagaaattgtaagctattttttttgtcctgatgtctaaattgcagtgataagaataggttgatacatgtatcataatctacctttataattttcagatcactttcaaattgcccaaggaaatattgtgatcctaagaatattaagataattttaggttaatgaaatacccattttccttttattcatggtgctttgcttacccacattattttttggtgtattttttagtggttattttagaagttgaagtggctgaaattttgtctattgtcttagaattgattgccagaaattgcaagatgtaatatatcaaagtcagggatgaggagcaggaggactattcaagataaacttctgtaacctatgcatattttatgggggcagtattattacaaatggatctgaaatgtcagttctagtatttagagagacttctctaataataccgggtgatattatctttgagtaaatttgaatataaattgaaacataaaaatgagtattgtgaactttctmggaaatattcattaaaaccattg

SEQ ID NO: 2874 - DNA, 3462 bp, Homo sapiens
cactcattggacttcagcatgactactcagttgccagcttacgtggcaattttgcttttctatgtctcaagagccagctgccaggacactttcaytgcagctgtttatgagcatgcagcgatattgcccaatgccaccctaacaccagtgtctcgtgaggaggctttggcattaatgaatcggaatctggacattttggaaggagcgatcacatcagcagcagatcagggtgcgcatattattgtgactccagaagatgctatttatggctggaacttcaacagggactctctctacccatatttggaggacatcccagaccctgaagtaaactggatcccctgtaataatcgtaacagatttggccagaccccagtacaagaaagactcagctgcctggccaagaacarctctatctatgtygtggcwaatattggggacaagaagccatgcgataccagtgatcctcagtgtccccctgatggccgttaccaatacaacactgatgtggtatttgattctcaaggaaaactggtggcacrctaccataagcaaaaccttttcatgggtgaaaatcaattcaatgtacccaaggagcctgagattgtgactttcaataccacctttggaagttttggcattttcacatgctttgatatactcttccatgatcctgctgttaccttggtgaaagatttccacgtggacaccatagtattcccaacagcttggatgaatgttttgccacatttgtcagctgttgaattccactcagcttgggctatgggcatgagggtcaatttccttgcatccaacatacattacccctcaaagaaaatgacaggaagtggcatctatgcacccaattcttcaagagcatttcattatgatatgaagacagaagagggaaaactcctcctctcgcaactggattcycacccatcccattctgcagtggtgaactggacttcctatgccagcagtatagaagmgctctcatcaggaaacaaggaatttaaaggcactgtctttttcgatgaattcacttttgtgaagctcacaggagttgcaggaaattatacagtttgtcagaaagatctctgctgtcatttaagctacaaaatgtctgagaacayaccaaatgaagtgtacgctctaggggcatttgacggactgcacactgtggaagggcgctattatctacagatttgtaccctgttgaaatgtaaaacgactaatttaaacacttgcggtgactcagctgaaacagcttctaccaggtttgaaatgttctccctcagtggcactttcggaacccagtatgtctttcctgaggtgttgctgagtgaaaatcagcttgcacctggagaatttcaggtgtcaactgacggacgcttgtttagtctgaagccaacatccggacctgtcttaacagtaactctgtttgggaggttgtatgagaaggactgggcatcaaatgcttcatcaggcctcacagcacaagcaagaataataatgctaatagttatagcacctattgtatgctcattaagttggyagaatattgactttttctcttttttatttgggataatttaaaaaatgatggatgagaaaagaaagattggtccgggttaatattatcctctagtataagtgaattactagtttctctttatttagacaaacacacacacaccagataatataaacttaataaattatctgttaatgtagattttatttaaaaaactatatttgaacattggtctttcttggacgtgagctaattatatcaaataagtatcacaaatcttttacgcagaagaaataaaaactacgggtagaaaacataagaactatcataaaatttacttacaaggaggctgctcttgttaccacttttattatattacgtatcacttattcagctctgctgaaaatttccaatgactttgtttgtttgctcttttwgttttttacctaaacaatacattttgattctcttgtgggttgataatgtctccccaaaatttacatgttgaagcacctcagaatgtgactgtatttggagacagggtctttaaagaggtaaaataaggtcattaggatagaccctaattcaatatgactgatgatcataaaagaagaggcgagtagggcacaacaggcacaaagggagaccataaggagacacagaggaaggacaactctttacaagctaagaagagagggcctcagaagaaaccaaccctgccaacaccttgatcttggacttccagcctccaaaactatgagaaataaatttctattgtttaagtcacccagtccatggtactttgttaggcagccctggcaaatgaatcaaagacccattcctgttcctctccccaccactactgttttctactgtaatctgaagcttcaacaaaaggcttacctggtaagaatattcagctggtctgggtcctcaagactccaatagacactcttaragaaggattgctgatggattgatagtgaaaccattagatcattgaattcctctggaattagaaaaccagagagtcccattttaagaaattagatatttaatatagcattgtgtgttctattttagtaacagcagaatctcttgacattacacaactcagtgaaacaacatcatttaagccaaaatatctcccaactgactgatagactctgagcactaatatcatagtgctgtgatgatggacaattacatagtaccgataacagccatgcactgtgcaaagcatgcccttctgcacaggagagcaaggcacttgcagtagtgatctatgccagcaaaacatcattttgagacaaacatttttgtggcagatgtttttcctaaaaagtactatatcatccaagaaatatttgagtaaaatcccttgttcttttgggtgacattaactgacatttgctttttttcaagacctaatagaaaataagaaagcccataatgtatttagaaacaggaatcctcagagcaattctctgtattctcatataatttcaatgtaaaacagaaaacatattgatgtgttggtgataggcttgaattattaaaaacttcaaaaacatcctaagtgtttcttttttgctcaacgttgtcaactatagtaggtctcccttgtggtgtaatgaattgcccccaaactattatcttaaaacaacaaacatttattatcttatagcatttctgagggtcaggatctgggactggcttagtggagttgttctggatcagggcctttggaaagttgtagttaacttgtccccagggctgccatcatctcaaggctcrggtggggctggagaaaatctgcttctcagctcactcacggcggttgccaggcctccattctttaggatgctagaaaaactttcataaaatgtcatctggcttctcctagagcaatgatactgagagag

SEQ ID NO: 2875 - DNA, 3614 bp, Homo sapiens
agagtttccttacagctgaacacgtggagggttcctggagggtggcacacctaggggtgcgtggaaggctctccagtccttcccccataccttgctctatgcacctcttcatttgtatcctttgtaatatcctttacaataagccactaaagcactcattggacttcagcatgactactcagttgccagcttacgtggcaattttgcttttctatgtctcaagagccagctgccaggacactttcaytgcagctgtttatgagcatgcagcgatattgcccaatgccaccctaacaccagtgtctcgtgaggaggctttggcattaatgaatcggaatctggacattttggaaggagcgatcacatcagcagcagatcagggtgcgcatattattgtgactccagaagatgctatttatggctggaacttcaacagggactctctctacccatatttggaggacatcccagaccctgaagtaaactggatcccctgtaataatcgtaacagatttggccagaccccagtacaagaaagactcagctgcctggccaagaacarctctatctatgtygtggcwaatattggggacaagaagccatgcgataccagtgatcctcagtgtccccctgatggccgttaccaatacaacactgatgtggtatttgattctcaaggaaaactggtggcacrctaccataagcaaaaccttttcatgggtgaaaatcaattcaatgtacccaaggagcctgagattgtgactttcaataccacctttggaagttttggcattttcacatgctttgatatactcttccatgatcctgctgttaccttggtgaaagatttccacgtggacaccatagtattcccaacagcttggatgaatgttttgccacatttgtcagctgttgaattccactcagcttgggctatgggcatgagggtcaatttccttgcatccaacatacattacccctcaaagaaaatgacaggaagtggcatctatgcacccaattcttcaagagcatttcattatgatatgaagacagaagagggaaaactcctcctctcgcaactggattcycacccatcccattctgcagtggtgaactggacttcctatgccagcagtatagaagmgctctcatcaggaaacaaggaatttaaaggcactgtctttttcgatgaattcacttttgtgaagctcacaggagttgcaggaaattatacagtttgtcagaaagatctctgctgtcatttaagctacaaaatgtctgagaacayaccaaatgaagtgtacgctctaggggcatttgacggactgcacactgtggaagggcgctattatctacagatttgtaccctgttgaaatgtaaaacgactaatttaaacacttgcggtgactcagctgaaacagcttctaccaggtttgaaatgttctccctcagtggcactttcggaacccagtatgtctttcctgaggtgttgctgagtgaaaatcagcttgcacctggagaatttcaggtgtcaactgacggacgcttgtttagtctgaagccaacatccggacctgtcttaacagtaactctgtttgggaggttgtatgagaaggactgggcatcaaatgcttcatcaggcctcacagcacaagcaagaataataatgctaatagttatagcacctattgtatgctcattaagttggyagaatattgactttttctcttttttatttgggataatttaaaaaatgatggatgagaaaagaaagattggtccgggttaatattatcctctagtataagtgaattactagtttctctttatttagacaaacacacacacaccagataatataaacttaataaattatctgttaatgtagattttatttaaaaaactatatttgaacattggtctttcttggacgtgagctaattatatcaaataagtatcacaaatcttttacgcagaagaaataaaaactacgggtagaaaacataagaactatcataaaatttacttacaaggaggctgctcttgttaccacttttattatattacgtatcacttattcagctctgctgaaaatttccaatgactttgtttgtttgctcttttwgttttttacctaaacaatacattttgattctcttgtgggttgataatgtctccccaaaatttacatgttgaagcacctcagaatgtgactgtatttggagacagggtctttaaagaggtaaaataaggtcattaggatagaccctaattcaatatgactgatgatcataaaagaagaggcgagtagggcacaacaggcacaaagggagaccataaggagacacagaggaaggacaactctttacaagctaagaagagagggcctcagaagaaaccaaccctgccaacaccttgatcttggacttccagcctccaaaactatgagaaataaatttctattgtttaagtcacccagtccatggtactttgttaggcagccctggcaaatgaatcaaagacccattcctgttcctctccccaccactactgttttctactgtaatctgaagcttcaacaaaaggcttacctggtaagaatattcagctggtctgggtcctcaagactccaatagacactcttaragaaggattgctgatggattgatagtgaaaccattagatcattgaattcctctggaattagaaaaccagagagtcccattttaagaaattagatatttaatatagcattgtgtgttctattttagtaacagcagaatctcttgacattacacaactcagtgaaacaacatcatttaagccaaaatatctcccaactgactgatagactctgagcactaatatcatagtgctgtgatgatggacaattacatagtaccgataacagccatgcactgtgcaaagcatgcccttctgcacaggagagcaaggcacttgcagtagtgatctatgccagcaaaacatcattttgagacaaacatttttgtggcagatgtttttcctaaaaagtactatatcatccaagaaatatttgagtaaaatcccttgttcttttgggtgacattaactgacatttgctttttttcaagacctaatagaaaataagaaagcccataatgtatttagaaacaggaatcctcagagcaattctctgtattctcatataatttcaatgtaaaacagaaaacatattgatgtgttggtgataggcttgaattattaaaaacttcaaaaacatcctaagtgtttcttttttgctcaacgttgtcaactatagtaggtctcccttgtggtgtaatgaattgcccccaaactattatcttaaaacaacaaacatttattatcttatagcatttctgagggtcaggatctgggactggcttagtggagttgttctggatcagggcctttggaaagttgtagttaacttgtccccagggctgccatcatctcaaggctcrggtggggctggagaaaatctgcttctcagctcactcacggcggttgccaggcctccattctttaggatgctagaaaaactttcataaaatgtcatctggcttctcctagagcaatgatactgagagag

SEQ ID NO: 2876 - DNA, 2166 bp, Homo sapiens
gcggggacccgatggccacggtggctctgggttgtcgggcctcgaaccgggtctccagacgttgggcccctccctcccagcgcgggagaggcggggaagggggcggggcgggggaggggccgcagcgcttttctccggaggtcgcgcgcccgagagcccgcgctgtccgccgccgctgcctgagtcgactctgcgccgcccgccgcgatggaggccgccgcccagttcttcgtcgagagcccggacgtggtctacggccccgaggccatcgaggcgcaatacgagtaccggacgacgcgcgtcagccgcgagggtggcgttctcaagctggagcagatccgcagggacatccragacttccggtctagcgcggggctggacaaagtcatagtgctgtggacggcgaayacggagcgcttctgtgaggtgattccaggcctcaacgacacagccgagaacctgctgcgcaccattgagctcggtctggaggtgtcgccctccacgctcttcgccgtggccagcatcctggagggctgtgccttcctcaatgggtctccgcagaacaccctggtgcccggagctcttgagctcgcgtggcagcaccgggtttttgtgggcggagatgacttcaagtcaggccagaccaaagtcaagtccgtgcttgtggacttcctcattggctccggcctcaagaccatgtccatcgtgagttacaaccacctgggcaacaacgatggggagaacctrtcggcgccattgcagttccgctctaaggaggtgtccaagagcaacgtggtggacgacatggtgcagagcaacccagtgctctatacgcccggcgaagagcctgaccactgcgtgcgtggggcgcgggcgcgggcgcggggttgcccggcgaggggtgscagggacccgggcaaactcctgctgcactccaggtggtcatcaagtatgtgccgtacgtgggtgacagcaagcgcgcgctggatgagtatacctcggagctgatgctgggcggaaccaacacactggtgctgcacaacacgtgtgaggactcgctgctggccgcacccatcatgctggacctagcgctgctgaccgagctgtgccagcgcgtgagcttctgcactgacatggaccccgagccgcagaccttccaccccgtgctgtccctgctcagcttcctcttcaaggcgccactagtgccgcccggcagcccggtggtcaatgcgcttttccgccagcgcagctgcatcgagaacatcctcagggcctgcgtggggctcccgccacagaaccacatgctcctggaacacaaaatggagcgcccagggcccagcctcaagcgagttggacccgtggctgccacctaccctatgttgaacaagaaaggaccggtacccgctgccacmaatggctgcaccggtgatgccaatgggcatytgcaagaggagcccccaatgcccmccacctgaggccccggtcacacagtttytcggctcttcctccccgctgccccccacgaccctaccttgaaggcccccacaaataaaggcgctgccactcagccctccttccacctggggttcttggggcctgtgacctgactctgcctccctctacttccccgactcttgagcgcccagcttcagtcccaycccctctgcccatggtcatcaccccaactcccagggagagcccagaacctggagcctcgctctgcccccagttctcaaaggtggggctagatgggggcggggacggaacaagaccacagggtggagagtgtggtggcagaaggccaaagagggaatctgagacaagctaccaaaaaccaaaaccagcttccatttattkatgggccccaccccctgacgtcctggggagaggggccccccaaagagcctttctctctgggacaaaatacaaatggcagraagggtccatacagaaaagaacgtctctgaggtccttgcgtttttaataaaatggtaagagtctttcgtgtggggcctcccagctgggcaagccttgattggccaggagtccaggtgcccgaggtgtgacctcagcccctcgccctgagcaggggcgctgggcagaagcctaggcccgcagagaggcccggggctgccgccccatcacacgctcatggtcatccctggc

SEQ ID NO: 2877 - DNA, 2575 bp, Homo sapiens
gcggggacccgatggccacggtggctctgggttgtcgggcctcgaaccgggtctccagacgttgggcccctccctcccagcgcgggagaggcggggaagggggcggggcgggggaggggccgcagcgcttttctccggaggtcgcgcgcccgagagcccgcgctgtccgccgccgctgcctgagtcgactctgcgccgcccgccgcgatggaggccgccgcccagttcttcgtcgagagcccggacgtggtctacggccccgaggccatcgaggcgcaatacgagtaccggacgacgcgcgtcagccgcgagggtggcgttctcaaggtgcaccccacgtccacgcgcttcaccttccggaccgcccggcaggtgccccggctcggggtcatgcttgtcggctggggcgggaacaacggctccacactcaccgccgcggtgctggccaatcgactgcgtttgtcctggcccacgcgcagcggccgcaaggaggccaactactacggctcgctgactcaggcgggcaccgtgagcctgggcctggacgccgagggccaggaggtgttcgtacccttcagcgcggtgctgcccatggtggcgcccaacgacctcgtgttcgatggctgggacatctcgtcgctgaacctggccgaggcgatgcggcgcgcgaaggtgctggactgggggctgcaggagcaactgtggccgcacatggaggccctgcggccccggccttctgtttacatccccgaattcatcgcggccaaccagagcgcgcgcgcggacaacctcatcccaggctcgcgtgcgcagcagctggagcagatccgcagggacatccragacttccggtctagcgcggggctggacaaagtcatagtgctgtggacggcgaayacggagcgcttctgtgaggtgattccaggcctcaacgacacagccgagaacctgctgcgcaccattgagctcggtctggaggtgtcgccctccacgctcttcgccgtggccagcatcctggagggctgtgccttcctcaatgggtctccgcagaacaccctggtgcccggagctcttgagctcgcgtggcagcaccgggtttttgtgggcggagatgacttcaagtcaggccagaccaaagtcaagtccgtgcttgtggacttcctcattggctccggcctcaagaccatgtccatcgtgagttacaaccacctgggcaacaacgatggggagaacctrtcggcgccattgcagttccgctctaaggaggtgtccaagagcaacgtggtggacgacatggtgcagagcaacccagtgctctatacgcccggcgaagagcctgaccactgcgtggtcatcaagtatgtgccgtacgtgggtgacagcaagcgcgcgctggatgagtatacctcggagctgatgctgggcggaaccaacacactggtgctgcacaacacgtgtgaggactcgctgctggccgcacccatcatgctggacctagcgctgctgaccgagctgtgccagcgcgtgagcttctgcactgacatggaccccgagccgcagaccttccaccccgtgctgtccctgctcagcttcctcttcaaggcgccactagtgccgcccggcagcccggtggtcaatgcgcttttccgccagcgcagctgcatcgagaacatcctcagggcctgcgtggggctcccgccacagaaccacatgctcctggaacacaaaatggagcgcccagggcccagcctcaagcgagttggacccgtggctgccacctaccctatgttgaacaagaaaggaccggtacccgctgccacmaatggctgcaccggtgatgccaatgggcatytgcaagaggagcccccaatgcccmccacctgaggccccggtcacacagtttytcggctcttcctccccgctgccccccacgaccctaccttgaaggcccccacaaataaaggcgctgccactcagccctccttccacctggggttcttggggcctgtgacctgactctgcctccctctacttccccgactcttgagcgcccagcttcagtcccaycccctctgcccatggtcatcaccccaactcccagggagagcccagaacctggagcctcgctctgcccccagttctcaaaggtggggctagatgggggcggggacggaacaagaccacagggtggagagtgtggtggcagaaggccaaagagggaatctgagacaagctaccaaaaaccaaaaccagcttccatttattkatgggccccaccccctgacgtcctggggagaggggccccccaaagagcctttctctctgggacaaaatacaaatggcagraagggtccatacagaaaagaacgtctctgaggtccttgcgtttttaataaaatggtaagagtctttcgtgtggggcctcccagctgggcaagccttgattggccaggagtccaggtgcccgaggtgtgacctcagcccctcgccctgagcaggggcgctgggcagaagcctaggcccgcagagaggcccggggctgccgccccatcacacgctcatggtcatccctggc

SEQ ID NO: 2878 - DNA, 1580 bp, Homo sapiens
agtgctccctatgaattgctgagggagagatacagcatagaaaaaaacaaggtgatgcgatggcgaggaagctcagtgtattggaagtccttctgatcatcttctgcttaattgtggtgaccatagatatcctcttgctgcttcttgtgttggaggaaacttcagatacttcatttactccagagtgcccagagattccccagtcggaaaggatagactgcacacctgaccaggaggtgaccgaggatatctgcagatggcaatataagtgctgctggtcgcctgtggcagatgccaatgtccctaggtgcttcttcccctggaactggggctatgaagccagcaatggccatacaaatacaagcacaggatttactgcccagttgaaaaggttgccatcaccatctctgtttggaaatgatgtcgccaccacccttttcacagctgaatatcagacatccaatcggtttcattttaagatcactgactttaataacatacgctatgaagtttcccatraaaatattaacctggttgatgggattgctgatgcctccaatttgagctattacgtggaggttactgataaacctttcagcatcaaaataatgaggacaagcaacagaagagtcttgttggacacgagcatcgggcccctccagtttgcccagcagtacctgcaactgtctttccgactgcccagtgccaatgtgtatgggctgggagagcatgtgcaccagcagtaccgccacaatatgacctggaagacttggcccatcttcacccgggacgctacccccaccgagggcatgattaatctgtatggagctcatacattcttcttgtgccttgaagatgccaggggctcctcttttggagtatttctgatgaacagtaatgccatggaggttacccttcagccagctcctgcgatcacttatcgcacgattggaggcattcttgacttttacgtattcctaggaaacactccagaacaagtggttcaggaatacttggagcttgttggacggccattcttccctccctattggagtcttgggttccagcttagtcgcagggactatggtggcatcaataaattgaaagaagttgtaagccgaaatcgtttagctgagataccatatgatgtccagtactctgacatagactacatggatggaaagaaggatttcactgttgatgaagtcgcttactctggtctcccagattttgtcaaggagttacatgacaatggacagaaatatcttattattatgaatcctggcatctccaaaaactctaactacgagccctataataatggaagcctaaagagagtgtggatcttggggagcaatggctttgctgttggggagggatatccgggaccgacagtctttcccgattataccaatccagtatgcactgagtggtggacagatcaggtcgctaaatttcatgatcatctggagtttgatggagtgtggattgtaagttattattcctgactcaaatttcctttggaaacagataacgccaaattttcagatgagttttgaccttgatgtcaaataaatgtc

SEQ ID NO: 2879 - DNA, 7673 bp, Homo sapiens
agtgctccctatgaattgctgagggagagatacagcatagaaaaaaacaaggtgatgcgatggcgaggaagctcagtgtattggaagtccttctgatcatcttctgcttaattgtggtgaccatagatatcctcttgctgcttcttgtgttggaggaaacttcagatacttcatttactccagagtgcccagagattccccagtcggaaaggatagactgcacacctgaccaggaggtgaccgaggatatctgcagatggcaatataagtgctgctggtcgcctgtggcagatgccaatgtccctaggtgcttcttcccctggaactggggctatgaagccagcaatggccatacaaatacaagcacaggatttactgcccagttgaaaaggttgccatcaccatctctgtttggaaatgatgtcgccaccacccttttcacagctgaatatcagacatccaatcggtttcattttaagatcactgactttaataacatacgctatgaagtttcccatraaaatattaacctggttgatgggattgctgatgcctccaatttgagctattacgtggaggttactgataaacctttcagcatcaaaataatgaggacaagcaacagaagagtcttgttggacacgagcatcgggcccctccagtttgcccagcagtacctgcaactgtctttccgactgcccagtgccaatgtgtatgggctgggagagcatgtgcaccagcagtaccgccacaatatgacctggaagacttggcccatcttcacccgggacgctacccccaccgagggcatgattaatctgtatggagctcatacattcttcttgtgccttgaagatgccaggggctcctcttttggagtatttctgatgaacagtaatgccatggaggttacccttcagccagctcctgcgatcacttatcgcacgattggaggcattcttgacttttacgtattcctaggaaacactccagaacaagtggttcaggaatacttggagcttgttggacggccattcttccctccctattggagtcttgggttccagcttagtcgcagggactatggtggcatcaataaattgaaagaagttgtaagccgaaatcgtttagctgagataccatatgatgtccagtactctgacatagactacatggatggaaagaaggatttcactgttgatgaagtcgcttactctggtctcccagattttgtcaaggagttacatgacaatggacagaaatatcttattattatgaatcctggcatctccaaaaactctaactacgagccctataataatggaagcctaaagagagtgtggatcttggggagcaatggctttgctgttggggagggatatccgggaccgacagtctttcccgattataccaatccagtatgcactgagtggtggacagatcaggtcgctaaatttcatgatcatctggagtttgatggagtgtggattgaaatgaatgaagtatctagcttactccaagcttctaataaccagtgtgaatccaacaacttgaactttcctccttttcttcctagagttctggatcacttactttttgcaagaactctctgcatggacacggagtttcatgggggccttcattatgacatccacagcttgtatggccactccatggcaagaaccacaaacttagccctggagaccatcttcatgaataataggagcttcatcttatcccgttctacttttgctggatctggcaaatttgctgctcattggctgggggacaatgcggccacatgggatgacctccgatggtctatccccactatccttgagttcaacctgtttggcatccccatggtaggtgccaacatctgtggttataacaacaatgtcacagaggagctctgcagaaggtggatgcagcttggagcattttatccactaccaaggaatcacaatgggcctgggttcagggaccaggatcccgctgcctttggtgttgattccctgctgctgaaatcctccagacattatctgaacatccgctacaccttgctgccctatctctatacccttttctaccgtgctcacacccggggagagacggtagcaaggccccttgtacatgagttctaccaggactcagccacgtgggatgtgcatgagcagttcttatggggacctggactcctcatcacgcctgttttatatgaaggtgtggacgaagtgaaagcatacatacctgatgccacctggtatgactatgagacagtaatggccatctcatggaggaaacagttggtgaatatgcttctcccaggtgacaagataggacttcatctgcgagggggctacatatttcccactcagaagccaaacacaaccacagaagccagccggaggaattccctgggactcatcatcgccttggactataagagagaagcaaagggggagctgtactgggatgacggtgtatctaaagatgctgtgactgaaaagaagtatattctatatgatttctctgttacctctaaccatctacaagcaaagattataaataataattatatggacactgacaacctcatgttcacagatatcacaatcttgggaatggacaaacagccagctaattttatcgtcctactgaataatgttgccacctccagtccaagcgttgtctacaatgcttccacaaaggtggtaaccatcactgatctccaaggactggtactgggacaagaattctctattaggtggaatcttcctgtcagtgacctggagaagttcaactgctaccctgatgatccaacagcctctgaggagagttgtaggcagcgggggtgtctttgggaggacacatctactcctggagtgcccacctgttactatgacaccatccctaattatgttgctagtgatattcagtacctgaacaccagcatcactgcagacctttccctcccgatggcccctgagtcagctgctgctgccgcctctgattctctctctgcaaagatcagcttcctccacctgaaagtgatctatcacacagcaaccatgctgcaggtcaagatctatgaccccactaataaaaggtatgaggttccagtaccactgaacacccctccccaaccagttggtgaccctgaaaaccgtctgtatgatgtcaggattcagaacaatccttttggaatccagattcaacgcaaaaactccagcactgtgatttgggattctcaactccctggcttcatcttcaatgacatgtttctctccatttctacgcgtctgccgtcccagtacatctatggctttggggaaactgagcacacgactttcagaagaaacatgaactggaacacatggggaatgtttgctcatgatgagccacctgcgtacaagaagaattcctatggtgtccacccttactacatggcactggaggaggatggtagtgcccatggagtgctcctgctaaatagcaatgccatggatgtgacattacagcccactcctgctctgacataccgcaccacaggagggattttggacttctacattgttttggggccaacccctgaacttgtaactcagcaatacacagagttgattggtcggccagcaatgattccatactgggccttgggattccatctgagtcgctatggataccagaatgatgctgaaatctccagtttgtatgatgcaatggtggcagcccagattccctatgacgtccagcatgtagacatcgattacatgaaccggaagctggatttcaccctcagtgccaactttcaaaacctcagtcttctgattgagcaaatgaagaaaaatggcatgagatttattctcattttggacccagccatttctggcaatgagacacagtatctcccattcattagaggacaggaaaataacgtgttcatcaaatggcctgacaccaatgacattgtctggggaaaggtttggccagatctgcctaatgtaattgtagatggatcccttgaccatgaaactcaggttaagctttacagggcctacgttgcctttcctgacttctttcgtaatagcacagctgcgtggtggaagaaagagatagaagagctctatgcaaaccctcgagagccagagaagagcttgaagtttgatggattgtggattgaaataactcaacatttcccctcagatttggaatctagggacaagggcctgagcagcaagactctgtgcatggagagtcagcagatcctgccggacagctcccccrtggagcactacaacgtgcacaacctgtacgggtggtcccagaccagacccacatacgaagctgtgcaggaggtgacaggacagcgaggggtcatcatcacccgctccacatttccctcttctggacgctggggaggacaccggttgggaaacaacacagctgcrtgggaccagctggggaaatctatcattggcatgatggagttcagtctctttggaataccttatacaggagcagatatctgtgggttctttggagatgctgaatatgagatgtgtgttcgctggatgcaactgggggcattttatccattttccagaaaccacaacaacatcgggacaaggagacaagatcctgtggcctggaattcaacctttgagatgttgtccagaaaagtcctagagaccagatataccctgcttccttatctctatactctgatgcataaagctcacgttgagggcagcacagttgtccggccccttctccatgagtttacggatgacaggacaacatgggatatagaccgtcagttcatgttgggccctgctatcttaatcagccctgtgttggaaactagcacatttgagatctctgcttattttccgagagcccgttggtatgactatagcacgggaactagcagcacatcaacaggtcagaggaaaatcctgaaggctccccttgaccacatcaaccttcatgtcagaggaggctacatcctgccctggcaagagcctgcwatgaacactcactccagtcgacaaaattttatgggattgattgttgctttggatgacaatgggacagctgaaggccaggtgttctgggatgatggacaaagcattgatacctatgaaaatggaaattattttttggcaaactttatagcagctcagaacatcctgcaaatccagaccatacacaataagtatttgagtgactcgaatccactaaaagttgggtatattagaatctggggtgtgaatacctatgtgacacaagtcagtttcacctatgacaaccggcaatttatggagacaaatttcaagagtgaaccttataatcagatactaactattcaattgactgacaagactatcaacctggaaaagttaactgaggttacttggattgatggtggtcctgtacttcctactccaactaagacaagtaccatcccaatgagttctcatccttctccatctactaccaatgccaccagttctgagacaatcaccagttctgccagtgcaaatactaccactggcactactgatactgttcctatcacaaccacatctttcccaagtactactagtgttacaactaatactactgttcctgatacaacttctcctttccctacaagtactactaatgctagcactaatgctactgttcctatcacaaccacacctttcccaacaagtactattggtgttacaactaatgctactgttcccaatacaactgcccctttcccaacaaatgctagtactgctagcactaatgctactgttcctatcacaaccacatgttttgcaacaagtactattggtgttacaactaatgctactgttcccgatacaactgcccctttcccaacaaatactactactgctagcactaatgctactattcctatcacaaccacaccttttgcaacaagtactattagtgttacaactagtactactgttcctgatacaactgctcctttccctacaagtactactagtgctagcactaatgctacccctgttcctatcacaaccacactttttgcaacaagtactattggtgttacaactggtactactgttcctgatacaactgctcctttccctacaagtactactagtactagcactagtgctactgttcctattacaaccacaccttcccctacaaatactgctgatgctaacactagtaatactgttcctaataccactatgccttctcctacaagtagtactactgtgagtactattgctaccgttcccatttcagtgactccttctctgacaagtactgctgatgccaccattagtactactgtacttattgccactacttcttctctaacaggtactactgatgttagcactagtactactattaataatataagtactcctgttcaaacaaatactactaatgctagcactagtactaatgttgctaatataactgctacctctcatacaagtactgatgatactgttcctaataatactgttccagttacagctattccttctcttgcaaatactggtgttgacactactagcaacagtttttccattatgaccacttctttctctgaaagtactaatgctatgaacactactgttattatggcaactacttctcctacaagtactgatgttgctagcacaaataatgatgcttctatgacaaattttcttttagctacaatgtctgctggtaatataactagtaatagtatttccataacaactacttcttttggtaatagtgttccttttgtgactactccttctccaagtactgatgctactactacaagtaataatactaatcctggcatgactacttattaccagacttctcctaccattcctacccatactcttacttctattcctagctctattacttctattttgagcatgtttccaacaagtaatacattcactactgataaaattactaattttactacccctacaaatgcaaacaccattattttcaacactcttgatacaaaaagtaccatggtaatagatgctacggtcactactaccagcaccaaagataataccatgagtccagatacaacagttacttccatagacaaattcaccacacacatcacacagttcgctactccccattctgctactactacaacactggccttaagccacacctcattagctcctacaaatctttctaatctaggcaccatggatattactgatgcagataactccagcagtgttacagatgatacagtggagcatggagcatgggcaaggtttcagaaacctcatcatgcatctcccagagtgtggaagccaatgaaatcacaaagaatggcgctagagtcttgcccagagaattccaaaagtggcagakattggagaccctgcagtagtggatgcagagccagggaagtagtggtgcatcctggactcaacagtgttcaatggacaaggaagctgaagctcctcaggaaaagtggagaatggcttggagtacaaaagttagatctgggccccaaaggacgtttgaggttttctcaccttagccaatctctggtggcttcagagaaggtggctttggaaattttttactatgtaattgagaaaagtttggctcaagagaagaagtaa

SEQ ID NO: 2880 - DNA, 2657 bp, Homo sapiens
gcacagccatctgtggtgactaggaggtccccaagccgaggacacccatcaaggacctttagagtggcctcagaccaaggtcaccaatcaatggctaactgggggtcccaaaacctagcccagccatctatggacagtggggagccctcaagcctagcccagccatctcaagccyctggggtaacctcaaatctggcccagccatctcaagcctttggggtgtctccaagtccagactacccatctcagtctgttgggragtacccaatgctggctcagccatttcagcccactgaggtgtccccaagtccaacctacccatctcaggccattagggagtacccaaccctggcmcagccatttcagcccactgaggtatctccaagcccagcccacccatatcagctcactgaggtgtccccaagtgcagcctactcatatcagcccactgaggtgtccccaaacccakgctacctatctatggccattgagatgtccccaagcccagaatacccatctgtggccactgaggtgtccccaagcccaacctacccatatcagcccactgagatatccccaagctcaggctacctatctgtggccactgaggtgtccccaagcccaggctacccatctcagctcactgaggtgtccccaagctcaggctacctatctgtggcyactgaagtgtccccaagcccagactactcatctcagcctactgagatgtccccaagctcaggctacctatctatggccactgaggtgtccccaagcccaggctacccatttcagcccactgaggtgtccccaagcccagactatccatgtgtggccactggggagtcccctagccttgcccagccatctcagcccactgaggtgtccccaagctcagcctacccatctgtggtcactggggagtctccaagcctggcccagtcatatcagcgcactgaggtgttcccaagcccagcctacccatttatggccactgaggtgtccccaagcccaggcgacccatctgtggtcactggggagtccccaagcccagcctacccatctcagcccactgagatgtccccaagcccagcctacccatctcagcccactggggagtctccaagcctgacccagccatctctgaccatcagagtgtccccaagcctagccatgtcatctcagactattggagtgtccccaagcctagccatgccatctcagaccattggagtgtccccaagcctagccatgccatttcacaccattggagtgtccccaaccctagctcacccatctatggccattcgggagtctccaagcctggcccagcctcctcagtccactggggaatccccaagcttgacctggccatctcaggccactggggtgtccccaagtgtagcccaccaatctgtggccagtagggtttcctcaagcctagcccagccatctcaagccagtgggatgtcccctagacaagattacccaccagtggcctccagggtgtccccaaaccaagctcacgcatctataaccagcaggatgtcccctagcagagctcatgcatctatgacctgtatggtgtccccaagccaggttcatcgatctatgcccagtgaggtgtccccaagccttgcccagctatctcargccaccactgcagtgcccttaagaccagctcatcaacctatggcctgtggtgtatccccaagcctagcccagccgtctcaagccacagggatgtcttcaaggctagcccaccaacctatgacctgtgtggtgtccttaagcccagcccagccatctcaagccattggtgtgtccccaagcctagcccacccatcaggaccccatgggttgtctccaagtctagctcacccatatgtggccagtggggcgggctccagcctagcccacccatctcagaccactgcagtatccccaaggcaagcccaaccatctgtggcctccagtccaggcaagacaaattcatcctgtaccctagcctccagcctagccgagccagctatarcccccagcctattcccaccatctgtggcccacacggaagccctaagcctggctcagtcacccccggacactaggttggccccaagccgatcccagccatctgtggtcagtggtacatgtcatggcctcaatgagccatgctggggctctaggctggattcaaatctgcagtgttcaagggtggactcagtagccccgtgtctgtgtcacccatcagcgtttgtttcagttagcctgggtggaccatatccctctgtggctggaaatatggaccagggtctgaaccagccatccctgggtactggggtgaacctatgtgaagaacctctgatggttagtgagatggtatccagccccccggacttcaagttcaacgacgtgtcccttgggttccatcatccacccagggttggtgggaggcatgtgtgtccaccctctgtggttagtgtttcaacaccaaatctctctcatgctgatgaggaggcctgttgtgtaggccagtgaatcacgcctctgttcaggggtgtggctgtaagccatccccaggagcctttggctgatgctatgttccccagtgggtctcaggggaccacatctcctggcckagctgggaatctcccctg

SEQ ID NO: 2881 - DNA, 2539 bp, Homo sapiens
ggaaaccagcaggcgttggggaggggtggcgggggaatagcggcggcagcagccccagccctcagagagacagcagaaagggagggagggagggtgctggggggacagccccccaccattcctaccgctatgggcccaacctcccactcccacctcccctccatcggccggggctaggacacccccaaatcccgtcgcccccttggcaccgacaccccgacagagacagagacacagccatccgccaccaccgctgccgcagcctggctggggagggggccagccccccaggccccctacccctctgaggtggccagaatggatttgtggccaggggcatggatgctgctgctgctgctcttcctgctgctgctcttcctgctgcccaccctgtggttctgcagcyccagtgccaagtacttcttcaagatggccttctacaatggctggatcctcttcctggctgtgctcgccatccctgtgtgtgccgtgcgaggacgcaacgtcgagaacatgaagatcttgcgtctaatgctgctccacatcaaatacctgtacgggatccgagtggaggtgcgaggggctcaccacttccctccctcgcagccctatgttgttgtctccaaccaccagagctctctcgatctgcttgggatgatggaggtactgccaggccgctgtgtgcccattgccaagcgcgagctactgtgggctggctctgccgggctggcctgctggctggcaggagtcatcttcatcgaccggaagcgcacgggggatgccatcagtgtcatgtctgaggtcgcccagaccctgctcacccaggacgtgagggtctgggtgtttcctgagggaacgagaaaccacaatggctccatgctgcccttcaaacgtggcgccttccatcttgcagtgcaggcccaggttcccattgtcccyatagtcatgtcctcctaccaagacttctactgcaagaaggagcgtcgcttcacctcgggacaatgtcaggtgcgggtgctgcccccagtgcccacggaagggctgacaccagatgacgtcccagctctggctgacagagtccggcactccatgctcactgttttccgggaaatctccactgatggccggggtggtggtgactatctgaagaagcctgggggcggtgggtgaaccctggctctgagctctcctcccatctgtccccatcttcctccccacacctacccacccagtgggccctgaagcagggccaaaccctcttccttgtctcccctctccccacttattctcctmtttggaatcttcaacttctgaagtgaatgtggatacagcgccactcctgccccctcttggccccatccatggactcttgcctcggtgcagtytccactcttgacccccacctcctactgtcttgtctgtgggacagttgcctccccctcatctccagtgactcagcctacacaagggaggggaacattccatccccagtggagtctcttcctatgtggtcttctctacccctctaccccacattggccagtggactcatccattctttggaacaaatcccccccactccaaagtccatggattcaatggactcatccatttgtgaggaggacttctcgccctctggctggaagctgatacctgaagcactcccaggctcatcmtgggagctttcctcagcaccttcaccttccctcccagtgtagcctcctgtcagtgggggctggacccttctaattcagaggtctcatgcctgcccttgcccagatgcccagggtcgtgcactctctgggataccagttcagtctccacatttctggttttctgtccccatagtacagttcttcagtggacatgaccccacccagccccctgcagccctgctgcaccatctcaccagacacaaggggaagaagcagacatcaggtgctgcactcacttytgccccctggggagttggggaaaggaacgaaccctggctggaggggataggagggcttttaatttatttctttttctgttgaggcttccccctctctgagccagttttcatttyttcctggtggcattagccactccctgcctctcactccagacctgttcccmcaactggggaggtaggctgggagcaaaaggagagggtgggacccagttttgcgtggttggtttttattaattatyyggataacagcaaaaaaactgaaaataaagagagagagagatctgggtgttggtggttgcatttgttaaggaattgaagaagcagttcttgcccaggcaacctgcccccagccagaagactcaggggcaggccaagaacacaggcctccccstttcttcagctctctgaagtttccattgttcattgctctttggtggctgatagccttatctgcagctcacagtcggccaatcccagaggattagtgggtccggtttctgtataaattagggggcaggggtgctgtagaggcttcttatcgatgattgacgccgaggcccaggctgttgtcctcacaggagcctg

SEQ ID NO: 2882 - DNA, 1715 bp, Homo sapiens
gggactggtttcagcgagagcctctgtactgctctgtagtctctgctaggacatggacgaaaagggacgcagccgggagagcgactgccccagtcccacccgcctcgcctggtctagcctccgtgtttccatgacaactccaaaggagcccaaactgggggcttgaatgccgggcacccagactccagcaccggccgaggacccccactccggctgcagggaccctgtcccagcgagaccgcaggcatgtcatccgaaaagtcaggagactcgcttcgagggcccacttcccccgccgccgcccgctgccgccgccccgcccccgccggcgccagcccagactgcccaggcccctggcttcgtggtgcccacgcacgcggggactgtgggcacgctgccgctggggggytacgtagcgcccggataccccctgcagctgcagccttgcactgcttacgtgccggtctacccggtgggcacgccatatgcaggcgggaccccggggggaacaggagtgacctccactctccccccgccgccccagggcccagggctggccctactggagccgaggcgcccgccacacgactacatgcccatcgcggtgctgaccaccatctgttgcttctggcctactggcatcattgccatcttcaaggccgtgcaggtgcgcacggccttggcccgcggagacatggtgtcggccgagatcgcttcacgcgaggcccggaacttctccttcatctccctggccgtgggcatcgcggccatggtgctctgtaccatcctcaccgtagtcatcatcatcgccgcgcagcaccacgagaactactgggatccctaaaaacgcccctggtccggccccactctgcgcccctcgatctcccaggctctttctgcagtcataccgcggacccaatgggcgccctgcacacccgtttctggggccgtcagacttggatacatcgtaaactccgcctccacggaacgtctcgccttgcgagcaagctcggaatccagttcctcaggaacccctccaaaacccacacccccagggacgccgctttccgggatcccggccaaacgccggaccctcagtcgctccaggccccctcaccctcaaagtgtagcgcccccaaccgagcaacctcggtttggtccctaaaaccccgcctcctctataagcaccgccccagctctgacaaaaccccgcctccaggtcggcaggctccgccttcttttcttctccgcggggtgattcagtccagtgattgggtttgtggctccaggcctcgcccacagacggacagacccctccctttcttccggcaaaaggaccgagccctggggtagtaaggcccccacactcctgttttttgcaagtacatttttgtccctcctccacccaggtatctgcctattttcttgctaatcccagaacctttccttttgctttttttaaggacatttgggaagttcctggtgtaggacccttctccctgggataagaaacctgcctgtaaacgctctgtaaatactcccttccacccatcccagcccctgggcagccgggcagaagggaatccaggctatggacctcccaagtccccgctccccgctcccctcggcggccccgccttgttctgatctgtgtgtgagtgtgtgtgaacttctgaaagacaatattaaagagacttagttgatttatcgcccgc

SEQ ID NO: 2883 - DNA, 5816 bp, Homo sapiens
  misc_feature (1)...(5816): n = A,T,C or G
agacgtgaggcttgcagcaggcygaggaggaagaagaggggcagtgggagcagaggaggtggctcctgccccagtgagagctctgagggtccctgcctgaagagggacagggacyggggcttggagaaggggctgtggaatgcagcccccttcactgctgctgctgctgctgctgctgctgctgctatgtgtctcagtggtcagacccagagggctgctgtgtgggagtttcccagaaccctgtgccaatggaggcacctgcctgagcctgtctctgggacaagggacctgccagtgtgcccctggcttcctgggtgagacgtgccagwttcctgacccctgccagaacgcccagctctgccaaaatggaggcagctgccaagccctgcttccygctcccctagggctccccagctctccctctccattgacacccagcttcttgtgcacttgcctccctggcttcactggygagagatgccaggccnagcttgaagacccttgtcctccctccttctgttccaaaaggggccgctgccacatccaggcctcgggccgcccacagtgctcctgcatgcctggatggacaggtgagcagtgccagcttcgggacttctgttcagccaacccatgtgttaatggaggggtgtgtctggccacrtacccccagatccagtgccactgcccaccgggcttygagggccatgcctgtgaacgtgatgtcaacgagtgcttccaggacccaggacyctgccccaaaggcacctcctgccataacaccctrggctccttccagtgcctctgccctgtggggcaggagggtccacgttgtgagctgcgggcaggaccctgccctcctaggggctgttcgaatgggggcacctgccagctgatgccagagaaagactccacctttcacctctgcctctgtcccccaggtttcataggcccrgrctgtgaggtgaatccagacaactgtgtcagccaccartgtcagaatgggggcacttgccaggatgggctggacacctacacctgcctctgcccagaaacctggacaggattctccggcacccgatgtgaggaggatatcgatgagtgcagaagctctccctgtgccaatggtgggcagtgccaggaccagcctggagccttccactgcaagtgtctcccaggctacgatggacagaactgctcaaaggaactcgatgcttgtcagtcccaaccctgtcacaaccatggaacctgtactcccaaacctggaggmttccactgtgcctgccctccaggctttgtggggctacgctgtgagggagacgtggacgagtgtctggaccagccctgccaccccacaggcactgcagcctgccactctctggccaatgccttctactgccagtgtctgcctggacacacaggctttcgatgctcctgccctcacagctctccagggccccggtgtcagaaacccggagccaaggggtgtgagggcagaagtggagatggggcctgcgatgctggctgcagtggcccgggaggaaactgggatgraggggactgctctctrggagtcccagacccctggaagsgctgcccctcccactctcggtgctggcttctcttccgggacgggcagtgccacccacagtgtgactctgaagagtgtctgtttgatggctacgactgtgagacccctccagcctgcactccagcctatgaccagtactgccatgatcacttccacaacgggcactgtgagaaaggctgcaacactgcagagtgtggctgggatggaggtgactgcaggcctgaagatggggacccagagtgggggccctcyctggccctgctggtggtactgagccccccagccctagaccagcagctgtttgccctggcccgggtgctgtccctgactctgagggtaggactctgggtaaggaaggatcgtgatggcagggacatggtgtacccctatcctggggcccgggctgaagaaaagctaggaggaactcgggaccccacctatcaggagagagcagcccctcaaacrcagcccctgggcaaggagaccgactccctcagtgctgggtttgtggtggtmatgggtgtggatttgtcccgctgtggccctgaccacccggcatcccgctgtccctgggaccctgggcttctactccgcttccttgctgcgatggctgcagtgggagccctggagcccctgctgcctggaccactgctggctgtccaccctcatgcagggaccgcaccccctgccaaccagcttccctggcctgtgctgtgctccccagtggccggggtgattctcctggccctaggggctcttctcgtcctccarctcatccggcgtcgacgccgagagcatggagctctctggctgccccctggtttcactcgacggcctcggactcagtcagctccccaccgacgccggcccccactaggcgaggacagcattggtctcaaggcactgaagccaaaggcagaagttgatgaggatggagttgtgatgtgctcaggccctgaggagggagaggaggtgggccaggtgaaagggctggggcaagaatggtctggaggtgatggaagsgatsaaagggcaaatcaaccttcactgatccttgctgttacccaaaggctgaagaaacaggcccaccctccacgtgccagctctggtctctgagtggtggctgtggggcgctccctcaggcagccatgctaactcctccccaggaatctgagatggaagcccctgacctggacacccgtggacctgatggggtgacacccctgatgtcagcagtttgctgtggggaagtacagtccgggaccttccaaggggcatggttgggatgtcctgagccctgggaacctctgctggatggaggggcctgtccccaggctcacaccgtgggcactggggagacccccctgcacctggctgcccgattctcccggccaaccgctgcccgccgcctccttgaggctggagccaaccccaaccagccagaccgggcagggcgcacaccccttcatgctgctgtggctgctgatgctcgggaggtctgccagcttctgctccgtagcagacaaactgcagtggacgctcgcacagaggacgggaccacacccttgatgctggctgccaggctggcggtggaagacctggttgaagaactgattgcagcccaagcagacgtgggggccagagataaatgggggaaaactgcgctgcactgggctgctgccgtgaacaacgcccgagccgcccgctcgcttctccaggccggagccgataaagatgcccaggacaacagggagcagacgccgctattcctggcggcgcgggaaggagcggtggaagtagcccagctactgctggggctgggggcagcccgagagctgcgggaccaggctgggctagcgccggcggacgtcgctcaccarcgtaaccactgggatctgctgacgctgctggaaggggctgggccaccagaggcccgtcacaaagccacgccgggccgcgaggctgggcccttcccgcgcgcacggacggtgtcagtaagcgtgcccccgcatggrggcggggctctgccgcgctgccggacgctgtcagccggagcaggccctcgtgggggcggagcttgtctgcaggctcggacttggtccgtagacttggctgcgcgggggggcggggcctattckcattgccggagcctctcgggagtaggagcaggaggaggcccgacccctcgcggccgtaggttttctgcaggcatgcgcgggcctcggcccaaccctgcgataatgcgaggaagatacggagtggctgccgggcgcggaggcagggtctcaacggatgactggccctgtgattgggtggccctgggagcttgcggttctgcctccaacattccgatcccgcctccttgccttactccgtccccggagcggggatcacctcaacttgaytgtggtcccccagccctccaagaaatgcccataaaccaaggaggagagggtaaaaaatagaagaatacatggaattggggagaagaatgggaaaaaagatgggagtgactgcataatgtcagcattttgtgcttttggctcagcatttggattggatggaggattttcatcctgaaaccagccctccgtcgccaccgaccatggaataattgtcttccacgaaactcttccctggtgccaaaaagggttttatgtatatatttgagagctccacatccctggatctgaatcctccacttcccactggaaccatgcccctcccagtcccgtttctcccctctaggggatggaggctgagagaccccaggaagaagaggatggtgagcagggcccccctcaggatgaggaaggctggccccctccaaactccaccactcggccttggcgatctgctcctccrtcccctcctcctccagggacccgccacacagccctgggaccccgctcggcctccctgctctccctgcagactgaactccttctggacctggtggctgaagcccagtcccgccgcctggaggagcagagggccaccttctacaccccccaaaacccctcaagcctagcccctgccccactccgtcctctcgaggacagagaacagctttacagcactatcctcagtcaccagtgccagcggatggaagcccagcggtcagagcctcccctccctccaggggggcaagagctcctggagttgctgctgagagttcagggtgggggtcgaatggaggagcaaaggtcccggccccccacacacacctgctgagacttgagccccaaccagcccttccttgccactggtctcaaagctgggcagcccattgcatgccctcaactcttgcttggcaggggtaccagagactgaaagacacggcacaaatctcaatattcatctcccacatcaccttccctgggaactggacagggtgaaagtcctcaaactctgggaacaggcgagatggaacagggatttaactccccgcccacaggtccatgggagcttgaggcagtaagggggatcccaggcacccatctcaaggagtggctgggagtcttttccctaacttgtggggacaccaccagttgtcaagctactaggcagtagggtctgagggctcaggcctccacctgagaggttataacctgagagacagctctacccttcctcccagtaagaagggaaggtgggtgggcacctgagagattaagactattctcccagtcccactaccagcacccccgatccctgagactgaggggtttacgggctgtgaatggaccttcagccctgcccaccctccctccccmctgctgctgagtctgtctgatgttttggttgtgtgaataaatataattcccctctggactgcagactggtatctggggggcccaggcggggtgaaaggtaggaaggtgaggccagaggccttttctctccccagtctggccagaggccagctcccctccccggctggttaattactggctcattaagcagcggctggagacctccctaattatctcccccagcccccctcttcggttttaattaagtagaacagggaggggagtcattagaacaagaaataygaactgagctgccggtgaacccaggcattccagcggcctgagtccacatcgcttagatccctgattcaggacccaggtgacagacgcccccagccgccaacacagccccactcctaggccgcggaagtccagccagggggctttcccatatctttcagatggcccgtctc

SEQ ID NO: 2884 - DNA, 6747 bp, Homo sapiens
  misc_feature (1)...(6747): n = A,T,C or G
agacgtgaggcttgcagcaggcygaggaggaagaagaggggcagtgggagcagaggaggtggctcctgccccagtgagagctctgagggtccctgcctgaagagggacagggacyggggcttggagaaggggctgtggaatgcagcccccttcactgctgctgctgctgctgctgctgctgctgctatgtgtctcagtggtcagacccagagggctgctgtgtgggagtttcccagaaccctgtgccaatggaggcacctgcctgagcctgtctctgggacaagggacctgccagtgtgcccctggcttcctgggtgagacgtgccagwttcctgacccctgccagaacgcccagctctgccaaaatggaggcagctgccaagccctgcttccygctcccctagggctccccagctctccctctccattgacacccagcttcttgtgcacttgcctccctggcttcactggygagagatgccaggccnagcttgaagacccttgtcctccctccttctgttccaaaaggggccgctgccacatccaggcctcgggccgcccacagtgctcctgcatgcctggatggacaggtgagcagtgccagcttcgggacttctgttcagccaacccatgtgttaatggaggggtgtgtctggccacrtacccccagatccagtgccactgcccaccgggcttygagggccatgcctgtgaacgtgatgtcaacgagtgcttccaggacccaggacyctgccccaaaggcacctcctgccataacaccctrggctccttccagtgcctctgccctgtggggcaggagggtccacgttgtgagctgcgggcaggaccctgccctcctaggggctgttcgaatgggggcacctgccagctgatgccagagaaagactccacctttcacctctgcctctgtcccccaggtttcataggcccrgrctgtgaggtgaatccagacaactgtgtcagccaccartgtcagaatgggggcacttgccaggatgggctggacacctacacctgcctctgcccagaaacctggacaggctgggactgctccgaagatgtggatgagtgtgagrcccagggtccccctcactgcagaaacgggggcacctgccagaactctgctggtagctttcactgcgtgtgtgtgagtggctggggsggcacaagctgtgaggagaacctggatgactgtattgctgccacctgtgccccgggatccacctgcattgaccgggtgggctctttctcctgcctctgcccacctggacgcacaggactcctgtgccacttggaagacatgtgtctgagccagccgtgccatggggatgcccaatgcagcaccaaccccctcacaggctccacactctgcctgtgtcagcctggctattcggggcccacctgccaccaggacctggacgagtgtctgatggcccagcaaggcccaagtccctgtgaacatggcggttcctgcctcaacactcctggctccttcaactgcctctgtccacctggctacacaggctcccgttgtgaggctgatcacaatgagtgcctctcccagccctgccacccaggaagcacctgtctggacctacttgccaccttccactgcctctgcccgccaggcttagaagggcagctctgtgaggtggagaccaacgagtgtgcctcagctccctgcctgaaccacgcrgattgccatgacctgctcaacrgcttccagtgcatctgyctgcctggattctccggcacccgatgtgaggaggatatcgatgagtgcagaagctctccctgtgccaatggtgggcagtgccaggaccagcctggagccttccactgcaagtgtctcccaggctttgaagggccacgctgtcaaacagaggtggatgagtgcctgagtgacccatgtcccsttggagccagctgccttgatcttccaggagccttcttttgcctctgcccctctggtttcacaggccarctctgtgaggttcccctgtgtgctcccaacctgtgccagcccaagcagatatgtaaggaccagaaagacaaggccaactgcctctgtcctgatggaagccctggctgtgccccacctgaggacaactgcacctgccaccacgggcactgccagagatcctcatgtgtgtgtgacgtgggttggacggggccagagtgtgaggcagagctagggggctgcatctctgcaccctgtgcccatggggggacctgctacccccagccctctggctacaactgcacctgccctacaggctacacaggacccacctgtagtgaggagatgacagcttgtcactcagggccatgtctcaatggcggctcctgcaaccctagccctggaggctactactgcacctgccckccaagccacacagggccccagtgccaaaccagcactgactactgtgtgtctgccccgtgcttcaatgggggtacctgtgtgaacaggcctggcaccttctcctgcctctgtgccatgggcttccagggcccgcgctgtgagggaaagctccgccccakctgtgcagacagcccctgtaggaatagggcaacctgccaggacagccctcagggtccccgctgcctctgccccactgkctacaccggaggcagctgccagactytgatggacttatgtgcccagargccctgcccacgcaattcccactgcctccagactgggccctccttccactgcttgtgcctccagggatggaccgggcctctctgcaaccttccactgtcctcctgccagaaggctgcactgagccaaggcatagacgtctcttccctttgccacaatggaggcctctgtgtcgacagcggcccctcctatttctgccactgcccccctggattccaaggcagcctgtgccaggatcacgtgaacccatgtgagtccaggccttgccagaacrgggccacctgcatggcccagcccagtgggtatctctgccagtgtgccccaggctacgatggacagaactgctcaaaggaactcgatgcttgtcagtcccaaccctgtcacaaccatggaacctgtactcccaaacctggaggmttccactgtgcctgccctccaggctttgtggggctacgctgtgagggagacgtggacgagtgtctggaccagccctgccaccccacaggcactgcagcctgccactctctggccaatgccttctactgccagtgtctgcctggacacacaggccagtggtgtgaggtggagatagaccyctgccacagccaaccctgctttcatggagggacctgtgaggccacagcaggatcacccctgggtttcatctgccactgccccaagggttttgaaggccccacctgcagccacagggccccttcctgcggcttccatcactgccaccacggaggcctgtgtctgccctcccctaagccaggcttcccaccacgctgtgcctgcctcagtggctatgggggtcctgactgcctgaccccaccagctcctaaaggctgtggccctccctccccatgcctatacaatggcagctgctcagagaccacgggcttggggggcccaggctttcgatgctcctgccctcacagctctccagggccccggtgtcagaaacccggagccaaggggtgtgagggcagaagtggagatggggcctgcgatgctggctgcagtggcccgggaggaaactgggatgraggggactgctctctrggagtcccagacccctggaagsgctgcccctcccactctcggtgctggcttctcttccgggacgggcagtgccacccacagtgtgactctgaagagtgtctgtttgatggctacgactgtgagacccctccagcctgcactccagcctatgaccagtactgccatgatcacttccacaacgggcactgtgagaaaggctgcaacactgcagagtgtggctgggatggaggtgactgcaggcctgaagatggggacccagagtgggggccctcyctggccctgctggtggtactgagccccccagccctagaccagcagctgtttgccctggcccgggtgctgtccctgactctgagggtaggactctgggtaaggaaggatcgtgatggcagggacatggtgtacccctatcctggggcccgggctgaagaaaagctaggaggaactcgggaccccacctatcaggagagagcagcccctcaaacrcagcccctgggcaaggagaccgactccctcagtgctgggtttgtggtggtmatgggtgtggatttgtcccgctgtggccctgaccacccggcatcccgctgtccctgggaccctgggcttctactccgcttccttgctgcgatggctgcagtgggagccctggagcccctgctgcctggaccactgctggctgtccaccctcatgcagggaccgcaccccctgccaaccagcttccctggcctgtgctgtgctccccagtggccggggtgattctcctggccctaggggctcttctcgtcctccarctcatccggcgtcgacgccgagagcatggagctctctggctgccccctggtttcactcgacggcctcggactcagtcagctccccaccgacgccggcccccactaggcgaggacagcattggtctcaaggcactgaagccaaaggcagaagttgatgaggatggagttgtgatgtgctcaggccctgaggagggagaggaggtgggccaggctgaagaaacaggcccaccctccacgtgccagctctggtctctgagtggtggctgtggggcgctccctcaggcagccatgctaactcctccccaggaatctgagatggaagcccctgacctggacacccgtggacctgatggggtgacacccctgatgtcagcagtttgctgtggggaagtacagtccgggaccttccaaggggcatggttgggatgtcctgagccctgggaacctctgctggatggaggggcctgtccccaggctcacaccgtgggcactggggagacccccctgcacctggctgcccgattctcccggccaaccgctgcccgccgcctccttgaggctggagccaaccccaaccagccagaccgggcagggcgcacaccccttcatgctgctgtggctgctgatgctcgggaggtctgccagcttctgctccgtagcagacaaactgcagtggacgctcgcacagaggacgggaccacacccttgatgctggctgccaggctggcggtggaagacctggttgaagaactgattgcagcccaagcagacgtgggggccagagataaatgggggaaaactgcgctgcactgggctgctgccgtgaacaacgcccgagccgcccgctcgcttctccaggccggagccgataaagatgcccaggacaacagggagcagacgccgctattcctggcggcgcgggaaggagcggtggaagtagcccagctactgctggggctgggggcagcccgagagctgcgggaccaggctgggctagcgccggcggacgtcgctcaccarcgtaaccactgggatctgctgacgctgctggaaggggctgggccaccagaggcccgtcacaaagccacgccgggccgcgaggctgggcccttcccgcgcgcacggacggtgtcagtaagcgtgcccccgcatggrggcggggctctgccgcgctgccggacgctgtcagccggagcaggccctcgtgggggcggagcttgtctgcaggctcggacttggtccgtagacttggctgcgcgggggggcggggcctattckcattgccggagcctctcgggagtaggagcaggaggaggcccgacccctcgcggccgtaggttttctgcaggcatgcgcgggcctcggcccaaccctgcgataatgcgaggaagatacggagtggctgccgggcgcggaggcagggtctcaacggatgactggccctgtgattgggtggccctgggagcttgcggttctgcctccaacattccgatcccgcctccttgccttactccgtccccggagcggggatcacctcaacttgaytgtggtcccccagccctccaagaaatgcccataaaccaaggaggagagggtaaaaaatagaagaatacatggtagggaggaattccaaaaatgattacccattaaaaggcaggctggaaggccttcctggttttaagatggatcccccaaaatgaagggttgtgagtttagtttctctcctaaaatgaatgtatgcccaccagagcagacrtcttccacgtggagaagctgcagctctggaaagagggtttaagatgctaggatgaggcaggcccagtcctcctccagaaaataagacaggccacaggagggcagagtggagtggaaatacccctaagttggaaccaagaattgcaggcatatgggatgtaagatgttctttcctatatatggtttccaaagggtgcccctatgatccattgtccccactgcccacaaatggctgacaaatatttattgggcacctactatgtgccaggcactgtgtaggtgctgaaaagtggccaagggccacccccgctgatgactccttgcattccctcccctcacaacaaagaactccactgtggggatgaagcgcttcttctagccactsctatcgctatttaagaaccctaaatctgtcacccataataaagctgatttgaagtgttacc

SEQ ID NO: 2885 - DNA, 1790 bp, Homo sapiens
acacacacccccgcttgggcctcctctctctctccggctccattttctccgccgccgggggccggggtctcctgtggggggcccagccggtatcccaggtctcccttcagtgccggggtgaacccccgggggagccgggagccgggggcagacgggcgggggttggggcggagggagcagcggccccagcgagtttggggggagaagtaaccaggcggggggaggggcggagcagrgagggggcctcaggscccccccccagctatggacgaacggctactggggccgccccctccaggcgggggccgggggggcctrggattggtgagtggggagcctgggggccctggcgagcctcccggtggcggagaccccggtgggggtagcgggggggtcccgggaggccgagggaagcaagacatcggggacattctgcagcagataatgaccatcaccgaccagagcctggacgaggcccaggccaagaaacacgccctaaactgccaccgaatgaagcctgctctctttagcgtcctgtgtgaaatcaaggagaaaactggcctcagcattcggagctcccaggaggaggagccggtggacccacagctgatgcgcttggacaacatgcttctggcagagggtgtggctgggcccgagaaagggggcggctcagcagcagcagctgcagccgctgcagcctctggtggtggtgtgtcccctgacaactccatcgaacactcggactatcgcagcaaacttgcccagatccgtcacatataccactcggagctggagaagtatgagcaggcatgtaatgagttcacgacccatgtcatgaacctgctgagggagcagagccgcaccaggcccgtggcccccaaagagatggaacgcatggtgagcatcatccatcgaaagttcagcgccatccagatgcagctgaagcagagcacctgcgaggctgtgatgatcctgcgctcccgtttcctggatgccagacgaaagcgccgtaacttcagcaaacaggccactgaggtcctaaatgagtatttctactcccacctgagtaacccatatcctagtgaggaggccaaggaggagcttgccaaraagtgtggcatcaccgtgtctcaggtctccaactggtttggcaacaagaggattcgctataagaaaaacatcggaaagttccaagaggaggcaaacatctatgctgtcaagaccgccgtgtcagtcacccaggggggccacagccgcccctccggacggcttacttacctcatacgcagctcatcttaaaccaatagaatcgctcggtggacgagagtgtctgactcagatatctacctcggagggagtttctgctactttagggaattattgactgggctttggggttgaacttttttttttttaaagaaagaaaaagaaaccctgggatccatctgttttttttkttgttgttgttgtttttgttkttgktgktggtggtggtggtggtggttcttaatttttaatttagtttggggaagtagcttgtttttttttttataaatatgttgatttcttgtcttttttttttatttcttactttcccatattaggggtgatagccaaaggggttctggtaagagaaagggggacaaacagaactggtaaagagscccccctggctccaggcctgtccatcaggaagtaaattttacagggcaccaagctttgccccctaaaatcccttaggtgttctttgttcatgcaggcaggtttctgccgcatttgatgtggaggca

SEQ ID NO: 2886 - DNA, 2324 bp, Homo sapiens
ctcttytagagaatgtccggattgctattggactttggagcgtatggctccaaatcaactcattggctaaaacttgmcggaaaatggtggttaggtggccagaatggatttgtggccaggggcatggatgctgctgctgctgctcttcctgctgctgctcttcctgctgcccaccctgtggttctgcagcyccagtgccaagtacttcttcaagatggccttctacaatggctggatcctcttcctggctgtgctcgccatccctgtgtgtgccgtgcgaggacgcaacgtcgagaacatgaagatcttgcgtctaatgctgctccacatcaaatacctgtacgggatccgagtggaggtgcgaggggctcaccacttccctccctcgcagccctatgttgttgtctccaaccaccagagctctctcgatctgcttgggatgatggaggtactgccaggccgctgtgtgcccattgccaagcgcgagctactgtgggctggctctgccgggctggcctgctggctggcaggagtcatcttcatcgaccggaagcgcacgggggatgccatcagtgtcatgtctgaggtcgcccagaccctgctcacccaggacgtgagggtctgggtgtttcctgagggaacgagaaaccacaatggctccatgctgcccttcaaacgtggcgccttccatcttgcagtgcaggcccaggttcccattgtcccyatagtcatgtcctcctaccaagacttctactgcaagaaggagcgtcgcttcacctcgggacaatgtcaggtgcgggtgctgcccccagtgcccacggaagggctgacaccagatgacgtcccagctctggctgacagagtccggcactccatgctcactgttttccgggaaatctccactgatggccggggtggtggtgactatctgaagaagcctgggggcggtgggtgaaccctggctctgagctctcctcccatctgtccccatcttcctccccacacctacccacccagtgggccctgaagcagggccaaaccctcttccttgtctcccctctccccacttattctcctmtttggaatcttcaacttctgaagtgaatgtggatacagcgccactcctgccccctcttggccccatccatggactcttgcctcggtgcagtytccactcttgacccccacctcctactgtcttgtctgtgggacagttgcctccccctcatctccagtgactcagcctacacaagggaggggaacattccatccccagtggagtctcttcctatgtggtcttctctacccctctaccccacattggccagtggactcatccattctttggaacaaatcccccccactccaaagtccatggattcaatggactcatccatttgtgaggaggacttctcgccctctggctggaagctgatacctgaagcactcccaggctcatcmtgggagctttcctcagcaccttcaccttccctcccagtgtagcctcctgtcagtgggggctggacccttctaattcagaggtctcatgcctgcccttgcccagatgcccagggtcgtgcactctctgggataccagttcagtctccacatttctggttttctgtccccatagtacagttcttcagtggacatgaccccacccagccccctgcagccctgctgcaccatctcaccagacacaaggggaagaagcagacatcaggtgctgcactcacttytgccccctggggagttggggaaaggaacgaaccctggctggaggggataggagggcttttaatttatttctttttctgttgaggcttccccctctctgagccagttttcatttyttcctggtggcattagccactccctgcctctcactccagacctgttcccmcaactggggaggtaggctgggagcaaaaggagagggtgggacccagttttgcgtggttggtttttattaattatyyggataacagcaaaaaaactgaaaataaagagagagagagatctgggtgttggtggttgcatttgttaaggaattgaagaagcagttcttgcccaggcaacctgcccccagccagaagactcaggggcaggccaagaacacaggcctccccstttcttcagctctctgaagtttccattgttcattgctctttggtggctgatagccttatctgcagctcacagtcggccaatcccagaggattagtgggtccggtttctgtataaattagggggcaggggtgctgtagaggcttcttatcgatgattgacgccgaggcccaggctgttgtcctcacaggagcctg

SEQ ID NO: 2887 - DNA, 2350 bp, Homo sapiens
gctagttcctgtgttgacagaaagagcagaagaggaggtggggtggagggagcagagccagggattaggggactactgaggctctggagatgagaccgccaggagtccttccccaccatgagccccctccactcctgcagctggaggagtttttcccagtctcagtgctgccctggggcgagagagactgaacaagctgtttgggtgggaagagaatggaggaagttgacagggatgggcggggcccgtgggggggctgaccaggaacccagcttcctgctcagtacccaggcatccagcccccagctcacccccaccccttccagcccccactcccctcaggaacccaaggttccagccctcctcccaaatcccagccacccctcccccaccagtttctcccctctaggggatggaggctgagagaccccaggaagaagaggatggtgagcaggccttccccgacaccgggccttgcgcacagcccccatccagccccgtgtctgggccccccaccattcctaccgctatgggcccaacctcccactcccacctcccctccatcggccggggctaggacacccccaaatcccgtcgcccccttggcaccgacaccccgacagagacagagacacagccatccgccaccaccgctgccgcagcctggctggggagggggccagccccccaggccccctacccctctgagctccccccctccccgctctccctccgcccgccccccccgccccccccccccgccgctgccttcatctctccatctctgcgctgctgccgctgcgccatccagcacccagactccagcaccggccgaggacccccactccggctgcagggaccctgtcccagcgagaccgcaggcatgtcatccgaaaagtcaggactcccagactcagtccctcacacttctccccgcccgctgccgccgccccgcccccgccggcgccagcccagactgcccaggcccctggcttcgtggtgcccacgcacgcggggactgtgggcacgctgccgctggggggytacgtagcgcccggataccccctgcagctgcagccttgcactgcttacgtgccggtctacccggtgggcacgccatatgcaggcgggaccccggggggaacaggagtgacctccactctccccccgccgccccagggcccagggctggccctactggagccgaggcgcccgccacacgactacatgcccatcgcggtgctgaccaccatctgttgcttctggcctactggcatcattgccatcttcaaggccgtgcaggtgcgcacggccttggcccgcggagacatggtgtcggccgagatcgcttcacgcgaggcccggaacttctccttcatctccctggccgtgggcatcgcggccatggtgctctgtaccatcctcaccgtagtcatcatcatcgccgcgcagcaccacgagaactactgggatccctaaaaacgcccctggtccggccccactctgcgcccctcgatctcccaggctctttctgcagtcataccgcggacccaatgggcgccctgcacacccgtttctggggccgtcagacttggatacatcgtaaactccgcctccacggaacgtctcgccttgcgagcaagctcggaatccagttcctcaggaacccctccaaaacccacacccccagggacgccgctttccgggatcccggccaaacgccggaccctcagtcgctccaggccccctcaccctcaaagtgtagcgcccccaaccgagcaacctcggtttggtccctaaaaccccgcctcctctataagcaccgccccagctctgacaaaaccccgcctccaggtcggcaggctccgccttcttttcttctccgcggggtgattcagtccagtgattgggtttgtggctccaggcctcgcccacagacggacagacccctccctttcttccggcaaaaggaccgagccctggggtagtaaggcccccacactcctgttttttgcaagtacatttttgtccctcctccacccaggtatctgcctattttcttgctaatcccagaacctttccttttgctttttttaaggacatttgggaagttcctggtgtaggacccttctccctgggataagaaacctgcctgtaaacgctctgtaaatactcccttccacccatcccagcccctgggcagccgggcagaagggaatccaggctatggacctcccaagtccccgctccccgctcccctcggcggccccgccttgttctgatctgtgtgtgagtgtgtgtgaacttctgaaagacaatattaaagagacttagttgatttatcgcccgc

SEQ ID NO: 2888 - DNA, 2835 bp, Homo sapiens
atgagaagttagcagttgcgtaaagaaggactggggcagatgaggattcaggaagcttgaggtttaggaaggaagatattgagagggaaaggtggaaatgaaggagagtgaagtgatggaatgatcctagtaaagggataatgggagtggaggaagagaagagggggtggaaaactagatacatggctaccaaattaaggaggcacgcgcattccagaggaatcggcattcttcctcactttttatttttctagaaagcacccctgaagccaaatttccattggaagaaaagatgtacccatattgtatgttgtgagaaggggttgtctcagcttgggcaagtaaggagactgatacgaagraagtaggaaagaaaaggtacagaggtaaaagagcatggaaaaggaaagggtcagggataaggccaaagagatctcttctctttaaaggccagagaaggcaggtggaggggggagctggactgctgggagatagtgagggacaaagggcaaaggaaaccagaccagaggactggagagtgagatggagtgagatggagtcctggagagaaaaagaagagaggtgaacttaatgcttgtcatatggtggccagaatggatttgtggccaggggcatggatgctgctgctgctgctcttcctgctgctgctcttcctgctgcccaccctgtggttctgcagcyccagtgccaagtacttcttcaagatggccttctacaatggctggatcctcttcctggctgtgctcgccatccctgtgtgtgccgtgcgaggacgcaacgtcgagaacatgaagatcttgcgtctaatgctgctccacatcaaatacctgtacgggatccgagtggaggtgcgaggggctcaccacttccctccctcgcagccctatgttgttgtctccaaccaccagagctctctcgatctgcttgggatgatggaggtactgccaggccgctgtgtgcccattgccaagcgcgagctactgtgggctggctctgccgggctggcctgctggctggcaggagtcatcttcatcgaccggaagcgcacgggggatgccatcagtgtcatgtctgaggtcgcccagaccctgctcacccaggacgtgagggtctgggtgtttcctgagggaacgagaaaccacaatggctccatgctgcccttcaaacgtggcgccttccatcttgcagtgcaggcccaggttcccattgtcccyatagtcatgtcctcctaccaagacttctactgcaagaaggagcgtcgcttcacctcgggacaatgtcaggtgcgggtgctgcccccagtgcccacggaagggctgacaccagatgacgtcccagctctggctgacagagtccggcactccatgctcactgttttccgggaaatctccactgatggccggggtggtggtgactatctgaagaagcctgggggcggtgggtgaaccctggctctgagctctcctcccatctgtccccatcttcctccccacacctacccacccagtgggccctgaagcagggccaaaccctcttccttgtctcccctctccccacttattctcctmtttggaatcttcaacttctgaagtgaatgtggatacagcgccactcctgccccctcttggccccatccatggactcttgcctcggtgcagtytccactcttgacccccacctcctactgtcttgtctgtgggacagttgcctccccctcatctccagtgactcagcctacacaagggaggggaacattccatccccagtggagtctcttcctatgtggtcttctctacccctctaccccacattggccagtggactcatccattctttggaacaaatcccccccactccaaagtccatggattcaatggactcatccatttgtgaggaggacttctcgccctctggctggaagctgatacctgaagcactcccaggctcatcmtgggagctttcctcagcaccttcaccttccctcccagtgtagcctcctgtcagtgggggctggacccttctaattcagaggtctcatgcctgcccttgcccagatgcccagggtcgtgcactctctgggataccagttcagtctccacatttctggttttctgtccccatagtacagttcttcagtggacatgaccccacccagccccctgcagccctgctgcaccatctcaccagacacaaggggaagaagcagacatcaggtgctgcactcacttytgccccctggggagttggggaaaggaacgaaccctggctggaggggataggagggcttttaatttatttctttttctgttgaggcttccccctctctgagccagttttcatttyttcctggtggcattagccactccctgcctctcactccagacctgttcccmcaactggggaggtaggctgggagcaaaaggagagggtgggacccagttttgcgtggttggtttttattaattatyyggataacagcaaaaaaactgaaaataaagagagagagagatctgggtgttggtggttgcatttgttaaggaattgaagaagcagttcttgcccaggcaacctgcccccagccagaagactcaggggcaggccaagaacacaggcctccccstttcttcagctctctgaagtttccattgttcattgctctttggtggctgatagccttatctgcagctcacagtcggccaatcccagaggattagtgggtccggtttctgtataaattagggggcaggggtgctgtagaggcttcttatcgatgattgacgccgaggcccaggctgttgtcctcacaggagcctg

SEQ ID NO: 2889 - DNA, 1311 bp, Homo sapiens
acacacacccccgcttgggcctcctctctctctccggctccattttctccgccgccgggggccggggtctcctgtggggggcccagccggtatcccaggtctcccttcagtgccggggtgaacccccgggggagccgggagccgggggcagacgggcgggggttggggcggagggagcagcggccccagcgagtttggggggagaagtaaccaggcggggggaggggcggagcagrgagggggcctcaggscccccccccagctatggacgaacggctactggggccgccccctccaggcgggggccgggggggcctrggattggtgagtggggagcctgggggccctggcgagcctcccggtggcggagaccccggtgggggtagcgggggggtcccgggaggccgagggaagcaagacatcggggacattctgcagcagataatgaccatcaccgaccagagcctggacgaggcccaggccaagaaacacgccctaaactgccaccgaatgaagcctgctctctttagcgtcctgtgtgaaatcaaggagaaaactggcctcagcattcggagctcccaggaggaggagccggtggacccacagctgatgcgcttggacaacatgcttctggcagagggtgtggctgggcccgagaaagggggcggctcagcagcagcagctgcagccgctgcagcctctggtggtggtgtgtcccctgacaactccatcgaacactcggactatcgcagcaaacttgcccagatccgtcacatataccactcggagctggagaagtatgagcaggcatgtaatgagttcacgacccatgtcatgaacctgctgagggagcagagccgcaccaggcccgtggcccccaaagagatggaacgcatggtgagcatcatccatcgaaagttcagcgccatccagatgcagctgaagcagagcacctgcgaggctgtgatgatcctgcgctcccgtttcctggatgccagacgaaagcgccgtaacttcagcaaacaggccactgaggtcctaaatgagtatttctactcccacctgagtaacccatatcctagtgaggaggccaaggaggagcttgccaaraagtgtggcatcaccgtgtctcaggtctccaactggtttggcaacaagaggattcgctataagaaaaacatcggaaagttccaagaggaggcaaacatctatgctgtcaagaccgccgtgtcagtcacccaggggggccacagccgcaccagctccccgacacccccttcctctgcaggtggatcccactgtcaccccrgc

SEQ ID NO: 2890 - DNA, 3064 bp, Homo sapiens
acacacacccccgcttgggcctcctctctctctccggctccattttctccgccgccgggggccggggtctcctgtggggggcccagccggtatcccaggtctcccttcagtgccggggtgaacccccgggggagccgggagccgggggcagacgggcgggggttggggcggagggagcagcggccccagcgagtttggggggagaagtaaccaggcggggggaggggcggagcagrgagggggcctcaggscccccccccagctatggacgaacggctactggggccgccccctccaggcgggggccgggggggcctrggattggtgagtggggagcctgggggccctggcgagcctcccggtggcggagaccccggtgggggtagcgggggggtcccgggaggccgagggaagcaagacatcggggacattctgcagcagataatgaccatcaccgaccagagcctggacgaggcccaggccaagaaacacgccctaaactgccaccgaatgaagcctgctctctttagcgtcctgtgtgaaatcaaggagaaaactggcctcagcattcggagctcccaggaggaggagccggtggacccacagctgatgcgcttggacaacatgcttctggcagagggtgtggctgggcccgagaaagggggcggctcagcagcagcagctgcagccgctgcagcctctggtggtggtgtgtcccctgacaactccatcgaacactcggactatcgcagcaaacttgcccagatccgtcacatataccactcggagctggagaagtatgagcaggcatgtaatgagttcacgacccatgtcatgaacctgctgagggagcagagccgcaccaggcccgtggcccccaaagagatggaacgcatggtgagcatcatccatcgaaagttcagcgccatccagatgcagctgaagcagagcacctgcgaggctgtgatgatcctgcgctcccgtttcctggatgccagacgaaagcgccgtaacttcagcaaacaggccactgaggtcctaaatgagtatttctactcccacctgagtaacccatatcctagtgaggaggccaaggaggagcttgccaaraagtgtggcatcaccgtgtctcaggtctccaactggtttggcaacaagaggattcgctataagaaaaacatcggaaagttccaagaggaggcaaacatctatgctgtcaagaccgccgtgtcagtcacccaggggggccacagccgcaccagctccccgacacccccttcctctgcaggctctggcggctctttcaatctctcaggatctggagacatgtttctggggatgcctgggctcaacggagattcctattctgcttcccaggtggaatcactccgacactcgatggggccagggggctatggggataacctcgggggaggccagatgtacagcccacgggaaatgagggcaaatggcagctggcaagaggctgtgaccccctcttcagtgacatccccaacggagggaccagggagtgttcactctgatacctccaactgatcttgcccctcagggtcacaggggtgggggstctcacaaggcgacttgaagaggacgcaggcttccagaggacaaaccccaatacaggagaagcacaagacagagaagggccaatggggtcatccsctccctaaygagactstctgtgctgggggtgctaattacatggcaggaagaatggggccyctaaggggagtgtggggtctgtctctcccttttttccawctttttcctctctcgckttctttcttacacagaaacatrcacataccsagaaacctatttctcagacccctttttctcctctgtctttctctctccctctcccacacctcacacacacatactcccacttgcaactattctgtttctctcctgggctcccccactttcccttccccaccccacttgtatggctggactcagtaattttgaggaaattgaagatgccatcttcccctgtgagtgacatgtctttaattttttaaaaaactactatttgaaaattggagggggaagaatgggaagggagttattgccaaatatgttaaatatgggttggggtgcttgtatatgtatcttcctcaatttccccataaatgaggtatctttttgtcacaccaaaatcaaggggtagggagagggaggaggttgcaaaaagccagatgtgggggaaaagtaacatcaacactgtcccatcctcagccctgaactagctaccatctgatcccctcagacattctcaggattttacaagactgtcagagtggggaacccctcccattaaagatccgggcaggactggggacaggttggaagtgtgatgggtgggggggtgggaggcatgggccgggggcagttctctcctcacttgtaaacttgtgtagtttcacagaaaaaaaacaaaatgcagttttaaataaagaaatttcttttttccctgggtttagttgagaatttttttcaaaaaacatgagaaaccccagaaaaaaaatgattttctttcacgaagytccaaacaggtttctctcctgttccccagccttgccttcatgatgcaggcccaawtgcacccttgcagacaacagtctggcctgaaccctattgatgcaactttgcgcaatcaagatggggctccagtgggtcaccaggcagccctgatggactgatggaataaataggatcgggggctctgagggaatgagaccctagagggtacactccccatcccccagggaagtgactgtacccagaggctggtagtacccaggggtggggtgataattatttctctagtacctgaaggactcttgtcccaaaggcatgaattcctagcattccctgtgacaagacgactgaaagatgggggctggagagagggtgcaggccccacctagggcggaggccacagcagggagaggggcagacagagccaggaccctggaaggaagcaggatggcwgccggaacagcagttggagcctgggtgctggtcctcagtctgtggg

SEQ ID NO: 2891 - DNA, 3765 bp, Homo sapiens
acacacacccccgcttgggcctcctctctctctccggctccattttctccgccgccgggggccggggtctcctgtggggggcccagccggtatcccaggtctcccttcagtgccggggtgaacccccgggggagccgggagccgggggcagacgggcgggggttggggcggagggagcagcggccccagcgagtttggggggagaagtaaccaggcggggggaggggcggagcagrgagggggcctcaggscccccccccagctatggacgaacggctactggggccgccccctccaggcgggggccgggggggcctrggattggtgagtggggagcctgggggccctggcgagcctcccggtggcggagaccccggtgggggtagcgggggggtcccgggaggccgagggaagcaagacatcggggacattctgcagcagataatgaccatcaccgaccagagcctggacgaggcccaggccaagaaacacgccctaaactgccaccgaatgaagcctgctctctttagcgtcctgtgtgaaatcaaggagaaaactggcctcagcattcggagctcccaggaggaggagccggtggacccacagctgatgcgcttggacaacatgcttctggcagagggtgtggctgggcccgagaaagggggcggctcagcagcagcagctgcagccgctgcagcctctggtggtggtgtgtcccctgacaactccatcgaacactcggactatcgcagcaaacttgcccagatccgtcacatataccactcggagctggagaagtatgagcaggcatgtaatgagttcacgacccatgtcatgaacctgctgagggagcagagccgcaccaggcccgtggcccccaaagagatggaacgcatggtgagcatcatccatcgaaagttcagcgccatccagatgcagctgaagcagagcacctgcgaggctgtgatgatcctgcgctcccgtttcctggatgccagacgaaagcgccgtaacttcagcaaacaggccactgaggtcctaaatgagtatttctactcccacctgagtaacccatatcctagtgaggaggccaaggaggagcttgccaaraagtgtggcatcaccgtgtctcaggtctccaactggtttggcaacaagaggattcgctataagaaaaacatcggaaagttccaagaggaggcaaacatctatgctgtcaagaccgccgtgtcagtcacccaggggggccacagccgcaccagctccccgacacccccttcctctgcaggctctggcggctctttcaatctctcaggatctggagacatgtttctggggatgcctgggctcaacggagattcctattctgcttcccaggtggaatcactccgacactcgatggggccagggggctatggggataacctcgggggaggccagatgtacagcccacgggaaatgagggcaaatggcagctggcaagaggctgtgaccccctcttcagtgacatccccaacggagggaccagggagtgttcactctgatacctccaactgatcttgcccctcagggtcacaggggtgggggstctcacaaggcgacttgaagaggacgcaggcttccagaggacaaaccccaatacaggagaagcacaagacagagaagggccaatggggtcatccsctccctaaygagactstctgtgctgggggtgctaattacatggcaggaagaatggggccyctaaggggagtgtggggtctgtctctcccttttttccawctttttcctctctcgckttctttcttacacagaaacatrcacataccsagaaacctatttctcagacccctttttctcctctgtctttctctctccctctcccacacctcacacacacatactcccacttgcaactattctgtttctctcctgggctcccccactttcccttccccaccccacttgtatgctctggaatctgtggagacgccagccctgcccaatcagagatgccaaaaatggggacatgacttctggacagaggacatgggccacgcccccatgcatccccacccccgcccctccggacggcttacttacctcatacgcagctcatcttaaaccaatagaatcgctcggtggacgagagtgtctgactcagatatctacctcggagggagtttctgctactttagggaattattgactgggctttggggttgaacttttttttttttaaagaaagaaaaagaaaccctgggatccatctgttttttttkttgttgttgttgtttttgttkttgktgktggtggtggtggtggtggttcttaatttttaatttagtttggggaagtagcttgtttttttttttataaatatgttgatttcttgtcttttttttttatttcttactttcccatattaggggtgatagccaaaggggttctggtaagagaaagggggacaaacagaactggtaaagagscccccctggctccaggcctgtccatcaggaagtaaattttacagggcaccaagctttgccccctaaaatcccttaggtgttctttgttcatgcaggcaggtttctgccgcatttgatgtggaggcagtgaagggcttgccctgctggcctctcatcccccttcttcccacaacccttgggcagggctggactcagtaattttgaggaaattgaagatgccatcttcccctgtgagtgacatgtctttaattttttaaaaaactactatttgaaaattggagggggaagaatgggaagggagttattgccaaatatgttaaatatgggttggggtgcttgtatatgtatcttcctcaatttccccataaatgaggtatctttttgtcacaccaaaatcaaggggtagggagagggaggaggttgcaaaaagccagatgtgggggaaaagtaacatcaacactgtcccatcctcagccctgaactagctaccatctgatcccctcagacattctcaggattttacaagactgtcagagtggggaacccctcccattaaagatccgggcaggactggggacaggttggaagtgtgatgggtgggggggtgggaggcatgggccgggggcagttctctcctcacttgtaaacttgtgtagtttcacagaaaaaaaacaaaatgcagttttaaataaagaaatttcttttttccctgggtttagttgagaatttttttcaaaaaacatgagaaaccccagaaaaaaaatgattttctttcacgaagytccaaacaggtttctctcctgttccccagccttgccttcatgatgcaggcccaawtgcacccttgcagacaacagtctggcctgaaccctattgatgcaactttgcgcaatcaagatggggctccagtgggtcaccaggcagccctgatggactgatggaataaataggatcgggggctctgagggaatgagaccctagagggtacactccccatcccccagggaagtgactgtacccagaggctggtagtacccaggggtggggtgataattatttctctagtacctgaaggactcttgtcccaaaggcatgaattcctagcattccctgtgacaagacgactgaaagatgggggctggagagagggtgcaggccccacctagggcggaggccacagcagggagaggggcagacagagccaggaccctggaaggaagcaggatggcwgccggaacagcagttggagcctgggtgctggtcctcagtctgtggg

SEQ ID NO: 2892 - DNA, 2523 bp, Homo sapiens
ctcttytagagaatgtccggattgctattggactttggagcgtatggctccaaatcaactcattggctaaaacttgmcggaaaatggtgagggaaaacactagggtcgcagggttcaaaatggctccaacctcctttggtgacgtagagagcagaacttgggtctgcccctcccttttagttaagggagcagaactgggattagcccgacgtttggatagtgggaacatcgatctgcggcgctggtgttaacccaactcattcggctggacgactcagccctccccatattaggtggccagaatggatttgtggccaggggcatggatgctgctgctgctgctcttcctgctgctgctcttcctgctgcccaccctgtggttctgcagcyccagtgccaagtacttcttcaagatggccttctacaatggctggatcctcttcctggctgtgctcgccatccctgtgtgtgccgtgcgaggacgcaacgtcgagaacatgaagatcttgcgtctaatgctgctccacatcaaatacctgtacgggatccgagtggaggtgcgaggggctcaccacttccctccctcgcagccctatgttgttgtctccaaccaccagagctctctcgatctgcttgggatgatggaggtactgccaggccgctgtgtgcccattgccaagcgcgagctactgtgggctggctctgccgggctggcctgctggctggcaggagtcatcttcatcgaccggaagcgcacgggggatgccatcagtgtcatgtctgaggtcgcccagaccctgctcacccaggacgtgagggtctgggtgtttcctgagggaacgagaaaccacaatggctccatgctgcccttcaaacgtggcgccttccatcttgcagtgcaggcccaggttcccattgtcccyatagtcatgtcctcctaccaagacttctactgcaagaaggagcgtcgcttcacctcgggacaatgtcaggtgcgggtgctgcccccagtgcccacggaagggctgacaccagatgacgtcccagctctggctgacagagtccggcactccatgctcactgttttccgggaaatctccactgatggccggggtggtggtgactatctgaagaagcctgggggcggtgggtgaaccctggctctgagctctcctcccatctgtccccatcttcctccccacacctacccacccagtgggccctgaagcagggccaaaccctcttccttgtctcccctctccccacttattctcctmtttggaatcttcaacttctgaagtgaatgtggatacagcgccactcctgccccctcttggccccatccatggactcttgcctcggtgcagtytccactcttgacccccacctcctactgtcttgtctgtgggacagttgcctccccctcatctccagtgactcagcctacacaagggaggggaacattccatccccagtggagtctcttcctatgtggtcttctctacccctctaccccacattggccagtggactcatccattctttggaacaaatcccccccactccaaagtccatggattcaatggactcatccatttgtgaggaggacttctcgccctctggctggaagctgatacctgaagcactcccaggctcatcmtgggagctttcctcagcaccttcaccttccctcccagtgtagcctcctgtcagtgggggctggacccttctaattcagaggtctcatgcctgcccttgcccagatgcccagggtcgtgcactctctgggataccagttcagtctccacatttctggttttctgtccccatagtacagttcttcagtggacatgaccccacccagccccctgcagccctgctgcaccatctcaccagacacaaggggaagaagcagacatcaggtgctgcactcacttytgccccctggggagttggggaaaggaacgaaccctggctggaggggataggagggcttttaatttatttctttttctgttgaggcttccccctctctgagccagttttcatttyttcctggtggcattagccactccctgcctctcactccagacctgttcccmcaactggggaggtaggctgggagcaaaaggagagggtgggacccagttttgcgtggttggtttttattaattatyyggataacagcaaaaaaactgaaaataaagagagagagagatctgggtgttggtggttgcatttgttaaggaattgaagaagcagttcttgcccaggcaacctgcccccagccagaagactcaggggcaggccaagaacacaggcctccccstttcttcagctctctgaagtttccattgttcattgctctttggtggctgatagccttatctgcagctcacagtcggccaatcccagaggattagtgggtccggtttctgtataaattagggggcaggggtgctgtagaggcttcttatcgatgattgacgccgaggcccaggctgttgtcctcacaggagcctg

SEQ ID NO: 2893 - DNA, 4386 bp, Homo sapiens
tctccggctccattttctccgccgccgggggccggggtctcctgtggggggcccagccggtatcccaggtctcccttcagtgccggggtgaacccccgggggagccgggagccgggggcagacgggcgggggttggggcggagggagcagcggccccagcgggggggcctrggattggtgagtggggagcctgggggccctggcgagcctcccggtggcggagaccccggtgggggtagcgggggggtcccgggaggccgagggaagcaagacatcggggacattctgcagcagataatgaccatcaccgaccagagcctggacgaggcccaggccaagaaacacgccctaaactgccaccgaatgaagcctgctctctttagcgtcctgtgtgaaatcaaggagaaaactggcctcagcattcggagctcccaggaggaggagccggtggacccacagctgatgcgcttggacaacatgcttctggcagagggtgtggctgggcccgagaaagggggcggctcagcagcagcagctgcagccgctgcagcctctggtggtggtgtgtcccctgacaactccatcgaacactcggactatcgcagcaaacttgcccagatccgtcacatataccactcggagctggagaagtatgagcaggcatgtaatgagttcacgacccatgtcatgaacctgctgagggagcagagccgcaccaggcccgtggcccccaaagagatggaacgcatggtgagcatcatccatcgaaagttcagcgccatccagatgcagctgaagcagagcacctgcgaggctgtgatgatcctgcgctcccgtttcctggatgccagacgaaagcgccgtaacttcagcaaacaggccactgaggtcctaaatgagtatttctactcccacctgagtaacccatatcctagtgaggaggccaaggaggagcttgccaaraagtgtggcatcaccgtgtctcaggtctccaactggtttggcaacaagaggattcgctataagaaaaacatcggaaagttccaagaggaggcaaacatctatgctgtcaagaccgccgtgtcagtcacccaggggggccacagccgcaccagctccccgacacccccttcctctgcaggtggaatcactccgacactcgatggggccagggggctatggggataacctcgggggaggccagatgtacagcccacgggaaatgagggcaaatggcagctggcaagaggctgtgaccccctcttcagtgacatccccaacggagggaccagggagtgttcactctgatacctccaactgatcttgcccctcagggtcacaggggtgggggstctcacaaggcgacttgaagaggacgcaggcttccagaggacaaaccccaatacaggagaagcacaagacagagaagggccaatggggtcatccsctccctaaygagactstctgtgctgggggtgctaattacatggcaggaagaatggggccyctaaggggagtgtggggtctgtctctcccttttttccawctttttcctctctcgckttctttcttacacagaaacatrcacataccsagaaacctatttctcagacccctttttctcctctgtctttctctctccctctcccacacctcacacacacatactcccacttgcaactattctgtttctctcctgggctcccccactttcccttccccaccccacttgtatgctctggaatctgtggagacgccagccctgcccaatcagagatgccaaaaatggggacatgacttctggacagaggacatgggccacgcccccatgcatccccacccccgcccctccggacggcttacttacctcatacgcagctcatcttaaaccaatagaatcgctcggtggacgagagtgtctgactcagatatctacctcggagggagtttctgctactttagggaattattgactgggctttggggttgaacttttttttttttaaagaaagaaaaagaaaccctgggatccatctgttttttttkttgttgttgttgtttttgttkttgktgktggtggtggtggtggtggttcttaatttttaatttagtttggggaagtagcttgtttttttttttataaatatgttgatttcttgtcttttttttttatttcttactttcccatattaggggtgatagccaaaggggttctggtaagagaaagggggacaaacagaactggtaaagagscccccctggctccaggcctgtccatcaggaagtaaattttacagggcaccaagctttgccccctaaaatcccttaggtgttctttgttcatgcaggcaggtttctgccgcatttgatgtggaggcagcatgggccgggggcagttctctcctcacttgtaaacttgtgtagtttcacagaaaaaaaacaaaatgcagttttaaataaagaaatttcttttttccctgggtttagttgagaatttttttcaaaaaacatgagaaaccccagaaaaaaaatgattttctttcacgaagytccaaacaggtttctctcctgttccccagccttgccttcatgatgcaggcccaawtgcacccttgcagacaacagtctggcctgaaccctattgatgcaactttgcgcaatcaagatggggctccagtgggtcaccaggcagccctgatggactgatggaataaataggatcgggggctctgagggaatgagaccctagagggtacactccccatcccccagggaagtgactgtacccagaggctggtagtacccaggggtggggtgataattatttctctagtacctgaaggactcttgtcccaaaggcatgaattcctagcattccctgtgacaagacgactgaaagatgggggctggagagagggtgcaggccccacctagggcggaggccacagcagggagaggggcagacagagccaggaccctggaaggaagcaggatggcwgccggaacagcagttggagcctgggtgctggtcctcagtctgtggggggcagtagtaggtgctcaaaacatcacagcccggattggcgagccactggtgctgaagtgtaagggggcccccaagaaaccaccccagcrgctggaatgraaactgaacacaggccggacagaagcttggaaggtcctgtctccccagggaggaggcccctgggacagtgtggctcgtgtccttcccaacrgctccctcttccttccggctgtsgggatccaggatgaggggattttccggtgccaggcaatgaacaggaatggaaaggagaccaagtccaactaccgagtccgtgtctaccagattcctgggaagccagaaattgtagattctgcctctgaactcacggctggtgttcccaataaggtggggacatgtgtgtcagagggaagctaccctgcagggactcttagctggcacttggatgggaagcccctggtgcctaatgagaagggagtatctgtgaaggaacagaccaggagacaccctgagacagggctcttcacactgcagtcggagctaatggtgaccccagcccggggaggagatccccgtcccaccttctcctgtagcttcagcccaggccttccccgacaccgggccttgcgcacagcccccatccagccccgtgtctgggagcctgtgcctctggaggaggtccaattggtggtggagccagaaggtggagcagtagctcctggtggaaccgtaaccctgacctgtgaagtccctgcccagccctctcctcaaatccactggatgaaggatggtgtgcccttgccccttccccccagccctgtgctgatcctccctgagatagggcctcaggaccagggaacctacagctgtgtggccacccattccagccacgggccccaggaaagccgtgctgtcagcatcagcatcatcgaaccaggcgaggaggggccaactgcaggctctgtgggaggatcagggctgggaactctagccctggccctggggatcctgggaggcctggggacagccgccctgctcattggggtcatcttgtggcaaaggcggcaacgccgaggagaggagaggaaggccccagaaaaccaggaggaagaggaggagcgtgcagaactgaatcagtcggaggaacctgaggcaggcgagagtagtactggagggccttgaggggcccacagacagatcccatccatcagctcccttttctttttcccttgaactgttctggcctcagaccaactctctcctgtataatctctctcctgtataaccccaccttgccaagctttcttctacaaccagagccccccacaatgatgattaaacacctgacacatcttgctctt

SEQ ID NO: 2894 - DNA, 4312 bp, Homo sapiens
tctccggctccattttctccgccgccgggggccggggtctcctgtggggggcccagccggtatcccaggtctcccttcagtgccggggtgaacccccgggggagccgggagccgggggcagacgggcgggggttggggcggagggagcagcggccccagcgggggggcctrggattggtgagtggggagcctgggggccctggcgagcctcccggtggcggagaccccggtgggggtagcgggggggtcccgggaggccgagggaagcaagacatcggggacattctgcagcagataatgaccatcaccgaccagagcctggacgaggcccaggccaagaaacacgccctaaactgccaccgaatgaagcctgctctctttagcgtcctgtgtgaaatcaaggagaaaactggcctcagcattcggagctcccaggaggaggagccggtggacccacagctgatgcgcttggacaacatgcttctggcagagggtgtggctgggcccgagaaagggggcggctcagcagcagcagctgcagccgctgcagcctctggtggtggtgtgtcccctgacaactccatcgaacactcggactatcgcagcaaacttgcccagatccgtcacatataccactcggagctggagaagtatgagcaggcatgtaatgagttcacgacccatgtcatgaacctgctgagggagcagagccgcaccaggcccgtggcccccaaagagatggaacgcatggtgagcatcatccatcgaaagttcagcgccatccagatgcagctgaagcagagcacctgcgaggctgtgatgatcctgcgctcccgtttcctggatgccagacgaaagcgccgtaacttcagcaaacaggccactgaggtcctaaatgagtatttctactcccacctgagtaacccatatcctagtgaggaggccaaggaggagcttgccaaraagtgtggcatcaccgtgtctcaggtctccaactggtttggcaacaagaggattcgctataagaaaaacatcggaaagttccaagaggaggcaaacatctatgctgtcaagaccgccgtgtcagtcacccaggggggccacagccgcaccagctccccgacacccccttcctctgcaggctctggcggctctttcaatctctcaggatctggagacatgtttctggggatgcctgggctcaacggagattcctattctgcttcccaggtggaatcactccgacactcgatggggccagggggctatggggataacctcgggggaggccagatgtacagcccacgggaaatgagggcaaatggcagctggcaagaggctgtgaccccctcttcagtgacatccccaacggagggaccagggagtgttcactctgatacctccaactgatcttgcccctcagggtcacaggggtgggggstctcacaaggcgacttgaagaggacgcaggcttccagaggacaaaccccaatacaggagaagcacaagacagagaagggccaatggggtcatccsctccctaaygagactstctgtgctgggggtgctaattacatggcaggaagaatggggccyctaaggggagtgtggggtctgtctctcccttttttccawctttttcctctctcgckttctttcttacacagaaacatrcacataccsagaaacctatttctcagacccctttttctcctctgtctttctctctccctctcccacacctcacacacacatactcccacttgcaactattctgtttctctcctgggctcccccactttcccttccccaccccacttgtatgctctggaatctgtggagacgccagccctgcccaatcagagatgccaaaaatggggacatgacttctggacagaggacatgggccacgcccccatgcatccccacccccgcccctccggacggcttacttacctcatacgcagctcatcttaaaccaatagaatcgctcggtggacgagagtgtctgactcagatatctacctcggagggagtttctgctactttagggaattattgactgggctttggggttgaacttttttttttttaaagaaagaaaaagaaaccctgggatccatctgttttttttkttgttgttgttgtttttgttkttgktgktggtggtggtggtggtggttcttaatttttaatttagtttggggaagtagcttgtttttttttttataaatatgttgatttcttgtcttttttttttatttcttactttcccatattaggggtgatagccaaaggggttctggtaagagaaagggggacaaacagaactggtaaagagscccccctggctccaggcctgtccatcaggaagtaaattttacagggcaccaagctttgccccctaaaatcccttaggtgttctttgttcatgcaggcaggtttctgccgcatttgatgtggaggcatgggccgggggcagttctctcctcacttgtaaacttgtgtagtttcacagaaaaaaaacaaaatgcagttttaaataaagaaatttcttttttccctgggtttagttgagaatttttttcaaaaaacatgagaaaccccagaaaaaaaatgattttctttcacgaagytccaaacaggtttctctcctgttccccagccttgccttcatgatgcaggcccaawtgcacccttgcagacaacagtctggcctgaaccctattgatgcaactttgcgcaatcaagatggggctccagtgggtcaccaggcagccctgatggactgatggaataaataggatcgggggctctgagggaatgagaccctagagggtacactccccatcccccagggaagtgactgtacccagaggctggtagtacccaggggtggggtgataattatttctctagtacctgaaggactcttgtcccaaaggcatgaattcctagcattccctgtgacaagacgactgaaagatgggggctggagagagggtgcaggccccacctagggcggaggccacagcagggagaggggcagacagagccaggaccctggaaggaagcaggatggcwgccggaacagcagttggagcctgggtgctggtcctcagtctgtggggggcagtagtaggtgctcaaaacatcacagcccggattggcgagccactggtgctgaagtgtaagggggcccccaagaaaccaccccagcrgctggaatgraaactgggaggaggcccctgggacagtgtggctcgtgtccttcccaacrgctccctcttccttccggctgtsgggatccaggatgaggggattttccggtgccaggcaatgaacaggaatggaaaggagaccaagtccaactaccgagtccgtgtctaccagattcctgggaagccagaaattgtagattctgcctctgaactcacggctggtgttcccaataaggtggggacatgtgtgtcagagggaagctaccctgcagggactcttagctggcacttggatgggaagcccctggtgcctaatgagaagggagtatctgtgaaggaacagaccaggagacaccctgagacagggctcttcacactgcagtcggagctaatggtgaccccagcccggggaggagatccccgtcccaccttctcctgtagcttcagcccaggccttccccgacaccgggccttgcgcacagcccccatccagccccgtgtctgggagcctgtgcctctggaggaggtccaattggtggtggagccagaaggtggagcagtagctcctggtggaaccgtaaccctgacctgtgaagtccctgcccagccctctcctcaaatccactggatgaaggatgtgagtgacctggagagaggggctgggagaaccaggcgaggaggggccaactgcaggctctgtgggaggatcagggctgggaactctagccctggccctggggatcctgggaggcctggggacagccgccctgctcattggggtcatcttgtggcaaaggcggcaacgccgaggagaggagaggaaggccccagaaaaccaggaggaagaggaggagcgtgcagaactgaatcagtcggaggaacctgaggcaggcgagagtagtactggagggccttgaggggcccacagacagatcccatccatcagctcccttttctttttcccttgaactgttctggcctcagaccaactctctcctgtataatctctctcctgtataaccccaccttgccaagctttcttctacaaccagagccccccacaatgatgattaaacacctgacacatcttg

SEQ ID NO: 2895 - DNA, 2007 bp, Homo sapiens
gcatgggccgggggcagttctctcctcacttgtaaacttgtgtagtttcacagaaaaaaaacaaaatgcagttttaaataaagaaatttcttttttccctgggtttagttgagaatttttttcaaaaaacatgagaaaccccagaaaaaaaatgattttctttcacgaagytccaaacaggtttctctcctgttccccagccttgccttcatgatgcaggcccaawtgcacccttgcagacaacagtctggcctgaaccctattgatgcaactttgcgcaatcaagatggggctccagtgggtcaccaggcagccctgatggactgatggaataaataggatcgggggctctgagggaatgagaccctagagggtacactccccatcccccagggaagtgactgtacccagaggctggtagtacccaggggtggggtgataattatttctctagtacctgaaggactcttgtcccaaaggcatgaattcctagcattccctgtgacaagacgactgaaagatgggggctggagagagggtgcaggccccacctagggcggaggccacagcagggagaggggcagacagagccaggaccctggaaggaagcaggatggcwgccggaacagcagttggagcctgggtgctggtcctcagtctgtggggggcagtagtaggtgctcaaaacatcacagcccggattggcgagccactggtgctgaagtgtaagggggcccccaagaaaccaccccagcrgctggaatgraaactgaacacaggccggacagaagcttggaaggtcctgtctccccagggaggaggcccctgggacagtgtggctcgtgtccttcccaacrgctccctcttccttccggctgtsgggatccaggatgaggggattttccggtgccaggcaatgaacaggaatggaaaggagaccaagtccaactaccgagtccgtgtctaccagattcctgggaagccagaaattgtagattctgcctctgaactcacggctggtgttcccaataaggtggggacatgtgtgtcagagggaagctaccctgcagggactcttagctggcacttggatgggaagcccctggtgcctaatgagaagggagtatctgtgaaggaacagaccaggagacaccctgagacagggctcttcacactgcagtcggagctaatggtgaccccagcccggggaggagatccccgtcccaccttctcctgtagcttcagcccaggccttccccgacaccgggccttgcgcacagcccccatccagccccgtgtctgggagcctgtgcctctggaggaggtccaattggtggtggagccagaaggtggagcagtagctcctggtggaaccgtaaccctgacctgtgaagtccctgcccagccctctcctcaaatccactggatgaaggatggtgtgcccttgccccttccccccagccctgtgctgatcctccctgagatagggcctcaggaccagggaacctacagctgtgtggccacccattccagccacgggccccaggaaagccgtgctgtcagcatcagcatcatcgaaccaggcgaggaggggccaactgcaggctctgtgggaggatcagggctgggaactctagccctggccctggggatcctgggaggcctggggacagccgccctgctcattggggtcatcttgtggcaaaggcggcaacgccgaggagaggagaggaaggccccagaaaaccaggaggaagaggaggagcgtgcagaactgaatcagtcggaggaacctgaggcaggcgagagtagtactggagggccttgaggggcccacagacagatcccatccatcagctcccttttctttttcccttgaactgttctggcctcagaccaactctctcctgtataatctctctcctgtataaccccaccttgccaagctttcttctacaaccagagccccccacaatgatgattaaacacctgacacatcttgctctt

SEQ ID NO: 2896 - DNA, 4226 bp, Homo sapiens
tctccggctccattttctccgccgccgggggccggggtctcctgtggggggcccagccggtatcccaggtctcccttcagtgccggggtgaacccccgggggagccgggagccgggggcagacgggcgggggttggggcggagggagcagcggccccagcgggggggcctrggattggtgagtggggagcctgggggccctggcgagcctcccggtggcggagaccccggtgggggtagcgggggggtcccgggaggccgagggaagcaagacatcggggacattctgcagcagataatgaccatcaccgaccagagcctggacgaggcccaggccaagaaacacgccctaaactgccaccgaatgaagcctgctctctttagcgtcctgtgtgaaatcaaggagaaaactggcctcagcattcggagctcccaggaggaggagccggtggacccacagctgatgcgcttggacaacatgcttctggcagagggtgtggctgggcccgagaaagggggcggctcagcagcagcagctgcagccgctgcagcctctggtggtggtgtgtcccctgacaactccatcgaacactcggactatcgcagcaaacttgcccagatccgtcacatataccactcggagctggagaagtatgagcaggcatgtaatgagttcacgacccatgtcatgaacctgctgagggagcagagccgcaccaggcccgtggcccccaaagagatggaacgcatggtgagcatcatccatcgaaagttcagcgccatccagatgcagctgaagcagagcacctgcgaggctgtgatgatcctgcgctcccgtttcctggatgccagacgaaagcgccgtaacttcagcaaacaggccactgaggtcctaaatgagtatttctactcccacctgagtaacccatatcctagtgaggaggccaaggaggagcttgccaaraagtgtggcatcaccgtgtctcaggtctccaactggtttggcaacaagaggattcgctataagaaaaacatcggaaagttccaagaggaggcaaacatctatgctgtcaagaccgccgtgtcagtcacccaggggggccacagccgcaccagctccccgacacccccttcctctgcaggtggaatcactccgacactcgatggggccagggggctatggggataacctcgggggaggccagatgtacagcccacgggaaatgagggcaaatggcagctggcaagaggctgtgaccccctcttcagtgacatccccaacggagggaccagggagtgttcactctgatacctccaactgatcttgcccctcagggtcacaggggtgggggstctcacaaggcgacttgaagaggacgcaggcttccagaggacaaaccccaatacaggagaagcacaagacagagaagggccaatggggtcatccsctccctaaygagactstctgtgctgggggtgctaattacatggcaggaagaatggggccyctaaggggagtgtggggtctgtctctcccttttttccawctttttcctctctcgckttctttcttacacagaaacatrcacataccsagaaacctatttctcagacccctttttctcctctgtctttctctctccctctcccacacctcacacacacatactcccacttgcaactattctgtttctctcctgggctcccccactttcccttccccaccccacttgtatgctctggaatctgtggagacgccagccctgcccaatcagagatgccaaaaatggggacatgacttctggacagaggacatgggccacgcccccatgcatccccacccccgcccctccggacggcttacttacctcatacgcagctcatcttaaaccaatagaatcgctcggtggacgagagtgtctgactcagatatctacctcggagggagtttctgctactttagggaattattgactgggctttggggttgaacttttttttttttaaagaaagaaaaagaaaccctgggatccatctgttttttttkttgttgttgttgtttttgttkttgktgktggtggtggtggtggtggttcttaatttttaatttagtttggggaagtagcttgtttttttttttataaatatgttgatttcttgtcttttttttttatttcttactttcccatattaggggtgatagccaaaggggttctggtaagagaaagggggacaaacagaactggtaaagagscccccctggctccaggcctgtccatcaggaagtaaattttacagggcaccaagctttgccccctaaaatcccttaggtgttctttgttcatgcaggcaggtttctgccgcatttgatgtggaggcagcatgggccgggggcagttctctcctcacttgtaaacttgtgtagtttcacagaaaaaaaacaaaatgcagttttaaataaagaaatttcttttttccctgggtttagttgagaatttttttcaaaaaacatgagaaaccccagaaaaaaaatgattttctttcacgaagytccaaacaggtttctctcctgttccccagccttgccttcatgatgcaggcccaawtgcacccttgcagacaacagtctggcctgaaccctattgatgcaactttgcgcaatcaagatggggctccagtgggtcaccaggcagccctgatggactgatggaataaataggatcgggggctctgagggaatgagaccctagagggtacactccccatcccccagggaagtgactgtacccagaggctggtagtacccaggggtggggtgataattatttctctagtacctgaaggactcttgtcccaaaggcatgaattcctagcattccctgtgacaagacgactgaaagatgggggctggagagagggtgcaggccccacctagggcggaggccacagcagggagaggggcagacagagccaggaccctggaaggaagcaggatggcwgccggaacagcagttggagcctgggtgctggtcctcagtctgtggggggcagtagtaggtgctcaaaacatcacagcccggattggcgagccactggtgctgaagtgtaagggggcccccaagaaaccaccccagcrgctggaatgraaactgggaggaggcccctgggacagtgtggctcgtgtccttcccaacrgctccctcttccttccggctgtsgggatccaggatgaggggattttccggtgccaggcaatgaacaggaatggaaaggagaccaagtccaactaccgagtccgtgtctaccagattcctgggaagccagaaattgtagattctgcctctgaactcacggctggtgttcccaataaggtggggacatgtgtgtcagagggaagctaccctgcagggactcttagctggcacttggatgggaagcccctggtgcctaatgagaagggagtatctgtgaaggaacagaccaggagacaccctgagacagggctcttcacactgcagtcggagctaatggtgaccccagcccggggaggagatccccgtcccaccttctcctgtagcttcagcccaggccttccccgacaccgggccttgcgcacagcccccatccagccccgtgtctgggagcctgtgcctctggaggaggtccaattggtggtggagccagaaggtggagcagtagctcctggtggaaccgtaaccctgacctgtgaagtccctgcccagccctctcctcaaatccactggatgaaggatgtgagtgacctggagagaggggctgggagaaccaggcgaggaggggccaactgcaggctctgtgggaggatcagggctgggaactctagccctggccctggggatcctgggaggcctggggacagccgccctgctcattggggtcatcttgtggcaaaggcggcaacgccgaggagaggagaggaaggccccagaaaaccaggaggaagaggaggagcgtgcagaactgaatcagtcggaggaacctgaggcaggcgagagtagtactggagggccttgaggggcccacagacagatcccatccatcagctcccttttctttttcccttgaactgttctggcctcagaccaactctctcctgtataatctctctcctgtataaccccaccttgccaagctttcttctacaaccagagccccccacaatgatgattaaacacctgacacatcttg

SEQ ID NO: 2897 - DNA, 1786 bp, Homo sapiens
gctagttcctgtgttgacagaaagagcagaagaggaggtggggtggagggagcagagccagggattaggggactactgaggctctggagatgagaccgccaggagtccttccccaccatgagccccctccactcctgcagctggaggagtttttcccagtctcagtgctgccctggggcgagagagactgaacaagctgtttgggtgggaagagaatggaggaagttgacagggatgggcggggcccgtgggggggctgaccaggaacccagcttcctgctcagtacccaggcatccagcccccagctcacccccaccccttccagcccccactcccctcaggaacccaaggttccagccctcctcccaaatcccagccacccctcccccaccagtttctcccctctaggggatggaggctgagagaccccaggaagaagaggatggtgagcagccctgggaccccgctcggcctccctgctctccctgcagactgaactccttctggacctggtggctgaagcccagtcccgccgcctggaggagcagagggccaccttctacaccccccaaaacccctcaagcctagcccctgccccactccgtcctctcgaggacagagaacagctttacagcactatcctcagtcaccagtgccagcggatggaagcccagcggtcagagcctcccctccctccaggggggcaagagctcctggagttgctgctgagagttcagggtgggggtcgaatggaggagcaaaggtcccggccccccacacacacctgctgagacttgagccccaaccagcccttccttgccactggtctcaaagctgggcagcccattgcatgccctcaactcttgcttggcaggggtaccagagactgaaagacacggcacaaatctcaatattcatctcccacatcaccttccctgggaactggacagggtgaaagtcctcaaactctgggaacaggcgagatggaacagggatttaactccccgcccacaggtccatgggagcttgaggcagtaagggggatcccaggcacccatctcaaggagtggctgggagtcttttccctaacttgtggggacaccaccagttgtcaagctactaggcagtagggtctgagggctcaggcctccacctgagaggttataacctgagagacagctctacccttcctcccagtaagaagggaaggtgggtgggcacctgagagattaagactattctcccagtcccactaccagcacccccgatccctgagactgaggggtttacgggctgtgaatggaccttcagccctgcccaccctccctccccmctgctgctgagtctgtctgatgttttggttgtgtgaataaatataattcccctctggactgcagactggtatctggggggcccaggcggggtgaaaggtaggaaggtgaggccagaggccttttctctccccagtctggccagaggccagctcccctccccggctggttaattactggctcattaagcagcggctggagacctccctaattatctcccccagcccccctcttcggttttaattaagtagaacagggaggggagtcattagaacaagaaataygaactgagctgccggtgaacccaggcattccagcggcctgagtccacatcgcttagatccctgattcaggacccaggtgacagacgcccccagccgccaacacagccccactcctaggccgcggaagtccagccagggggctttcccatatctttcagatggcccgtctc

SEQ ID NO: 2898 - DNA, 2477 bp, Homo sapiens
gagcagacgccgctattcctggcggcgcgggaaggagcggtggaagtagcccagctactgctggggctgggggcagcccgagagctgcgggaccaggctgggctagcgccggcggacgtcgctcaccarcgtaaccactgggatctgctgacgctgctggaaggggctgggccaccagaggcccgtcacaaagccacgccgggccgcgaggctgggcccttcccgcgcgcacggacggtgtcagtaagcgtgcccccgcatggrggcggggctctgccgcgctgccggacgctgtcagccggagcaggccctcgtgggggcggagcttgtctgcaggctcggacttggtccgtagacttggctgcgcgggggggcggggcctattckcattgccggagcctctcgggagtaggagcaggaggaggcccgacccctcgcggccgtaggttttctgcaggcatgcgcgggcctcggcccaaccctgcgataatgcgaggaagatacggagtggctgccgggcgcggaggcagggtctcaacggatgactggccctgtgattgggtggccctgggagcttgcggttctgcctccaacattccgatcccgcctccttgccttactccgtccccggagcggggatcacctcaacttgaytgtggtcccccagccctccaagaaatgcccataaaccaaggaggagagggtaaaaaatagaagaatacatggaattggggagaagaatgggaaaaaagatgggagtgactgcataatgtcagcattttgtgcttttggctcagcatttggattggatggaggattttcatcctgaaaccagccctccgtcgccaccgaccatggaataattgtcttccacgaaactcttccctggtgccaaaaagggttttatgtatatatttgagagctccacatccctggatctgaatcctccacttcccactggaaccatgcccctcccagtcccgtttctcccctctaggggatggaggctgagagaccccaggaagaagaggatggtgagcagggcccccctcaggatgaggaaggctggccccctccaaactccaccactcggccttggcgatctgctcctccrtcccctcctcctccagggacccgccacacagccctgggaccccgctcggcctccctgctctccctgcagactgaactccttctggacctggtggctgaagcccagtcccgccgcctggaggagcagagggccaccttctacaccccccaaaacccctcaagcctagcccctgccccactccgtcctctcgaggacagagaacagctttacagcactatcctcagtcaccagtgccagcggatggaagcccagcggtcagagcctcccctccctccaggggggcaagagctcctggagttgctgctgagagttcagggtgggggtcgaatggaggagcaaaggtcccggccccccacacacacctgctgagacttgagccccaaccagcccttccttgccactggtctcaaagctgggcagcccattgcatgccctcaactcttgcttggcaggggtaccagagactgaaagacacggcacaaatctcaatattcatctcccacatcaccttccctgggaactggacagggtgaaagtcctcaaactctgggaacaggcgagatggaacagggatttaactccccgcccacaggtccatgggagcttgaggcagtaagggggatcccaggcacccatctcaaggagtggctgggagtcttttccctaacttgtggggacaccaccagttgtcaagctactaggcagtagggtctgagggctcaggcctccacctgagaggttataacctgagagacagctctacccttcctcccagtaagaagggaaggtgggtgggcacctgagagattaagactattctcccagtcccactaccagcacccccgatccctgagactgaggggtttacgggctgtgaatggaccttcagccctgcccaccctccctccccmctgctgctgagtctgtctgatgttttggttgtgtgaataaatataattcccctctggactgcagactggtatctggggggcccaggcggggtgaaaggtaggaaggtgaggccagaggccttttctctccccagtctggccagaggccagctcccctccccggctggttaattactggctcattaagcagcggctggagacctccctaattatctcccccagcccccctcttcggttttaattaagtagaacagggaggggagtcattagaacaagaaataygaactgagctgccggtgaacccaggcattccagcggcctgagtccacatcgcttagatccctgattcaggacccaggtgacagacgcccccagccgccaacacagccccactcctaggccgcggaagtccagccagggggctttcccatatctttcagatggcccgtctc

SEQ ID NO: 2899 - DNA, 1858 bp, Homo sapiens
agcgttcgggggacttgttctctaggtccaggatcttcctaatgcatcgcctcagccatgaacaacgcggagttctttaatacccgtgagcagcagcccaggccccttgaagagtgcagactcccacctggcctgggmgtctggctccgcagcagracacgaagtttgcattccccaaggggcggccagggggcggaccagggaaaggtagtcctctgcattttgccgtgtgctggtcccacccgcctcgcctggtctagcctccgtgtttccatgacaactccaaaggagcccaaactgggggcttgaatgccgggcacccagactccagcaccggccgaggacccccactccggctgcagggaccctgtcccagcgagaccgcaggcatgtcatccgaaaagtcaggagactcgcttcgagggcccacttcccccgccgccgcccgctgccgccgccccgcccccgccggcgccagcccagactgcccaggcccctggcttcgtggtgcccacgcacgcggggactgtgggcacgctgccgctggggggytacgtagcgcccggataccccctgcagctgcagccttgcactgcttacgtgccggtctacccggtgggcacgccatatgcaggcgggaccccggggggaacaggagtgacctccactctccccccgccgccccagggcccagggctggccctactggagccgaggcgcccgccacacgactacatgcccatcgcggtgctgaccaccatctgttgcttctggcctactggcatcattgccatcttcaaggccgtgcaggtgcgcacggccttggcccgcggagacatggtgtcggccgagatcgcttcacgcgaggcccggaacttctccttcatctccctggccgtgggcatcgcggccatggtgctctgtaccatcctcaccgtagtcatcatcatcgccgcgcagcaccacgagaactactgggatccctaaaaacgcccctggtccggccccactctgcgcccctcgatctcccaggctctttctgcagtcataccgcggacccaatgggcgccctgcacacccgtttctggggccgtcagacttggatacatcgtaaactccgcctccacggaacgtctcgccttgcgagcaagctcggaatccagttcctcaggaacccctccaaaacccacacccccagggacgccgctttccgggatcccggccaaacgccggaccctcagtcgctccaggccccctcaccctcaaagtgtagcgcccccaaccgagcaacctcggtttggtccctaaaaccccgcctcctctataagcaccgccccagctctgacaaaaccccgcctccaggtcggcaggctccgccttcttttcttctccgcggggtgattcagtccagtgattgggtttgtggctccaggcctcgcccacagacggacagacccctccctttcttccggcaaaaggaccgagccctggggtagtaaggcccccacactcctgttttttgcaagtacatttttgtccctcctccacccaggtatctgcctattttcttgctaatcccagaacctttccttttgctttttttaaggacatttgggaagttcctggtgtaggacccttctccctgggataagaaacctgcctgtaaacgctctgtaaatactcccttccacccatcccagcccctgggcagccgggcagaagggaatccaggctatggacctcccaagtccccgctccccgctcccctcggcggccccgccttgttctgatctgtgtgtgagtgtgtgtgaacttctgaaagacaatattaaagagacttagttgatttatcgcccgc

SEQ ID NO: 2900 - DNA, 7922 bp, Homo sapiens
  misc_feature (1)...(7922): n = A,T,C or G
agacgtgaggcttgcagcaggcygaggaggaagaagaggggcagtgggagcagaggaggtggctcctgccccagtgagagctctgagggtccctgcctgaagagggacagggacyggggcttggagaaggggctgtggaatgcagcccccttcactgctgctgctgctgctgctgctgctgctgctatgtgtctcagtggtcagacccagagggctgctgtgtgggagtttcccagaaccctgtgccaatggaggcacctgcctgagcctgtctctgggacaagggacctgccagtgtgcccctggcttcctgggtgagacgtgccagwttcctgacccctgccagaacgcccagctctgccaaaatggaggcagctgccaagccctgcttccygctcccctagggctccccagctctccctctccattgacacccagcttcttgtgcacttgcctccctggcttcactggygagagatgccaggccnagcttgaagacccttgtcctccctccttctgttccaaaaggggccgctgccacatccaggcctcgggccgcccacagtgctcctgcatgcctggatggacaggtgagcagtgccagcttcgggacttctgttcagccaacccatgtgttaatggaggggtgtgtctggccacrtacccccagatccagtgccactgcccaccgggcttygagggccatgcctgtgaacgtgatgtcaacgagtgcttccaggacccaggacyctgccccaaaggcacctcctgccataacaccctrggctccttccagtgcctctgccctgtggggcaggagggtccacgttgtgagctgcgggcaggaccctgccctcctaggggctgttcgaatgggggcacctgccagctgatgccagagaaagactccacctttcacctctgcctctgtcccccaggtttcataggcccrgrctgtgaggtgaatccagacaactgtgtcagccaccartgtcagaatgggggcacttgccaggatgggctggacacctacacctgcctctgcccagaaacctggacaggctgggactgctccgaagatgtggatgagtgtgagrcccagggtccccctcactgcagaaacgggggcacctgccagaactctgctggtagctttcactgcgtgtgtgtgagtggctggggsggcacaagctgtgaggagaacctggatgactgtattgctgccacctgtgccccgggatccacctgcattgaccgggtgggctctttctcctgcctctgcccacctggacgcacaggactcctgtgccacttggaagacatgtgtctgagccagccgtgccatggggatgcccaatgcagcaccaaccccctcacaggctccacactctgcctgtgtcagcctggctattcggggcccacctgccaccaggacctggacgagtgtctgatggcccagcaaggcccaagtccctgtgaacatggcggttcctgcctcaacactcctggctccttcaactgcctctgtccacctggctacacaggctcccgttgtgaggctgatcacaatgagtgcctctcccagccctgccacccaggaagcacctgtctggacctacttgccaccttccactgcctctgcccgccaggcttagaagggcagctctgtgaggtggagaccaacgagtgtgcctcagctccctgcctgaaccacgcrgattgccatgacctgctcaacrgcttccagtgcatctgyctgcctggattctccggcacccgatgtgaggaggatatcgatgagtgcagaagctctccctgtgccaatggtgggcagtgccaggaccagcctggagccttccactgcaagtgtctcccaggctttgaagggccacgctgtcaaacagaggtggatgagtgcctgagtgacccatgtcccsttggagccagctgccttgatcttccaggagccttcttttgcctctgcccctctggtttcacaggccarctctgtgaggttcccctgtgtgctcccaacctgtgccagcccaagcagatatgtaaggaccagaaagacaaggccaactgcctctgtcctgatggaagccctggctgtgccccacctgaggacaactgcacctgccaccacgggcactgccagagatcctcatgtgtgtgtgacgtgggttggacggggccagagtgtgaggcagagctagggggctgcatctctgcaccctgtgcccatggggggacctgctacccccagccctctggctacaactgcacctgccctacaggctacacaggacccacctgtagtgaggagatgacagcttgtcactcagggccatgtctcaatggcggctcctgcaaccctagccctggaggctactactgcacctgccckccaagccacacagggccccagtgccaaaccagcactgactactgtgtgtctgccccgtgcttcaatgggggtacctgtgtgaacaggcctggcaccttctcctgcctctgtgccatgggcttccagggcccgcgctgtgagggaaagctccgccccakctgtgcagacagcccctgtaggaatagggcaacctgccaggacagccctcagggtccccgctgcctctgccccactgkctacaccggaggcagctgccagactytgatggacttatgtgcccagargccctgcccacgcaattcccactgcctccagactgggccctccttccactgcttgtgcctccagggatggaccgggcctctctgcaaccttccactgtcctcctgccagaaggctgcactgagccaaggcatagacgtctcttccctttgccacaatggaggcctctgtgtcgacagcggcccctcctatttctgccactgcccccctggattccaaggcagcctgtgccaggatcacgtgaacccatgtgagtccaggccttgccagaacrgggccacctgcatggcccagcccagtgggtatctctgccagtgtgccccaggctacgatggacagaactgctcaaaggaactcgatgcttgtcagtcccaaccctgtcacaaccatggaacctgtactcccaaacctggaggmttccactgtgcctgccctccaggctttgtggggctacgctgtgagggagacgtggacgagtgtctggaccagccctgccaccccacaggcactgcagcctgccactctctggccaatgccttctactgccagtgtctgcctggacacacaggccagtggtgtgaggtggagatagaccyctgccacagccaaccctgctttcatggagggacctgtgaggccacagcaggatcacccctgggtttcatctgccactgccccaaggcaaggttttgaaggccccacctgcagccacagggccccttcctgcggcttccatcactgccaccacggaggcctgtgtctgccctcccctaagccaggcttcccaccacgctgtgcctgcctcagtggctatgggggtcctgactgcctgaccccaccagctcctaaaggctgtggccctccctccccatgcctatacaatggcagctgctcagagaccacgggcttggggggcccaggctttcgatgctcctgccctcacagctctccagggccccggtgtcagaaacccggagccaaggggtgtgagggcagaagtggagatggggcctgcgatgctggctgcagtggcccgggaggaaactgggatgraggggactgctctctrggagtcccagacccctggaagsgctgcccctcccactctcggtgctggcttctcttccgggacgggcagtgccacccacagtgtgactctgaagagtgtctgtttgatggctacgactgtgagacccctccagcctgcactccagcctatgaccagtactgccatgatcacttccacaacgggcactgtgagaaaggctgcaacactgcagagtgtggctgggatggaggtgactgcaggcctgaagatggggacccagagtgggggccctcyctggccctgctggtggtactgagccccccagccctagaccagcagctgtttgccctggcccgggtgctgtccctgactctgagggtaggactctgggtaaggaaggatcgtgatggcagggacatggtgtacccctatcctggggcccgggctgaagaaaagctaggaggaactcgggaccccacctatcaggagagagcagcccctcaaacrcagcccctgggcaaggagaccgactccctcagtgctgggtttgtggtggtmatgggtgtggatttgtcccgctgtggccctgaccacccggcatcccgctgtccctgggaccctgggcttctactccgcttccttgctgcgatggctgcagtgggagccctggagcccctgctgcctggaccactgctggctgtccaccctcatgcagggaccggtagcaccccctgccaaccagcttccctggcctgtgctgtgctccccagtggccggggtgattctcctggccctaggggctcttctcgtcctccarctcatccggcgtcgacgccgagagcatggagctctctggctgccccctggtttcactcgacggcctcggactcagtcagctccccaccgacgccggcccccactaggcgaggacagcattggtctcaaggcactgaagccaaaggcagaagttgatgaggatggagttgtgatgtgctcaggccctgaggagggagaggaggtgggccaggctgaagaaacaggcccaccctccacgtgccagctctggtctctgagtggtggctgtggggcgctccctcaggcagccatgctaactcctccccaggaatctgagatggaagcccctgacctggacacccgtggacctgatggggtgacacccctgatgtcagcagtttgctgtggggaagtacagtccgggaccttccaaggggcatggttgggatgtcctgagccctgggaacctctgctggatggaggggcctgtccccaggctcacaccgtgggcactggggagacccccctgcacctggctgcccgattctcccggccaaccgctgcccgccgcctccttgaggctggagccaaccccaaccagccagaccgggcagggcgcacaccccttcatgctgctgtggctgctgatgctcgggaggtctgccagcttctgctccgtagcagacaaactgcagtggacgctcgcacagaggacgggaccacacccttgatgctggctgccaggctggcggtggaagacctggttgaagaactgattgcagcccaagcagacgtgggggccagagataaatgggggaaaactgcgctgcactgggctgctgccgtgaacaacgcccgagccgcccgctcgcttctccaggccggagccgataaagatgcccaggacaacagggagcagacgccgctattcctggcggcgcgggaaggagcggtggaagtagcccagctactgctggggctgggggcagcccgagagctgcgggaccaggctgggctagcgccggcggacgtcgctcaccarcgtaaccactgggatctgctgacgctgctggaaggggctgggccaccagaggcccgtcacaaagccacgccgggccgcgaggctgggcccttcccgcgcgcacggacggtgtcagtaagcgtgcccccgcatggrggcggggctctgccgcgctgccggacgctgtcagccggagcaggccctcgtgggggcggagcttgtctgcaggctcggacttggtccgtagacttggctgcgcgggggggcggggcctattckcattgccggagcctctcgggagtaggagcaggaggaggcccgacccctcgcggccgtaggttttctgcaggcatgcgcgggcctcggcccaaccctgcgataatgcgaggaagatacggagtggctgccgggcgcggaggcagggtctcaacggatgactggccctgtgattgggtggccctgggagcttgcggttctgcctccaacattccgatcccgcctccttgccttactccgtccccggagcggggatcacctcaacttgaytgtggtcccccagccctccaagaaatgcccataaaccaaggaggagagggtaaaaaatagaagaatacatggaattggggagaagaatgggaaaaaagatgggagtgactgcataatgtcagcattttgtgcttttggctcagcatttggattggatggaggattttcatcctgaaaccagccctccgtcgccaccgaccatggaataattgtcttccacgaaactcttccctggtgccaaaaagggttttatgtatatatttgagagctccacatccctggatctgaatcctccacttcccactggaaccatgcccctcccagtcccgtttctcccctctaggggatggaggctgagagaccccaggaagaagaggatggtgagcagggcccccctcaggatgaggaaggctggccccctccaaactccaccactcggccttggcgatctgctcctccrtcccctcctcctccagggacccgccacacagccctgggaccccgctcggcctccctgctctccctgcagactgaactccttctggacctggtggctgaagcccagtcccgccgcctggaggagcagagggccaccttctacaccccccaaaacccctcaagcctagcccctgccccactccgtcctctcgaggacagagaacagctttacagcactatcctcagtcaccagtgccagcggatggaagcccagcggtcagagcctcccctccctccaggggggcaagagctcctggagttgctgctgagagttcagggtgggggtcgaatggaggagcaaaggtcccggccccccacacacacctgctgagacttgagccccaaccagcccttccttgccactggtctcaaagctgggcagcccattgcatgccctcaactcttgcttggcaggggtaccagagactgaaagacacggcacaaatctcaatattcatctcccacatcaccttccctgggaactggacagggtgaaagtcctcaaactctgggaacaggcgagatggaacagggatttaactccccgcccacaggtccatgggagcttgaggcagtaagggggatcccaggcacccatctcaaggagtggctgggagtcttttccctaacttgtggggacaccaccagttgtcaagctactaggcagtagggtctgagggctcaggcctccacctgagaggttataacctgagagacagctctacccttcctcccagtaagaagggaaggtgggtgggcacctgagagattaagactattctcccagtcccactaccagcacccccgatccctgagactgaggggtttacgggctgtgaatggaccttcagccctgcccaccctccctccccmctgctgctgagtctgtctgatgttttggttgtgtgaataaatataattcccctctggactgcagactggtatctggggggcccaggcggggtgaaaggtaggaaggtgaggccagaggccttttctctccccagtctggccagaggccagctcccctccccggctggttaattactggctcattaagcagcggctggagacctccctaattatctcccccagcccccctcttcggttttaattaagtagaacagggaggggagtcattagaacaagaaataygaactgagctgccggtgaacccaggcattccagcggcctgagtccacatcgcttagatccctgattcaggacccaggtgacagacgcccccagccgccaacacagccccactcctaggccgcggaagtccagccagggggctttcccatatctttcagatggcccgtctc

SEQ ID NO: 2901 - DNA, 2243 bp, Homo sapiens
ctcttytagagaatgtccggattgctattggactttggagcgtatggctccaaatcaactcattggctaaaacttgmcggaaaatggtggttaggtggccagaatggatttgtggccaggggcatggatgctgctgctgctgctcttcctgctgctgctcttcctgctgcccaccctgtggttctgcagcyccagtgccaagtacttcttcaagatggccttctacaatggctggatcctcttcctggctgtgctcgccatccctgtgtgtgccgtgcgaggacgcaacgtcgagaacatgaagatcttgcgtctaatgctgctccacatcaaatacctgtacgggatccgagtggaggtgcgaggggctcaccacttccctccctcgcagccctatgttgttgtctccaaccaccagagctctctcgatctgcttgggatgatggaggtactgccaggccgctgtgtgcccattgccaagcgcgagctactgtgggctggctctgccgggctggcctgctggctggcaggagtcatcttcatcgaccggaagcgcacgggggatgccatcagtgtcatgtctgaggtcgcccagaccctgctcacccaggacgtgagggtctgggtgtttcctgagggaacgagaaaccacaatggctccatgctgcccttcaaacgtggcgccttccatcttgcagtgcaggcccaggttcccattgtcccyatagtcatgtcctcctaccaagacttctactgcaagaaggagcgtcgcttcacctcgggacaatgtcaggtgcgggtgctgcccccagtgcccacggaagggctgacaccagatgacgtcccagctctggctgacagagtccggcactccatgctcactgttttccgggaaatctccactgatggccggggtggtggtgactatctgaagaagcctgggggcggtgggtgaaccctggctmtttggaatcttcaacttctgaagtgaatgtggatacagcgccactcctgccccctcttggccccatccatggactcttgcctcggtgcagtytccactcttgacccccacctcctactgtcttgtctgtgggacagttgcctccccctcatctccagtgactcagcctacacaagggaggggaacattccatccccagtggagtctcttcctatgtggtcttctctacccctctaccccacattggccagtggactcatccattctttggaacaaatcccccccactccaaagtccatggattcaatggactcatccatttgtgaggaggacttctcgccctctggctggaagctgatacctgaagcactcccaggctcatcmtgggagctttcctcagcaccttcaccttccctcccagtgtagcctcctgtcagtgggggctggacccttctaattcagaggtctcatgcctgcccttgcccagatgcccagggtcgtgcactctctgggataccagttcagtctccacatttctggttttctgtccccatagtacagttcttcagtggacatgaccccacccagccccctgcagccctgctgcaccatctcaccagacacaaggggaagaagcagacatcaggtgctgcactcacttytgccccctggggagttggggaaaggaacgaaccctggctggaggggataggagggcttttaatttatttctttttctgttgaggcttccccctctctgagccagttttcatttyttcctggtggcattagccactccctgcctctcactccagacctgttcccmcaactggggaggtaggctgggagcaaaaggagagggtgggacccagttttgcgtggttggtttttattaattatyyggataacagcaaaaaaactgaaaataaagagagagagagatctgggtgttggtggttgcatttgttaaggaattgaagaagcagttcttgcccaggcaacctgcccccagccagaagactcaggggcaggccaagaacacaggcctccccstttcttcagctctctgaagtttccattgttcattgctctttggtggctgatagccttatctgcagctcacagtcggccaatcccagaggattagtgggtccggtttctgtataaattagggggcaggggtgctgtagaggcttcttatcgatgattgacgccgaggcccaggctgttgtcctcacaggagcctggcacmtagcctctcctccagcagcagcacctg

SEQ ID NO: 2902 - DNA, 4475 bp, Homo sapiens
tctccggctccattttctccgccgccgggggccggggtctcctgtggggggcccagccggtatcccaggtctcccttcagtgccggggtgaacccccgggggagccgggagccgggggcagacgggcgggggttggggcggagggagcagcggccccagcgggggggcctrggattggtgagtggggagcctgggggccctggcgagcctcccggtggcggagaccccggtgggggtagcgggggggtcccgggaggccgagggaagcaagacatcggggacattctgcagcagataatgaccatcaccgaccagagcctggacgaggcccaggccaagaaacacgccctaaactgccaccgaatgaagcctgctctctttagcgtcctgtgtgaaatcaaggagaaaactggcctcagcattcggagctcccaggaggaggagccggtggacccacagctgatgcgcttggacaacatgcttctggcagagggtgtggctgggcccgagaaagggggcggctcagcagcagcagctgcagccgctgcagcctctggtggtggtgtgtcccctgacaactccatcgaacactcggactatcgcagcaaacttgcccagatccgtcacatataccactcggagctggagaagtatgagcaggcatgtaatgagttcacgacccatgtcatgaacctgctgagggagcagagccgcaccaggcccgtggcccccaaagagatggaacgcatggtgagcatcatccatcgaaagttcagcgccatccagatgcagctgaagcagagcacctgcgaggctgtgatgatcctgcgctcccgtttcctggatgccagacgaaagcgccgtaacttcagcaaacaggccactgaggtcctaaatgagtatttctactcccacctgagtaacccatatcctagtgaggaggccaaggaggagcttgccaaraagtgtggcatcaccgtgtctcaggtctccaactggtttggcaacaagaggattcgctataagaaaaacatcggaaagttccaagaggaggcaaacatctatgctgtcaagaccgccgtgtcagtcacccaggggggccacagccgcaccagctccccgacacccccttcctctgcaggctctggcggctctttcaatctctcaggatctggagacatgtttctggggatgcctgggctcaacggagattcctattctgcttcccaggtggaatcactccgacactcgatggggccagggggctatggggataacctcgggggaggccagatgtacagcccacgggaaatgagggcaaatggcagctggcaagaggctgtgaccccctcttcagtgacatccccaacggagggaccagggagtgttcactctgatacctccaactgatcttgcccctcagggtcacaggggtgggggstctcacaaggcgacttgaagaggacgcaggcttccagaggacaaaccccaatacaggagaagcacaagacagagaagggccaatggggtcatccsctccctaaygagactstctgtgctgggggtgctaattacatggcaggaagaatggggccyctaaggggagtgtggggtctgtctctcccttttttccawctttttcctctctcgckttctttcttacacagaaacatrcacataccsagaaacctatttctcagacccctttttctcctctgtctttctctctccctctcccacacctcacacacacatactcccacttgcaactattctgtttctctcctgggctcccccactttcccttccccaccccacttgtatgctctggaatctgtggagacgccagccctgcccaatcagagatgccaaaaatggggacatgacttctggacagaggacatgggccacgcccccatgcatccccacccccgcccctccggacggcttacttacctcatacgcagctcatcttaaaccaatagaatcgctcggtggacgagagtgtctgactcagatatctacctcggagggagtttctgctactttagggaattattgactgggctttggggttgaacttttttttttttaaagaaagaaaaagaaaccctgggatccatctgttttttttkttgttgttgttgtttttgttkttgktgktggtggtggtggtggtggttcttaatttttaatttagtttggggaagtagcttgtttttttttttataaatatgttgatttcttgtcttttttttttatttcttactttcccatattaggggtgatagccaaaggggttctggtaagagaaagggggacaaacagaactggtaaagagscccccctggctccaggcctgtccatcaggaagtaaattttacagggcaccaagctttgccccctaaaatcccttaggtgttctttgttcatgcaggcaggtttctgccgcatttgatgtggaggcagcatgggccgggggcagttctctcctcacttgtaaacttgtgtagtttcacagaaaaaaaacaaaatgcagttttaaataaagaaatttcttttttccctgggtttagttgagaatttttttcaaaaaacatgagaaaccccagaaaaaaaatgattttctttcacgaagytccaaacaggtttctctcctgttccccagccttgccttcatgatgcaggcccaawtgcacccttgcagacaacagtctggcctgaaccctattgatgcaactttgcgcaatcaagatggggctccagtgggtcaccaggcagccctgatggactgatggaataaataggatcgggggctctgagggaatgagaccctagagggtacactccccatcccccagggaagtgactgtacccagaggctggtagtacccaggggtggggtgataattatttctctagtacctgaaggactcttgtcccaaaggcatgaattcctagcattccctgtgacaagacgactgaaagatgggggctggagagagggtgcaggccccacctagggcggaggccacagcagggagaggggcagacagagccaggaccctggaaggaagcaggatggcwgccggaacagcagttggagcctgggtgctggtcctcagtctgtggggggcagtagtaggtgctcaaaacatcacagcccggattggcgagccactggtgctgaagtgtaagggggcccccaagaaaccaccccagcrgctggaatgraaactgaacacaggccggacagaagcttggaaggtcctgtctccccagggaggaggcccctgggacagtgtggctcgtgtccttcccaacrgctccctcttccttccggctgtsgggatccaggatgaggggattttccggtgccaggcaatgaacaggaatggaaaggagaccaagtccaactaccgagtccgtgtctaccagattcctgggaagccagaaattgtagattctgcctctgaactcacggctggtgttcccaataaggtggggacatgtgtgtcagagggaagctaccctgcagggactcttagctggcacttggatgggaagcccctggtgcctaatgagaagggagtatctgtgaaggaacagaccaggagacaccctgagacagggctcttcacactgcagtcggagctaatggtgaccccagcccggggaggagatccccgtcccaccttctcctgtagcttcagcccaggccttccccgacaccgggccttgcgcacagcccccatccagccccgtgtctgggagcctgtgcctctggaggaggtccaattggtggtggagccagaaggtggagcagtagctcctggtggaaccgtaaccctgacctgtgaagtccctgcccagccctctcctcaaatccactggatgaaggatggtgtgcccttgccccttccccccagccctgtgctgatcctccctgagatagggcctcaggaccagggaacctacagctgtgtggccacccattccagccacgggccccaggaaagccgtgctgtcagcatcagcatcatcgaaccaggcgaggaggggccaactgcaggctctgtgggaggatcagggctgggaactctagccctggccctggggatcctgggaggcctggggacagccgccctgctcattggggtcatcttgtggcaaaggcggcaacgccgaggagaggagaggaaggccccagaaaaccaggaggaagaggaggagcgtgcagaactgaatcagtcggaggaacctgaggcaggcgagagtagtactggagggccttgaggggcccacagacagatcccatccatcagctcccttttctttttcccttgaactgttctggcctcagaccaactctctcctgtataatctctctcctgtataaccccaccttgccaagctttcttctacaaccagagccccccacaatgatgattaaacacctgacacatcttgctctt

SEQ ID NO: 2903 - DNA, 1748 bp, Homo sapiens
gctagttcctgtgttgacagaaagagcagaagaggaggtggggtggagggagcagagccagggattaggggactactgaggctctggagatgagaccgccaggagtccttccccaccatgagccccctccactcctgcagctggaggagtttttcccagtctcagtgctgccctggggcgagagagactgaacaagctgtttgggtgggaagagaatggaggaagttgacagggatgggcggggcccgtgggggggctgaccaggaacccagcttcctgctcagtacccaggcatccagcccccagctcacccccaccccttccagcccccactcccctcaggaacccaaggttccagccctcctcccaaatcccagccacccctcccccaccagtttctcccctctaggggatggaggctgagagaccccaggaagaagaggatggtgagcagactgaactccttctggacctggtggctgaagcccagtcccgccgcctggaggagcagagggccaccttctacaccccccaaaacccctcaagcctagcccctgccccactccgtcctctcgaggacagagaacagctttacagcactatcctcagtcaccagtgccagcggatggaagcccagcggtcagagcctcccctccctccaggggggcaagagctcctggagttgctgctgagagttcagggtgggggtcgaatggaggagcaaaggtcccggccccccacacacacctgctgagacttgagccccaaccagcccttccttgccactggtctcaaagctgggcagcccattgcatgccctcaactcttgcttggcaggggtaccagagactgaaagacacggcacaaatctcaatattcatctcccacatcaccttccctgggaactggacagggtgaaagtcctcaaactctgggaacaggcgagatggaacagggatttaactccccgcccacaggtccatgggagcttgaggcagtaagggggatcccaggcacccatctcaaggagtggctgggagtcttttccctaacttgtggggacaccaccagttgtcaagctactaggcagtagggtctgagggctcaggcctccacctgagaggttataacctgagagacagctctacccttcctcccagtaagaagggaaggtgggtgggcacctgagagattaagactattctcccagtcccactaccagcacccccgatccctgagactgaggggtttacgggctgtgaatggaccttcagccctgcccaccctccctccccmctgctgctgagtctgtctgatgttttggttgtgtgaataaatataattcccctctggactgcagactggtatctggggggcccaggcggggtgaaaggtaggaaggtgaggccagaggccttttctctccccagtctggccagaggccagctcccctccccggctggttaattactggctcattaagcagcggctggagacctccctaattatctcccccagcccccctcttcggttttaattaagtagaacagggaggggagtcattagaacaagaaataygaactgagctgccggtgaacccaggcattccagcggcctgagtccacatcgcttagatccctgattcaggacccaggtgacagacgcccccagccgccaacacagccccactcctaggccgcggaagtccagccagggggctttcccatatctttcagatggcccgtctc

SEQ ID NO: 2904 - DNA, 2675 bp, Homo sapiens
gctagttcctgtgttgacagaaagagcagaagaggaggtggggtggagggagcagagccagggattaggggactactgaggctctggagatgagaccgccaggagtccttccccaccatgagccccctccactcctgcagctggaggagtttttcccagtctcagtgctgccctggggcgagagagactgaacaagctgtttgggtgggaagagaatggaggaagttgacagggatgggcggggcccgtgggggggctgaccaggaacccagcttcctgctcagtacccaggcatccagcccccagctcacccccaccccttccagcccccactcccctcaggaacccaaggttccagccctcctcccaaatcccagccacccctcccccaccagtttctcccctctaggggatggaggctgagagaccccaggaagaagaggatggtgagcaggccttccccgacaccgggccttgcgcacagcccccatccagccccgtgtctgggccccccaccattcctaccgctatgggcccaacctcccactcccacctcccctccatcggccggggctaggacacccccaaatcccgtcgcccccttggcaccgacaccccgacagagacagagacacagccatccgccaccaccgctgccgcagcctggctggggagggggccagccccccaggccccctacccctctgagctccccccctccccgctctccctccgcccgccccccccgccccccccccccgccgctgccttcatctctccatctctgcgctgctgccgctgcgccatccagcacccagactccagcaccggccgaggacccccactccggctgcagggaccctgtcccagcgagaccgcaggcatgtcatccgaaaagtcaggactcccagactcagtccctcacacttctccgccgccctacaatgcccctcagcctccagccgaacccccagccccaccgccacaggcagccccttcctcacaccatcaccaccaccaccactaccatcagtctggcaccgccaccctcccgcgcttaggggcagggggcctggcctcttccgcggccaccgctcagcgcggtccctcctcctctgccacgctgccgaggcccccccaccacgcccctcccggccctgctgccggggcacccccacccggctgcgctaccttgccccgcatgccacccgacccttacctgcaggagactcgcttcgagggcccacttcccccgccgccgcccgctgccgccgccccgcccccgccggcgccagcccagactgcccaggcccctggcttcgtggtgcccacgcacgcggggactgtgggcacgctgccgctggggggytacgtagcgcccggataccccctgcagctgcagccttgcactgcttacgtgccggtctacccggtgggcacgccatatgcaggcgggaccccggggggaacaggagtgacctccactctccccccgccgccccagggcccagggctggccctactggagccgaggcgcccgccacacgactacatgcccatcgcggtgctgaccaccatctgttgcttctggcctactggcatcattgccatcttcaaggccgtgcaggtgcgcacggccttggcccgcggagacatggtgtcggccgagatcgcttcacgcgaggcccggaacttctccttcatctccctggccgtgggcatcgcggccatggtgctctgtaccatcctcaccgtagtcatcatcatcgccgcgcagcaccacgagaactactgggatccctaaaaacgcccctggtccggccccactctgcgcccctcgatctcccaggctctttctgcagtcataccgcggacccaatgggcgccctgcacacccgtttctggggccgtcagacttggatacatcgtaaactccgcctccacggaacgtctcgccttgcgagcaagctcggaatccagttcctcaggaacccctccaaaacccacacccccagggacgccgctttccgggatcccggccaaacgccggaccctcagtcgctccaggccccctcaccctcaaagtgtagcgcccccaaccgagcaacctcggtttggtccctaaaaccccgcctcctctataagcaccgccccagctctgacaaaaccccgcctccaggtcggcaggctccgccttcttttcttctccgcggggtgattcagtccagtgattgggtttgtggctccaggcctcgcccacagacggacagacccctccctttcttccggcaaaaggaccgagccctggggtagtaaggcccccacactcctgttttttgcaagtacatttttgtccctcctccacccaggtatctgcctattttcttgctaatcccagaacctttccttttgctttttttaaggacatttgggaagttcctggtgtaggacccttctccctgggataagaaacctgcctgtaaacgctctgtaaatactcccttccacccatcccagcccctgggcagccgggcagaagggaatccaggctatggacctcccaagtccccgctccccgctcccctcggcggccccgccttgttctgatctgtgtgtgagtgtgtgtgaacttctgaaagacaatattaaagagacttagttgatttatcgcccgc

SEQ ID NO: 2905 - DNA, 7914 bp, Homo sapiens
  misc_feature (1)...(7914): n = A,T,C or G
agacgtgaggcttgcagcaggcygaggaggaagaagaggggcagtgggagcagaggaggtggctcctgccccagtgagagctctgagggtccctgcctgaagagggacagggacyggggcttggagaaggggctgtggaatgcagcccccttcactgctgctgctgctgctgctgctgctgctgctatgtgtctcagtggtcagacccagagggctgctgtgtgggagtttcccagaaccctgtgccaatggaggcacctgcctgagcctgtctctgggacaagggacctgccagtgtgcccctggcttcctgggtgagacgtgccagwttcctgacccctgccagaacgcccagctctgccaaaatggaggcagctgccaagccctgcttccygctcccctagggctccccagctctccctctccattgacacccagcttcttgtgcacttgcctccctggcttcactggygagagatgccaggccnagcttgaagacccttgtcctccctccttctgttccaaaaggggccgctgccacatccaggcctcgggccgcccacagtgctcctgcatgcctggatggacaggtgagcagtgccagcttcgggacttctgttcagccaacccatgtgttaatggaggggtgtgtctggccacrtacccccagatccagtgccactgcccaccgggcttygagggccatgcctgtgaacgtgatgtcaacgagtgcttccaggacccaggacyctgccccaaaggcacctcctgccataacaccctrggctccttccagtgcctctgccctgtggggcaggagggtccacgttgtgagctgcgggcaggaccctgccctcctaggggctgttcgaatgggggcacctgccagctgatgccagagaaagactccacctttcacctctgcctctgtcccccaggtttcataggcccrgrctgtgaggtgaatccagacaactgtgtcagccaccartgtcagaatgggggcacttgccaggatgggctggacacctacacctgcctctgcccagaaacctggacaggctgggactgctccgaagatgtggatgagtgtgagrcccagggtccccctcactgcagaaacgggggcacctgccagaactctgctggtagctttcactgcgtgtgtgtgagtggctggggsggcacaagctgtgaggagaacctggatgactgtattgctgccacctgtgccccgggatccacctgcattgaccgggtgggctctttctcctgcctctgcccacctggacgcacaggactcctgtgccacttggaagacatgtgtctgagccagccgtgccatggggatgcccaatgcagcaccaaccccctcacaggctccacactctgcctgtgtcagcctggctattcggggcccacctgccaccaggacctggacgagtgtctgatggcccagcaaggcccaagtccctgtgaacatggcggttcctgcctcaacactcctggctccttcaactgcctctgtccacctggctacacaggctcccgttgtgaggctgatcacaatgagtgcctctcccagccctgccacccaggaagcacctgtctggacctacttgccaccttccactgcctctgcccgccaggcttagaagggcagctctgtgaggtggagaccaacgagtgtgcctcagctccctgcctgaaccacgcrgattgccatgacctgctcaacrgcttccagtgcatctgyctgcctggattctccggcacccgatgtgaggaggatatcgatgagtgcagaagctctccctgtgccaatggtgggcagtgccaggaccagcctggagccttccactgcaagtgtctcccaggctttgaagggccacgctgtcaaacagaggtggatgagtgcctgagtgacccatgtcccsttggagccagctgccttgatcttccaggagccttcttttgcctctgcccctctggtttcacaggccarctctgtgaggttcccctgtgtgctcccaacctgtgccagcccaagcagatatgtaaggaccagaaagacaaggccaactgcctctgtcctgatggaagccctggctgtgccccacctgaggacaactgcacctgccaccacgggcactgccagagatcctcatgtgtgtgtgacgtgggttggacggggccagagtgtgaggcagagctagggggctgcatctctgcaccctgtgcccatggggggacctgctacccccagccctctggctacaactgcacctgccctacaggctacacaggacccacctgtagtgaggagatgacagcttgtcactcagggccatgtctcaatggcggctcctgcaaccctagccctggaggctactactgcacctgccckccaagccacacagggccccagtgccaaaccagcactgactactgtgtgtctgccccgtgcttcaatgggggtacctgtgtgaacaggcctggcaccttctcctgcctctgtgccatgggcttccagggcccgcgctgtgagggaaagctccgccccakctgtgcagacagcccctgtaggaatagggcaacctgccaggacagccctcagggtccccgctgcctctgccccactgkctacaccggaggcagctgccagactytgatggacttatgtgcccagargccctgcccacgcaattcccactgcctccagactgggccctccttccactgcttgtgcctccagggatggaccgggcctctctgcaaccttccactgtcctcctgccagaaggctgcactgagccaaggcatagacgtctcttccctttgccacaatggaggcctctgtgtcgacagcggcccctcctatttctgccactgcccccctggattccaaggcagcctgtgccaggatcacgtgaacccatgtgagtccaggccttgccagaacrgggccacctgcatggcccagcccagtgggtatctctgccagtgtgccccaggctacgatggacagaactgctcaaaggaactcgatgcttgtcagtcccaaccctgtcacaaccatggaacctgtactcccaaacctggaggmttccactgtgcctgccctccaggctttgtggggctacgctgtgagggagacgtggacgagtgtctggaccagccctgccaccccacaggcactgcagcctgccactctctggccaatgccttctactgccagtgtctgcctggacacacaggccagtggtgtgaggtggagatagaccyctgccacagccaaccctgctttcatggagggacctgtgaggccacagcaggatcacccctgggtttcatctgccactgccccaagggttttgaaggccccacctgcagccacagggccccttcctgcggcttccatcactgccaccacggaggcctgtgtctgccctcccctaagccaggcttcccaccacgctgtgcctgcctcagtggctatgggggtcctgactgcctgaccccaccagctcctaaaggctgtggccctccctccccatgcctatacaatggcagctgctcagagaccacgggcttggggggcccaggctttcgatgctcctgccctcacagctctccagggccccggtgtcagaaacccggagccaaggggtgtgagggcagaagtggagatggggcctgcgatgctggctgcagtggcccgggaggaaactgggatgraggggactgctctctrggagtcccagacccctggaagsgctgcccctcccactctcggtgctggcttctcttccgggacgggcagtgccacccacagtgtgactctgaagagtgtctgtttgatggctacgactgtgagacccctccagcctgcactccagcctatgaccagtactgccatgatcacttccacaacgggcactgtgagaaaggctgcaacactgcagagtgtggctgggatggaggtgactgcaggcctgaagatggggacccagagtgggggccctcyctggccctgctggtggtactgagccccccagccctagaccagcagctgtttgccctggcccgggtgctgtccctgactctgagggtaggactctgggtaaggaaggatcgtgatggcagggacatggtgtacccctatcctggggcccgggctgaagaaaagctaggaggaactcgggaccccacctatcaggagagagcagcccctcaaacrcagcccctgggcaaggagaccgactccctcagtgctgggtttgtggtggtmatgggtgtggatttgtcccgctgtggccctgaccacccggcatcccgctgtccctgggaccctgggcttctactccgcttccttgctgcgatggctgcagtgggagccctggagcccctgctgcctggaccactgctggctgtccaccctcatgcagggaccgcaccccctgccaaccagcttccctggcctgtgctgtgctccccagtggccggggtgattctcctggccctaggggctcttctcgtcctccarctcatccggcgtcgacgccgagagcatggagctctctggctgccccctggtttcactcgacggcctcggactcagtcagctccccaccgacgccggcccccactaggcgaggacagcattggtctcaaggcactgaagccaaaggcagaagttgatgaggatggagttgtgatgtgctcaggccctgaggagggagaggaggtgggccaggctgaagaaacaggcccaccctccacgtgccagctctggtctctgagtggtggctgtggggcgctccctcaggcagccatgctaactcctccccaggaatctgagatggaagcccctgacctggacacccgtggacctgatggggtgacacccctgatgtcagcagtttgctgtggggaagtacagtccgggaccttccaaggggcatggttgggatgtcctgagccctgggaacctctgctggatggaggggcctgtccccaggctcacaccgtgggcactggggagacccccctgcacctggctgcccgattctcccggccaaccgctgcccgccgcctccttgaggctggagccaaccccaaccagccagaccgggcagggcgcacaccccttcatgctgctgtggctgctgatgctcgggaggtctgccagcttctgctccgtagcagacaaactgcagtggacgctcgcacagaggacgggaccacacccttgatgctggctgccaggctggcggtggaagacctggttgaagaactgattgcagcccaagcagacgtgggggccagagataaatgggggaaaactgcgctgcactgggctgctgccgtgaacaacgcccgagccgcccgctcgcttctccaggccggagccgataaagatgcccaggacaacagggagcagacgccgctattcctggcggcgcgggaaggagcggtggaagtagcccagctactgctggggctgggggcagcccgagagctgcgggaccaggctgggctagcgccggcggacgtcgctcaccarcgtaaccactgggatctgctgacgctgctggaaggggctgggccaccagaggcccgtcacaaagccacgccgggccgcgaggctgggcccttcccgcgcgcacggacggtgtcagtaagcgtgcccccgcatggrggcggggctctgccgcgctgccggacgctgtcagccggagcaggccctcgtgggggcggagcttgtctgcaggctcggacttggtccgtagacttggctgcgcgggggggcggggcctattckcattgccggagcctctcgggagtaggagcaggaggaggcccgacccctcgcggccgtaggttttctgcaggcatgcgcgggcctcggcccaaccctgcgataatgcgaggaagatacggagtggctgccgggcgcggaggcagggtctcaacggatgactggccctgtgattgggtggccctgggagcttgcggttctgcctccaacattccgatcccgcctccttgccttactccgtccccggagcggggatcacctcaacttgaytgtggtcccccagccctccaagaaatgcccataaaccaaggaggagagggtaaaaaatagaagaatacatggaattggggagaagaatgggaaaaaagatgggagtgactgcataatgtcagcattttgtgcttttggctcagcatttggattggatggaggattttcatcctgaaaccagccctccgtcgccaccgaccatggaataattgtcttccacgaaactcttccctggtgccaaaaagggttttatgtatatatttgagagctccacatccctggatctgaatcctccacttcccactggaaccatgcccctcccagtcccgtttctcccctctaggggatggaggctgagagaccccaggaagaagaggatggtgagcagggcccccctcaggatgaggaaggctggccccctccaaactccaccactcggccttggcgatctgctcctccrtcccctcctcctccagggacccgccacacagccctgggaccccgctcggcctccctgctctccctgcagactgaactccttctggacctggtggctgaagcccagtcccgccgcctggaggagcagagggccaccttctacaccccccaaaacccctcaagcctagcccctgccccactccgtcctctcgaggacagagaacagctttacagcactatcctcagtcaccagtgccagcggatggaagcccagcggtcagagcctcccctccctccaggggggcaagagctcctggagttgctgctgagagttcagggtgggggtcgaatggaggagcaaaggtcccggccccccacacacacctgctgagacttgagccccaaccagcccttccttgccactggtctcaaagctgggcagcccattgcatgccctcaactcttgcttggcaggggtaccagagactgaaagacacggcacaaatctcaatattcatctcccacatcaccttccctgggaactggacagggtgaaagtcctcaaactctgggaacaggcgagatggaacagggatttaactccccgcccacaggtccatgggagcttgaggcagtaagggggatcccaggcacccatctcaaggagtggctgggagtcttttccctaacttgtggggacaccaccagttgtcaagctactaggcagtagggtctgagggctcaggcctccacctgagaggttataacctgagagacagctctacccttcctcccagtaagaagggaaggtgggtgggcacctgagagattaagactattctcccagtcccactaccagcacccccgatccctgagactgaggggtttacgggctgtgaatggaccttcagccctgcccaccctccctccccmctgctgctgagtctgtctgatgttttggttgtgtgaataaatataattcccctctggactgcagactggtatctggggggcccaggcggggtgaaaggtaggaaggtgaggccagaggccttttctctccccagtctggccagaggccagctcccctccccggctggttaattactggctcattaagcagcggctggagacctccctaattatctcccccagcccccctcttcggttttaattaagtagaacagggaggggagtcattagaacaagaaataygaactgagctgccggtgaacccaggcattccagcggcctgagtccacatcgcttagatccctgattcaggacccaggtgacagacgcccccagccgccaacacagccccactcctaggccgcggaagtccagccagggggctttcccatatctttcagatggcccgtctc

SEQ ID NO: 2906 - DNA, 1889 bp, Homo sapiens
gctagttcctgtgttgacagaaagagcagaagaggaggtggggtggagggagcagagccagggattaggggactactgaggctctggagatgagaccgccaggagtccttccccaccatgagccccctccactcctgcagctggaggagtttttcccagtctcagtgctgccctggggcgagagagactgaacaagctgtttgggtgggaagagaatggaggaagttgacagggatgggcggggcccgtgggggggctgaccaggaacccagcttcctgctcagtacccaggcatccagcccccagctcacccccaccccttccagcccccactcccctcaggaacccaaggttccagccctcctcccaaatcccagccacccctcccccaccagtttctcccctctaggggatggaggctgagagaccccaggaagaagaggatggtgagcagggcccccctcaggatgaggaaggctggccccctccaaactccaccactcggccttggcgatctgctcctccrtcccctcctcctccagggacccgccacacagccctgggaccccgctcggcctccctgctctccctgcagactgaactccttctggacctggtggctgaagcccagtcccgccgcctggaggagcagagggccaccttctacaccccccaaaacccctcaagcctagcccctgccccactccgtcctctcgaggacagagaacagctttacagcactatcctcagtcaccagtgccagcggatggaagcccagcggtcagagcctcccctccctccaggggggcaagagctcctggagttgctgctgagagttcagggtgggggtcgaatggaggagcaaaggtcccggccccccacacacacctgctgagacttgagccccaaccagcccttccttgccactggtctcaaagctgggcagcccattgcatgccctcaactcttgcttggcaggggtaccagagactgaaagacacggcacaaatctcaatattcatctcccacatcaccttccctgggaactggacagggtgaaagtcctcaaactctgggaacaggcgagatggaacagggatttaactccccgcccacaggtccatgggagcttgaggcagtaagggggatcccaggcacccatctcaaggagtggctgggagtcttttccctaacttgtggggacaccaccagttgtcaagctactaggcagtagggtctgagggctcaggcctccacctgagaggttataacctgagagacagctctacccttcctcccagtaagaagggaaggtgggtgggcacctgagagattaagactattctcccagtcccactaccagcacccccgatccctgagactgaggggtttacgggctgtgaatggaccttcagccctgcccaccctccctccccmctgctgctgagtctgtctgatgttttggttgtgtgaataaatataattcccctctggactgcagactggtatctggggggcccaggcggggtgaaaggtaggaaggtgaggccagaggccttttctctccccagtctggccagaggccagctcccctccccggctggttaattactggctcattaagcagcggctggagacctccctaattatctcccccagcccccctcttcggttttaattaagtagaacagggaggggagtcattagaacaagaaataygaactgagctgccggtgaacccaggcattccagcggcctgagtccacatcgcttagatccctgattcaggacccaggtgacagacgcccccagccgccaacacagccccactcctaggccgcggaagtccagccagggggctttcccatatctttcagatggcccgtctc

SEQ ID NO: 2907 - DNA, 7918 bp, Homo sapiens
  misc_feature (1)...(7918): n = A,T,C or G
agacgtgaggcttgcagcaggcygaggaggaagaagaggggcagtgggagcagaggaggtggctcctgccccagtgagagctctgagggtccctgcctgaagagggacagggacyggggcttggagaaggggctgtggaatgcagcccccttcactgctgctgctgctgctgctgctgctgctgctatgtgtctcagtggtcagacccagagggctgctgtgtgggagtttcccagaaccctgtgccaatggaggcacctgcctgagcctgtctctgggacaagggacctgccagtgtgcccctggcttcctgggtgagacgtgccagwttcctgacccctgccagaacgcccagctctgccaaaatggaggcagctgccaagccctgcttccygctcccctagggctccccagctctccctctccattgacacccagcttcttgtgcacttgcctccctggcttcactggygagagatgccaggccnagcttgaagacccttgtcctccctccttctgttccaaaaggggccgctgccacatccaggcctcgggccgcccacagtgctcctgcatgcctggatggacaggtgagcagtgccagcttcgggacttctgttcagccaacccatgtgttaatggaggggtgtgtctggccacrtacccccagatccagtgccactgcccaccgggcttygagggccatgcctgtgaacgtgatgtcaacgagtgcttccaggacccaggacyctgccccaaaggcacctcctgccataacaccctrggctccttccagtgcctctgccctgtggggcaggagggtccacgttgtgagctgcgggcaggaccctgccctcctaggggctgttcgaatgggggcacctgccagctgatgccagagaaagactccacctttcacctctgcctctgtcccccaggtttcataggcccrgrctgtgaggtgaatccagacaactgtgtcagccaccartgtcagaatgggggcacttgccaggatgggctggacacctacacctgcctctgcccagaaacctggacaggctgggactgctccgaagatgtggatgagtgtgagrcccagggtccccctcactgcagaaacgggggcacctgccagaactctgctggtagctttcactgcgtgtgtgtgagtggctggggsggcacaagctgtgaggagaacctggatgactgtattgctgccacctgtgccccgggatccacctgcattgaccgggtgggctctttctcctgcctctgcccacctggacgcacaggactcctgtgccacttggaagacatgtgtctgagccagccgtgccatggggatgcccaatgcagcaccaaccccctcacaggctccacactctgcctgtgtcagcctggctattcggggcccacctgccaccaggacctggacgagtgtctgatggcccagcaaggcccaagtccctgtgaacatggcggttcctgcctcaacactcctggctccttcaactgcctctgtccacctggctacacaggctcccgttgtgaggctgatcacaatgagtgcctctcccagccctgccacccaggaagcacctgtctggacctacttgccaccttccactgcctctgcccgccaggcttagaagggcagctctgtgaggtggagaccaacgagtgtgcctcagctccctgcctgaaccacgcrgattgccatgacctgctcaacrgcttccagtgcatctgyctgcctggattctccggcacccgatgtgaggaggatatcgatgagtgcagaagctctccctgtgccaatggtgggcagtgccaggaccagcctggagccttccactgcaagtgtctcccaggctttgaagggccacgctgtcaaacagaggtggatgagtgcctgagtgacccatgtcccsttggagccagctgccttgatcttccaggagccttcttttgcctctgcccctctggtttcacaggccarctctgtgaggttcccctgtgtgctcccaacctgtgccagcccaagcagatatgtaaggaccagaaagacaaggccaactgcctctgtcctgatggaagccctggctgtgccccacctgaggacaactgcacctgccaccacgggcactgccagagatcctcatgtgtgtgtgacgtgggttggacggggccagagtgtgaggcagagctagggggctgcatctctgcaccctgtgcccatggggggacctgctacccccagccctctggctacaactgcacctgccctacaggctacacaggacccacctgtagtgaggagatgacagcttgtcactcagggccatgtctcaatggcggctcctgcaaccctagccctggaggctactactgcacctgccckccaagccacacagggccccagtgccaaaccagcactgactactgtgtgtctgccccgtgcttcaatgggggtacctgtgtgaacaggcctggcaccttctcctgcctctgtgccatgggcttccagggcccgcgctgtgagggaaagctccgccccakctgtgcagacagcccctgtaggaatagggcaacctgccaggacagccctcagggtccccgctgcctctgccccactgkctacaccggaggcagctgccagactytgatggacttatgtgcccagargccctgcccacgcaattcccactgcctccagactgggccctccttccactgcttgtgcctccagggatggaccgggcctctctgcaaccttccactgtcctcctgccagaaggctgcactgagccaaggcatagacgtctcttccctttgccacaatggaggcctctgtgtcgacagcggcccctcctatttctgccactgcccccctggattccaaggcagcctgtgccaggatcacgtgaacccatgtgagtccaggccttgccagaacrgggccacctgcatggcccagcccagtgggtatctctgccagtgtgccccaggctacgatggacagaactgctcaaaggaactcgatgcttgtcagtcccaaccctgtcacaaccatggaacctgtactcccaaacctggaggmttccactgtgcctgccctccaggctttgtggggctacgctgtgagggagacgtggacgagtgtctggaccagccctgccaccccacaggcactgcagcctgccactctctggccaatgccttctactgccagtgtctgcctggacacacaggccagtggtgtgaggtggagatagaccyctgccacagccaaccctgctttcatggagggacctgtgaggccacagcaggatcacccctgggtttcatctgccactgccccaaggcaaggttttgaaggccccacctgcagccacagggccccttcctgcggcttccatcactgccaccacggaggcctgtgtctgccctcccctaagccaggcttcccaccacgctgtgcctgcctcagtggctatgggggtcctgactgcctgaccccaccagctcctaaaggctgtggccctccctccccatgcctatacaatggcagctgctcagagaccacgggcttggggggcccaggctttcgatgctcctgccctcacagctctccagggccccggtgtcagaaacccggagccaaggggtgtgagggcagaagtggagatggggcctgcgatgctggctgcagtggcccgggaggaaactgggatgraggggactgctctctrggagtcccagacccctggaagsgctgcccctcccactctcggtgctggcttctcttccgggacgggcagtgccacccacagtgtgactctgaagagtgtctgtttgatggctacgactgtgagacccctccagcctgcactccagcctatgaccagtactgccatgatcacttccacaacgggcactgtgagaaaggctgcaacactgcagagtgtggctgggatggaggtgactgcaggcctgaagatggggacccagagtgggggccctcyctggccctgctggtggtactgagccccccagccctagaccagcagctgtttgccctggcccgggtgctgtccctgactctgagggtaggactctgggtaaggaaggatcgtgatggcagggacatggtgtacccctatcctggggcccgggctgaagaaaagctaggaggaactcgggaccccacctatcaggagagagcagcccctcaaacrcagcccctgggcaaggagaccgactccctcagtgctgggtttgtggtggtmatgggtgtggatttgtcccgctgtggccctgaccacccggcatcccgctgtccctgggaccctgggcttctactccgcttccttgctgcgatggctgcagtgggagccctggagcccctgctgcctggaccactgctggctgtccaccctcatgcagggaccgcaccccctgccaaccagcttccctggcctgtgctgtgctccccagtggccggggtgattctcctggccctaggggctcttctcgtcctccarctcatccggcgtcgacgccgagagcatggagctctctggctgccccctggtttcactcgacggcctcggactcagtcagctccccaccgacgccggcccccactaggcgaggacagcattggtctcaaggcactgaagccaaaggcagaagttgatgaggatggagttgtgatgtgctcaggccctgaggagggagaggaggtgggccaggctgaagaaacaggcccaccctccacgtgccagctctggtctctgagtggtggctgtggggcgctccctcaggcagccatgctaactcctccccaggaatctgagatggaagcccctgacctggacacccgtggacctgatggggtgacacccctgatgtcagcagtttgctgtggggaagtacagtccgggaccttccaaggggcatggttgggatgtcctgagccctgggaacctctgctggatggaggggcctgtccccaggctcacaccgtgggcactggggagacccccctgcacctggctgcccgattctcccggccaaccgctgcccgccgcctccttgaggctggagccaaccccaaccagccagaccgggcagggcgcacaccccttcatgctgctgtggctgctgatgctcgggaggtctgccagcttctgctccgtagcagacaaactgcagtggacgctcgcacagaggacgggaccacacccttgatgctggctgccaggctggcggtggaagacctggttgaagaactgattgcagcccaagcagacgtgggggccagagataaatgggggaaaactgcgctgcactgggctgctgccgtgaacaacgcccgagccgcccgctcgcttctccaggccggagccgataaagatgcccaggacaacagggagcagacgccgctattcctggcggcgcgggaaggagcggtggaagtagcccagctactgctggggctgggggcagcccgagagctgcgggaccaggctgggctagcgccggcggacgtcgctcaccarcgtaaccactgggatctgctgacgctgctggaaggggctgggccaccagaggcccgtcacaaagccacgccgggccgcgaggctgggcccttcccgcgcgcacggacggtgtcagtaagcgtgcccccgcatggrggcggggctctgccgcgctgccggacgctgtcagccggagcaggccctcgtgggggcggagcttgtctgcaggctcggacttggtccgtagacttggctgcgcgggggggcggggcctattckcattgccggagcctctcgggagtaggagcaggaggaggcccgacccctcgcggccgtaggttttctgcaggcatgcgcgggcctcggcccaaccctgcgataatgcgaggaagatacggagtggctgccgggcgcggaggcagggtctcaacggatgactggccctgtgattgggtggccctgggagcttgcggttctgcctccaacattccgatcccgcctccttgccttactccgtccccggagcggggatcacctcaacttgaytgtggtcccccagccctccaagaaatgcccataaaccaaggaggagagggtaaaaaatagaagaatacatggaattggggagaagaatgggaaaaaagatgggagtgactgcataatgtcagcattttgtgcttttggctcagcatttggattggatggaggattttcatcctgaaaccagccctccgtcgccaccgaccatggaataattgtcttccacgaaactcttccctggtgccaaaaagggttttatgtatatatttgagagctccacatccctggatctgaatcctccacttcccactggaaccatgcccctcccagtcccgtttctcccctctaggggatggaggctgagagaccccaggaagaagaggatggtgagcagggcccccctcaggatgaggaaggctggccccctccaaactccaccactcggccttggcgatctgctcctccrtcccctcctcctccagggacccgccacacagccctgggaccccgctcggcctccctgctctccctgcagactgaactccttctggacctggtggctgaagcccagtcccgccgcctggaggagcagagggccaccttctacaccccccaaaacccctcaagcctagcccctgccccactccgtcctctcgaggacagagaacagctttacagcactatcctcagtcaccagtgccagcggatggaagcccagcggtcagagcctcccctccctccaggggggcaagagctcctggagttgctgctgagagttcagggtgggggtcgaatggaggagcaaaggtcccggccccccacacacacctgctgagacttgagccccaaccagcccttccttgccactggtctcaaagctgggcagcccattgcatgccctcaactcttgcttggcaggggtaccagagactgaaagacacggcacaaatctcaatattcatctcccacatcaccttccctgggaactggacagggtgaaagtcctcaaactctgggaacaggcgagatggaacagggatttaactccccgcccacaggtccatgggagcttgaggcagtaagggggatcccaggcacccatctcaaggagtggctgggagtcttttccctaacttgtggggacaccaccagttgtcaagctactaggcagtagggtctgagggctcaggcctccacctgagaggttataacctgagagacagctctacccttcctcccagtaagaagggaaggtgggtgggcacctgagagattaagactattctcccagtcccactaccagcacccccgatccctgagactgaggggtttacgggctgtgaatggaccttcagccctgcccaccctccctccccmctgctgctgagtctgtctgatgttttggttgtgtgaataaatataattcccctctggactgcagactggtatctggggggcccaggcggggtgaaaggtaggaaggtgaggccagaggccttttctctccccagtctggccagaggccagctcccctccccggctggttaattactggctcattaagcagcggctggagacctccctaattatctcccccagcccccctcttcggttttaattaagtagaacagggaggggagtcattagaacaagaaataygaactgagctgccggtgaacccaggcattccagcggcctgagtccacatcgcttagatccctgattcaggacccaggtgacagacgcccccagccgccaacacagccccactcctaggccgcggaagtccagccagggggctttcccatatctttcagatggcccgtctc

SEQ ID NO: 2908 - DNA, 4658 bp, Homo sapiens
acacacacccccgcttgggcctcctctctctctccggctccattttctccgccgccgggggccggggtctcctgtggggggcccagccggtatcccaggtctcccttcagtgccggggtgaacccccgggggagccgggagccgggggcagacgggcgggggttggggcggagggagcagcggccccagcgagtttggggggagaagtaaccaggcggggggaggggcggagcagrgagggggcctcaggscccccccccagctatggacgaacggctactggggccgccccctccaggcgggggccgggggggcctrggattggtgagtggggagcctgggggccctggcgagcctcccggtggcggagaccccggtgggggtagcgggggggtcccgggaggccgagggaagcaagacatcggggacattctgcagcagataatgaccatcaccgaccagagcctggacgaggcccaggccaagaaacacgccctaaactgccaccgaatgaagcctgctctctttagcgtcctgtgtgaaatcaaggagaaaactggcctcagcattcggagctcccaggaggaggagccggtggacccacagctgatgcgcttggacaacatgcttctggcagagggtgtggctgggcccgagaaagggggcggctcagcagcagcagctgcagccgctgcagcctctggtggtggtgtgtcccctgacaactccatcgaacactcggactatcgcagcaaacttgcccagatccgtcacatataccactcggagctggagaagtatgagcaggcatgtaatgagttcacgacccatgtcatgaacctgctgagggagcagagccgcaccaggcccgtggcccccaaagagatggaacgcatggtgagcatcatccatcgaaagttcagcgccatccagatgcagctgaagcagagcacctgcgaggctgtgatgatcctgcgctcccgtttcctggatgccagacgaaagcgccgtaacttcagcaaacaggccactgaggtcctaaatgagtatttctactcccacctgagtaacccatatcctagtgaggaggccaaggaggagcttgccaaraagtgtggcatcaccgtgtctcaggtctccaactggtttggcaacaagaggattcgctataagaaaaacatcggaaagttccaagaggaggcaaacatctatgctgtcaagaccgccgtgtcagtcacccaggggggccacagccgcaccagctccccgacacccccttcctctgcaggctctggcggctctttcaatctctcaggatctggagacatgtttctggggatgcctgggctcaacggagattcctattctgcttcccaggtggaatcactccgacactcgatggggccagggggctatggggataacctcgggggaggccagatgtacagcccacgggaaatgagggcaaatggcagctggcaagaggctgtgaccccctcttcagtgacatccccaacggagggaccagggagtgttcactctgatacctccaactgatcttgcccctcagggtcacaggggtgggggstctcacaaggcgacttgaagaggacgcaggcttccagaggacaaaccccaatacaggagaagcacaagacagagaagggccaatggggtcatccsctccctaaygagactstctgtgctgggggtgctaattacatggcaggaagaatggggccyctaaggggagtgtggggtctgtctctcccttttttccawctttttcctctctcgckttctttcttacacagaaacatrcacataccsagaaacctatttctcagacccctttttctcctctgtctttctctctccctctcccacacctcacacacacatactcccacttgcaactattctgtttctctcctgggctcccccactttcccttccccaccccacttgtatgctctggaatctgtggagacgccagccctgcccaatcagagatgccaaaaatggggacatgacttctggacagaggacatgggccacgcccccatgcatccccacccccgcccctccggacggcttacttacctcatacgcagctcatcttaaaccaatagaatcgctcggtggacgagagtgtctgactcagatatctacctcggagggagtttctgctactttagggaattattgactgggctttggggttgaacttttttttttttaaagaaagaaaaagaaaccctgggatccatctgttttttttkttgttgttgttgtttttgttkttgktgktggtggtggtggtggtggttcttaatttttaatttagtttggggaagtagcttgtttttttttttataaatatgttgatttcttgtcttttttttttatttcttactttcccatattaggggtgatagccaaaggggttctggtaagagaaagggggacaaacagaactggtaaagagscccccctggctccaggcctgtccatcaggaagtaaattttacagggcaccaagctttgccccctaaaatcccttaggtgttctttgttcatgcaggcaggtttctgccgcatttgatgtggaggcatgggccgggggcagttctctcctcacttgtaaacttgtgtagtttcacagaaaaaaaacaaaatgcagttttaaataaagaaatttcttttttccctgggtttagttgagaatttttttcaaaaaacatgagaaaccccagaaaaaaaatgattttctttcacgaagytccaaacaggtttctctcctgttccccagccttgccttcatgatgcaggcccaawtgcacccttgcagacaacagtctggcctgaaccctattgatgcaactttgcgcaatcaagatggggctccagtgggtcaccaggcagccctgatggactgatggaataaataggatcgggggctctgagggaatgagaccctagagggtacactccccatcccccagggaagtgactgtacccagaggctggtagtacccaggggtggggtgataattatttctctagtacctgaaggactcttgtcccaaaggcatgaattcctagcattccctgtgacaagacgactgaaagatgggggctggagagagggtgcaggccccacctagggcggaggccacagcagggagaggggcagacagagccaggaccctggaaggaagcaggatggcwgccggaacagcagttggagcctgggtgctggtcctcagtctgtggggggcagtagtaggtgctcaaaacatcacagcccggattggcgagccactggtgctgaagtgtaagggggcccccaagaaaccaccccagcrgctggaatgraaactgaacacaggccggacagaagcttggaaggtcctgtctccccagggaggaggcccctgggacagtgtggctcgtgtccttcccaacrgctccctcttccttccggctgtsgggatccaggatgaggggattttccggtgccaggcaatgaacaggaatggaaaggagaccaagtccaactaccgaagtttgagaaccttcacaattacagsctctgactggatttttcctccttcagagattcctgggaagccagaaattgtagattctgcctctgaactcacggctggtgttcccaataaggtggggacatgtgtgtcagagggaagctaccctgcagggactcttagctggcacttggatgggaagcccctggtgcctaatgagaagggagtatctgtgaaggaacagaccaggagacaccctgagacagggctcttcacactgcagtcggagctaatggtgaccccagcccggggaggagatccccgtcccaccttctcctgtagcttcagcccaggccttccccgacaccgggccttgcgcacagcccccatccagccccgtgtctgggagcctgtgcctctggaggaggtccaattggtggtggagccagaaggtggagcagtagctcctggtggaaccgtaaccctgacctgtgaagtccctgcccagccctctcctcaaatccactggatgaaggatggtgtgcccttgccccttccccccagccctgtgctgatcctccctgagatagggcctcaggaccagggaacctacagctgtgtggccacccattccagccacgggccccaggaaagccgtgctgtcagcatcagcatcatcgaaccaggcgaggaggggccaactgcaggctctgtgggaggatcagggctgggaactctagccctggccctggggatcctgggaggcctggggacagccgccctgctcattggggtcatcttgtggcaaaggcggcaacgccgaggagaggagaggaaggccccagaaaaccaggaggaagaggaggagcgtgcagaactgaatcagtcggaggaacctgaggcaggcgagagtagtactggagggccttgaggggcccacagacagatcccatccatcagctcccttttctttttcccttgaactgttctggcctcagaccaactctctcctgtataatctctctcctgtataaccccaccttgccaagctttcttctacaaccagagccccccacaatgatgattaaacacctgacacatcttgctctt

SEQ ID NO: 2909 - DNA, 1966 bp, Homo sapiens
ctccccccctccccgctctccctccgcccgccccccccgccccccccccccgccgctgccttcatctctccatctctgcgctgctgccgctgcgccatccagcacccagactccagcaccggccgaggacccccactccggctgcagggaccctgtcccagcgagaccgcaggcatgtcatccgaaaagtcaggactcccagactcagtccctcacacttctccgccgccctacaatgcccctcagcctccagccgaacccccagccccaccgccacaggcagccccttcctcacaccatcaccaccaccaccactaccatcagtctggcaccgccaccctcccgcgcttaggggcagggggcctggcctcttccgcggccaccgctcagcgcggtccctcctcctctgccacgctgccgaggcccccccaccacgcccctcccggccctgctgccggggcacccccacccggctgcgctaccttgccccgcatgccacccgacccttacctgcaggagactcgcttcgagggcccacttcccccgccgccgcccgctgccgccgccccgcccccgccggcgccagcccagactgcccaggcccctggcttcgtggtgcccacgcacgcggggactgtgggcacgctgccgctggggggytacgtagcgcccggataccccctgcagctgcagccttgcactgcttacgtgccggtctacccggtgggcacgccatatgcaggcgggaccccggggggaacaggagtgacctccactctccccccgccgccccagggcccagggctggccctactggagccgaggcgcccgccacacgactacatgcccatcgcggtgctgaccaccatctgttgcttctggcctactggcatcattgccatcttcaaggccgtgcaggtgcgcacggccttggcccgcggagacatggtgtcggccgagatcgcttcacgcgaggcccggaacttctccttcatctccctggccgtgggcatcgcggccatggtgctctgtaccatcctcaccgtagtcatcatcatcgccgcgcagcaccacgagaactactgggatccctaaaaacgcccctggtccggccccactctgcgcccctcgatctcccaggctctttctgcagtcataccgcggacccaatgggcgccctgcacacccgtttctggggccgtcagacttggatacatcgtaaactccgcctccacggaacgtctcgccttgcgagcaagctcggaatccagttcctcaggaacccctccaaaacccacacccccagggacgccgctttccgggatcccggccaaacgccggaccctcagtcgctccaggccccctcaccctcaaagtgtagcgcccccaaccgagcaacctcggtttggtccctaaaaccccgcctcctctataagcaccgccccagctctgacaaaaccccgcctccaggtcggcaggctccgccttcttttcttctccgcggggtgattcagtccagtgattgggtttgtggctccaggcctcgcccacagacggacagacccctccctttcttccggcaaaaggaccgagccctggggtagtaaggcccccacactcctgttttttgcaagtacatttttgtccctcctccacccaggtatctgcctattttcttgctaatcccagaacctttccttttgctttttttaaggacatttgggaagttcctggtgtaggacccttctccctgggataagaaacctgcctgtaaacgctctgtaaatactcccttccacccatcccagcccctgggcagccgggcagaagggaatccaggctatggacctcccaagtccccgctccccgctcccctcggcggccccgccttgttctgatctgtgtgtgagtgtgtgtgaacttctgaaagacaatattaaagagacttagttgatttatcgcccgc

SEQ ID NO: 2910 - DNA, 1929 bp, Homo sapiens
cgccccccccccccgccgctgccttcatctctccatctctgcgctgctgccgctgcgccatccagcacccagactccagcaccggccgaggacccccactccggctgcagggaccctgtcccagcgagaccgcaggcatgtcatccgaaaagtcaggactcccagactcagtccctcacacttctccgccgccctacaatgcccctcagcctccagccgaacccccagccccaccgccacaggcagccccttcctcacaccatcaccaccaccaccactaccatcagtctggcaccgccaccctcccgcgcttaggggcagggggcctggcctcttccgcggccaccgctcagcgcggtccctcctcctctgccacgctgccgaggcccccccaccacgcccctcccggccctgctgccggggcacccccacccggctgcgctaccttgccccgcatgccacccgacccttacctgcaggagactcgcttcgagggcccacttcccccgccgccgcccgctgccgccgccccgcccccgccggcgccagcccagactgcccaggcccctggcttcgtggtgcccacgcacgcggggactgtgggcacgctgccgctggggggytacgtagcgcccggataccccctgcagctgcagccttgcactgcttacgtgccggtctacccggtgggcacgccatatgcaggcgggaccccggggggaacaggagtgacctccactctccccccgccgccccagggcccagggctggccctactggagccgaggcgcccgccacacgactacatgcccatcgcggtgctgaccaccatctgttgcttctggcctactggcatcattgccatcttcaaggccgtgcaggtgcgcacggccttggcccgcggagacatggtgtcggccgagatcgcttcacgcgaggcccggaacttctccttcatctccctggccgtgggcatcgcggccatggtgctctgtaccatcctcaccgtagtcatcatcatcgccgcgcagcaccacgagaactactgggatccctaaaaacgcccctggtccggccccactctgcgcccctcgatctcccaggctctttctgcagtcataccgcggacccaatgggcgccctgcacacccgtttctggggccgtcagacttggatacatcgtaaactccgcctccacggaacgtctcgccttgcgagcaagctcggaatccagttcctcaggaacccctccaaaacccacacccccagggacgccgctttccgggatcccggccaaacgccggaccctcagtcgctccaggccccctcaccctcaaagtgtagcgcccccaaccgagcaacctcggtttggtccctaaaaccccgcctcctctataagcaccgccccagctctgacaaaaccccgcctccaggtcggcaggctccgccttcttttcttctccgcggggtgattcagtccagtgattgggtttgtggctccaggcctcgcccacagacggacagacccctccctttcttccggcaaaaggaccgagccctggggtagtaaggcccccacactcctgttttttgcaagtacatttttgtccctcctccacccaggtatctgcctattttcttgctaatcccagaacctttccttttgctttttttaaggacatttgggaagttcctggtgtaggacccttctccctgggataagaaacctgcctgtaaacgctctgtaaatactcccttccacccatcccagcccctgggcagccgggcagaagggaatccaggctatggacctcccaagtccccgctccccgctcccctcggcggccccgccttgttctgatctgtgtgtgagtgtgtgtgaacttctgaaagacaatattaaagagacttagttgatttatcgcccgc

SEQ ID NO: 2911 - DNA, 4622 bp, Homo sapiens
acacacacccccgcttgggcctcctctctctctccggctccattttctccgccgccgggggccggggtctcctgtggggggcccagccggtatcccaggtctcccttcagtgccggggtgaacccccgggggagccgggagccgggggcagacgggcgggggttggggcggagggagcagcggccccagcgagtttggggggagaagtaaccaggcggggggaggggcggagcagrgagggggcctcaggscccccccccagctatggacgaacggctactggggccgccccctccaggcgggggccgggggggcctrggattggtgagtggggagcctgggggccctggcgagcctcccggtggcggagaccccggtgggggtagcgggggggtcccgggaggccgagggaagcaagacatcggggacattctgcagcagataatgaccatcaccgaccagagcctggacgaggcccaggccaagaaacacgccctaaactgccaccgaatgaagcctgctctctttagcgtcctgtgtgaaatcaaggagaaaactggcctcagcattcggagctcccaggaggaggagccggtggacccacagctgatgcgcttggacaacatgcttctggcagagggtgtggctgggcccgagaaagggggcggctcagcagcagcagctgcagccgctgcagcctctggtggtggtgtgtcccctgacaactccatcgaacactcggactatcgcagcaaacttgcccagatccgtcacatataccactcggagctggagaagtatgagcaggcatgtaatgagttcacgacccatgtcatgaacctgctgagggagcagagccgcaccaggcccgtggcccccaaagagatggaacgcatggtgagcatcatccatcgaaagttcagcgccatccagatgcagctgaagcagagcacctgcgaggctgtgatgatcctgcgctcccgtttcctggatgccagacgaaagcgccgtaacttcagcaaacaggccactgaggtcctaaatgagtatttctactcccacctgagtaacccatatcctagtgaggaggccaaggaggagcttgccaaraagtgtggcatcaccgtgtctcaggtctccaactggtttggcaacaagaggattcgctataagaaaaacatcggaaagttccaagaggaggcaaacatctatgctgtcaagaccgccgtgtcagtcacccaggggggccacagccgcaccagctccccgacacccccttcctctgcaggctctggcggctctttcaatctctcaggatctggagacatgtttctggggatgcctgggctcaacggagattcctattctgcttcccaggtggaatcactccgacactcgatggggccagggggctatggggataacctcgggggaggccagatgtacagcccacgggaaatgagggcaaatggcagctggcaagaggctgtgaccccctcttcagtgacatccccaacggagggaccagggagtgttcactctgatacctccaactgatcttgcccctcagggtcacaggggtgggggstctcacaaggcgacttgaagaggacgcaggcttccagaggacaaaccccaatacaggagaagcacaagacagagaagggccaatggggtcatccsctccctaaygagactstctgtgctgggggtgctaattacatggcaggaagaatggggccyctaaggggagtgtggggtctgtctctcccttttttccawctttttcctctctcgckttctttcttacacagaaacatrcacataccsagaaacctatttctcagacccctttttctcctctgtctttctctctccctctcccacacctcacacacacatactcccacttgcaactattctgtttctctcctgggctcccccactttcccttccccaccccacttgtatgctctggaatctgtggagacgccagccctgcccaatcagagatgccaaaaatggggacatgacttctggacagaggacatgggccacgcccccatgcatccccacccccgcccctccggacggcttacttacctcatacgcagctcatcttaaaccaatagaatcgctcggtggacgagagtgtctgactcagatatctacctcggagggagtttctgctactttagggaattattgactgggctttggggttgaacttttttttttttaaagaaagaaaaagaaaccctgggatccatctgttttttttkttgttgttgttgtttttgttkttgktgktggtggtggtggtggtggttcttaatttttaatttagtttggggaagtagcttgtttttttttttataaatatgttgatttcttgtcttttttttttatttcttactttcccatattaggggtgatagccaaaggggttctggtaagagaaagggggacaaacagaactggtaaagagscccccctggctccaggcctgtccatcaggaagtaaattttacagggcaccaagctttgccccctaaaatcccttaggtgttctttgttcatgcaggcaggtttctgccgcatttgatgtggaggcagcatgggccgggggcagttctctcctcacttgtaaacttgtgtagtttcacagaaaaaaaacaaaatgcagttttaaataaagaaatttcttttttccctgggtttagttgagaatttttttcaaaaaacatgagaaaccccagaaaaaaaatgattttctttcacgaagytccaaacaggtttctctcctgttccccagccttgccttcatgatgcaggcccaawtgcacccttgcagacaacagtctggcctgaaccctattgatgcaactttgcgcaatcaagatggggctccagtgggtcaccaggcagccctgatggactgatggaataaataggatcgggggctctgagggaatgagaccctagagggtacactccccatcccccagggaagtgactgtacccagaggctggtagtacccaggggtggggtgataattatttctctagtacctgaaggactcttgtcccaaaggcatgaattcctagcattccctgtgacaagacgactgaaagatgggggctggagagagggtgcaggccccacctagggcggaggccacagcagggagaggggcagacagagccaggaccctggaaggaagcaggatggcwgccggaacagcagttggagcctgggtgctggtcctcagtctgtggggggcagtagtaggtgctcaaaacatcacagcccggattggcgagccactggtgctgaagtgtaagggggcccccaagaaaccaccccagcrgctggaatgraaactgaacacaggccggacagaagcttggaaggtcctgtctccccagggaggaggcccctgggacagtgtggctcgtgtccttcccaacrgctccctcttccttccggctgtsgggatccaggatgaggggattttccggtgccaggcaatgaacaggaatggaaaggagaccaagtccaactaccgagtccgtgtctaccagattcctgggaagccagaaattgtagattctgcctctgaactcacggctggtgttcccaataaggtggggacatgtgtgtcagagggaagctaccctgcagggactcttagctggcacttggatgggaagcccctggtgcctaatgagaagggagtatctgtgaaggaacagaccaggagacaccctgagacagggctcttcacactgcagtcggagctaatggtgaccccagcccggggaggagatccccgtcccaccttctcctgtagcttcagcccaggccttccccgacaccgggccttgcgcacagcccccatccagccccgtgtctgggagcctgtgcctctggaggaggtccaattggtggtggagccagaaggtggagcagtagctcctggtggaaccgtaaccctgacctgtgaagtccctgcccagccctctcctcaaatccactggatgaaggatggtgtgcccttgccccttccccccagccctgtgctgatcctccctgagatagggcctcaggaccagggaacctacagctgtgtggccacccattccagccacgggccccaggaaagccgtgctgtcagcatcagcatcatcgaaccaggcgaggaggggccaactgcaggctctgtgggaggatcagggctgggaactctagccctggccctggggatcctgggaggcctggggacagccgccctgctcattggggtcatcttgtggcaaaggcggcaacgccgaggagaggagaggaaggccccagaaaaccaggaggaagaggaggagcgtgcagaactgaatcagtcggaggaacctgaggcaggcgagagtagtactggagggccttgaggggcccacagacagatcccatccatcagctcccttttctttttcccttgaactgttctggcctcagaccaactctctcctgtataatctctctcctgtataaccccaccttgccaagctttcttctacaaccagagccccccacaatgatgattaaacacctgacacatcttgctctt

SEQ ID NO: 2912 - DNA, 6321 bp, Homo sapiens
gtgagagacatcacctccgactccctcagcctctcctggacagtccccgagggccagtttgaccatttcttggtccagtwtaagaatggggaygggcagcccaaggcggtgcgggtgccgggacacgaggatggggtcaccatctcrggcctggagccagaccacaagtacaagatgaacctgtacggcttccacggtggccagcgcgtgggccccgtgtctgctgttggtttaactgccccaggaaaggatgaagaaatggccccagcctcgacagaacctcccacccctgaaccccmcatcaagcctcgcctggaggagctgaccgtgacagatgcgacccctgactccctcagcctgtcctggacggttcccgagggacagtttgaccacttcctggtccagtacaagaatggggatgggcagcccaaggcaacacgggtgccaggacatgaggacagggtcaccatctccggcctggagccagacaacaagtacaagatgaacctgtacggcttccacggtggccagcgtgtgggccccgtgtctgccatcggggtgacagctgcagaggaagagacccccagccccacagaacccagcatggaggccccggagccccctgaggagcygctcctgggggagctracagtgacaggatcctcccctgactcgctgagcctctcctggaccgtcccccagggccgcttcgactccttcaccgtgcagtacaaggacagggacgggcggccccaggtggtgcgtgttgggggygaggagagcgaggtcaccgtggggggcctggagcctgggcgcaaatacaagatgcacctgtayggcctccacgaggggcggcgygtgggcccggtgtccaccgtgrgcgtgactgccccacaagaggatgtggacragacccccagccctacagaaccaggcacagaggccccagrgccccccgaggagcctctcctgggggagctgacagtgacaggatcctcccctgactcgctgagcctttcctggaccgtcccccagggccgctttgactccttcaccgtgcagtacaaggacagggaygggcggccccaggcggtgcgtgttgggggccaggagagcaaggtcactgtgaggggcctggagcctgggcgcaagtacaagatgcacctgtacggcctccacgaggggcrgcgcctrggcccggtgtctgccgtgggcgtcacagaggatgaagccgagaccacccaagcagtgcctaccatgacccctgagccccccatcaagcctcgcctgggggagctgaccatgacagatgccacccctgactccctcagcctgtcctggacggttcccgagggccagtttgaccacttcctggtccagtacaggaatggggatgggcagcccaaggcggtgcgggtgccggggcacgaggacggggtcaccatctcaggcctggagccagaccataaatacaagatgaacctgtacggcttccacggtggccagcrcgtgggccccatctctgtcattggggtgacggaggaagagacccccagccccacggaactcagcactgaggcccsggagccccctgaggagccgctcctgggggagctgacagtgacaggatcctcccctgactcgctgagcctctcctggaccatcccccagggccacttcgactccttcaccgtgcagtacaaggacagggacgggcggccccaggtgatgcgtgtcaggggcgaggagagcgaggtcaccgtggggggcctggagcccgggcgcaaatacaagatgcacctgtacggcctccacgaggggcggcgtgtgggcccggtgtccaccgtgggtgtgacagtgcccaccacaacccctgagccccccaacaagcctmgcctcrgggagctgaccgtgacagatgccacccctgactccctcagcctgtcctggatggtcccygagggccagtttgaccacttcctggtccagtacaggaatggggatgggcagcccaaggtggtgcggkkgccggggcacgaggacggggtcaccatctcaggcctggagccagaccacaagtacaagatgaacctgtacggcttccacrgtggccagcgcgtgggccccatctctgtcattggggtgacagaggaagaaactcccgcccccacagaacccagcacggaggccccggagccccctgaggagccgctcctgggggagctgacagtgacaggatcctcccctgactcgctgagcctctcctggaccatcccccagggccgcttcgactccttcactgtgcagtacaaggacagggacgggcggccccaggtggtgcgtgtcaggggcgaggagagcgaggtcaccgtggggggcctggagcccgggygcaaatacargatgcacctgtacggcctccaygaggggcagcgcgtgggcccagtgtccgctgtgggtgtgacagctccaaaggatgaagccgagaccacccaagcagtgcctaccatgacccctgagccccccatcaagcctcgcctgggggagctgaccgtgacagatgccacccccgactccctcagcctgtcctggatggttcccgagggccagtttgaccacttcctggtccagtacaggaatggggatgggcagcccaaggcggtgcgggkgccggggcacgaggacggggtcaccatctcaggcctggagccagaccayaartacaagatgaacctgtacggcttccacggtggccagcgcgtaggccctgtgtctgccattggggtgwcggaggaagagacccccagccccacagaacccagcactgaggccccggaggcccctgaggagccgctcctgggggagttgacagtgacaggatcctcccctgactcgctgagcctctcctggaccrtcccccaggkccgcttcgactccttcaccgtgcagtacaaggacagggaygggcagccccaggtggtgsgtgtcagggkcraggagagcgaggtcaccgtrgggggcctrgagcccgggcgcaaatacaagatgcayctgtacggcctccacgaggggcagcgcgtgggcccagtgtccaccgtgggcatcacggcgcccctgcccacaccactgccggtggagccccgcctgggggagctggcggtggmggccgtgacctcggactcagtgggcctctcatggacggtggcccagggcccctttgactccttcctggtacagtacagggacgcgcaggggcagccccaggcagtgcctgtgagcggagacctccgagcggtmgccgtctcggggctggwmccggcccgcaagtacaagttcctgctctttggactccagaatgggaaacgccacrgcccagtccctgtggaggccaggaccgccccagacaccaaaccgtctccccgcctgggggagctgactgtgacagatgcgacccctgactccgtgggcctctcgtggacggtccctgagggcgaattcgactccttcgtggtccagtacaaggataaggatggtcggctccaggtggtgccggtggcagccaaccagcgggaggtcacagtccaggscctggagcccagtaggaaatacaggttcctgctctatggtctgtcaggcaggaaacgactgggccccatctctgctgacagcaccacagctcccctggagaaggagctacctccccacctgggggaactgaccgtggctgaggagacctccagctctctgcgcctgtcctggacggtagcccagggcccctttgactccttcgtggtccagtacagggacacggacgggcagcccagggcagtgcctgtggccgcagaccagcgcacagtcaccgtagaggacctggagcctggcaagaaatacaagtttctgctctacgggctccttgggggaaagcgcctgggcccggtctctgccctgggaatgacagccccagaagaggacacaccagccccagagttagccccagaggcccctgagcctcctgaagagccccgcctaggagtgctgaccgtgaccgacacaaccccagactccatgcgcctctcgtggagcgtggcccagggcccctttgattccttcgtggtccagtatgaggacacgaacgggcagccccaggccttgctcgtggacggcgaccagagcaagatcctcatctcaggcctggagcccagcaccccctacaggttcctcctctatggcctccatgaagggaagcgcctggggcccctctcagctgagggcaccacagggctggctcctgctggtcagacctcagaggagkcaaggccccgcctgtcccagctgtctgtgactgacgtgaccaccagttcactgaggctcaactgggaggccccaccgggggccttcgactccttcctgctccgctttggggttccatcaccaagcacwctggagccgcatccgcgtccactgctgcagcgcgagctgatggtgccggggacrcggcactcggccgtgctccgggacctgcgttccgggactctgtacagcctgacactgtatgggctgcgaggaccccacaaggccgacagcatccagggaaccgcccgcaccctcagcccagttctggagagcccccgtgacctccaattcagtgaaatcagggagacctcagccaaggtcaactggatgcccccaccatcccgggcggacagcttcaaagtctcctaccagctggcggacggaggggagcctcagagtgtgcaggtggayggccrggcccggacccagaaactccaggtgggagycaagaaaayggcatgggtgggagttgagagagaacgaggaggttcctgacggtcccacacagttgcgtgcactgaacttgaccgagggattcgccgtgctgcactggaagcccccccagaatcctgtrgacacctatgacrtccaggtcacagcccctggggccccgcctctgcaggcggagaccccaggcagcgcggtggactaccccctgcatgaccttgtcctccacaccaactacaccgccacagtgcgtggcctgcggggccccaacctcacttccccagccagcatcaccttcaccacagggctagaggcccctcgggacttggaggccaaggaagtgaccccccgcaccgccctgctcacttggactgagcccccagtccggcccgcaggctacctgctcagcttccacacccctggtggacagamccaggtgccccggccccactgacccaactcccctccctgggtgattccaggaggtgctgcctctggccctcccggagggtctccacctccctctcccctgacccccccttgtctgtcccacaggagatcctgctcccaggagggatcacatctcaccagctccttggcctctttccctccacctcctacaatgcacggctccaggccaygtggggccagagcctcctgccgcccgtgtccacctctttcaccacgggtgggctgyggatccccttccccagggactgcggggaggagatgcagaacggagccggtgcctccaggaccagcaccatcttcctcaacggcaaccgsgagyggcccctgaacgtgttttgsgacatggagactgatgggggcggctggctggtgttccagcgccgcatggatggacagacagacttctggagggactgggaggactatgcccatggttttgggaacatctctggagagttctggctgggcaatgaggccctgcacagcctgacacaggcaggtgactactccatscgcgtggacctgcgggctggggacgaggctgtgttcgcccagtacgactccttccacgtagactcggctgcggagtactaccgcctccacttggagggctaccacggcaccgcaggggactccatgagctaccacagcggcagtgtcttctctgcccgtgatcggraccccaacarcttgctcatctcctgcrctgtctcctaccgaggggcctggtggtacaggaactgccactacgccaacctcaacgggctctacrggagcacagtggaccatcagggagtgagctggtaccactggaagggcttcgagttctcggtgcccttcacggaaatgaagctgagctgctgcccacctctctcgcaccccagtatgactgccragcactgaggggtcgccccgagagaagagccagggtccttcaccacccagccgctggaggaagccttctctgccagcgatctcgcagcactgtgtttacaggggggaggggaggggttcgtacrggagcaataaaggagaaactgaggtacccgg

SEQ ID NO: 2913 - DNA, 10617 bp, Homo sapiens
cagacatgcccaggggactgccgtggccgaggagagtgtcacgatggcagctgtgtctgcaaagatgggtatgctggcgaagactgcggagaagaggtgccaaccattgagggcatgaggatgcatctcttggaggagacaacagttcggacagagtggaccccggctcctggccccgtggatgcctatgaaattcagttcatccccacgacagagggggcgagccccccattcacagcacgggttccaagmtctgcctcagcctatgaccagagaggactggcccmtggacaggagtaccaggtcactgtccgagcccttcgagggaccagmtggggccttcctgcctccaagaccatcaccaccatgatcgatgggccccaggacctccgagtggtggctgtgacaccgacaacactggagcttggctggctgcgtccccaggctgaggtggaccgatttgtggtgtcctacgtcagtgccggcaaccagagggtgaggctggaagtgccccctgaagcagacgggacgctgctgactgacctgatgccaggcgtagaatatgtggtgactgtcacagcggagcggggccgggcagtcagctacccagctkctgtcagggccaacacagggtcctcacccttgggcctcttggggactaccgatgagcctcctccctcaggcccctcgacgacgcaaggggcccaggctcctctcctgcagcagcgcccccaggagctgggagagttgagggtgctgggcagagatgagacagggcgcctccgtgtggtctggaccgcccagcctgacacctttgcctacttccaactgcgcatgcgggtgcccgaggggccgggggcacatgaggaagtgctgccaggggacgtccgccaggctctggtgcctccaccccctcctggaaccccgtatgagctgtcacttcatggggtccctcctgggggcaagccctctgaccccatcatctaccaaggcattatggacaaggatgaggagaagcctgggaagtcctcaggcccaccacrcctgggtgagctgacggtgacagacaggacctccgactccttgctcctgcgctggacggtccccgagggcgagtttgactmcttcgtgatccagtacaaagacagggacgggcagccccaggtggtgcccgtggaaggaccccagcgctcggccgtcatcacctccctggatcctggccgcaagtacaratttgtcctgtatgggtttgttggcaagaagaggcatggtccgctggtggctgaagccaagatcttgcctcagagtgacccaagtccagggactccaccccrcctgggaaacctgtgggtgacagaccctaccccagattcactgcacctctcctggactgtccctgagggccagtttgacaccttcatggtccagtacagggacagggatggacggccccaggtggtacctgtggaagggcccgagcgttcatttgttgtctcctcactggaccctgaccacaagtacagattcactctgtttggaattgcgaacaagaagcggtatggccccctcacggccgatggcaccactgctccagagaggaaagaggagcccccccrccctgagttcctggagcagcccctcctgggggaactgacagtgaccggcgtgaccccagactccttgcgtctctcatggacagtggcccagggccccttcgactcattcatggtccagtacaaggatgcacaggggcagccccaggcagtgcctgttgcgggggatgagaatgaggttactgtccccggcctggatcccgaccggaagtataagatgaacctctacgggcttcgtggcaggcagcrtgtggggcccgagtctgtggtggccaagactgctcctcaggaggatgtggacgagacccccagccccacagaactgggcacggaggccccggagtcccccgaggagccgctcctgggggagctgacagtgacaggatcctcccctgattcgctgagcctcttctggaccgtcccccagggcagcttcgactctttcaccgtgcagtacaaggacagggatgggcggccccrggcggtgcgtgttgggggcaaggagagtgaggtcaccgtgggaggcctagagcccgggcacaagtacaagatgcacctgtacggcctccaygaggggcagcgcgtgggcccrgtgtccgccgtgggcgtgacagccccacaacaagaagagacccctccagccactgagtccccgctggagccacgcctaggagagctgacartgacagatgtgacccccaactctgtgggcctctcctggacagtccccgagggccagtttgactccttcatagtccagtacaaggacaaggacgggcagccccaggtggtgccggtggcggcagaccagcgagaggtcacagtctacaacctggagcctgagagaaaatataagatgaacatgtatggactacatgatgggcaacgcatgggccccctgtctgtggtcatcgtgacggccccagccacagaggcctccaagcctcccctggagccacgcctaggggagctgacagtgacggatataacccctgactctgtgggcctctcatggacagtccctgagggtgaattcgactcctttgtggttcagtacaaggacagggacgggcagccccaggtggtgcccgtggctgcagatcagcgggaggtcactatccctgacctggaaccctcccgcaagtacaagttcctgctctttgggatccaggatgggaaacgacgcagcccagtctctgtggaggcaaagacggttgcccgaggtgacgccagcccaggggccccaccccgccttggggagctgtgggtgacagaccccaccccagactcactgcgcctctcctggacggttcctgagggccagttcgactcttttgtggtccagttcaaggacaaagacgggccccaggtggtgcccgtggagggccatgagcgctctgtcactgtcacccctctggatgccggccgcaagtacagattcctcctctatggcctcctgggcaagaagcgccatggccctctcactgccgacggcaccacggaagcccggagtgctatggatgatactggaacaaagcgtcccccaaaaccccgtctgggggaggagctgcaggtgaccaccgtgacccagaactccgtgggcctctcctggacagtccctgagggccagtttgactcctttgtggtccagtacaaagacagggacgggcagccccaggtggtgcccgtggagggcagcctcagggaggtcagcgtgccgggcctggaccctgcccacaggtacaagctgctgctctacgggctgcaccacggcaagcgtgtgggccccatctcggccgtcgccattactgccggcagggaagaaacggaaactgagaccacggccccgacccctccagcgcctgagccccacctcggggagttgacagtggaggaggccacgtcacacaccctgcatctctcctggatggtgactragggagaatttgactccttcgaaatccagtacrcagatagagacgggcaactccaaatggtccgcataggaggtgaccggaatgacatcaccctctctggcctggaatccgaccacagatacctggtgaccctgtatggtttcagtgatgggaagcatgtaggtcctgtccatgtcgaggccctgacagtcccggaggaggagaagccttcagaacctcccacygcaacccccgagccccccatcaagcctcgcctgggggagctgaccgtgacagatgccacccctgactccctcagcctgtcctggacrgttccygagggacagtttgaccacttcctggtccagtacaggaatggagatgggcagcccaaggcagtgagggtgccagggcacgaggaaggggtcaccatctcgggcctggagccagaccataaatacaagatgaacctgtacggcttccacggtggccagcgcatgggccctgtgtctgtcgtcggggtgacagaacccagcatggaggccccggagcccgctgaggagccrctcctgggggagctaacagtgacaggatcctcccctgactcgctgagcctctcctggacygtcccccagggccgcttcgactccttcaccrtgcagtacaaggacagggacgggcggccccaggtggtgcgtgttgggggcgaggagagtgaagtcaccgtggggggcctggagcctgggcgcaagtacaagatgcacctgtacggcctccacgaggggcggcgcgtgggcccagtgtctgctgtgggcgtcacggcccccgaagaggagtcccctgatgctcctcttgcaaagctgcgcctagggcagatgacagtgagagacatcacctccgactccctcagcctctcctggacagtccccgagggccagtttgaccatttcttggtccagtwtaagaatggggaygggcagcccaaggcggtgcgggtgccgggacacgaggatggggtcaccatctcrggcctggagccagaccacaagtacaagatgaacctgtacggcttccacggtggccagcgcgtgggccccgtgtctgctgttggtttaactgcctcgacagaacctcccacccctgaaccccmcatcaagcctcgcctggaggagctgaccgtgacagatgcgacccctgactccctcagcctgtcctggacggttcccgagggacagtttgaccacttcctggtccagtacaagaatggggatgggcagcccaaggcaacacgggtgccaggacatgaggacagggtcaccatctccggcctggagccagacaacaagtacaagatgaacctgtacggcttccacggtggccagcgtgtgggccccgtgtctgccatcggggtgacagaggaagagacccccagccccacagaacccagcatggaggccccggagccccctgaggagcygctcctgggggagctracagtgacaggatcctcccctgactcgctgagcctctcctggaccgtcccccagggccgcttcgactccttcaccgtgcagtacaaggacagggacgggcggccccaggtggtgcgtgttgggggygaggagagcgaggtcaccgtggggggcctggagcctgggcgcaaatacaagatgcacctgtayggcctccacgaggggcggcgygtgggcccggtgtccaccgtgrgcgtgactgccccacaagaggatgtggacragacccccagccctacagaaccaggcacagaggccccagrgccccccgaggagcctctcctgggggagctgacagtgacaggatcctcccctgactcgctgagcctttcctggaccgtcccccagggccgctttgactccttcaccgtgcagtacaaggacagggaygggcggccccaggcggtgcgtgttgggggccaggagagcaaggtcactgtgaggggcctggagcctgggcgcaagtacaagatgcacctgtacggcctccacgaggggcrgcgcctrggcccggtgtctgccgtgggcgtcacagaggatgaagccgagaccacccaagcagtgcctaccatgacccctgagccccccatcaagcctcgcctgggggagctgaccatgacagatgccacccctgactccctcagcctgtcctggacggttcccgagggccagtttgaccacttcctggtccagtacaggaatggggatgggcagcccaaggcggtgcgggtgccggggcacgaggacggggtcaccatctcaggcctggagccagaccataaatacaagatgaacctgtacggcttccacggtggccagcrcgtgggccccatctctgtcattggggtgacggaggaagagacccccagccccacggaactcagcactgaggcccsggagccccctgaggagccgctcctgggggagctgacagtgacaggatcctcccctgactcgctgagcctctcctggaccatcccccagggccacttcgactccttcaccgtgcagtacaaggacagggacgggcggccccaggtgatgcgtgtcaggggcgaggagagcgaggtcaccgtggggggcctggagcccgggcgcaaatacaagatgcacctgtacggcctccacgaggggcggcgtgtgggcccggtgtccaccgtgggtgtgacagtgcccaccacaacccctgagccccccaacaagcctmgcctcrgggagctgaccgtgacagatgccacccctgactccctcagcctgtcctggatggtcccygagggccagtttgaccacttcctggtccagtacaggaatggggatgggcagcccaaggtggtgcggkkgccggggcacgaggacggggtcaccatctcaggcctggagccagaccacaagtacaagatgaacctgtacggcttccacrgtggccagcgcgtgggccccatctctgtcattggggtgacagaggaagaaactcccgcccccacagaacccagcacggaggccccggagccccctgaggagccgctcctgggggagctgacagtgacaggatcctcccctgactcgctgagcctctcctggaccatcccccagggccgcttcgactccttcactgtgcagtacaaggacagggacgggcggccccaggtggtgcgtgtcaggggcgaggagagcgaggtcaccgtggggggcctggagcccgggygcaaatacargatgcacctgtacggcctccaygaggggcagcgcgtgggcccagtgtccgctgtgggtgtgacagctccaaaggatgaagccgagaccacccaagcagtgcctaccatgacccctgagccccccatcaagcctcgcctgggggagctgaccgtgacagatgccacccccgactccctcagcctgtcctggatggttcccgagggccagtttgaccacttcctggtccagtacaggaatggggatgggcagcccaaggcggtgcgggkgccggggcacgaggacggggtcaccatctcaggcctggagccagaccayaartacaagatgaacctgtacggcttccacggtggccagcgcgtaggccctgtgtctgccattggggtgwcggaggaagagacccccagccccacagaacccagcactgaggccccggaggcccctgaggagccgctcctgggggagttgacagtgacaggatcctcccctgactcgctgagcctctcctggaccrtcccccaggkccgcttcgactccttcaccgtgcagtacaaggacagggaygggcagccccaggtggtgsgtgtcagggkcraggagagcgaggtcaccgtrgggggcctrgagcccgggcgcaaatacaagatgcayctgtacggcctccacgaggggcagcgcgtgggcccagtgtccaccgtgggcatcacggcgcccctgcccacaccactgccggtggagccccgcctgggggagctggcggtggmggccgtgacctcggactcagtgggcctctcatggacggtggcccagggcccctttgactccttcctggtacagtacagggacgcgcaggggcagccccaggcagtgcctgtgagcggagacctccgagcggtmgccgtctcggggctggwmccggcccgcaagtacaagttcctgctctttggactccagaatgggaaacgccacrgcccagtccctgtggaggccaggaccgccccagacaccaaaccgtctccccgcctgggggagctgactgtgacagatgcgacccctgactccgtgggcctctcgtggacggtccctgagggcgaattcgactccttcgtggtccagtacaaggataaggatggtcggctccaggtggtgccggtggcagccaaccagcgggaggtcacagtccaggscctggagcccagtaggaaatacaggttcctgctctatggtctgtcaggcaggaaacgactgggccccatctctgctgacagcaccacagctcccctggagaaggagctacctccccacctgggggaactgaccgtggctgaggagacctccagctctctgcgcctgtcctggacggtagcccagggcccctttgactccttcgtggtccagtacagggacacggacgggcagcccagggcagtgcctgtggccgcagaccagcgcacagtcaccgtagaggacctggagcctggcaagaaatacaagtttctgctctacgggctccttgggggaaagcgcctgggcccggtctctgccctgggaatgacagccccagaagaggacacaccagccccagagttagccccagaggcccctgagcctcctgaagagccccgcctaggagtgctgaccgtgaccgacacaaccccagactccatgcgcctctcgtggagcgtggcccagggcccctttgattccttcgtggtccagtatgaggacacgaacgggcagccccaggccttgctcgtggacggcgaccagagcaagatcctcatctcaggcctggagcccagcaccccctacaggttcctcctctatggcctccatgaagggaagcgcctggggcccctctcagctgagggcaccacagggctggctcctgctggtcagacctcagaggagkcaaggccccgcctgtcccagctgtctgtgactgacgtgaccaccagttcactgaggctcaactgggaggccccaccgggggccttcgactccttcctgctccgctttggggttccatcaccaagcacwctggagccgcatccgcgtccactgctgcagcgcgagctgatggtgccggggacrcggcactcggccgtgctccgggacctgcgttccgggactctgtacagcctgacactgtatgggctgcgaggaccccacaaggccgacagcatccagggaaccgcccgcaccctcagcccagttctggagagcccccgtgacctccaattcagtgaaatcagggagacctcagccaaggtcaactggatgcccccaccatcccgggcggacagcttcaaagtctcctaccagctggcggacggaggggagcctcagagtgtgcaggtggayggccrggcccggacccagaaactccaggggctgatcccaggcgctcgctatgaggtgaccgtggtctcggtccgaggctttgaggagagtgagcctctcacaggcttcctcaccacggttcctgacggtcccacacagttgcgtgcactgaacttgaccgagggattcgccgtgctgcactggaagcccccccagaatcctgtrgacacctatgacrtccaggtcacagcccctggggccccgcctctgcaggcggagaccccaggcagcgcggtggactaccccctgcatgaccttgtcctccacaccaactacaccgccacagtgcgtggcctgcggggccccaacctcacttccccagccagcatcaccttcaccacagggctagaggcccctcgggacttggaggccaaggaagtgaccccccgcaccgccctgctcacttggactgagcccccagtccggcccgcaggctacctgctcagcttccacacccctggtggacagamccaggagatcctgctcccaggagggatcacatctcaccagctccttggcctctttccctccacctcctacaatgcacggctccaggccaygtggggccagagcctcctgccgcccgtgtccacctctttcaccacgggtgggctgyggatccccttccccagggactgcggggaggagatgcagaacggagccggtgcctccaggaccagcaccatcttcctcaacggcaaccgsgagyggcccctgaacgtgttttgsgacatggagactgatgggggcggctggctggtgttccagcgccgcatggatggacagacagacttctggagggactgggaggactatgcccatggttttgggaacatctctggagagttctggctgggcaatgaggccctgcacagcctgacacaggcaggtgactactccatscgcgtggacctgcgggctggggacgaggctgtgttcgcccagtacgactccttccacgtagactcggctgcggagtactaccgcctccacttggagggctaccacggcaccgcaggggactccatgagctaccacagcggcagtgtcttctctgcccgtgatcggraccccaacarcttgctcatctcctgcrctgtctcctaccgaggggcctggtggtacaggaactgccactacgccaacctcaacgggctctacrggagcacagtggaccatcagggagtgagctggtaccactggaagggcttcgagttctcggtgcccttcacggaaatgaagctgagctgctgcccacctctctcgcaccccagtatgactgccragcactgaggggtcgccccgagagaagagccagggtccttcaccacccagccgctggaggaagccttctctgccagcgatctcgcagcactgtgtttacaggggggaggggaggggttcgtacrggagcaataaaggagaaactgaggtacccgg

SEQ ID NO: 2914 - DNA, 13394 bp, Homo sapiens
ggtcctccccttctcctcccctgctcgctgcagactccctcctcactgtcgctgccgagatccacagtcggttgtggctcagcccctgttgcaggggacaagtgagggagacttccctgtcctgccctgagacgccgccctcccggggttggggacagagcaggtgcagaggcactgcagctgctcggttgcccagcctcctgaatgatgccagcccagtatgctctaacctccagcctggttctcctggtgctgctgagcacagccagagcaggccccttctcttcacggtccaatgtgacactgccagccccccggccccctccccagccagggggccacacagtgggggctggagtgggaagcccctcttctcagctttacgagcacacagtggaaggaggggagaagcaggtggtattcacccaccgcattaacctgcccccttccactggctgtggctgtcccccaggcaccgagcccccagtccttgcttcagaggtacaggccctgagggtccgtctagagatcctggaggagttggtgaaggggctcaaggaacagtgcactgggggatgttgtcctgcctctgcccaagctggcacaggtcagacagatgtgcggaccctctgcagtctccatggtgtgtttgatctgagccgctgcacctgttcctgtgagccaggctggggtgggcccacctgctcagaccccacagatrctgagatccctccctcttccccaccctcagcctcggggtcctgcccagatgactgcaatgatcagggtcgctgtgtccgtggtcgttgcrtgtgctttcccggctacactggccccagctgtggctggccatcctgtcccggggactgccaaggccgtgggcgctgcgtgcagggcgtgtgtgtgtgccgggcaggcttctcaggccccgactgcagccagcgctcctgccctcgaggttgcagccagaggggacgctgtgagggtgggcgctgcgtgtgtgacccaggctacactggtgacgactgtggcatgaggagctgccctcgcggttgcagtcagagggggcgctgtgagaatgggcgctgcgtgtgtaaccccggctacrctggcgaggactgtggggtgaggagctgccctcggggctgcagccagcggggacgctgcaaggacgggcgctgcgtgtgtgaccccggctacactggcgaggactgtggtacgcggagctgcccctgggactgtggcgagggcgggcgctgcgtggacggccgctgcgtgtgctggcccgggtacacaggcgaggactgcagcacgcggacatgtccgagggactgccggggccgcgggcgctgcgaggacggcgaatgcatttgcgacacgggctacagcggggacgactgcggcgtgcgcagctgccctggcgactgcaaccaaaggggccgctgcgaggacggccgctgcgtgtgctggccggggtacactggaaccgattgcggctcgcgcgcctgcccacgcgactgtagaggtcgcgggcgctgcgagaacggcgtgtgtgtttgcaatgcgggctacagcggcgaggactgcggtgtgcgcagctgtcctggggactgtcgtggccggggccgctgtgagagtggccgctgcatgtgttggccggggtacacaggccgggactgcggcacgcgcgcctgtcctggcgactgtcgcgggcgcgggcgctgcgtggatggccrctgcgtgtgcaacccgggcttcaccggtgaggactgtgggagccgtcgctgtcccggggactgccgtgggcacggcctttgcgaggatggcgtgtgcgtgtgtgacgcaggctactcaggggaagactgcagcacgcgcagctgccccgggggctgccgaggccgcggccagtgcctagatgggcggtgtgtgtgcgaggayggctactctggcgaggattgcggtgtgaggcagtgcccgaatgactgcagccagcacggcgtgtgccaggacggtgtgtgcatctgttgggaaggctacgtgrgtgaggactgcagcatccgcacctgcccctccaactgccacgggaggggccgctgtgaggaagggcgctgcctgtgcgacccaggctacaccggccctacctgtgccacccrcatgtgcccggctgactgccggggacgtgggcggtgtgtgcaaggagtgtgcctgtgccacgtgggctatggcggtgaggactgcgggcaggaagagcctccagccagcgcctgccctggaggctgcgggccccgggaactgtgccgggcaggccagtgtgtgtgtgtagagggcttccgaggccctgactgtgccatccagacatgcccaggggactgccgtggccgaggagagtgtcacgatggcagctgtgtctgcaaagatgggtatgctggcgaagactgcggagaagcacgggttccaagmtctgcctcagcctatgaccagagaggactggcccmtggacaggagtaccaggtcactgtccgagcccttcgagggaccagmtggggccttcctgcctccaagaccatcaccaccatgatcgatgggccccaggacctccgagtggtggctgtgacaccgacaacactggagcttggctggctgcgtccccaggctgaggtggaccgatttgtggtgtcctacgtcagtgccggcaaccagagggtgaggctggaagtgccccctgaagcagacgggacgctgctgactgacctgatgccaggcgtagaatatgtggtgactgtcacagcggagcggggccgggcagtcagctacccagctkctgtcagggccaacacagaggaaagggaggaggagtccccgcccaggccaagcctgtcccagcccccacggcggccttggggcaacctgacggccgagctgagccgtttccgcggcacggtgcaggacctggagcgccacctgcgggctcacggctacccactgcgggccaaccagacttacacgtcggtggcgcgccacatccatgaatacttgcagcggcaggtgctgggcagttccgccgatggcgcgcttctcgtgtctctcgacgggctccgcggccagttcgagcgcgtggtgctgcgctggcggcctcagccgcctgcagagggccccggcggtgagctgactgtgccgggcaccacgcgcaccgtcagcctgcccgacctcaggcccggcaccacctaccacgtggaggtccacggggtgcgggcggggcagacctccaagtcctacgccttcatcaccaccacaggcccctcgacgacgcaaggggcccaggctcctctcctgcagcagcgcccccaggagctgggagagttgagggtgctgggcagagatgagacagggcgcctccgtgtggtctggaccgcccagcctgacacctttgcctacttccaactgcgcatgcgggtgcccgaggggccgggggcacatgaggaagtgctgccaggggacgtccgccaggctctggtgcctccaccccctcctggaaccccgtatgagctgtcacttcatggggtccctcctgggggcaagccctctgaccccatcatctaccaaggcattatggacaaggatgaggagaagcctgggaagtcctcaggcccaccacrcctgggtgagctgacggtgacagacaggacctccgactccttgctcctgcgctggacggtccccgagggcgagtttgactmcttcgtgatccagtacaaagacagggacgggcagccccaggtggtgcccgtggaaggaccccagcgctcggccgtcatcacctccctggatcctggccgcaagtacaratttgtcctgtatgggtttgttggcaagaagaggcatggtccgctggtggctgaagccaagatcttgcctcagagtgacccaagtccagggactccaccccrcctgggaaacctgtgggtgacagaccctaccccagattcactgcacctctcctggactgtccctgagggccagtttgacaccttcatggtccagtacagggacagggatggacggccccaggtggtacctgtggaagggcccgagcgttcatttgttgtctcctcactggaccctgaccacaagtacagattcactctgtttggaattgcgaacaagaagcggtatggccccctcacggccgatggcaccactgctccagagaggaaagaggagcccccccrccctgagttcctggagcagcccctcctgggggaactgacagtgaccggcgtgaccccagactccttgcgtctctcatggacagtggcccagggccccttcgactcattcatggtccagtacaaggatgcacaggggcagccccaggcagtgcctgttgcgggggatgagaatgaggttactgtccccggcctggatcccgaccggaagtataagatgaacctctacgggcttcgtggcaggcagcrtgtggggcccgagtctgtggtggccaagactgctcctcaggaggatgtggacgagacccccagccccacagaactgggcacggaggccccggagtcccccgaggagccgctcctgggggagctgacagtgacaggatcctcccctgattcgctgagcctcttctggaccgtcccccagggcagcttcgactctttcaccgtgcagtacaaggacagggatgggcggccccrggcggtgcgtgttgggggcaaggagagtgaggtcaccgtgggaggcctagagcccgggcacaagtacaagatgcacctgtacggcctccaygaggggcagcgcgtgggcccrgtgtccgccgtgggcgtgacagccccacaacaagaagagacccctccagccactgagtccccgctggagccacgcctaggagagctgacartgacagatgtgacccccaactctgtgggcctctcctggacagtccccgagggccagtttgactccttcatagtccagtacaaggacaaggacgggcagccccaggtggtgccggtggcggcagaccagcgagaggtcacagtctacaacctggagcctgagagaaaatataagatgaacatgtatggactacatgatgggcaacgcatgggccccctgtctgtggtcatcgtgacggctcccctcccaccagccccagccacagaggcctccaagcctcccctggagccacgcctaggggagctgacagtgacggatataacccctgactctgtgggcctctcatggacagtccctgagggtgaattcgactcctttgtggttcagtacaaggacagggacgggcagccccaggtggtgcccgtggctgcagatcagcgggaggtcactatccctgacctggaaccctcccgcaagtacaagttcctgctctttgggatccaggatgggaaacgacgcagcccagtctctgtggaggcaaagacggttgcccgaggtgacgccagcccaggggccccaccccgccttggggagctgtgggtgacagaccccaccccagactcactgcgcctctcctggacggttcctgagggccagttcgactcttttgtggtccagttcaaggacaaagacgggccccaggtggtgcccgtggagggccatgagcgctctgtcactgtcacccctctggatgccggccgcaagtacagattcctcctctatggcctcctgggcaagaagcgccatggccctctcactgccgacggcaccacggaagcccggagtgctatggatgatactggaacaaagcgtcccccaaaaccccgtctgggggaggagctgcaggtgaccaccgtgacccagaactccgtgggcctctcctggacagtccctgagggccagtttgactcctttgtggtccagtacaaagacagggacgggcagccccaggtggtgcccgtggagggcagcctcagggaggtcagcgtgccgggcctggaccctgcccacaggtacaagctgctgctctacgggctgcaccacggcaagcgtgtgggccccatctcggccgtcgccattactgccggcagggaagaaacggaaactgagaccacggccccgacccctccagcgcctgagccccacctcggggagttgacagtggaggaggccacgtcacacaccctgcatctctcctggatggtgactragggagaatttgactccttcgaaatccagtacrcagatagagacgggcaactccaaatggtccgcataggaggtgaccggaatgacatcaccctctctggcctggaatccgaccacagatacctggtgaccctgtatggtttcagtgatgggaagcatgtaggtcctgtccatgtcgaggccctgacagtcccggaggaggagaagccttcagaacctcccacygcaacccccgagccccccatcaagcctcgcctgggggagctgaccgtgacagatgccacccctgactccctcagcctgtcctggacrgttccygagggacagtttgaccacttcctggtccagtacaggaatggagatgggcagcccaaggcagtgagggtgccagggcacgaggaaggggtcaccatctcgggcctggagccagaccataaatacaagatgaacctgtacggcttccacggtggccagcgcatgggccctgtgtctgtcgtcggggtgacagctgcagaggaagagacccccagccccacagaacccagcatggaggccccggagcccgctgaggagccrctcctgggggagctaacagtgacaggatcctcccctgactcgctgagcctctcctggacygtcccccagggccgcttcgactccttcaccrtgcagtacaaggacagggacgggcggccccaggtggtgcgtgttgggggcgaggagagtgaagtcaccgtggggggcctggagcctgggcgcaagtacaagatgcacctgtacggcctccacgaggggcggcgcgtgggcccagtgtctgctgtgggcgtcacggcccccgaagaggagtcccctgatgctcctcttgcaaagctgcgcctagggcagatgacagtgagagacatcacctccgactccctcagcctctcctggacagtccccgagggccagtttgaccatttcttggtccagtwtaagaatggggaygggcagcccaaggcggtgcgggtgccgggacacgaggatggggtcaccatctcrggcctggagccagaccacaagtacaagatgaacctgtacggcttccacggtggccagcgcgtgggccccgtgtctgctgttggtttaactgcctcgacagaacctcccacccctgaaccccmcatcaagcctcgcctggaggagctgaccgtgacagatgcgacccctgactccctcagcctgtcctggacggttcccgagggacagtttgaccacttcctggtccagtacaagaatggggatgggcagcccaaggcaacacgggtgccaggacatgaggacagggtcaccatctccggcctggagccagacaacaagtacaagatgaacctgtacggcttccacggtggccagcgtgtgggccccgtgtctgccatcggggtgacagaggaagagacccccagccccacagaacccagcatggaggccccggagccccctgaggagcygctcctgggggagctracagtgacaggatcctcccctgactcgctgagcctctcctggaccgtcccccagggccgcttcgactccttcaccgtgcagtacaaggacagggacgggcggccccaggtggtgcgtgttgggggygaggagagcgaggtcaccgtggggggcctggagcctgggcgcaaatacaagatgcacctgtayggcctccacgaggggcggcgygtgggcccggtgtccaccgtgrgcgtgactgccccacaagaggatgtggacragacccccagccctacagaaccaggcacagaggccccagrgccccccgaggagcctctcctgggggagctgacagtgacaggatcctcccctgactcgctgagcctttcctggaccgtcccccagggccgctttgactccttcaccgtgcagtacaaggacagggaygggcggccccaggcggtgcgtgttgggggccaggagagcaaggtcactgtgaggggcctggagcctgggcgcaagtacaagatgcacctgtacggcctccacgaggggcrgcgcctrggcccggtgtctgccgtgggcgtcacagaggatgaagccgagaccacccaagcagtgcctaccatgacccctgagccccccatcaagcctcgcctgggggagctgaccatgacagatgccacccctgactccctcagcctgtcctggacggttcccgagggccagtttgaccacttcctggtccagtacaggaatggggatgggcagcccaaggcggtgcgggtgccggggcacgaggacggggtcaccatctcaggcctggagccagaccataaatacaagatgaacctgtacggcttccacggtggccagcrcgtgggccccatctctgtcattggggtgacggaggaagagacccccagccccacggaactcagcactgaggcccsggagccccctgaggagccgctcctgggggagctgacagtgacaggatcctcccctgactcgctgagcctctcctggaccatcccccagggccacttcgactccttcaccgtgcagtacaaggacagggacgggcggccccaggtgatgcgtgtcaggggcgaggagagcgaggtcaccgtggggggcctggagcccgggcgcaaatacaagatgcacctgtacggcctccacgaggggcggcgtgtgggcccggtgtccaccgtgggtgtgacagtgcccaccacaacccctgagccccccaacaagcctmgcctcrgggagctgaccgtgacagatgccacccctgactccctcagcctgtcctggatggtcccygagggccagtttgaccacttcctggtccagtacaggaatggggatgggcagcccaaggtggtgcggkkgccggggcacgaggacggggtcaccatctcaggcctggagccagaccacaagtacaagatgaacctgtacggcttccacrgtggccagcgcgtgggccccatctctgtcattggggtgacagaggaagaaactcccgcccccacagaacccagcacggaggccccggagccccctgaggagccgctcctgggggagctgacagtgacaggatcctcccctgactcgctgagcctctcctggaccatcccccagggccgcttcgactccttcactgtgcagtacaaggacagggacgggcggccccaggtggtgcgtgtcaggggcgaggagagcgaggtcaccgtggggggcctggagcccgggygcaaatacargatgcacctgtacggcctccaygaggggcagcgcgtgggcccagtgtccgctgtgggtgtgacagctccaaaggatgaagccgagaccacccaagcagtgcctaccatgacccctgagccccccatcaagcctcgcctgggggagctgaccgtgacagatgccacccccgactccctcagcctgtcctggatggttcccgagggccagtttgaccacttcctggtccagtacaggaatggggatgggcagcccaaggcggtgcgggkgccggggcacgaggacggggtcaccatctcaggcctggagccagaccayaartacaagatgaacctgtacggcttccacggtggccagcgcgtaggccctgtgtctgccattggggtgwcggaggaagagacccccagccccacagaacccagcactgaggccccggaggcccctgaggagccgctcctgggggagttgacagtgacaggatcctcccctgactcgctgagcctctcctggaccrtcccccaggkccgcttcgactccttcaccgtgcagtacaaggacagggaygggcagccccaggtggtgsgtgtcagggkcraggagagcgaggtcaccgtrgggggcctrgagcccgggcgcaaatacaagatgcayctgtacggcctccacgaggggcagcgcgtgggcccagtgtccaccgtgggcatcacggcgcccctgcccacaccactgccggtggagccccgcctgggggagctggcggtggmggccgtgacctcggactcagtgggcctctcatggacggtggcccagggcccctttgactccttcctggtacagtacagggacgcgcaggggcagccccaggcagtgcctgtgagcggagacctccgagcggtmgccgtctcggggctggwmccggcccgcaagtacaagttcctgctctttggactccagaatgggaaacgccacrgcccagtccctgtggaggccaggaccgccccagacaccaaaccgtctccccgcctgggggagctgactgtgacagatgcgacccctgactccgtgggcctctcgtggacggtccctgagggcgaattcgactccttcgtggtccagtacaaggataaggatggtcggctccaggtggtgccggtggcagccaaccagcgggaggtcacagtccaggscctggagcccagtaggaaatacaggttcctgctctatggtctgtcaggcaggaaacgactgggccccatctctgctgacagcaccacagctcccctggagaaggagctacctccccacctgggggaactgaccgtggctgaggagacctccagctctctgcgcctgtcctggacggtagcccagggcccctttgactccttcgtggtccagtacagggacacggacgggcagcccagggcagtgcctgtggccgcagaccagcgcacagtcaccgtagaggacctggagcctggcaagaaatacaagtttctgctctacgggctccttgggggaaagcgcctgggcccggtctctgccctgggaatgacagccccagaagaggacacaccagccccagagttagccccagaggcccctgagcctcctgaagagccccgcctaggagtgctgaccgtgaccgacacaaccccagactccatgcgcctctcgtggagcgtggcccagggcccctttgattccttcgtggtccagtatgaggacacgaacgggcagccccaggccttgctcgtggacggcgaccagagcaagatcctcatctcaggcctggagcccagcaccccctacaggttcctcctctatggcctccatgaagggaagcgcctggggcccctctcagctgagggcaccacagggctggctcctgctggtcagacctcagaggagkcaaggccccgcctgtcccagctgtctgtgactgacgtgaccaccagttcactgaggctcaactgggaggccccaccgggggccttcgactccttcctgctccgctttggggttccatcaccaagcacwctggagccgcatccgcgtccactgctgcagcgcgagctgatggtgccggggacrcggcactcggccgtgctccgggacctgcgttccgggactctgtacagcctgacactgtatgggctgcgaggaccccacaaggccgacagcatccagggaaccgcccgcaccctcagcccagttctggagagcccccgtgacctccaattcagtgaaatcagggagacctcagccaaggtcaactggatgcccccaccatcccgggcggacagcttcaaagtctcctaccagctggcggacggaggggagcctcagagtgtgcaggtggayggccrggcccggacccagaaactccaggggctgatcccaggcgctcgctatgaggtgaccgtggtctcggtccgaggctttgaggagagtgagcctctcacaggcttcctcaccacggttcctgacggtcccacacagttgcgtgcactgaacttgaccgagggattcgccgtgctgcactggaagcccccccagaatcctgtrgacacctatgacrtccaggtcacagcccctggggccccgcctctgcaggcggagaccccaggcagcgcggtggactaccccctgcatgaccttgtcctccacaccaactacaccgccacagtgcgtggcctgcggggccccaacctcacttccccagccagcatcaccttcaccacagggctagaggcccctcgggacttggaggccaaggaagtgaccccccgcaccgccctgctcacttggactgagcccccagtccggcccgcaggctacctgctcagcttccacacccctggtggacagamccaggtgccccggccccactgacccaactcccctccctgggtgattccaggaggtgctgcctctggccctcccggagggtctccacctccctctcccctgacccccccttgtctgtcccacaggagatcctgctcccaggagggatcacatctcaccagctccttggcctctttccctccacctcctacaatgcacggctccaggccaygtggggccagagcctcctgccgcccgtgtccacctctttcaccacgggtgggctgyggatccccttccccagggactgcggggaggagatgcagaacggagccggtgcctccaggaccagcaccatcttcctcaacggcaaccgsgagyggcccctgaacgtgttttgsgacatggagactgatgggggcggctggctggtgttccagcgccgcatggatggacagacagacttctggagggactgggaggactatgcccatggttttgggaacatctctggagagttctggctgggcaatgaggccctgcacagcctgacacaggcaggtgactactccatscgcgtggacctgcgggctggggacgaggctgtgttcgcccagtacgactccttccacgtagactcggctgcggagtactaccgcctccacttggagggctaccacggcaccgcaggggactccatgagctaccacagcggcagtgtcttctctgcccgtgatcggraccccaacarcttgctcatctcctgcrctgtctcctaccgaggggcctggtggtacaggaactgccactacgccaacctcaacgggctctacrggagcacagtggaccatcagggagtgagctggtaccactggaagggcttcgagttctcggtgcccttcacggaaatgaagctgagctgctgcccacctctctcgcaccccagtatgactgccragcactgaggggtcgccccgagagaagagccagggtccttcaccacccagccgctggaggaagccttctctgccagcgatctcgcagcactgtgtttacaggggggaggggaggggttcgtacrggagcaataaaggagaaactgaggtacccgg

SEQ ID NO: 2915 - DNA, 3086 bp, Homo sapiens
ccttgtgcatttgggctgaagacaaagatgactgcaggagtgggcaggccggagtggggcgccctggcctgtscccaggaaggaggaggagtctgcagccctgtgggcttcaacatccatcaaggagtccagagcaggagccaggccaggcgggagggaaaggccctgggaggggctctctaatctcccagccccgactctgccccgtcactgccrctgctcctcattactcgctggggctgctgtcgcctccccgaagggtggccttgtccagatagyggcaaacctccctgccgtggatgagtcaggagcattttcttaagaggaacatcactggaaaacaaaatgagcggggacacagaaaccaacagcagtggctgcatttgtggtacaggctcctcttccrgagctcgctgatgcccacctcagacaggcctgaccacggcacggctggtgggatttgccagtcacctcaaccagccagttccaccctcagcttctctcagaagggagcaccacactcctcaagctcagtgaatgtatcccggcatgggtggggccagagcctgtgatatctcgaggtgggctcggcaggacaccggggtgtggaagggggaagcgagcacctgactcagacagcgcgggagctcgcaggagtcacgaggccacagcgacttcattgtctgactgggcctggacctataaacttcccacctcagccttgggccaagcmtggaagataaaaatggagcaccccatggcgcccctcactcagattctcccctgggcttctcccacgcagccccagaagaggacacaccagccccagagttagccccagaggcccctgagcctcctgaagagccccgcctaggagtgctgaccgtgaccgacacaaccccagactccatgcgcctctcgtggagcgtggcccagggcccctttgattccttcgtggtccagtatgaggacacgaacgggcagccccaggccttgctcgtggacggcgaccagagcaagatcctcatctcaggcctggagcccagcaccccctacaggttcctcctctatggcctccatgaagggaagcgcctggggcccctctcagctgagggcaccacagggctggctcctgctggtcagacctcagaggagkcaaggccccgcctgtcccagctgtctgtgactgacgtgaccaccagttcactgaggctcaactgggaggccccaccgggggccttcgactccttcctgctccgctttggggttccatcaccaagcacwctggagccgcatccgcgtccactgctgcagcgcgagctgatggtgccggggacrcggcactcggccgtgctccgggacctgcgttccgggactctgtacagcctgacactgtatgggctgcgaggaccccacaaggccgacagcatccagggaaccgcccgcaccctcagcccagttctggagagcccccgtgacctccaattcagtgaaatcagggagacctcagccaaggtcaactggatgcccccaccatcccgggcggacagcttcaaagtctcctaccagctggcggacggaggggagcctcagagtgtgcaggtggayggccrggcccggacccagaaactccaggtgggagycaagaaaayggcatgggtgggagttgagagagaacgaggaggttcctgacggtcccacacagttgcgtgcactgaacttgaccgagggattcgccgtgctgcactggaagcccccccagaatcctgtrgacacctatgacrtccaggtcacagcccctggggccccgcctctgcaggcggagaccccaggcagcgcggtggactaccccctgcatgaccttgtcctccacaccaactacaccgccacagtgcgtggcctgcggggccccaacctcacttccccagccagcatcaccttcaccacagggctagaggcccctcgggacttggaggccaaggaagtgaccccccgcaccgccctgctcacttggactgagcccccagtccggcccgcaggctacctgctcagcttccacacccctggtggacagamccaggagatcctgctcccaggagggatcacatctcaccagctccttggcctctttccctccacctcctacaatgcacggctccaggccaygtggggccagagcctcctgccgcccgtgtccacctctttcaccacgggtgggctgyggatccccttccccagggactgcggggaggagatgcagaacggagccggtgcctccaggaccagcaccatcttcctcaacggcaaccgsgagyggcccctgaacgtgttttgsgacatggagactgatgggggcggctggctggtgttccagcgccgcatggatggacagacagacttctggagggactgggaggactatgcccatggttttgggaacatctctggagagttctggctgggcaatgaggccctgcacagcctgacacaggcaggtgactactccatscgcgtggacctgcgggctggggacgaggctgtgttcgcccagtacgactccttccacgtagactcggctgcggagtactaccgcctccacttggagggctaccacggcaccgcaggggactccatgagctaccacagcggcagtgtcttctctgcccgtgatcggraccccaacarcttgctcatctcctgcrctgtctcctaccgaggggcctggtggtacaggaactgccactacgccaacctcaacgggctctacrggagcacagtggaccatcagggagtgagctggtaccactggaagggcttcgagttctcggtgcccttcacggaaatgaagctgagaccaagaaactttcgctccccagcggggggaggctgagctgctgcccacctctctcgcaccccagtatgactgccragcactgaggggtcgccccgagagaagagccagggtccttcaccacccagccgctggaggaagccttctctgccagcgatctcgcagcactgtgtttacaggggggaggggaggggttcgtacrggagcaataaaggagaaactgaggtacccggct

SEQ ID NO: 2916 - DNA, 13270 bp, Homo sapiens
ggtcctccccttctcctcccctgctcgctgcagactccctcctcactgtcgctgccgagatccacagtcggttgtggctcagcccctgttgcaggggacaagtgagggagacttccctgtcctgccctgagacgccgccctcccggggttggggacagagcaggtgcagaggcactgcagctgctcggttgcccagcctcctgaatgatgccagcccagtatgctctaacctccagcctggttctcctggtgctgctgagcacagccagagcaggccccttctcttcacggtccaatgtgacactgccagccccccggccccctccccagccagggggccacacagtgggggctggagtgggaagcccctcttctcagctttacgagcacacagtggaaggaggggagaagcaggtggtattcacccaccgcattaacctgcccccttccactggctgtggctgtcccccaggcaccgagcccccagtccttgcttcagaggtacaggccctgagggtccgtctagagatcctggaggagttggtgaaggggctcaaggaacagtgcactgggggatgttgtcctgcctctgcccaagctggcacaggtcagacagatgtgcggaccctctgcagtctccatggtgtgtttgatctgagccgctgcacctgttcctgtgagccaggctggggtgggcccacctgctcagaccccacagatrctgagatccctccctcttccccaccctcagcctcggggtcctgcccagatgactgcaatgatcagggtcgctgtgtccgtggtcgttgcrtgtgctttcccggctacactggccccagctgtggctggccatcctgtcccggggactgccaaggccgtgggcgctgcgtgcagggcgtgtgtgtgtgccgggcaggcttctcaggccccgactgcagccagcgctcctgccctcgaggttgcagccagaggggacgctgtgagggtgggcgctgcgtgtgtgacccaggctacactggtgacgactgtggcatgaggagctgccctcgcggttgcagtcagagggggcgctgtgagaatgggcgctgcgtgtgtaaccccggctacrctggcgaggactgtggggtgaggagctgccctcggggctgcagccagcggggacgctgcaaggacgggcgctgcgtgtgtgaccccggctacactggcgaggactgtggtacgcggagctgcccctgggactgtggcgagggcgggcgctgcgtggacggccgctgcgtgtgctggcccgggtacacaggcgaggactgcagcacgcggacatgtccgagggactgccggggccgcgggcgctgcgaggacggcgaatgcatttgcgacacgggctacagcggggacgactgcggcgtgcgcagctgccctggcgactgcaaccaaaggggccgctgcgaggacggccgctgcgtgtgctggccggggtacactggaaccgattgcggctcgcgcgcctgcccacgcgactgtagaggtcgcgggcgctgcgagaacggcgtgtgtgtttgcaatgcgggctacagcggcgaggactgcggtgtgcgcagctgtcctggggactgtcgtggccggggccgctgtgagagtggccgctgcatgtgttggccggggtacacaggccgggactgcggcacgcgcgcctgtcctggcgactgtcgcgggcgcgggcgctgcgtggatggccrctgcgtgtgcaacccgggcttcaccggtgaggactgtgggagccgtcgctgtcccggggactgccgtgggcacggcctttgcgaggatggcgtgtgcgtgtgtgacgcaggctactcaggggaagactgcagcacgcgcagctgccccgggggctgccgaggccgcggccagtgcctagatgggcggtgtgtgtgcgaggayggctactctggcgaggattgcggtgtgaggcagtgcccgaatgactgcagccagcacggcgtgtgccaggacggtgtgtgcatctgttgggaaggctacgtgrgtgaggactgcagcatccgcacctgcccctccaactgccacgggaggggccgctgtgaggaagggcgctgcctgtgcgacccaggctacaccggccctacctgtgccacccrcatgtgcccggctgactgccggggacgtgggcggtgtgtgcaaggagtgtgcctgtgccacgtgggctatggcggtgaggactgcgggcaggaagagcctccagccagcgcctgccctggaggctgcgggccccgggaactgtgccgggcaggccagtgtgtgtgtgtagagggcttccgaggccctgactgtgccatccagacatgcccaggggactgccgtggccgaggagagtgtcacgatggcagctgtgtctgcaaagatgggtatgctggcgaagactgcggagaagcacgggttccaagmtctgcctcagcctatgaccagagaggactggcccmtggacaggagtaccaggtcactgtccgagcccttcgagggaccagmtggggccttcctgcctccaagaccatcaccaccatgatcgatgggccccaggacctccgagtggtggctgtgacaccgacaacactggagcttggctggctgcgtccccaggctgaggtggaccgatttgtggtgtcctacgtcagtgccggcaaccagagggtgaggctggaagtgccccctgaagcagacgggacgctgctgactgacctgatgccaggcgtagaatatgtggtgactgtcacagcggagcggggccgggcagtcagctacccagctkctgtcagggccaacacagaggaaagggaggaggagtccccgcccaggccaagcctgtcccagcccccacggcggccttggggcaacctgacggccgagctgagccgtttccgcggcacggtgcaggacctggagcgccacctgcgggctcacggctacccactgcgggccaaccagacttacacgtcggtggcgcgccacatccatgaatacttgcagcggcaggtgctgggcagttccgccgatggcgcgcttctcgtgtctctcgacgggctccgcggccagttcgagcgcgtggtgctgcgctggcggcctcagccgcctgcagagggccccggcggtgagctgactgtgccgggcaccacgcgcaccgtcagcctgcccgacctcaggcccggcaccacctaccacgtggaggtccacggggtgcgggcggggcagacctccaagtcctacgccttcatcaccaccacaggcccctcgacgacgcaaggggcccaggctcctctcctgcagcagcgcccccaggagctgggagagttgagggtgctgggcagagatgagacagggcgcctccgtgtggtctggaccgcccagcctgacacctttgcctacttccaactgcgcatgcgggtgcccgaggggccgggggcacatgaggaagtgctgccaggggacgtccgccaggctctggtgcctccaccccctcctggaaccccgtatgagctgtcacttcatggggtccctcctgggggcaagccctctgaccccatcatctaccaaggcattatggacaaggatgaggagaagcctgggaagtcctcaggcccaccacrcctgggtgagctgacggtgacagacaggacctccgactccttgctcctgcgctggacggtccccgagggcgagtttgactmcttcgtgatccagtacaaagacagggacgggcagccccaggtggtgcccgtggaaggaccccagcgctcggccgtcatcacctccctggatcctggccgcaagtacaratttgtcctgtatgggtttgttggcaagaagaggcatggtccgctggtggctgaagccaagatcttgcctcagagtgacccaagtccagggactccaccccrcctgggaaacctgtgggtgacagaccctaccccagattcactgcacctctcctggactgtccctgagggccagtttgacaccttcatggtccagtacagggacagggatggacggccccaggtggtacctgtggaagggcccgagcgttcatttgttgtctcctcactggaccctgaccacaagtacagattcactctgtttggaattgcgaacaagaagcggtatggccccctcacggccgatggcaccactgctccagagaggaaagaggagcccccccrccctgagttcctggagcagcccctcctgggggaactgacagtgaccggcgtgaccccagactccttgcgtctctcatggacagtggcccagggccccttcgactcattcatggtccagtacaaggatgcacaggggcagccccaggcagtgcctgttgcgggggatgagaatgaggttactgtccccggcctggatcccgaccggaagtataagatgaacctctacgggcttcgtggcaggcagcrtgtggggcccgagtctgtggtggccaagactgctcctcaggaggatgtggacgagacccccagccccacagaactgggcacggaggccccggagtcccccgaggagccgctcctgggggagctgacagtgacaggatcctcccctgattcgctgagcctcttctggaccgtcccccagggcagcttcgactctttcaccgtgcagtacaaggacagggatgggcggccccrggcggtgcgtgttgggggcaaggagagtgaggtcaccgtgggaggcctagagcccgggcacaagtacaagatgcacctgtacggcctccaygaggggcagcgcgtgggcccrgtgtccgccgtgggcgtgacagccccacaacaagaagagacccctccagccactgagtccccgctggagccacgcctaggagagctgacartgacagatgtgacccccaactctgtgggcctctcctggacagtccccgagggccagtttgactccttcatagtccagtacaaggacaaggacgggcagccccaggtggtgccggtggcggcagaccagcgagaggtcacagtctacaacctggagcctgagagaaaatataagatgaacatgtatggactacatgatgggcaacgcatgggccccctgtctgtggtcatcgtgacggccccagccacagaggcctccaagcctcccctggagccacgcctaggggagctgacagtgacggatataacccctgactctgtgggcctctcatggacagtccctgagggtgaattcgactcctttgtggttcagtacaaggacagggacgggcagccccaggtggtgcccgtggctgcagatcagcgggaggtcactatccctgacctggaaccctcccgcaagtacaagttcctgctctttgggatccaggatgggaaacgacgcagcccagtctctgtggaggcaaagacggttgcccgaggtgacgccagcccaggggccccaccccgccttggggagctgtgggtgacagaccccaccccagactcactgcgcctctcctggacggttcctgagggccagttcgactcttttgtggtccagttcaaggacaaagacgggccccaggtggtgcccgtggagggccatgagcgctctgtcactgtcacccctctggatgccggccgcaagtacagattcctcctctatggcctcctgggcaagaagcgccatggccctctcactgccgacggcaccacggaagcccggagtgctatggatgatactggaacaaagcgtcccccaaaaccccgtctgggggaggagctgcaggtgaccaccgtgacccagaactccgtgggcctctcctggacagtccctgagggccagtttgactcctttgtggtccagtacaaagacagggacgggcagccccaggtggtgcccgtggagggcagcctcagggaggtcagcgtgccgggcctggaccctgcccacaggtacaagctgctgctctacgggctgcaccacggcaagcgtgtgggccccatctcggccgtcgccattactgccggcagggaagaaacggaaactgagaccacggccccgacccctccagcgcctgagccccacctcggggagttgacagtggaggaggccacgtcacacaccctgcatctctcctggatggtgactragggagaatttgactccttcgaaatccagtacrcagatagagacgggcaactccaaatggtccgcataggaggtgaccggaatgacatcaccctctctggcctggaatccgaccacagatacctggtgaccctgtatggtttcagtgatgggaagcatgtaggtcctgtccatgtcgaggccctgacagtcccggaggaggagaagccttcagaacctcccacygcaacccccgagccccccatcaagcctcgcctgggggagctgaccgtgacagatgccacccctgactccctcagcctgtcctggacrgttccygagggacagtttgaccacttcctggtccagtacaggaatggagatgggcagcccaaggcagtgagggtgccagggcacgaggaaggggtcaccatctcgggcctggagccagaccataaatacaagatgaacctgtacggcttccacggtggccagcgcatgggccctgtgtctgtcgtcggggtgacagaacccagcatggaggccccggagcccgctgaggagccrctcctgggggagctaacagtgacaggatcctcccctgactcgctgagcctctcctggacygtcccccagggccgcttcgactccttcaccrtgcagtacaaggacagggacgggcggccccaggtggtgcgtgttgggggcgaggagagtgaagtcaccgtggggggcctggagcctgggcgcaagtacaagatgcacctgtacggcctccacgaggggcggcgcgtgggcccagtgtctgctgtgggcgtcacggcccccgaagaggagtcccctgatgctcctcttgcaaagctgcgcctagggcagatgacagtgagagacatcacctccgactccctcagcctctcctggacagtccccgagggccagtttgaccatttcttggtccagtwtaagaatggggaygggcagcccaaggcggtgcgggtgccgggacacgaggatggggtcaccatctcrggcctggagccagaccacaagtacaagatgaacctgtacggcttccacggtggccagcgcgtgggccccgtgtctgctgttggtttaactgcctcgacagaacctcccacccctgaaccccmcatcaagcctcgcctggaggagctgaccgtgacagatgcgacccctgactccctcagcctgtcctggacggttcccgagggacagtttgaccacttcctggtccagtacaagaatggggatgggcagcccaaggcaacacgggtgccaggacatgaggacagggtcaccatctccggcctggagccagacaacaagtacaagatgaacctgtacggcttccacggtggccagcgtgtgggccccgtgtctgccatcggggtgacagaggaagagacccccagccccacagaacccagcatggaggccccggagccccctgaggagcygctcctgggggagctracagtgacaggatcctcccctgactcgctgagcctctcctggaccgtcccccagggccgcttcgactccttcaccgtgcagtacaaggacagggacgggcggccccaggtggtgcgtgttgggggygaggagagcgaggtcaccgtggggggcctggagcctgggcgcaaatacaagatgcacctgtayggcctccacgaggggcggcgygtgggcccggtgtccaccgtgrgcgtgactgccccacaagaggatgtggacragacccccagccctacagaaccaggcacagaggccccagrgccccccgaggagcctctcctgggggagctgacagtgacaggatcctcccctgactcgctgagcctttcctggaccgtcccccagggccgctttgactccttcaccgtgcagtacaaggacagggaygggcggccccaggcggtgcgtgttgggggccaggagagcaaggtcactgtgaggggcctggagcctgggcgcaagtacaagatgcacctgtacggcctccacgaggggcrgcgcctrggcccggtgtctgccgtgggcgtcacagaggatgaagccgagaccacccaagcagtgcctaccatgacccctgagccccccatcaagcctcgcctgggggagctgaccatgacagatgccacccctgactccctcagcctgtcctggacggttcccgagggccagtttgaccacttcctggtccagtacaggaatggggatgggcagcccaaggcggtgcgggtgccggggcacgaggacggggtcaccatctcaggcctggagccagaccataaatacaagatgaacctgtacggcttccacggtggccagcrcgtgggccccatctctgtcattggggtgacggaggaagagacccccagccccacggaactcagcactgaggcccsggagccccctgaggagccgctcctgggggagctgacagtgacaggatcctcccctgactcgctgagcctctcctggaccatcccccagggccacttcgactccttcaccgtgcagtacaaggacagggacgggcggccccaggtgatgcgtgtcaggggcgaggagagcgaggtcaccgtggggggcctggagcccgggcgcaaatacaagatgcacctgtacggcctccacgaggggcggcgtgtgggcccggtgtccaccgtgggtgtgacagtgcccaccacaacccctgagccccccaacaagcctmgcctcrgggagctgaccgtgacagatgccacccctgactccctcagcctgtcctggatggtcccygagggccagtttgaccacttcctggtccagtacaggaatggggatgggcagcccaaggtggtgcggkkgccggggcacgaggacggggtcaccatctcaggcctggagccagaccacaagtacaagatgaacctgtacggcttccacrgtggccagcgcgtgggccccatctctgtcattggggtgacagaggaagaaactcccgcccccacagaacccagcacggaggccccggagccccctgaggagccgctcctgggggagctgacagtgacaggatcctcccctgactcgctgagcctctcctggaccatcccccagggccgcttcgactccttcactgtgcagtacaaggacagggacgggcggccccaggtggtgcgtgtcaggggcgaggagagcgaggtcaccgtggggggcctggagcccgggygcaaatacargatgcacctgtacggcctccaygaggggcagcgcgtgggcccagtgtccgctgtgggtgtgacagctccaaaggatgaagccgagaccacccaagcagtgcctaccatgacccctgagccccccatcaagcctcgcctgggggagctgaccgtgacagatgccacccccgactccctcagcctgtcctggatggttcccgagggccagtttgaccacttcctggtccagtacaggaatggggatgggcagcccaaggcggtgcgggkgccggggcacgaggacggggtcaccatctcaggcctggagccagaccayaartacaagatgaacctgtacggcttccacggtggccagcgcgtaggccctgtgtctgccattggggtgwcggaggaagagacccccagccccacagaacccagcactgaggccccggaggcccctgaggagccgctcctgggggagttgacagtgacaggatcctcccctgactcgctgagcctctcctggaccrtcccccaggkccgcttcgactccttcaccgtgcagtacaaggacagggaygggcagccccaggtggtgsgtgtcagggkcraggagagcgaggtcaccgtrgggggcctrgagcccgggcgcaaatacaagatgcayctgtacggcctccacgaggggcagcgcgtgggcccagtgtccaccgtgggcatcacggcgcccctgcccacaccactgccggtggagccccgcctgggggagctggcggtggmggccgtgacctcggactcagtgggcctctcatggacggtggcccagggcccctttgactccttcctggtacagtacagggacgcgcaggggcagccccaggcagtgcctgtgagcggagacctccgagcggtmgccgtctcggggctggwmccggcccgcaagtacaagttcctgctctttggactccagaatgggaaacgccacrgcccagtccctgtggaggccaggaccgccccagacaccaaaccgtctccccgcctgggggagctgactgtgacagatgcgacccctgactccgtgggcctctcgtggacggtccctgagggcgaattcgactccttcgtggtccagtacaaggataaggatggtcggctccaggtggtgccggtggcagccaaccagcgggaggtcacagtccaggscctggagcccagtaggaaatacaggttcctgctctatggtctgtcaggcaggaaacgactgggccccatctctgctgacagcaccacagctcccctggagaaggagctacctccccacctgggggaactgaccgtggctgaggagacctccagctctctgcgcctgtcctggacggtagcccagggcccctttgactccttcgtggtccagtacagggacacggacgggcagcccagggcagtgcctgtggccgcagaccagcgcacagtcaccgtagaggacctggagcctggcaagaaatacaagtttctgctctacgggctccttgggggaaagcgcctgggcccggtctctgccctgggaatgacagccccagaagaggacacaccagccccagagttagccccagaggcccctgagcctcctgaagagccccgcctaggagtgctgaccgtgaccgacacaaccccagactccatgcgcctctcgtggagcgtggcccagggcccctttgattccttcgtggtccagtatgaggacacgaacgggcagccccaggccttgctcgtggacggcgaccagagcaagatcctcatctcaggcctggagcccagcaccccctacaggttcctcctctatggcctccatgaagggaagcgcctggggcccctctcagctgagggcaccacagggctggctcctgctggtcagacctcagaggagkcaaggccccgcctgtcccagctgtctgtgactgacgtgaccaccagttcactgaggctcaactgggaggccccaccgggggccttcgactccttcctgctccgctttggggttccatcaccaagcacwctggagccgcatccgcgtccactgctgcagcgcgagctgatggtgccggggacrcggcactcggccgtgctccgggacctgcgttccgggactctgtacagcctgacactgtatgggctgcgaggaccccacaaggccgacagcatccagggaaccgcccgcaccctcagcccagttctggagagcccccgtgacctccaattcagtgaaatcagggagacctcagccaaggtcaactggatgcccccaccatcccgggcggacagcttcaaagtctcctaccagctggcggacggaggggagcctcagagtgtgcaggtggayggccrggcccggacccagaaactccaggggctgatcccaggcgctcgctatgaggtgaccgtggtctcggtccgaggctttgaggagagtgagcctctcacaggcttcctcaccacggttcctgacggtcccacacagttgcgtgcactgaacttgaccgagggattcgccgtgctgcactggaagcccccccagaatcctgtrgacacctatgacrtccaggtcacagcccctggggccccgcctctgcaggcggagaccccaggcagcgcggtggactaccccctgcatgaccttgtcctccacaccaactacaccgccacagtgcgtggcctgcggggccccaacctcacttccccagccagcatcaccttcaccacagggctagaggcccctcgggacttggaggccaaggaagtgaccccccgcaccgccctgctcacttggactgagcccccagtccggcccgcaggctacctgctcagcttccacacccctggtggacagamccaggagatcctgctcccaggagggatcacatctcaccagctccttggcctctttccctccacctcctacaatgcacggctccaggccaygtggggccagagcctcctgccgcccgtgtccacctctttcaccacgggtgggctgyggatccccttccccagggactgcggggaggagatgcagaacggagccggtgcctccaggaccagcaccatcttcctcaacggcaaccgsgagyggcccctgaacgtgttttgsgacatggagactgatgggggcggctggctggtgttccagcgccgcatggatggacagacagacttctggagggactgggaggactatgcccatggttttgggaacatctctggagagttctggctgggcaatgaggccctgcacagcctgacacaggcaggtgactactccatscgcgtggacctgcgggctggggacgaggctgtgttcgcccagtacgactccttccacgtagactcggctgcggagtactaccgcctccacttggagggctaccacggcaccgcaggggactccatgagctaccacagcggcagtgtcttctctgcccgtgatcggraccccaacarcttgctcatctcctgcrctgtctcctaccgaggggcctggtggtacaggaactgccactacgccaacctcaacgggctctacrggagcacagtggaccatcagggagtgagctggtaccactggaagggcttcgagttctcggtgcccttcacggaaatgaagctgagaccaagaaactttcgctccccagcggggggaggctgagctgctgcccacctctctcgcaccccagtatgactgccragcactgaggggtcgccccgagagaagagccagggtccttcaccacccagccgctggaggaagccttctctgccagcgatctcgcagcactgtgtttacaggggggaggggaggggttcgtacrggagcaataaaggagaaactgaggtacccggct

SEQ ID NO: 2917 - DNA, 3127 bp, Homo sapiens
ccttgtgcatttgggctgaagacaaagatgactgcaggagtgggcaggccggagtggggcgccctggcctgtscccaggaaggaggaggagtctgcagccctgtgggcttcaacatccatcaaggagtccagagcaggagccaggccaggcgggagggaaaggccctgggaggggctctctaatctcccagccccgactctgccccgtcactgccrctgctcctcattactcgctggggctgctgtcgcctccccgaagggtggccttgtccagatagyggcaaacctccctgccgtggatgagtcaggagcattttcttaagaggaacatcactggaaaacaaaatgagcggggacacagaaaccaacagcagtggctgcatttgtggtacaggctcctcttccrgagctcgctgatgcccacctcagacaggcctgaccacggcacggctggtgggatttgccagtcacctcaaccagccagttccaccctcagcttctctcagaagggagcaccacactcctcaagctcagtgaatgtatcccggcatgggtggggccagagcctgtgatatctcgaggtgggctcggcaggacaccggggtgtggaagggggaagcgagcacctgactcagacagcgcgggagctcgcaggagtcacgaggccacagcgacttcattgtctgactgggcctggacctataaacttcccacctcagccttgggccaagcmtggaagataaaaatggagcaccccatggcgcccctcactcagattctcccctgggcttctcccacgcagccccagaagaggacacaccagccccagagttagccccagaggcccctgagcctcctgaagagccccgcctaggagtgctgaccgtgaccgacacaaccccagactccatgcgcctctcgtggagcgtggcccagggcccctttgattccttcgtggtccagtatgaggacacgaacgggcagccccaggccttgctcgtggacggcgaccagagcaagatcctcatctcaggcctggagcccagcaccccctacaggttcctcctctatggcctccatgaagggaagcgcctggggcccctctcagctgagggcaccacagggctggctcctgctggtcagacctcagaggagkcaaggccccgcctgtcccagctgtctgtgactgacgtgaccaccagttcactgaggctcaactgggaggccccaccgggggccttcgactccttcctgctccgctttggggttccatcaccaagcacwctggagccgcatccgcgtccactgctgcagcgcgagctgatggtgccggggacrcggcactcggccgtgctccgggacctgcgttccgggactctgtacagcctgacactgtatgggctgcgaggaccccacaaggccgacagcatccagggaaccgcccgcaccctcagcccagttctggagagcccccgtgacctccaattcagtgaaatcagggagacctcagccaaggtcaactggatgcccccaccatcccgggcggacagcttcaaagtctcctaccagctggcggacggaggggagcctcagagtgtgcaggtggayggccrggcccggacccagaaactccaggggctgatcccaggcgctcgctatgaggtgaccgtggtctcggtccgaggctttgaggagagtgagcctctcacaggcttcctcaccacggttcctgacggtcccacacagttgcgtgcactgaacttgaccgagggattcgccgtgctgcactggaagcccccccagaatcctgtrgacacctatgacrtccaggtcacagcccctggggccccgcctctgcaggcggagaccccaggcagcgcggtggactaccccctgcatgaccttgtcctccacaccaactacaccgccacagtgcgtggcctgcggggccccaacctcacttccccagccagcatcaccttcaccacagggctagaggcccctcgggacttggaggccaaggaagtgaccccccgcaccgccctgctcacttggactgagcccccagtccggcccgcaggctacctgctcagcttccacacccctggtggacagamccaggagatcctgctcccaggagggatcacatctcaccagctccttggcctctttccctccacctcctacaatgcacggctccaggccaygtggggccagagcctcctgccgcccgtgtccacctctttcaccacgggtgggctgyggatccccttccccagggactgcggggaggagatgcagaacggagccggtgcctccaggaccagcaccatcttcctcaacggcaaccgsgagyggcccctgaacgtgttttgsgacatggagactgatgggggcggctggctggtgttccagcgccgcatggatggacagacagacttctggagggactgggaggactatgcccatggttttgggaacatctctggagagttctggctgggcaatgaggccctgcacagcctgacacaggcaggtgactactccatscgcgtggacctgcgggctggggacgaggctgtgttcgcccagtacgactccttccacgtagactcggctgcggagtactaccgcctccacttggagggctaccacggcaccgcaggggactccatgagctaccacagcggcagtgtcttctctgcccgtgatcggraccccaacarcttgctcatctcctgcrctgtctcctaccgaggggcctggtggtacaggaactgccactacgccaacctcaacgggctctacrggagcacagtggaccatcagggagtgagctggtaccactggaagggcttcgagttctcggtgcccttcacggaaatgaagctgagaccaagaaactttcgctccccagcggggggaggctgagctgctgcccacctctctcgcaccccagtatgactgccragcactgaggggtcgccccgagagaagagccagggtccttcaccacccagccgctggaggaagccttctctgccagcgatctcgcagcactgtgtttacaggggggaggggaggggttcgtacrggagcaataaaggagaaactgaggtacccggct

SEQ ID NO: 2918 - DNA, 11195 bp, Homo sapiens
ggtcctccccttctcctcccctgctcgctgcagactccctcctcactgtcgctgccgagatccacagtcggttgtggctcagcccctgttgcaggggacaagtgagggagacttccctgtcctgccctgagacgccgccctcccggggttggggacagagcaggtgcagaggcactgcagctgctcggttgcccagcctcctgaatgatgccagcccagtatgctctaacctccagcctggttctcctggtgctgctgagcacagccagagcaggccccttctcttcacggtccaatgtgacactgccagccccccggccccctccccagccagggggccacacagtgggggctggagtgggaagcccctcttctcagctttacgagcacacagtggaaggaggggagaagcaggtggtattcacccaccgcattaacctgcccccttccactggctgtggctgtcccccaggcaccgagcccccagtccttgcttcagaggtacaggccctgagggtccgtctagagatcctggaggagttggtgaaggggctcaaggaacagtgcactgggggatgttgtcctgcctctgcccaagctggcacaggtcagacagatgtgcggaccctctgcagtctccatggtgtgtttgatctgagccgctgcacctgttcctgtgagccaggctggggtgggcccacctgctcagaccccacagatrctgagatccctccctcttccccaccctcagcctcggggtcctgcccagatgactgcaatgatcagggtcgctgtgtccgtggtcgttgcrtgtgctttcccggctacactggccccagctgtggctggccatcctgtcccggggactgccaaggccgtgggcgctgcgtgcagggcgtgtgtgtgtgccgggcaggcttctcaggccccgactgcagccagcgctcctgccctcgaggttgcagccagaggggacgctgtgagggtgggcgctgcgtgtgtgacccaggctacactggtgacgactgtggcatgaggagctgccctcgcggttgcagtcagagggggcgctgtgagaatgggcgctgcgtgtgtaaccccggctacrctggcgaggactgtggggtgaggagctgccctcggggctgcagccagcggggacgctgcaaggacgggcgctgcgtgtgtgaccccggctacactggcgaggactgtggtacgcggagctgcccctgggactgtggcgagggcgggcgctgcgtggacggccgctgcgtgtgctggcccgggtacacaggcgaggactgcagcacgcggacatgtccgagggactgccggggccgcgggcgctgcgaggacggcgaatgcatttgcgacacgggctacagcggggacgactgcggcgtgcgcagctgccctggcgactgcaaccaaaggggccgctgcgaggacggccgctgcgtgtgctggccggggtacactggaaccgattgcggctcgcgcgcctgcccacgcgactgtagaggtcgcgggcgctgcgagaacggcgtgtgtgtttgcaatgcgggctacagcggcgaggactgcggtgtgcgcagctgtcctggggactgtcgtggccggggccgctgtgagagtggccgctgcatgtgttggccggggtacacaggccgggactgcggcacgcgcgcctgtcctggcgactgtcgcgggcgcgggcgctgcgtggatggccrctgcgtgtgcaacccgggcttcaccggtgaggactgtgggagccgtcgctgtcccggggactgccgtgggcacggcctttgcgaggatggcgtgtgcgtgtgtgacgcaggctactcaggggaagactgcagcacgcgcagctgccccgggggctgccgaggccgcggccagtgcctagatgggcggtgtgtgtgcgaggayggctactctggcgaggattgcggtgtgaggcagtgcccgaatgactgcagccagcacggcgtgtgccaggacggtgtgtgcatctgttgggaaggctacgtgrgtgaggactgcagcatccgcacctgcccctccaactgccacgggaggggccgctgtgaggaagggcgctgcctgtgcgacccaggctacaccggccctacctgtgccacccrcatgtgcccggctgactgccggggacgtgggcggtgtgtgcaaggagtgtgcctgtgccacgtgggctatggcggtgaggactgcgggcaggaagagcctccagccagcgcctgccctggaggctgcgggccccgggaactgtgccgggcaggccagtgtgtgtgtgtagagggcttccgaggccctgactgtgccatccagacatgcccaggggactgccgtggccgaggagagtgtcacgatggcagctgtgtctgcaaagatgggtatgctggcgaagactgcggagaagtgatcgatgggccccaggacctccgagtggtggctgtgacaccgacaacactggagcttggctggctgcgtccccaggctgaggtggaccgatttgtggtgtcctacgtcagtgccggcaaccagagggtgaggctggaagtgccccctgaagcagacgggacgctgctgactgacctgatgccaggcgtagaatatgtggtgactgtcacagcggagcggggccgggcagtcagctacccagctkctgtcagggccaacacaggaccccagcgctcggccgtcatcacctccctggatcctggccgcaagtacaratttgtcctgtatgggtttgttggcaagaagaggcatggtccgctggtggctgaagccaagatcttgcctcagagtgacccaagtccagggactccaccccrcctgggaaacctgtgggtgacagaccctaccccagattcactgcacctctcctggactgtccctgagggccagtttgacaccttcatggtccagtacagggacagggatggacggccccaggtggtacctgtggaagggcccgagcgttcatttgttgtctcctcactggaccctgaccacaagtacagattcactctgtttggaattgcgaacaagaagcggtatggccccctcacggccgatggcaccactgctccagagaggaaagaggagcccccccrccctgagttcctggagcagcccctcctgggggaactgacagtgaccggcgtgaccccagactccttgcgtctctcatggacagtggcccagggccccttcgactcattcatggtccagtacaaggatgcacaggggcagccccaggcagtgcctgttgcgggggatgagaatgaggttactgtccccggcctggatcccgaccggaagtataagatgaacctctacgggcttcgtggcaggcagcrtgtggggcccgagtctgtggtggccaagactggaggatgtggacgagacccccagccccacagaactgggcacggaggccccggagtcccccgaggagccgctcctgggggagctgacagtgacaggatcctcccctgattcgctgagcctcttctggaccgtcccccagggcagcttcgactctttcaccgtgcagtacaaggacagggatgggcggccccrggcggtgcgtgttgggggcaaggagagtgaggtcaccgtgggaggcctagagcccgggcacaagtacaagatgcacctgtacggcctccaygaggggcagcgcgtgggcccrgtgtccgccgtgggcgtgacagaggcctccaagcctcccctggagccacgcctaggggagctgacagtgacggatataacccctgactctgtgggcctctcatggacagtccctgagggtgaattcgactcctttgtggttcagtacaaggacagggacgggcagccccaggtggtgcccgtggctgcagatcagcgggaggtcactatccctgacctggaaccctcccgcaagtacaagttcctgctctttgggatccaggatgggaaacgacgcagcccagtctctgtggaggcaaagacggactcactgcgcctctcctggacggttcctgagggccagttcgactcttttgtggtccagttcaaggacaaagacgggccccaggtggtgcccgtggagggccatgagcgctctgtcactgtcacccctctggatgccggccgcaagtacagattcctcctctatggcctcctgggcaagaagcgccatggccctctcactgccgacggcaccacgggtgaggggcattccctgcaggtgaccaccgtgacccagaactccgtgggcctctcctggacagtccctgagggccagtttgactcctttgtggtccagtacaaagacagggacgggcagccccaggtggtgcccgtggagggcagcctcagggaggtcagcgtgccgggcctggaccctgcccacaggtacaagctgctgctctacgggctgcaccacggcaagcgtgtgggccccatctcggccgtcgccattactgcgcctgagccccacctcggggagttgacagtggaggaggccacgtcacacaccctgcatctctcctggatggtgactragggagaatttgactccttcgaaatccagtacrcagatagagacgggcaactccaaatggtccgcataggaggtgaccggaatgacatcaccctctctggcctggaatccgaccacagatacctggtgaccctgtatggtttcagtgatgggaagcatgtaggtcctgtccatgtcgaggccctgacagaacctcccacygcaacccccgagccccccatcaagcctcgcctgggggagctgaccgtgacagatgccacccctgactccctcagcctgtcctggacrgttccygagggacagtttgaccacttcctggtccagtacaggaatggagatgggcagcccaaggcagtgagggtgccagggcacgaggaaggggtcaccatctcgggcctggagccagaccataaatacaagatgaacctgtacggcttccacggtggccagcgcatgggccctgtgtctgtcgtcggggtgacagctgcagaggaagagacccccagccccacagaacccagcatggaggccccggagcccgctgaggagccrctcctgggggagctaacagtgacaggatcctcccctgactcgctgagcctctcctggacygtcccccagggccgcttcgactccttcaccrtgcagtacaaggacagggacgggcggccccaggtggtgcgtgttgggggcgaggagacccccgaagaggagtcccctgatgctcctcttgcaaagctgcgcctagggcagatgacagtgagagacatcacctccgactccctcagcctctcctggacagtccccgagggccagtttgaccatttcttggtccagtwtaagaatggggaygggcagcccaaggcggtgcgggtgccgggacacgaggatggggctgcagaggaagagacccccagccccacagaacccagcatggaggccccggagccccctgaggagcygctcctgggggagctracagtgacaggatcctcccctgactcgctgagcctctcctggaccgtcccccagggccgcttcgactccttcaccgtgcagtacaaggacagggacgggcggccccaggtggtgcgtgttgggggygaggagagcgaggtcaccgtggggggcctggagcctgggcgcaaatacaagatgcacctgtayggcctccacgaggggcggcgygtgggcccggtgtccaccgtgrgcgtgactgaaccaggcacagaggccccagrgccccccgaggagcctctcctgggggagctgacagtgacaggatcctcccctgactcgctgagcctttcctggaccgtcccccagggccgctttgactccttcaccgtgcagtacaaggacagggaygggcggccccaggcggtgcgtgttgggggccaggagagcaaggtcactgtgaggggcctggagcctgggcgcaagtacaagatgcacctgtacggcctccacgaggggcrgcgcctrggcccggtgtctgccgtgggcgtcacagaggatgaagccgagaccacccaagcagtgcctaccatgacccctgagccccccatcaagcctcgcctgggggagctgaccatgacagatgccacccctgactccctcagcctgtcctggacggttcccgagggccagtttgaccacttcctggtccagtacaggaatggggatgggcagcccaaggcggtgcgggtgccggggcacgaggacggggtcaccatctcaggcctggagccagaccataaatacaagatgaacctgtacggcttccacggtggccagcrcgtgggccccatctctgtcattggggtgacggaggaagagacccccagccccacggaactcagcactgaggcccsggagccccctgaggagccgctcctgggggagctgacagtgacaggatcctcccctgactcgctgagcctctcctggaccatcccccagggccacttcgactccttcaccgtgcagtacaaggacagggacgggcggccccaggtgatgcgtgtcaggggcgaggagagcgaggtcaccgtggggggcctggagcccgggcgcaaatacaagatgcacctgtacggcctccacgaggggcggcgtgtgggcccggtgtccaccgtgggtgtgacagctccagaggatgaagcagagaccacccaagcagtgcccaccacaacccctgagccccccaacaagcctmgcctcrgggagctgaccgtgacagatgccacccctgactccctcagcctgtcctggatggtcccygagggccagtttgaccacttcctggtccagtacaggaatggggatgggcagcccaaggtggtgcggkkgccggggcacgaggacggggtcaccatctcaggcctggagccagaccacaagtacaagatgaacctgtacggcttccacrgtggccagcgcgtgggccccatctctgtcattggggtgacagctgcagaggaagaaactcccgcccccacagaacccagcacggaggccccggagccccctgaggagccgctcctgggggagctgacagtgacaggatcctcccctgactcgctgagcctctcctggaccatcccccagggccgcttcgactccttcactgtgcagtacaaggacagggacgggcggccccaggtggtgcgtgtcaggggcgaggagagcgaggtcaccgtggggggcctggagcccgggygcaaatacargatgcacctgtacggcctccaygaggggcagcgcgtgggcccagtgtccgctgtgggtgtgacagctccaaaggatgaagccgagaccacccaagcagtgcctaccatgacccctgagccccccatcaagcctcgcctgggggagctgaccgtgacagatgccacccccgactccctcagcctgtcctggatggttcccgagggccagtttgaccacttcctggtccagtacaggaatggggatgggcagcccaaggcggtgcgggkgccggggcacgaggacggggtcaccatctcaggcctggagccagaccayaartacaagatgaacctgtacggcttccacggtggccagcgcgtaggccctgtgtctgccattggggtgwcggaggaagagacccccagccccacagaacccagcactgaggccccggaggcccctgaggagccgctcctgggggagttgacagtgacaggatcctcccctgactcgctgagcctctcctggaccrtcccccaggkccgcttcgactccttcaccgtgcagtacaaggacagggaygggcagccccaggtggtgsgtgtcagggkcraggagagcgaggtcaccgtrgggggcctrgagcccgggcgcaaatacaagatgcayctgtacggcctccacgaggggcagcgcgtgggcccagtgtccaccgtgggcatcacggcgcccctgcccacaccactgccggtggagccccgcctgggggagctggcggtggmggccgtgacctcggactcagtgggcctctcatggacggtggcccagggcccctttgactccttcctggtacagtacagggacgcgcaggggcagccccaggcagtgcctgtgagcggagacctccgagcggtmgccgtctcggggctggwmccggcccgcaagtacaagttcctgctctttggactccagaatgggaaacgccacrgcccagtccctgtggaggccaggaccgccccagacaccaaaccgtctccccgcctgggggagctgactgtgacagatgcgacccctgactccgtgggcctctcgtggacggtccctgagggcgaattcgactccttcgtggtccagtacaaggataaggatggtcggctccaggtggtgccggtggcagccaaccagcgggaggtcacagtccaggscctggagcccagtaggaaatacaggttcctgctctatggtctgtcaggcaggaaacgactgggccccatctctgctgacagcaccacagctcccctggagaaggagctacctccccacctgggggaactgaccgtggctgaggagacctccagctctctgcgcctgtcctggacggtagcccagggcccctttgactccttcgtggtccagtacagggacacggacgggcagcccagggcagtgcctgtggccgcagaccagcgcacagtcaccgtagaggacctggagcctggcaagaaatacaagtttctgctctacgggctccttgggggaaagcgcctgggcccggtctctgccctgggaatgacagccccagaagaggacacaccagccccagagttagccccagaggcccctgagcctcctgaagagccccgcctaggagtgctgaccgtgaccgacacaaccccagactccatgcgcctctcgtggagcgtggcccagggcccctttgattccttcgtggtccagtatgaggacacgaacgggcagccccaggccttgctcgtggacggcgaccagagcaagatcctcatctcaggcctggagcccagcaccccctacaggttcctcctctatggcctccatgaagggaagcgcctggggcccctctcagctgagggcaccacagggctggctcctgctggtcagacctcagaggagkcaaggccccgcctgtcccagctgtctgtgactgacgtgaccaccagttcactgaggctcaactgggaggccccaccgggggccttcgactccttcctgctccgctttggggttccatcaccaagcacwctggagccgcatccgcgtccactgctgcagcgcgagctgatggtgccggggacrcggcactcggccgtgctccgggacctgcgttccgggactctgtacagcctgacactgtatgggctgcgaggaccccacaaggccgacagcatccagggaaccgcccgcaccctcagcccagttctggagagcccccgtgacctccaattcagtgaaatcagggagacctcagccaaggtcaactggatgcccccaccatcccgggcggacagcttcaaagtctcctaccagctggcggacggaggggagcctcagagtgtgcaggtggayggccrggcccggacccagaaactccaggggctgatcccaggcgctcgctatgaggtgaccgtggtctcggtccgaggctttgaggagagtgagcctctcacaggcttcctcaccacggttcctgacggtcccacacagttgcgtgcactgaacttgaccgagggattcgccgtgctgcactggaagcccccccagaatcctgtrgacacctatgacrtccaggtcacagcccctggggccccgcctctgcaggcggagaccccaggcagcgcggtggactaccccctgcatgaccttgtcctccacaccaactacaccgccacagtgcgtggcctgcggggccccaacctcacttccccagccagcatcaccttcaccacagggctagaggcccctcgggacttggaggccaaggaagtgaccccccgcaccgccctgctcacttggactgagcccccagtccggcccgcaggctacctgctcagcttccacacccctggtggacagamccaggagatcctgctcccaggagggatcacatctcaccagctccttggcctctttccctccacctcctacaatgcacggctccaggccaygtggggccagagcctcctgccgcccgtgtccacctctttcaccacgggtgggctgyggatccccttccccagggactgcggggaggagatgcagaacggagccggtgcctccaggaccagcaccatcttcctcaacggcaaccgsgagyggcccctgaacgtgttttgsgacatggagactgatgggggcggctggctggtgttccagcgccgcatggatggacagacagacttctggagggactgggaggactatgcccatggttttgggaacatctctggagagttctggctgggcaatgaggccctgcacagcctgacacaggcaggtgactactccatscgcgtggacctgcgggctggggacgaggctgtgttcgcccagtacgactccttccacgtagactcggctgcggagtactaccgcctccacttggagggctaccacggcaccgcaggggactccatgagctaccacagcggcagtgtcttctctgcccgtgatcggraccccaacarcttgctcatctcctgcrctgtctcctaccgaggggcctggtggtacaggaactgccactacgccaacctcaacgggctctacrggagcacagtggaccatcagggagtgagctggtaccactggaagggcttcgagttctcggtgcccttcacggaaatgaagctgagaccaagaaactttcgctccccagcggggggaggctgagctgctgcccacctctctcgcaccccagtatgactgccragcactgaggggtcgccccgagagaagagccagggtccttcaccacccagccgctggaggaagccttctctgccagcgatctcgcagcactgtgtttacaggggggaggggaggggttcgtacrggagcaataaaggagaaactgaggtacccggct

SEQ ID NO: 2919 - DNA, 3206 bp, Homo sapiens
ccttgtgcatttgggctgaagacaaagatgactgcaggagtgggcaggccggagtggggcgccctggcctgtscccaggaaggaggaggagtctgcagccctgtgggcttcaacatccatcaaggagtccagagcaggagccaggccaggcgggagggaaaggccctgggaggggctctctaatctcccagccccgactctgccccgtcactgccrctgctcctcattactcgctggggctgctgtcgcctccccgaagggtggccttgtccagatagyggcaaacctccctgccgtggatgagtcaggagcattttcttaagaggaacatcactggaaaacaaaatgagcggggacacagaaaccaacagcagtggctgcatttgtggtacaggctcctcttccrgagctcgctgatgcccacctcagacaggcctgaccacggcacggctggtgggatttgccagtcacctcaaccagccagttccaccctcagcttctctcagaagggagcaccacactcctcaagctcagtgaatgtatcccggcatgggtggggccagagcctgtgatatctcgaggtgggctcggcaggacaccggggtgtggaagggggaagcgagcacctgactcagacagcgcgggagctcgcaggagtcacgaggccacagcgacttcattgtctgactgggcctggacctataaacttcccacctcagccttgggccaagcmtggaagataaaaatggagcaccccatggcgcccctcactcagattctcccctgggcttctcccacgcagccccagaagaggacacaccagccccagagttagccccagaggcccctgagcctcctgaagagccccgcctaggagtgctgaccgtgaccgacacaaccccagactccatgcgcctctcgtggagcgtggcccagggcccctttgattccttcgtggtccagtatgaggacacgaacgggcagccccaggccttgctcgtggacggcgaccagagcaagatcctcatctcaggcctggagcccagcaccccctacaggttcctcctctatggcctccatgaagggaagcgcctggggcccctctcagctgagggcaccacagggctggctcctgctggtcagacctcagaggagkcaaggccccgcctgtcccagctgtctgtgactgacgtgaccaccagttcactgaggctcaactgggaggccccaccgggggccttcgactccttcctgctccgctttggggttccatcaccaagcacwctggagccgcatccgcgtccactgctgcagcgcgagctgatggtgccggggacrcggcactcggccgtgctccgggacctgcgttccgggactctgtacagcctgacactgtatgggctgcgaggaccccacaaggccgacagcatccagggaaccgcccgcaccctcagcccagttctggagagcccccgtgacctccaattcagtgaaatcagggagacctcagccaaggtcaactggatgcccccaccatcccgggcggacagcttcaaagtctcctaccagctggcggacggaggggagcctcagagtgtgcaggtggayggccrggcccggacccagaaactccaggggctgatcccaggcgctcgctatgaggtgaccgtggtctcggtccgaggctttgaggagagtgagcctctcacaggcttcctcaccacggttcctgacggtcccacacagttgcgtgcactgaacttgaccgagggattcgccgtgctgcactggaagcccccccagaatcctgtrgacacctatgacrtccaggtcacagcccctggggccccgcctctgcaggcggagaccccaggcagcgcggtggactaccccctgcatgaccttgtcctccacaccaactacaccgccacagtgcgtggcctgcggggccccaacctcacttccccagccagcatcaccttcaccacagggctagaggcccctcgggacttggaggccaaggaagtgaccccccgcaccgccctgctcacttggactgagcccccagtccggcccgcaggctacctgctcagcttccacacccctggtggacagamccaggtgccccggccccactgacccaactcccctccctgggtgattccaggaggtgctgcctctggccctcccggagggtctccacctccctctcccctgacccccccttgtctgtcccacaggagatcctgctcccaggagggatcacatctcaccagctccttggcctctttccctccacctcctacaatgcacggctccaggccaygtggggccagagcctcctgccgcccgtgtccacctctttcaccacgggtgggctgyggatccccttccccagggactgcggggaggagatgcagaacggagccggtgcctccaggaccagcaccatcttcctcaacggcaaccgsgagyggcccctgaacgtgttttgsgacatggagactgatgggggcggctggctggtgttccagcgccgcatggatggacagacagacttctggagggactgggaggactatgcccatggttttgggaacatctctggagagttctggctgggcaatgaggccctgcacagcctgacacaggcaggtgactactccatscgcgtggacctgcgggctggggacgaggctgtgttcgcccagtacgactccttccacgtagactcggctgcggagtactaccgcctccacttggagggctaccacggcaccgcaggggactccatgagctaccacagcggcagtgtcttctctgcccgtgatcggraccccaacarcttgctcatctcctgcrctgtctcctaccgaggggcctggtggtacaggaactgccactacgccaacctcaacgggctctacrggagcacagtggaccatcagggagtgagctggtaccactggaagggcttcgagttctcggtgcccttcacggaaatgaagctgagctgctgcccacctctctcgcaccccagtatgactgccragcactgaggggtcgccccgagagaagagccagggtccttcaccacccagccgctggaggaagccttctctgccagcgatctcgcagcactgtgtttacaggggggaggggaggggttcgtacrggagcaataaaggagaaactgaggtacccgg

SEQ ID NO: 2920 - DNA, 708 bp, Homo sapiens
gccctgcgcccctcctccgccgccggctcccgggtgtggtggtcgcwccagctctctgctctcccagcgcagcgccgccgcccggcccctccagcttcccggaccatggccaacctggagcgcaccttcatcgccatcaagccggacggcgtgcagcgcggcctggtgggcgagatcatcaagcgcttcgagcagaagggattccgcctcgtggccatgaagttcctccgggcctctgaagaacacctgaagcagcactacattgacctgaaagaccgaccattcttccctgggctggtgaagtacatgaactcagggccggttgtggccatggtctgggaggggctgaacgtggtgaagacaggccgagtgatgcttggggagaccaatccagcagaytcaaagccaggcaccattcgtggggacttctgcattcaggttggcaggaacatcattcatggcagtgattcagtaaaaagtgctgaaaaagaaatcagcctatggtttaagcctgaagaactggttgactacaagtcttgtgctcatgactgggtctatgaataaraggtggacacaacagcagtctccttyagcayggcgtggtgtgtccctggacacagctcttcattccattgacttagaggcaacaggattgatcattcttttrtagagcatatttgccaataaagcttttggaagccggacact

SEQ ID NO: 2921 - DNA, 1253 bp, Homo sapiens
gtgctgcgaaccacgtgggtcccgggcgcgtttcgggtgctggcggctgcagccggagttcaaacctaagcagctggaagggccctgtggctaggtaccatagagtctctacacaggastaartcagcctggtgtgcaggggaggcagacacacaaacasaaaattggactacagtgctaagatgctgtaagaagaggttaactaaaggacaggaagatggggccaagagstggtgctactgtctactttagggatcgtctttcaaggcgaggggcctcctatctcaagctgtgatacaggaaccatggccaactgtgagcgtaccttcattgcgatcaaaccagatggggtccagcggggtcttgtgggagagattatcaagcgttttgagcagaaaggattccgccttgttggtctgaaattcatgcaagcttccgaagatcttctcaaggaacactacgttgacctgaaggaccgtccattctttgccggcctggtgaaatacatgcactcagggccggtagttgccatggtctgggaggggctgaatgtggtgaagacgggccgagtcatgctcggggagaccaaccctgcagactccaagcctgggaccatccgtggagacttctgcatacaagttggcaggaccatggccaacctggagcgcaccttcatcgccatcaagccggacggcgtgcagcgcggcctggtgggcgagatcatcaagcgcttcgagcagaagggattccgcctcgtggccatgaagttcctccgggcctctgaagaacacctgaagcagcactacattgacctgaaagaccgaccattcttccctgggctggtgaagtacatgaactcagggccggttgtggccatggtctgggaggggctgaacgtggtgaagacaggccgagtgatgcttggggagaccaatccagcagaytcaaagccaggcaccattcgtggggacttctgcattcaggttggcaggaacatcattcatggcagtgattcagtaaaaagtgctgaaaaagaaatcagcctatggtttaagcctgaagaactggttgactacaagtcttgtgctcatgactgggtctatgaataaraggtggacacaacagcagtctccttyagcayggcgtggtgtgtccctggacacagctcttcattccattgacttagaggcaacaggattgatcattcttttrtagagcatatttgccaataaagcttttggaagccggacact

SEQ ID NO: 2922 - DNA, 1573 bp, Homo sapiens
gccctgcgcccctcctccgccgccggctcccgggtgtggtggtcgcwccagctctctgctctcccagcgcagcgccgccgcccggcccctccagcttcccggaccatggccaacctggagcgcaccttcatcgccatcaagccggacggcgtgcagcgcggcctggtgggcgagatcatcaagcgcttcgagcagaagggattccgcctcgtggccatgaagttcctccgggcctctgaagaacacctgaagcagcactacattgacctgaaagaccgaccattcttccctgggctggtgaagtacatgaactcagggccggttgtggccatggtctgggaggggctgaacgtggtgaagacaggccgagtgatgcttggggagaccaatccagcagaytcaaagccaggcaccattcgtggggacttctgcattcaggttggcaggtaagtccggggacaggagggtggatgacttttatgcaacaccatttaaagcagacgtcatggcgtatcctactttcagaagaatctgtgcccttttttttttttttttttcttgagacggagtctccttcttgcactccagcctgggcaacaagaacaaaactccgtctcaaaaaaaaaaaaaaaaaagctttcacacatagcttcttccctaggttacttaattttaagcaagacaacaagggagccataagtggtaattcctgtgtagtacagcaaaaaatgctaggtgtggagaagggaagcattctagccacatccatgagtactttgtccatgggtgtgtcacttaaccttttgattccctcacctgtacacagtctgttcaaaacctttacaaagttgtgaggttgaagtgggataaagggatttttattaataagcagtgttatgtcatggttgggctttgcaaatcagtgttataagaaaatgcagcagagctggcctatgataatgaacacatcatatctagttgggatgttgatctgcagtgggtttgagtatcactgtattttccaaaatttgcggaggagtgttttatgtcttcggcaatcttggggtacaagcactcttttgatggggaggccagacttggaagcataatacagttgaaacaaggaatgttttaaatcaagcacttttacagttgtatagctgcttttaaaaggaaatgctttgggggtataaattggtctgttgcttcaagtggcaatttggctgaaagagtctggagtgctgtccattgcggtacccattaaacagacttttgcactttaaaacatggcaacttgtaattgttttctttcttaggaacatcattcatggcagtgattcagtaaaaagtgctgaaaaagaaatcagcctatggtttaagcctgaagaactggttgactacaagtcttgtgctcatgactgggtctatgaataaraggtggacacaacagcagtctccttyagcayggcgtggtgtgtccctggacacagctcttcattccattgacttagaggcaacaggattgatcattcttttrtagagcatatttgccaataaagcttttggaagccgg

SEQ ID NO: 2923 - DNA, 776 bp, Homo sapiens
gggaagctgggcatcaccaaagggagcttgtttgccagggacactgcaagtaggaagtgtctacaggtcgatgacaggcctaatctctatgacagggtctagactttcctcagggtccaggggcgcacctcagggtgaactggaaaactcgaccgcactttagtgccaggaccatggccaacctggagcgcaccttcatcgccatcaagccggacggcgtgcagcgcggcctggtgggcgagatcatcaagcgcttcgagcagaagggattccgcctcgtggccatgaagttcctccgggcctctgaagaacacctgaagcagcactacattgacctgaaagaccgaccattcttccctgggctggtgaagtacatgaactcagggccggttgtggccatggtctgggaggggctgaacgtggtgaagacaggccgagtgatgcttggggagaccaatccagcagaytcaaagccaggcaccattcgtggggacttctgcattcaggttggcaggaacatcattcatggcagtgattcagtaaaaagtgctgaaaaagaaatcagcctatggtttaagcctgaagaactggttgactacaagtcttgtgctcatgactgggtctatgaataaraggtggacacaacagcagtctccttyagcayggcgtggtgtgtccctggacacagctcttcattccattgacttagaggcaacaggattgatcattcttttrtagagcatatttgccaataaagcttttggaagccggacact

SEQ ID NO: 2924 - DNA, 595 bp, Homo sapiens
gccctgcgcccctcctccgccgccggctcccgggtgtggtggtcgcwccagctctctgctctcccagcgcagcgccgccgcccggcccctccagcttcccggaccatggccaacctggagcgcaccttcatcgccatcaagccggacggcgtgcagcgcggcctggtgggcgagatcatcaagcgcttcgagcagaagggattccgcctcgtggccatgaagttcctccgggcctctgaagaacacctgaagcagcactacattgacctgaaagaccgaccattcttccctgggctggtgaagtacatgaactcagggccggttgtggccatggaacatcattcatggcagtgattcagtaaaaagtgctgaaaaagaaatcagcctatggtttaagcctgaagaactggttgactacaagtcttgtgctcatgactgggtctatgaataaraggtggacacaacagcagtctccttyagcayggcgtggtgtgtccctggacacagctcttcattccattgacttagaggcaacaggattgatcattcttttrtagagcatatttgccaataaagcttttggaagccggacact

SEQ ID NO: 2925 - DNA, 1132 bp, Homo sapiens
gaagcgttccgtgcgtgcaagtgctgcgaaccacgtgggtcccgggcgcgtttcgggtgctggcggctgcagccggagttcaaacctaagcagctggaaggaaccatggccaactgtgagcgtaccttcattgcgatcaaaccagatggggtccagcggggtcttgtgggagagattatcaagcgttttgagcagaaaggattccgccttgttggtctgaaattcatgcaagcttccgaagatcttctcaaggaacactacgttgacctgaaggaccgtccattctttgccggcctggtgaaatacatgcactcagggccggtagttgccatggtctgggaggggctgaatgtggtgaagacgggccgagtcatgctcggggagaccaaccctgcagactccaagcctgggaccatccgtggagacttctgcatacaagttggcaggaacattatacatggcrgtgattctgtggagagtgcagagaaggagatcggcttgtggtttcaccctgaggaactggtagattacacgagctgtgctcagaactggatctatgaatgacaggagggcagaccacattgcttttcacatccatttcccctccttcccatgggcagaggaccaggctgtaggaaatctagttatttacaggaacttcatcataatttggagggaagctcttggagctgtgagttctccctgtacagtgttaccatccccgaccatctgattaaaatgcttcctcccagcataggattcattgagttggttacttcatattgttgyattgcttttttttccttcttttcatgtacactgaataacctgacctaatagagagtgtaaatactataaaaatgatttattttgagrtctcacatacacacaggcattctttgcctgcccttcttaacccccgcatcccttccactcttggcactgagctattcaacaggcatctatggagcatgtgctacgtggccaagactggactaggtgcagaggattcatcagaaatgaaagaaaacatgagggctgggtgtgctggcttgtgcttgtgataccagctacttgggaggctgagatgggagaccagcctgggtarcatagcragaccctgtctcactaa

SEQ ID NO: 2926 - DNA, 3587 bp, Homo sapiens
tgcgcagaacgctccagacgctgagaggcaggaggcactagggatcgtccgcaggattgggactgatacagaggccgccacggagcccgccggagccaccgttcctgctgctgccgccgctgcccgaatcggaaccgtcgggccgcagccgccggcaatgccgcgaaggaagaggaatgcaggcagtagttcagatggaaccgaagattccgatttttctacagatctcgagcacacagacagttcagaaagtgatggcacatcccgacgatctgctcgagtcacccgctcctcagccaggctaagccagagttctcaagattccagtcctgttcgaaatctgcagtcttttggcactgaggagcctgcttactctaccagaagagtgacccgtagtcagcagcagcctaccccagtgacaccgaaaaaataccctcttcggcagactcgttcatctggttcagaaactgagcaagtggttgatttttcagatagagaaactaaaaatacagctgatcatgatgagtcaccgcctcgaactccaactggaaatgcgccttcttctgagtctgacatagacatctccagccccaatgtatctcacgatgagagcattgccaaggacatgtccctgaaggactcaggcagtgatctctctcatcgccccaagcgccgtcgcttccatgaaagctacaacttcaatatgaagtgtcctacaccaggctgtaactctctaggacaccttacaggaaaacatgagagacatttctccatctcaggatgcccactgtatcataacctctcagctgacgaatgcaaggtgagagcacagagccgggataagcagatagaagaaaggatgctgtctcacaggcaagatgacaacaacaggcatgcaaccaggcaccaggcaccaacggagagrcagcttcgatataaggaaaaagtggctgaactcaggaagaaaagaaattctggactgagcaaagaacagaaagagaaatatatggaacacagacagacctatgggaacacacgggaacctcttttagaaaacctgacaagcgagtatgacttggatcttttccgaagagcacaagcccgggcttcagaggatttggagaagttaaggctgcaaggccaaatcacagagggaagcaacatgattaaaacaattgcttttggccgctatgagcttgatacctggtatcattctccatatcctgaagaatatgcacggctgggacgtctctatatgtgtgaattctgtttaaaatatatgaagagccaaacgatactccgccggcacatggccaaatgtgtgtggaaacacccacctggtgatgagatatatcgcaaaggttcaatctctgtgtttgaagtggatggcaagaaaaacaagatctactgccaaaacctgtgcctgttggccaaactttttctggaccacaagacattatattatgatgtggagcccttcctgttctatgttatgacagaggcggacaacactggctgtcacctgattggatatttttctaaggaaaagaattcattcctcaactacaacgtctcctgtatccttactatgcctcagtacatgagacagggctatggcaagatgcttattgatttcagttatttgctttccaaagtcgaagaaaaagttggctccccagaacgtccactctcagatctggggcttataagctatcgcagttactggaaagaagtacttctccgctacctgcataattttcaaggcaaagagatttctatcaaagaaatcagtcaggagacggctgtgaatcctgtggacattgtcagcactctgcaagcccttcagatgctcaaatactggaagggaaaacacctagttttaaagagacaggacctgattgatgagtggatagccaaagaggccaaaaggtccaactccaataaaaccatggatcccagctgcttaaaatggacccctcccaagggcacttaaagtgacctgtcattccgagccagcgaaccccagcagtaggaatccgtaccctagggatctgtctgtcatttctctgttgctcttgtgattggcaagtacagtatcctttgggaaggccatccccctcaggactgtcctggctccgacctttgtgtacactgcagacgctggttctgaggaactgttgtttcggcctcagtgaggttgcctggatgggatctgtattagacttgagtgcaggtctctcagcactgacccaaggagttctgttatggtactgtacctgtccagtcactggttctctcctcatgtcctctcgccccatgaggttgtgttgtgtcttctaagcgtggtactagtgcttgccacctggtcaccagacctccaaatatggctgccaccaccaggacctttccagttactccttatatgtgtgttctatggaggggcagggaaaaggtggcacttgtgagtgtgtgtggattggcagggggtccattcactttgggttccatcttgctttaaatttcttcattttgattaagagacctctttttgatctgtattgggctaaccagagccaaatacttttgaagagtttcccagggactagtcatggtaatagcatataattgatctgaatgagatggagagaagaatgaaggggtggtggttctgggtttgatttgagttcacctgtgggcagtgggcagtgggcagtgtcttggtgaaagggaacggatactactttttgcctcaccgtaaagtactcactagtaaatatttccttctctctttactcccactttttacgtttgcaggtgccaaagtaatgtccacttttccctttcatgctgcatattaactggttaattatactgcagaaaccttttcacctccactagtctgatacagtacatctgtacttccatataccttgcactgattttgtctgagtgccctgggagaagtagaaaatgattgaaagtgacttccgtatctcagcccatgactcagcaaggcagaatggccacccctgccaaagtttgcttctcttttcaacagtgcctcaccctccctctaggattaaagtgcttctgcccttccacgaactcctcctccatttcctttttgggatttgtcaccatccttctattctctggtcttctatttttggtgttgttcaagtgaaggaagagatgttccctctaatttctctctagcccattataacctgctatcttggggcaacttttgatgtatgacatgtcacccttcccaacttggtctcctccaacatgctgtcttcatgtggagccctcaccacaatccctgactccggtcatttgtgcctttctcttgtcatctctgtacactacttatattcactgtgggttgggggagctaattttaagcatgttcagtggcagctcccctccagtttcagtgtcactgttaaaatttatcaaaaagcaacttcactaggggttttcttaagggataaaggccttttacagaagctaaacccttccccacatgtggtagaatgtgctcttctatatctactcctcaataaagcatgttctctgctcaa

SEQ ID NO: 2927 - DNA, 4367 bp, Homo sapiens
gtagaagaagaaaggtgccactccggcatgaagacagactcgcttagtcgccagtcacttaagctgagtgcattgtgatttccaataattgaggcagtggttctaaaagctgtctacattaatgaaaagagcaatgtggccagcttgactaagccgccagcgcacagcgcggcaggacgcgcccgggtctcagcggacttgtgcatgttagctgtgtagatttatgtgagggcttgtaaaactctggtcttgtaaactagtcttaagcgcttttaatatggagacagatkagagcccctctccgctccygtgtgggcccgcaggagaagcggtgatggagagccgagctcgccccttccaagcgctgccccgtgagcagtctccaccacctcccctgcaaacgtccagtggtgcagaggtaatggacgttggctctggtggtgatggacagtccgaactccctgctgaggaccccttcaacttctacggagcttctcttctctccaaaggatccttctctaagggccgcctcctcatagacccgaactgtagtggccacagcccgcgcaccgcccggcacgcacctgcggtccggaagttctcccctgaccttaagttgcttaaggatgtaaagattagcgtgagctttaccgagagctgcaggagtaaggacaggaaggtgctgtacacaggagcagagcgcgacgtgcgggcggagtgcggtctgctccttagccctgtcagtggggacgtgcatgcttgtccctttggcgggagtgttggtgacggggtaggcrtagggggtgagagtgctgataagaaggatgaggagaatgagctggatcaggaaaagagagtggagtatgcagtgctcgatgagttagaagattttactgacaatttggagctagatgaagaaggagcaggcgggttcacggctaaagcratcgttcagagagacagagtggatgaagaggccttgaatttcccctacgaggatgactttgacaaygatgtggatgctctgctggaagaaggcctttgtgcccccaaaaagaggcgaacagaggaaaaatatggcggagacagcgaccatccgtccgatggagagacaagtgtgcagccgatgatgaccaagattaaaacagtgctcaaaagtcgtggccgcccacctacagagccgctgcccgacgggtggatcatgacattccataactctggagtcccggtgtacctacacagagagtctcgggtggtcacctggtccaggccatacttcttgggaacgggaagcatacggaaacacgaccctcctctgagtagcatcccttgtctgcattataagaaaatgaaggacaacgaggaacgggagcaaagcagtgacctcacccctagtggggatgtgtcccccgtcaagcccctgagccgatctgcagagctggagtttcccctggatgagcctgactctatgggtgctgacccggggcccccggacgagaaagacccactaggggctgaggcmgcccctggggccctggggcaggtgaaggccaaagtcgaggtgtgcaaagatgaatccgttgatctcgaggaatttcgaagctacctggagaagcgttttgactttgagcaagttactgtgaaaaaattcaggacttgggctgagcggcggcaattcaatcgggaaatgaagcggaagcaggcggagtccgagaggcccatcttgccagccaatcagaagctcattactttatcagtgcaagatgcacccacaaagaaagagtttgttattaaccccaacgggaaatccgaggtctgcatcctgcacgagtacatgcagcgtgtcctcaaggtccgccctgtctataatttctttgaatgtgagaacccaagtgagccttttggtgcctcggtgaccattgatggtgtgacttacggatctggaactgcaagcagcaaaaaacttgcgaagaataaagctgcccgagctacactggaaatcctcatccctgactttgttaaacagacctctgaagagargcccaaagacagtgaagaactcgagtattttaaccacatcagcatcgaggactcgcgggtctacgagctgaccagcaaggctgggctgttgtctccatatcagatcctccacgagtgccttaaaagaaaccatgggatgggtgacacgtctatcaagtttgaagtggttcctgggaaaaaccagaagagtgaatacgtcatggcgtgtggcaagcacacagtgcgcgggtggtgtaagaacaagagagttggaaagcagttagcctcacagaagatccttcagctgctgcacccacatgtcaagaactgggggtctttactgcgcatgtatggccgtgagagcagcaagatggtcaagcaggagacatcggacaagagtgtgattgagctgcagcagtatgccaagaagaacaagcccaacctgcacatcctcagcaagctccaagaggagatgaagaggctagctgaggaaagggaggagactcgaaagaagcccaagatgtccattgtggcgtccgcccagcctggcggtgagcccctgtgcaccgtggacgtgtgagggaggtggcacgggccagggcgcgggggccgccagccgcacttctgaggagaccagcagtcatgcatcgtgcaccacagtgtcaggcctccaacccaygctccttccctgtggccaacctgtgggcccggccttagggtggaggctttagtgtacagggacagccatggccacacagcacacatgtggagcagcggctctccctggaaagctccaggcctgaatggatggactcagcgactgcaccagtggcagctggtgactgtggacagtggtggaccctgcttctgtgcacctgctgcaggctctttttatgaaggctttcatgaattttagtatgtaatacgcactgacgacacatgatgcttggatgacagatgagaggggatggctgagtcctgtggctggcccgtgatgccaggtggcccatgtgcccagggcgcctgcagggctgctacagggacctggtcaggaggtgcacatggtgccctgccctcacccaccctctgtgtttccccttctttgaaaaggtagaagagaaaggaatattttaaacctttttggcttaaacagaattttagcatcagaactagctttctgggattggaggcaaaccatcaaggtggtccctctccagtctggacacgatgccagcaaggatgacgtcctgccacctcctggagttaccctggcctcctagggtccctttttctgatgaagtcttaatkccctaaaagcgcctctttggacactgaggccctctctgcctttcctggcctccggcaacagttttttacaaagattttttgcagtcgagtccatatgtccacccattgatttttaaagcttttgtgatattttagcattttgaaagactttcacagtgagartagaaggtagatttggaatcatrcattttagcaagtggacttgttgaaacaggaagcaagrgccttcagtgtagcccattcttgatccagagctgttgcctgtgacagcggtttctctggatgtcaaaggcagctgcctggtgcccagcttgcttctcgactggtggcccctatgggtgggtgtgcgatggaaatgtgttcctgccggagtctgaggcaccagggtgtgctcaaaggctggccctggtggtggactggcacctgtgcagagtgccgtgtgcttgtggtgcgccatctgaagcaagagtccagcgttctgccgtgtctgtcccccaccatgccccctacaggcggtactgayggcgcttttttttttttttctgtcaggaaaacaatgttggcctgtgggccgcccacaacatatccttccctcactacctgtgtgaccaaggttggcttctgttgacctttaaaaawgaaaccctcaactcaaattgctataattagacacttgcttctgtcttgcctcctgtctgcagctgtgaatagtcatttgactgtgactgttgcccttagccagccagatgcgcctgtgaaccaaagcttcgtgcacatgtgttcccctaaaggttggggagcctcgctgtgtcttgctgttcccaggcaccaccacagcaggtgctgccatactcttgtggtctctgtgcgccccccccccccccmacccgtctgccaagcatgggtatgaatcgtgcacacagccatgcttcaaggccggggcaggggagcctgtgctgatgccatccagrgcactgggctgtgcctggaaggcgagccttgattgtctgaacacataaagcaaactgtccagaagggaa

SEQ ID NO: 2928 - DNA, 4468 bp, Homo sapiens
agcctggacaggctttccagatggctgcggcggtcggtcggtgaggctttcccggctgtggtttggctgcgggcggcttgggcagcccgcgggcgcctcaggtagaagaagaaaggtgccactccggcatgaagacagactcgcttagtcgccagtcacttaagctgagtgcattgtgatttccaataattgaggcagtggttctaaaagctgtctacattaatgaaaagagcaatgtggccagcttgactaagccgccagcgcacagcgcggcaggacgcgcccgggtctcagcggacttgtgcatgttagctgtgtagatttatgtgagggcttgtaaaactctggtcttgtaaactagtcttaagcgcttttaatatggagacagatkagagcccctctccgctccygtgtgggcccgcaggagaagcggtgatggagagccgagctcgccccttccaagcgctgccccgtgagcagtctccaccacctcccctgcaaacgtccagtggtgcagaggtaatggacgttggctctggtggtgatggacagtccgaactccctgctgaggaccccttcaacttctacggagcttctcttctctccaaaggatccttctctaagggccgcctcctcatagacccgaactgtagtggccacagcccgcgcaccgcccggcacgcacctgcggtccggaagttctcccctgaccttaagttgcttaaggatgtaaagattagcgtgagctttaccgagagctgcaggagtaaggacaggaaggtgctgtacacaggagcagagcgcgacgtgcgggcggagtgcggtctgctccttagccctgtcagtggggacgtgcatgcttgtccctttggcgggagtgttggtgacggggtaggcrtagggggtgagagtgctgataagaaggatgaggagaatgagctggatcaggaaaagagagtggagtatgcagtgctcgatgagttagaagattttactgacaatttggagctagatgaagaaggagcaggcgggttcacggctaaagcratcgttcagagagacagagtggatgaagaggccttgaatttcccctacgaggatgactttgacaaygatgtggatgctctgctggaagaaggcctttgtgcccccaaaaagaggcgaacagaggaaaaatatggcggagacagcgaccatccgtccgatggagagacaagtgtgcagccgatgatgaccaagattaaaacagtgctcaaaagtcgtggccgcccacctacagagccgctgcccgacgggtggatcatgacattccataactctggagtcccggtgtacctacacagagagtctcgggtggtcacctggtccaggccatacttcttgggaacgggaagcatacggaaacacgaccctcctctgagtagcatcccttgtctgcattataagaaaatgaaggacaacgaggaacgggagcaaagcagtgacctcacccctagtggggatgtgtcccccgtcaagcccctgagccgatctgcagagctggagtttcccctggatgagcctgactctatgggtgctgacccggggcccccggacgagaaagacccactaggggctgaggcmgcccctggggccctggggcaggtgaaggccaaagtcgaggtgtgcaaagatgaatccgttgatctcgaggaatttcgaagctacctggagaagcgttttgactttgagcaagttactgtgaaaaaattcaggacttgggctgagcggcggcaattcaatcgggaaatgaagcggaagcaggcggagtccgagaggcccatcttgccagccaatcagaagctcattactttatcagtgcaagatgcacccacaaagaaagagtttgttattaaccccaacgggaaatccgaggtctgcatcctgcacgagtacatgcagcgtgtcctcaaggtccgccctgtctataatttctttgaatgtgagaacccaagtgagccttttggtgcctcggtgaccattgatggtgtgacttacggatctggaactgcaagcagcaaaaaacttgcgaagaataaagctgcccgagctacactggaaatcctcatccctgactttgttaaacagacctctgaagagargcccaaagacagtgaagaactcgagtattttaaccacatcagcatcgaggactcgcgggtctacgagctgaccagcaaggctgggctgttgtctccatatcagatcctccacgagtgccttaaaagaaaccatgggatgggtgacacgtctatcaagtttgaagtggttcctgggaaaaaccagaagagtgaatacgtcatggcgtgtggcaagcacacagtgcgcgggtggtgtaagaacaagagagttggaaagcagttagcctcacagaagatccttcagctgctgcacccacatgtcaagaactgggggtctttactgcgcatgtatggccgtgagagcagcaagatggtcaagcaggagacatcggacaagagtgtgattgagctgcagcagtatgccaagaagaacaagcccaacctgcacatcctcagcaagctccaagaggagatgaagaggctagctgaggaaagggaggagactcgaaagaagcccaagatgtccattgtggcgtccgcccagcctggcggtgagcccctgtgcaccgtggacgtgtgagggaggtggcacgggccagggcgcgggggccgccagccgcacttctgaggagaccagcagtcatgcatcgtgcaccacagtgtcaggcctccaacccaygctccttccctgtggccaacctgtgggcccggccttagggtggaggctttagtgtacagggacagccatggccacacagcacacatgtggagcagcggctctccctggaaagctccaggcctgaatggatggactcagcgactgcaccagtggcagctggtgactgtggacagtggtggaccctgcttctgtgcacctgctgcaggctctttttatgaaggctttcatgaattttagtatgtaatacgcactgacgacacatgatgcttggatgacagatgagaggggatggctgagtcctgtggctggcccgtgatgccaggtggcccatgtgcccagggcgcctgcagggctgctacagggacctggtcaggaggtgcacatggtgccctgccctcacccaccctctgtgtttccccttctttgaaaaggtagaagagaaaggaatattttaaacctttttggcttaaacagaattttagcatcagaactagctttctgggattggaggcaaaccatcaaggtggtccctctccagtctggacacgatgccagcaaggatgacgtcctgccacctcctggagttaccctggcctcctagggtccctttttctgatgaagtcttaatkccctaaaagcgcctctttggacactgaggccctctctgcctttcctggcctccggcaacagttttttacaaagattttttgcagtcgagtccatatgtccacccattgatttttaaagcttttgtgatattttagcattttgaaagactttcacagtgagartagaaggtagatttggaatcatrcattttagcaagtggacttgttgaaacaggaagcaagrgccttcagtgtagcccattcttgatccagagctgttgcctgtgacagcggtttctctggatgtcaaaggcagctgcctggtgcccagcttgcttctcgactggtggcccctatgggtgggtgtgcgatggaaatgtgttcctgccggagtctgaggcaccagggtgtgctcaaaggctggccctggtggtggactggcacctgtgcagagtgccgtgtgcttgtggtgcgccatctgaagcaagagtccagcgttctgccgtgtctgtcccccaccatgccccctacaggcggtactgayggcgcttttttttttttttctgtcaggaaaacaatgttggcctgtgggccgcccacaacatatccttccctcactacctgtgtgaccaaggttggcttctgttgacctttaaaaawgaaaccctcaactcaaattgctataattagacacttgcttctgtcttgcctcctgtctgcagctgtgaatagtcatttgactgtgactgttgcccttagccagccagatgcgcctgtgaaccaaagcttcgtgcacatgtgttcccctaaaggttggggagcctcgctgtgtcttgctgttcccaggcaccaccacagcaggtgctgccatactcttgtggtctctgtgcgccccccccccccccmacccgtctgccaagcatgggtatgaatcgtgcacacagccatgcttcaaggccggggcaggggagcctgtgctgatgccatccagrgcactgggctgtgcctggaaggcgagccttgattgtctgaacacataaagcaaactgtccagaagggaa

SEQ ID NO: 2929 - DNA, 3496 bp, Homo sapiens
aagggcacatctaggcyccctgagagcacctcctttctgtgtctgttctcaggaatgctgttgagctctcctgttgcaggagcatgagcgccaggggctctggtgtctgaacagcgtgttttgcaggatgactttgacaaygatgtggatgctctgctggaagaaggcctttgtgcccccaaaaagaggcgaacagaggaaaaatatggcggagacagcgaccatccgtccgatggagagacaagtgtgcagccgatgatgaccaagattaaaacagtgctcaaaagtcgtggccgcccacctacagagccgctgcccgacgggtggatcatgacattccataactctggagtcccggtgtacctacacagagagtctcgggtggtcacctggtccaggccatacttcttgggaacgggaagcatacggaaacacgaccctcctctgagtagcatcccttgtctgcattataagaaaatgaaggacaacgaggaacgggagcaaagcagtgacctcacccctagtggggatgtgtcccccgtcaagcccctgagccgatctgcagagctggagtttcccctggatgagcctgactctatgggtgctgacccggggcccccggacgagaaagacccactaggggctgaggcmgcccctggggccctggggcaggtgaaggccaaagtcgaggtgtgcaaagatgaatccgttgatctcgaggaatttcgaagctacctggagaagcgttttgactttgagcaagttactgtgaaaaaattcaggacttgggctgagcggcggcaattcaatcgggaaatgaagcggaagcaggcggagtccgagaggcccatcttgccagccaatcagaagctcattactttatcagtgcaagatgcacccacaaagaaagagtttgttattaaccccaacgggaaatccgaggtctgcatcctgcacgagtacatgcagcgtgtcctcaaggtccgccctgtctataatttctttgaatgtgagaacccaagtgagccttttggtgcctcggtgaccattgatggtgtgacttacggatctggaactgcaagcagcaaaaaacttgcgaagaataaagctgcccgagctacactggaaatcctcatccctgactttgttaaacagacctctgaagagargcccaaagacagtgaagaactcgagtattttaaccacatcagcatcgaggactcgcgggtctacgagctgaccagcaaggctgggctgttgtctccatatcagatcctccacgagtgccttaaaagaaaccatgggatgggtgacacgtctatcaagtttgaagtggttcctgggaaaaaccagaagagtgaatacgtcatggcgtgtggcaagcacacagtgcgcgggtggtgtaagaacaagagagttggaaagcagttagcctcacagaagatccttcagctgctgcacccacatgtcaagaactgggggtctttactgcgcatgtatggccgtgagagcagcaagatggtcaagcaggagacatcggacaagagtgtgattgagctgcagcagtatgccaagaagaacaagcccaacctgcacatcctcagcaagctccaagaggagatgaagaggctagctgaggaaagggaggagactcgaaagaagcccaagatgtccattgtggcgtccgcccagcctggcggtgagcccctgtgcaccgtggacgtgtgagggaggtggcacgggccagggcgcgggggccgccagccgcacttctgaggagaccagcagtcatgcatcgtgcaccacagtgtcaggcctccaacccaygctccttccctgtggccaacctgtgggcccggccttagggtggaggctttagtgtacagggacagccatggccacacagcacacatgtggagcagcggctctccctggaaagctccaggcctgaatggatggactcagcgactgcaccagtggcagctggtgactgtggacagtggtggaccctgcttctgtgcacctgctgcaggctctttttatgaaggctttcatgaattttagtatgtaatacgcactgacgacacatgatgcttggatgacagatgagaggggatggctgagtcctgtggctggcccgtgatgccaggtggcccatgtgcccagggcgcctgcagggctgctacagggacctggtcaggaggtgcacatggtgccctgccctcacccaccctctgtgtttccccttctttgaaaaggtagaagagaaaggaatattttaaacctttttggcttaaacagaattttagcatcagaactagctttctgggattggaggcaaaccatcaaggtggtccctctccagtctggacacgatgccagcaaggatgacgtcctgccacctcctggagttaccctggcctcctagggtccctttttctgatgaagtcttaatkccctaaaagcgcctctttggacactgaggccctctctgcctttcctggcctccggcaacagttttttacaaagattttttgcagtcgagtccatatgtccacccattgatttttaaagcttttgtgatattttagcattttgaaagactttcacagtgagartagaaggtagatttggaatcatrcattttagcaagtggacttgttgaaacaggaagcaagrgccttcagtgtagcccattcttgatccagagctgttgcctgtgacagcggtttctctggatgtcaaaggcagctgcctggtgcccagcttgcttctcgactggtggcccctatgggtgggtgtgcgatggaaatgtgttcctgccggagtctgaggcaccagggtgtgctcaaaggctggccctggtggtggactggcacctgtgcagagtgccgtgtgcttgtggtgcgccatctgaagcaagagtccagcgttctgccgtgtctgtcccccaccatgccccctacaggcggtactgayggcgcttttttttttttttctgtcaggaaaacaatgttggcctgtgggccgcccacaacatatccttccctcactacctgtgtgaccaaggttggcttctgttgacctttaaaaawgaaaccctcaactcaaattgctataattagacacttgcttctgtcttgcctcctgtctgcagctgtgaatagtcatttgactgtgactgttgcccttagccagccagatgcgcctgtgaaccaaagcttcgtgcacatgtgttcccctaaaggttggggagcctcgctgtgtcttgctgttcccaggcaccaccacagcaggtgctgccatactcttgtggtctctgtgcgccccccccccccccmacccgtctgccaagcatgggtatgaatcgtgcacacagccatgcttcaaggccggggcaggggagcctgtgctgatgccatccagrgcactgggctgtgcctggaaggcgagccttgattgtctgaacacataaagcaaactgtccagaagggaa

SEQ ID NO: 2930 - DNA, 1462 bp, Homo sapiens
cgaggatgctacagcrgatggatgtcctgcccaaggcgagctgtcccgctcgggcagagggctggggccttggggacccgggactcatgcagaagagggcacctgcctcacttgagcaatagttgctcccactctcccaccccctgcgcctctcagaaagccacagagatgggcgtgcggctgatggtggatgccgagcagacctacttccagccggccatcagtcgcctgacgctggagatgcagcggaagttcaatgtggagaagctgctcatcttcaacacataccagtgctacctcaaggatgcctatgacaatgtgaccctggacrtggagctggctcaccgtgagggctggtgttttggggccaagccggtgcggggcgcatacctggcccaggagcgagcctgtgcrkcagagatcggatatgaggaccccatcaaccccatgtacgaggccaccaacaccatgtaccacaggtgcctggactacgtgctggaggagctgaagcacaacgccaaggccaaggtgatggtggcctcccacaatgaggacacagtgygcttcgcactgcgcaggatggaggagctgcgcttgcatcctactgtactttggacagctgctaggcatgtgtgaccagatcagcttcccgctggggccctggagaacagcagcctcgtgaagggtgcccgtcgggagcggcagctgctgtggctggagctcttgaggtggctccgaactggcaacctcttccatccccccgcccccgcccaggccatcaccacagctgcagccaaccccatcctcacacagattcaccttttttcaccccacacttgcagagctgctggaggtggagtcaggtgcctcccagccctgccaatggtgggggcactcaggtgtgggctgaccctgatacctgcctgggatagccgctggtaactgttaggaactttcctcggatgtgtgggcccaaggcccccacctctgtgacccccatgtccttggacctagaggattgtccaccttctcccaaggccagcccacatagcccgagcccctcggggagcagtggccgggctggggaggcctgcctggtcaataaaccactgttcctgcagctgagagccctttgccctcacacagggtcagctctgggcaacaaagagggagtggctcagacagggtcagagaagtctcatcccaaactctggcttccagcatcatctgttcctggaggccaggccctgcgcagacctggccacccagggtgctggacacccccaaccctgactccacaaggacccagcagggcccatgggcccaggccagcacggaggggactcatgcagatgcagaagccaagctccccaggtggccctggcatgcctccccgcagggctcctcctcaggccattcctgccaccctgagtcctctatcccagtgacctgcatcaggctc

SEQ ID NO: 2931 - DNA, 1981 bp, Homo sapiens
gctgtcttcatggagagcaggaacagagactttgggaagccagggggccttggcctcagccctgctggcagagggtccccaccatgtagctgaagtgccagggtgcttgtgaacttaagcggcccgggcgggtaccggcgtcccgccatggctctgcggcgcgtcttgcccgcgctgcgcccctacattccccgcttcgcgccgctgtccacggcgccggccgccagcgagcagcccgccgcgggcccaggggccgtgccaggacgtgggtcggccagggcagtgcggccgctggtgcccgccgtggacttcggcaacgcgtaggaggcgtactgcagctggcgaacctgggagctggcgcgcagcctgctggtgctgcgcttstgcgcctggcccgcgctgctggcgcgccacgagcaggaaagtgtcgcaaagatgggcatcgcatccagggctgagattgaggactggttcacggcagagaccctgggagtgtctggcactgtggacctgctggactggagcagcctcatcgacagcaggaccaagctgtccaagcacctggtagtccccaatggacagacaggacagctggagcccctgctgtcccggtttgctgaggaggaggagctacagatgacgaggatgctacagcrgatggatgtcctgcccaagaaagccacagagatgggcgtgcggctgatggtggatgccgagcagacctacttccagccggccatcagtcgcctgacgctggagatgcagcggaagttcaatgtggagaagctgctcatcttcaacacataccagtgctacctcaaggatgcctatgacaatgtgaccctggacrtggagctggctcaccgtgagggctggtgttttggggccaagccggtgcggggcgcatacctggcccaggagcgagcctgtgcrkcagagatcggatatgaggaccccatcaaccccatgtacgaggccaccaacaccatgtaccacaggtgcctggactacgtgctggaggagctgaagcacaacgccaaggccaaggtgatggtggcctcccacaatgaggacacagtgygcttcgcactgcgcaggatggaggagctgcgcttgcatcctactgtactttggacagctgctaggcatgtgtgaccagatcagcttcccgctggggccctggagaacagcagcctcgtgaagggtgcccgtcgggagcggcagctgctgtggctggagctcttgaggtggctccgaactggcaacctcttccatccccccgcccccgcccaggccatcaccacagctgcagccaaccccatcctcacacagattcaccttttttcaccccacacttgcagagctgctggaggtggagtcaggtgcctcccagccctgccaatggtgggggcactcaggtgtgggctgaccctgatacctgcctgggatagccgctggtaactgttaggaactttcctcggatgtgtgggcccaaggcccccacctctgtgacccccatgtccttggacctagaggattgtccaccttctcccaaggccagcccacatagcccgagcccctcggggagcagtggccgggctggggaggcctgcctggtcaataaaccactgttcctgcagctgagagccctttgccctcacacagggtcagctctgggcaacaaagagggagtggctcagacagggtcagagaagtctcatcccaaactctggcttccagcatcatctgttcctggaggccaggccctgcgcagacctggccacccagggtgctggacacccccaaccctgactccacaaggacccagcagggcccatgggcccaggccagcacggaggggactcatgcagatgcagaagccaagctccccaggtggccctggcatgcctccccgcagggctcctcctcaggccattcctgccaccctgagtcctctatcccagtgacctgcatcaggctc

SEQ ID NO: 2932 - DNA, 1996 bp, Homo sapiens
gtccggccagccgctggagtcgttaggtgcckccttgcttctgacgagccacacgtttgcttcttccctgtgttcccagctggagggacatgagtgtccctgggccgtcgtctccggacggggccctgacacggccaccctactgcctggaggccggggagccgacgcctggtttaagtgacacttctccagatgaagggttaatagaggacttgactatagaagacaaagcagtggagcaactggcagaaggattgctttctcattatttgccagatctgcagagatcaaaacaagccctccaggaactcaccttggacttaaagtatgatgttgaatatccttgatgaacattgatgcaaaaatcctcaataaaatactggcaaaccgaatccagcagcacatcaaaaagcttatccaccatgatcaagtaggcttcatccctgggatgcaaggctggttcaatatacgcaaatcaataaatgtaatccagcatataaacagagccaaagacaaaaaccacatgattatctcaatagatgcaaaaagcctttgacaaaattcaacaacccttcatgctaaaaactctcaataaattaggtattgatgggacgtatttcaaaataatagctatctatgacaaacccacagccaatatcatactgaatgggcaaaaactggaagcattccctttgaaaactggcacaagacagggatgccctctctcaccgctcctattcaacatagtgttggaagttctggccagggcaatcaggcaggagaaggaaataaagggtattcaattaggaaaagaggaagtcaaattgtccctgtttgcagacgacatgattgtttatctagaaaaccccatcgtctcagcccaaaatctccttaagctgataagcaacttcagcaaagtctcaggatacaaaatcaatgtacaaaaatcacaagcattcttatacaccaacaacagacaaacagagagccaaatcatgagtgaactcccattcacaattgcttcaaagagaataaaatacctaggaatccaacttacaagggatgtgaaggacctcttcaaggagaactacaaaccactgctcaaggaaataaaagaggatacaaacaaatggaagaacattccatgctcatgggtaggaagaatcaatatcatgaaaatggccatactgcccaaggtaatttacagattcaatgccatccccatcaagctaccaatgactttcttcacagaattggaaaaaactactttaaagttcatatggaaccaaaaaagagcctgcatcgccaagtcaatcctaagccaaaagaacaaagctggaggcatcacactacctgacttcaaactatactacaaggctacagtaaccaaaacagcatggtactggtaccaaaacagagatataaatcaatggaacagaacagagccctcagaaataatgccgcatatctacaactatctgatctttgacaaacctgagaaaaacaagcaatggggaaaggattccctatttaataaatggtgctgggaaaactggctagccatatgtagaaagctgaaactggatcccttccttacaccttatacaaaaatcaattcaagatggattaaagatttaaacgttagacctaaaaccataaaaaccctagaagaaaacctaggcattaccattcaggacataggcatgggcaaggacttcatgtccaaaacaccaaaagcaatggcaacaaaagccaaaattgacaaatgggatctaattaaactaaagagcttctgcacagcaaaagaaactaccatcagagtgaacaggcaacctacaacatgggagaaaattttcgcaacctactcatctgacaaagggctaatacccagaatctacaatgaactcaaacaaatttacaagaaaaaaacaaccccatcaaaaagtgggcgaaggacatgaacagacacttctcaaaagaagacatttatgcagcc

SEQ ID NO: 2933 - DNA, 1912 bp, Homo sapiens
acactgcgtccggggccagacgacgatatcagcgcggggtccccacaacgccatggggcagagccaactctcgagcgcgtgatcgaagccygcagttttttcgccyccgtcacttccgggtgcgacaatctcttctgtccggccagccgctggagtcgttaggtgcckccttgcttctgacgagccacacgtttgcttcttccctgtgttcccagctggagggacatgagtgtccctgggccgtcgtctccggacggggccctgacacggccaccctactgcctggaggccggggagccgacgcctggtttaagtgacacttctccagatgaagggttaatagaggacttgactatagaagacaaagcagtggagcaactggcagaaggattgctttctcattatttgccagatctgcagagatcaaaacaagccctccaggaactcactttgctgaggctaaacactatcatgccaagttggtgaatataagaaaagagatgctgatgcttcatgaaaaaacatcaaagttaaaaaaaagagcacttaaactgcagcagaagaggcaaaaagaagagttggaaagggagcagcaacgagagaaggagtttgaaagagaaaagcagttaactgccagaccagccaaaaggatgtgaaaagttgtgtttgtgtgttttcttctcctgtcccatatttgggttatgatgactcaagtgtagactgaagttgaggtagtgccttatgccattatgtcatatgttgaaatccttattccggtattactgtgtctccatgccttttttccaagtagcagacgtcatgttgcatggtttttgatatttatatgtaagtttttcaaattttgcttaattttaaaatttattattttgatcttgaattatttataaactggaaagtggtttgattattgtgagtcaaaactctaagtggttaaaaattagtatgaattttttagcttcttaatgaatatggatttaaaactctccagttcttattttatgaaatgacttgcctttctggtaatacaatgctgattttttagtaattgccttttcattactttgttaagaagaaatgccagctgtttaatcacacctacccctggaaaagaggtaaaccttttgaacagttgaatttcatcagaagctctatagctttttggtgagaggaagtgatactctttattacaagaaacaaggaattaacaaaaataaggaacttgttgctacctttcttttctgttgaacattaaaaataatttggtttgtggactgggcatggtggcttatggaaaagaggtgagcctttgtgaagaacataatggaaaagtgcatgtacgggaaataacagcactttaggtgtagttcaggtgagcaagatgccagatagtttctactaaccatatactctttctgcttcttagcgtcgttgtcactgcttctgtggcttttgggttcaaagtagattatatatattcctaaagcttggtggaggtagtggagctatcacacactcaaatgagcttgtatatttataatacaatatagtattatagtaacagttatcatacactgagatatagtttctgtgcttgtaaaaaattcttgaagtgaggccgggtgcggtggctcatgcctgtaatcccaacgctttgggacgccgaggcgggtggatcatgaggtcaaaagattgagaccatcctggccaacatggtgaaaccccgtctctactagaaatacaaaaattagctgggtgtgggggcgtgcgcctgtagtcccagctacttgggaggctgaggcaggagaattgcttgaacccaggaggcagaggttgcagtaagccaagatcgtgccactgcactccagccttggtgacagagcaagactccgtc

SEQ ID NO: 2934 - DNA, 657 bp, Homo sapiens
acactgcgtccggggccagacgacgatatcagcgcggggtccccacaacgccatggggcagagccaactctcgagcgcgtgatcgaagccygcagttttttcgccyccgtcacttccgggtgcgacaatctcttctgtccggccagccgctggagtcgttaggtgcckccttgcttctgacgagccacacgtttgcttcttccctgtgttcccagctggagggacatgagtgtccctgggccgtcgtctccggacggggccctgacacggccaccctactgcctggaggccggggagccgacgcctggtttaagtgacacttctccagatgaagggttaatagaggacttgactatagaagacaaagcagtggagcaactggcagaaggattgctttctcattatttgccagatctgcagagatcaaaacaagccctccaggaactcacaaccaagttgtattgttagacacactggaacaagagatttcaaaatttaaagaatgtcattctatgttggatattaatgctttgtttgctgaggctaaacactatcatgccaagttggtgaatataagaaaagagatgctgatgcttcatgaaaaaacatcaaagttaaaagaattcaaggacgaagatatcaatgaccagcacagag

SEQ ID NO: 2935 - DNA, 981 bp, Homo sapiens
gggcgcgcaaggggcgagtctktccagccggcagcaccccaggccggatggacgcttgttcctggttctgtgccccgtgagcgctcaacgccctgcctgatcctgcctgaagatggtgccactggtggctgtggtatcagggccccgtgcccagctctttgcctgcctgctcaggctgggcactcagcaggtcggcccccttcagctgcacaccggggccagccatgcggccaggaaccattatgaggtgctggtgctgggtgggggcagtggcggaatcaccatggctgcccgcatgaagaggaaagtgggtgcagagaatgtggccattgttgagcccagtgagagacatttctaccagccaatctggacactggtgggtgctggtgccaaacaattgtcctcatctggtcgtcccacggcaagtgtgattccatctggtgtagaatggatcaaagctagagtgactgagttgaacccagacaagaactgcattcacacagatgacgacgagaagatctcctaccgatatcttattattgctctcggaatccagctggactatgagaagattaaaggcctacctgaaggtttcgctcatcccaaaatagggtcgaattattcagttaagactgtagagaagacatggaaagctctgcaggacttcaaagagggcaatgccatcttcaccttcccaaatactccagtgaagtgtgctggagcccctcagaagatcatgtacttatcagaagcctacttcaggaaggtatgcttcctttctggggacagagatgagcagggcggacagtgctaattcactgattgcaagaattccattttatctctattgtaatcccttttttatctyggaatttttattacatgtgtacaaaattagttaactggaagtttataaaatataaaagaggagaaaatcactcatgatccaattgctttaataaagctgcagttttcaatttg

SEQ ID NO: 2936 - DNA, 1677 bp, Homo sapiens
atgttccaggaggcagccagcttgtaactagcaagcattgctatgtttgtatttctgatacattttctaaaagagatcgcagaacaaagggtcctgactcaccaaggatacagcctgatcctgcctgaagatggtgccactggtggctgtggtatcagggccccgtgcccagctctttgcctgcctgctcaggctgggcactcagcaggtcggcccccttcagctgcacaccggggccagccatgcggccaggaaccattatgaggtgctggtgctgggtgggggcagtggcggaatcaccatggctgcccgcatgaagaggaaagtgggtgcagagaatgtggccattgttgagcccagtgagagacatttctaccagccaatctggacactggtgggtgctggtgccaaacaattgtcctcatctggtcgtcccacggcaagtgtgattccatctggtgtagaatggatcaaagctagagtgactgagttgaacccagacaagaactgcattcacacagatgacgacgagaagatctcctaccgatatcttattattgctctcggaatccagctggactatgagaagattaaaggcctacctgaaggtttcgctcatcccaaaatagggtcgaattattcagttaagactgtagagaagacatggaaagctctgcaggacttcaaagagggcaatgccatcttcaccttcccaaatactccagtgaagtgtgctggagcccctcagaagatcatgtacttatcagaagcctacttcaggaagacagggaagcgatccaaggccaatatcattttcaacacttctcttggagccattttcggggttaagaagtatgcagatgccctgcaggagatcatccaggagcggaacctcactgttaactacaagaaaaacctcaytgaagtccgagccgataaacaagaggctgtatttgagaacctggacaaaccaggagagacccaagtgatttcatatgaaatgcttcatgtcacacctccaatgagcccaccagatgtcctcaagaccagtcctgtggctgatgctgctggttgggtggatgtggataaagaaactctgcaacacaggaggtacccaaatgtgtttgggattggggactgcaccaaccttcctacgtcaaagaccgctgctgcagtagctgcccagtcaggaatacttgataggacaatttctgtaattatgaagaatcaaacaccaacaaagaagtatgatggctacacatcatgtccactggtgaccggctacaaccgtgtgattcttgctgartttgactacaaagcagagccrctagaaaccttcccctttgatcaaagcaaagagcgcctttccatgtatctcatgaaagctgacctgatgcctttcctgtattggaatatgatgctaaggggttactggggaggaccagcgtttctgcgcaagttgtttcatctaggtatgagttaaggatggctcagcacttgctcatcttggatggcttytgggccaaaactkcagtcactgaatgaccaagagcagcacgaaggacttggaacctatccttgtaaagagttccttgatgggtaatggtgaccaaatgcctcccttttcagtacctttgaacagcaaccatgtgggctactcatgatgggcttgattct

SEQ ID NO: 2937 - DNA, 1566 bp, Homo sapiens
gggagcgaaggtttttgctgcgccaacgcagtgaccgaaggctccgctcacgccyggcctgatcctgcctgaagatggtgccactggtggctgtggtatcagggccccgtgcccagctctttgcctgcctgctcaggctgggcactcagcaggtcggcccccttcagctgcacaccggggccagccatgcggccaggaaccattatgaggtgctggtgctgggtgggggcagtggcggaatcaccatggctgcccgcatgaagaggaaagtgggtgcagagaatgtggccattgttgagcccagtgagagacatttctaccagccaatctggacactggtgggtgctggtgccaaacaattgtcctcatctggtcgtcccacggcaagtgtgattccatctggtgtagaatggatcaaagctagagtgactgagttgaacccagacaagaactgcattcacacagatgacgacgagaagatctcctaccgatatcttattattgctctcggaatccagctggactatgagaagattaaaggcctacctgaaggtttcgctcatcccaaaatagggtcgaattattcagttaagactgtagagaagacatggaaagctctgcaggacttcaaagagggcaatgccatcttcaccttcccaaatactccagtgaagtgtgctggagcccctcagaagatcatgtacttatcagaagcctacttcaggaagacagggaagcgatccaaggccaatatcattttcaacacttctcttggagccattttcggggttaagaagtatgcagatgccctgcaggagatcatccaggagcggaacctcactgttaactacaagaaaaacctcaytgaagtccgagccgataaacaagaggctgtatttgagaacctggacaaaccaggagagacccaagtgatttcatatgaaatgcttcatgtcacacctccaatgagcccaccagatgtcctcaagaccagtcctgtggctgatgctgctggttgggtggatgtggataaagaaactctgcaacacaggaggtacccaaatgtgtttgggattggggactgcaccaaccttcctacgtcaaagaccgctgctgcagtagctgcccagtcaggaatacttgataggacaatttctgtaattatgaagaatcaaacaccaacaaagaagtatgatggctacacatcatgtccactggtgaccggctacaaccgtgtgattcttgctgartttgactacaaagcagagccrctagaaaccttcccctttgatcaaagcaaagagcgcctttccatgtatctcatgaaagctgacctgatgcctttcctgtattggaatatgatgctaaggtaagtgcactgcctggttcctggatgaggaaagggatttgtagcacatctccacccaaaggggatgcagcctcttttcttcattattagcagtgaccaagtgttctgtcttccatgctctaggccctcttttgctgctggataaataataatagtaaatcactttcacataccaagtactctatcatctgctacct

SEQ ID NO: 2938 - DNA, 1804 bp, Homo sapiens
ggtttttgctgcgccaacgcagtgaccgaaggctccgctcacgccyggtagaggcgggtttcaccatgttgcccagctggtctcgaactcctggcctcaaatgatccgcacacttcggccttccaaagtgctgggattacacgagtgagccaccgcgctggaccagaacaatgcttttttaaagcctgatcctgcctgaagatggtgccactggtggctgtggtatcagggccccgtgcccagctctttgcctgcctgctcaggctgggcactcagcaggtcggcccccttcagctgcacaccggggccagccatgcggccaggaaccattatgaggtgctggtgctgggtgggggcagtggcggaatcaccatggctgcccgcatgaagaggaaagtgggtgcagagaatgtggccattgttgagcccagtgagagacatttctaccagccaatctggacactggtgggtgctggtgccaaacaattgtcctcatctggtcgtcccacggcaagtgtgattccatctggtgtagaatggatcaaagctagagtgactgagttgaacccagacaagaactgcattcacacagatgacgacgagaagatctcctaccgatatcttattattgctctcggaatccagctggactatgagaagattaaaggcctacctgaaggtttcgctcatcccaaaatagggtcgaattattcagttaagactgtagagaagacatggaaagctctgcaggacttcaaagagggcaatgccatcttcaccttcccaaatactccagtgaagtgtgctggagcccctcagaagatcatgtacttatcagaagcctacttcaggaagacagggaagcgatccaaggccaatatcattttcaacacttctcttggagccattttcggggttaagaagtatgcagatgccctgcaggagatcatccaggagcggaacctcactgttaactacaagaaaaacctcaytgaagtccgagccgataaacaagaggctgtatttgagaacctggacaaaccaggagagacccaagtgatttcatatgaaatgcttcatgtcacacctccaatgagcccaccagatgtcctcaagaccagtcctgtggctgatgctgctggttgggtggatgtggataaagaaactctgcaacacaggaggtacccaaatgtgtttgggattggggactgcaccaaccttcctacgtcaaagaccgctgctgcagtagctgcccagtcaggaatacttgataggacaatttctgtaattatgaagaatcaaacaccaacaaagaagtatgatggctacacatcatgtccactggtgaccggctacaaccgtgtgattcttgctgartttgactacaaagcagagccrctagaaaccttcccctttgatcaaagcaaagagcgcctttccatgtatctcatgaaagctgacctgatgcctttcctgtattggaatatgatgctaaggggttactggggaggaccagcgtttctgcgcaagttgtttcatctaggtatgagttaaggatggctcagcacttgctcatcttggatggcttytgggccaaaactkcagtcactgaatgaccaagagcagcacgaaggacttggaacctatccttgtaaagagttccttgatgggtaatggtgaccaaatgcctcccttttcagtacctttgaacagcaaccatgtgggctactcatgatgggcttgattctttgggaataataaaatgaaataatacttttaytttctgaataaaagtttgtcactg

SEQ ID NO: 2939 - DNA, 1876 bp, Homo sapiens
ctgcggggccgcccttcagggcgcgcaaggggcgagtctktccagccggcagcaccccaggccggatggacgcttgttcctggttctgtgccccgtgagcgctcaacgccctgcctgatcctgcctgaagatggtgccactggtggctgtggtatcagggccccgtgcccagctctttgcctgcctgctcaggctgggcactcagcaggtcggcccccttcagctgcacaccggggccagccatgcggccaggaaccattatgaggtgctggtgctgggtgggggcagtggcggaatcaccatggctgcccgcatgaagaggaaagtgggtgcagagaatgtggccattgttgagcccagtgagagacatttctaccagccaatctggacactggtgggtgctggtgccaaacaattgtcctcatctggtcgtcccacggcaagtgtgattccatctggtgtagaatggatcaaagctagagtgactgagttgaacccagacaagaactgcattcacacagatgacgacgagaagatctcctaccgatatcttattattgctctcggaatccagctggactatgagaaggttttcctgaaaggagcttggttaccactttacggcaacttttccatcaacgacagcttcttaaaactagagaaaactaatgaaggtgataagacatcaactgcttgtttctgcttgtttatctcttggataattaaaggcctacctgaaggtttcgctcatcccaaaatagggtcgaattattcagttaagactgtagagaagacatggaaagctctgcaggacttcaaagagggcaatgccatcttcaccttcccaaatactccagtgaagtgtgctggagcccctcagaagatcatgtacttatcagaagcctacttcaggaagacagggaagcgatccaaggccaatatcattttcaacacttctcttggagccattttcggggttaagaagtatgcagatgccctgcaggagatcatccaggagcggaacctcactgttaactacaagaaaaacctcaytgaagtccgagccgataaacaagaggctgtatttgagaacctggacaaaccaggagagacccaagtgatttcatatgaaatgcttcatgtcacacctccaatgagcccaccagatgtcctcaagaccagtcctgtggctgatgctgctggttgggtggatgtggataaagaaactctgcaacacaggaggtacccaaatgtgtttgggattggggactgcaccaaccttcctacgtcaaagaccgctgctgcagtagctgcccagtcaggaatacttgataggacaatttctgtaattatgaagaatcaaacaccaacaaagaagtatgatggctacacatcatgtccactggtgaccggctacaaccgtgtgattcttgctgartttgactacaaagcagagccrctagaaaccttcccctttgatcaaagcaaagagcgcctttccatgtatctcatgaaagctgacctgatgcctttcctgtattggaatatgatgctaaggggttactggggaggaccagcgtttctgcgcaagttgtttcatctaggtatgagttaaggatggctcagcacttgctcatcttggatggcttytgggccaaaactkcagtcactgaatgaccaagagcagcacgaaggacttggaacctatccttgtaaagagttccttgatgggtaatggtgaccaaatgcctcccttttcagtacctttgaacagcaaccatgtgggctactcatgatgggcttgattctttgggaataataaaatgaaataatacttttaytttctgaataaaagtttgtcactgattgtgttcta

SEQ ID NO: 2940 - DNA, 1622 bp, Homo sapiens
taagaagcgcctttcgcctccctccatgattctgaggcctccccagccacatggtactcctgatcctgcctgaagatggtgccactggtggctgtggtatcagggccccgtgcccagctctttgcctgcctgctcaggctgggcactcagcaggtcggcccccttcagctgcacaccggggccagccatgcggccaggaaccattatgaggtgctggtgctgggtgggggcagtggcggaatcaccatggctgcccgcatgaagaggaaagtgggtgcagagaatgtggccattgttgagcccagtgagagacatttctaccagccaatctggacactggtgggtgctggtgccaaacaattgtcctcatctggtcgtcccacggcaagtgtgattccatctggtgtagaatggatcaaagctagagtgactgagttgaacccagacaagaactgcattcacacagatgacgacgagaagatctcctaccgatatcttattattgctctcggaatccagctggactatgagaagattaaaggcctacctgaaggtttcgctcatcccaaaatagggtcgaattattcagttaagactgtagagaagacatggaaagctctgcaggacttcaaagagggcaatgccatcttcaccttcccaaatactccagtgaagtgtgctggagcccctcagaagatcatgtacttatcagaagcctacttcaggaagacagggaagcgatccaaggccaatatcattttcaacacttctcttggagccattttcggggttaagaagtatgcagatgccctgcaggagatcatccaggagcggaacctcactgttaactacaagaaaaacctcaytgaagtccgagccgataaacaagaggctgtatttgagaacctggacaaaccaggagagacccaagtgatttcatatgaaatgcttcatgtcacacctccaatgagcccaccagatgtcctcaagaccagtcctgtggctgatgctgctggttgggtggatgtggataaagaaactctgcaacacaggaggtacccaaatgtgtttgggattggggactgcaccaaccttcctacgtcaaagaccgctgctgcagtagctgcccagtcaggaatacttgataggacaatttctgtaattatgaagaatcaaacaccaacaaagaagtatgatggctacacatcatgtccactggtgaccggctacaaccgtgtgattcttgctgartttgactacaaagcagagccrctagaaaccttcccctttgatcaaagcaaagagcgcctttccatgtatctcatgaaagctgacctgatgcctttcctgtattggaatatgatgctaaggggttactggggaggaccagcgtttctgcgcaagttgtttcatctaggtatgagttaaggatggctcagcacttgctcatcttggatggcttytgggccaaaactkcagtcactgaatgaccaagagcagcacgaaggacttggaacctatccttgtaaagagttccttgatgggtaatggtgaccaaatgcctcccttttcagtacctttgaacagcaaccatgtgggctactcatgatgggcttgattct

SEQ ID NO: 2941 - DNA, 1724 bp, Homo sapiens
cgggcggggccccagtccaggccttgagacccagaagggagcgaaggtttttgctgcgccaacgcagtgaccgaaggctccgctcacgccyggcctgatcctgcctgaagatggtgccactggtggctgtggtatcagggccccgtgcccagctctttgcctgcctgctcaggctgggcactcagcaggtcggcccccttcagctgcacaccggggccagccatgcggccaggaaccattatgaggtgctggtgctgggtgggggcagtggcggaatcaccatggctgcccgcatgaagaggaaagtgggtgcagagaatgtggccattgttgagcccagtgagagacatttctaccagccaatctggacactggtgggtgctggtgccaaacaattgtcctcatctggtcgtcccacggcaagtgtgattccatctggtgtagaatggatcaaagctagagtgactgagttgaacccagacaagaactgcattcacacagatgacgacgagaagatctcctaccgatatcttattattgctctcggaatccagctggactatgagaagattaaaggcctacctgaaggtttcgctcatcccaaaatagggtcgaattattcagttaagactgtagagaagacatggaaagctctgcaggacttcaaagagggcaatgccatcttcaccttcccaaatactccagtgaagtgtgctggagcccctcagaagatcatgtacttatcagaagcctacttcaggaagacagggaagcgatccaaggccaatatcattttcaacacttctcttggagccattttcggggttaagaagtatgcagatgccctgcaggagatcatccaggagcggaacctcactgttaactacaagaaaaacctcaytgaagtccgagccgataaacaagaggctgtatttgagaacctggacaaaccaggagagacccaagtgatttcatatgaaatgcttcatgtcacacctccaatgagcccaccagatgtcctcaagaccagtcctgtggctgatgctgctggttgggtggatgtggataaagaaactctgcaacacaggaggtacccaaatgtgtttgggattggggactgcaccaaccttcctacgtcaaagaccgctgctgcagtagctgcccagtcaggaatacttgataggacaatttctgtaattatgaagaatcaaacaccaacaaagaagtatgatggctacacatcatgtccactggtgaccggctacaaccgtgtgattcttgctgartttgactacaaagcagagccrctagaaaccttcccctttgatcaaagcaaagagcgcctttccatgtatctcatgaaagctgacctgatgcctttcctgtattggaatatgatgctaaggggttactggggaggaccagcgtttctgcgcaagttgtttcatctaggtatgagttaaggatggctcagcacttgctcatcttggatggcttytgggccaaaactkcagtcactgaatgaccaagagcagcacgaaggacttggaacctatccttgtaaagagttccttgatgggtaatggtgaccaaatgcctcccttttcagtacctttgaacagcaaccatgtgggctactcatgatgggcttgattctttgggaataataaaatgaaataatacttttaytttctgaataaaagtttgtcactgattgtgttcta

SEQ ID NO: 2942 - DNA, 1228 bp, Homo sapiens
acactgcgtccggggccagacgacgatatcagcgcggggtccccacaacgccatggggcagagccaactctcgagcgcgtgatcgaagccygcagttttttcgccyccgtcacttccgggtgcgacaatctcttctgtccggccagccgctggagtcgttaggtgcckccttgcttctgacgagccacacgtttgcttcttccctgtgttcccagctggagggacatgagtgtccctgggccgtcgtctccggacggggccctgacacggccaccctactgcctggaggccggggagccgacgcctgcattctttaaaatattcagacagaaccaagttgtattgttagacacactggaacaagagatttcaaaatttaaagaatgtcattctatgttggatattaatgctttgtttgctgaggctaaacactatcatgccaagttggtgaatataagaaaagagatgctgatgcttcatgaaaaaacatcaaagttaaaaaaaagagcacttaaactgcagcagaagaggcaaaaagaagagttggaaagggagcagcaacgagagaaggagtttgaaagagaaaagcagttaactgccagaccagccaaaaggatgtgaaaagttgtgtttgtgtgttttcttctcctgtcccatatttgggttatgatgactcaagtgtagactgaagttgaggtagtgccttatgccattatgtcatatgttgaaatccttattccggtattactgtgtctccatgccttttttccaagtagcagacgtcatgttgcatggtttttgatatttatatgtaagtttttcaaattttgcttaattttaaaatttattattttgatcttgaattatttataaactggaaagtggtttgattattgtgagtcaaaactctaagtggttaaaaattagtatgaattttttagcttcttaatgaatatggatttaaaactctccagttcttattttatgaaatgacttgcctttctggtaatacaatgctgattttttagtaattgccttttcattactttgttaagaagaaatgccagctgtttaatcacacctacccctggaaaagaggtaaaccttttgaacagttgaatttcatcagaagctctatagctttttggtgagaggaagtgatactctttattacaagaaacaaggaattaacaaaaataaggaacttgttgctacctttcttttctgt

SEQ ID NO: 2943 - DNA, 2275 bp, Homo sapiens
acactgcgtccggggccagacgacgatatcagcgcggggtccccacaacgccatggggcagagccaactctcgagcgcgtgatcgaagccygcagttttttcgccyccgtcacttccgggtgcgacaatctcttctgtccggccagccgctggagtcgttaggtgcckccttgcttctgacgagccacacgtttgcttcttccctgtgttcccagctggagggacatgagtgtccctgggccgtcgtctccggacggggccctgacacggccaccctactgcctggaggccggggagccgacgcctggtttaagtgacacttctccagatgaagggttaatagaggacttgactatagaagacaaagcagtggagcaactggcagaaggattgctttctcattatttgccagatctgcagagatcaaaacaagccctccaggaactcacacagaaccaagttgtattgttagacacactggaacaagagatttcaaaatttaaagaatgtcattctatgttggatattaatgctttgtttgctgaggctaaacactatcatgccaagttggtgaatataagaaaagagatgctgatgcttcatgaaaaaacatcaaagttaaaaaaaagagcacttaaactgcagcagaagaggcaaaaagaagagttggaaagggagcagcaacgagagaaggagtttgaaagagaaaagcagttaactgccagaccagccaaaaggatgtgaaaagttgtgtttgtgtgttttcttctcctgtcccatatttgggttatgatgactcaagtgtagactgaagttgaggtagtgccttatgccattatgtcatatgttgaaatccttattccggtattactgtgtctccatgccttttttccaagtagcagacgtcatgttgcatggtttttgatatttatatgtaagtttttcaaattttgcttaattttaaaatttattattttgatcttgaattatttataaactggaaagtggtttgattattgtgagtcaaaactctaagtggttaaaaattagtatgaattttttagcttcttaatgaatatggatttaaaactctccagttcttattttatgaaatgacttgcctttctggtaatacaatgctgattttttagtaattgccttttcattactttgttaagaagaaatgccagctgtttaatcacacctacccctggaaaagaggtaaaccttttgaacagttgaatttcatcagaagctctatagctttttggtgagaggaagtgatactctttattacaagaaacaaggaattaacaaaaataaggaacttgttgctacctttcttttctgttgaacattaaaaataatttggtttgtggactgggcatggtggcttatggaaaagaggtgagcctttgtgaagaacataatggaaaagtgcatgtacgggaaataacagcactttaggtgtagttcaggtgagcaagatgccagatagtttctactaaccatatactctttctgcttcttagcgtcgttgtcactgcttctgtggcttttgggttcaaagtagattatatatattcctaaagcttggtggaggtagtggagctatcacacactcaaatgagcttgtatatttataatacaatatagtattatagtaacagttatcatacactgagatatagtttctgtgcttgtaaaaaattcttgaagtgaggccgggtgcggtggctcatgcctgtaatcccaacgctttgggacgccgaggcgggtggatcatgaggtcaaaagattgagaccatcctggccaacatggtgaaaccccgtctctactagaaatacaaaaattagctgggtgtgggggcgtgcgcctgtagtcccagctacttgggaggctgaggcaggagaattgcttgaacccaggaggcagaggttgcagtaagccaagatcgtgccactgcactccagccttggtgacagagcaagactccgtctccaaaaaaaagaaaaaaaaatttcttgaagtggaatgatgtacaccaaatacccactttatagataattacagggatggtgaaaaattagtaaatagcttcacaaaagaggcagcgtgatacctttagtgttttctagaatttttttctggatattatatgtaagaatttattgtttgagggaaatacgaggtttcattgtttaaaatcaagagtgtattgtttactgttttacagtattatttaatatccaactggtctccaatctccattac

SEQ ID NO: 2944 - DNA, 1938 bp, Homo sapiens
acactgcgtccggggccagacgacgatatcagcgcggggtccccacaacgccatggggcagagccaactctcgagcgcgtgatcgaagccygcagttttttcgccyccgtcacttccgggtgcgacaatctcttctgtccggccagccgctggagtcgttaggtgcckccttgcttctgacgagccacacgtttgcttcttccctgtgttcccagctggagggacatgagtgtccctgggccgtcgtctccggacggggccctgacacggccaccctactgcctggaggccggggagccgacgcctgcctgatcctgcctgaagatggtgccactggtggctgtggtatcagggccccgtgcccagctctttgcctgcctgctcaggctgggcactcagcaggtcggcccccttcagctgcacaccggggccagccatgcggccaggaaccattatgaggtgctggtgctgggtgggggcagtggcggaatcaccatggctgcccgcatgaagaggaaagtgggtgcagagaatgtggccattgttgagcccagtgagagacatttctaccagccaatctggacactggtgggtgctggtgccaaacaattgtcctcatctggtcgtcccacggcaagtgtgattccatctggtgtagaatggatcaaagctagagtgactgagttgaacccagacaagaactgcattcacacagatgacgacgagaagatctcctaccgatatcttattattgctctcggaatccagctggactatgagaagattaaaggcctacctgaaggtttcgctcatcccaaaatagggtcgaattattcagttaagactgtagagaagacatggaaagctctgcaggacttcaaagagggcaatgccatcttcaccttcccaaatactccagtgaagtgtgctggagcccctcagaagatcatgtacttatcagaagcctacttcaggaagacagggaagcgatccaaggccaatatcattttcaacacttctcttggagccattttcggggttaagaagtatgcagatgccctgcaggagatcatccaggagcggaacctcactgttaactacaagaaaaacctcaytgaagtccgagccgataaacaagaggctgtatttgagaacctggacaaaccaggagagacccaagtgatttcatatgaaatgcttcatgtcacacctccaatgagcccaccagatgtcctcaagaccagtcctgtggctgatgctgctggttgggtggatgtggataaagaaactctgcaacacaggaggtacccaaatgtgtttgggattggggactgcaccaaccttcctacgtcaaagaccgctgctgcagtagctgcccagtcaggaatacttgataggacaatttctgtaattatgaagaatcaaacaccaacaaagaagtatgatggctacacatcatgtccactggtgaccggctacaaccgtgtgattcttgctgartttgactacaaagcagagccrctagaaaccttcccctttgatcaaagcaaagagcgcctttccatgtatctcatgaaagctgacctgatgcctttcctgtattggaatatgatgctaaggggttactggggaggaccagcgtttctgcgcaagttgtttcatctaggtatgagttaaggatggctcagcacttgctcatcttggatggcttytgggccaaaactkcagtcactgaatgaccaagagcagcacgaaggacttggaacctatccttgtaaagagttccttgatgggtaatggtgaccaaatgcctcccttttcagtacctttgaacagcaaccatgtgggctactcatgatgggcttgattctttgggaataataaaatgaaataatacttttaytttctgaataaaagtttgtcactgattgtgttcta

SEQ ID NO: 2945 - DNA, 2796 bp, Homo sapiens
gcctccgckaggggaccccctccrtggcttcccaccrggttgttccaggcctcagcttcgccgaaaggcctcaccacctccgacctccgcctgcycyggggatgctcccagccctgctgcggcagaacgcgacrtgctaaccggaatccctaggccgcctgtctcctacccatacttagaggccccgctcagacggtcctkaaaacgtctgaaaggcsgttcctgccagagtccctgctacctgttacctccacccctatttagtcctagtggacagcytcgctcaccttccctgggatgacacttctggcggctgagatgagcgagcctctctgggctctgccgccgggtgtgggctgacctgcctacagctggggcctgataaggcagcagcaaaagggtggaggggaggcagtgttgaagctggggcaacgctcgccattgaatgacttccaagtgctccggggcacagagctacagcacctgctacatgcggtggtgcccrggccttggcaggaggatgtggcagatgctgaagagtgtgctggtcgctgtgggcccttaatggactgcygggcsttccactacaacgtgagcagccatggttgccaactgctgccatggactcaacactcrccccacacraggctgyggcgttctgggcgctrtgacctcttccagragaaaggtacacgcccactctccggaatggcctggaagagaacttctgccrtaaccctgatggcgaccccggaggtccttggtgctacacaacagaccctgctgtgcgcttccagagctgcrgcatcaaatcctgccgggaggccgcgtgtgtctggtgcaatggcgaggaataccgcggcgcggtagaccgcacggagtcagggcgcgagtgccagcgctgggatcttcagcacccgcaccagcaccccttcgagccgggttcctcgaccaaggtctggacgacaactattgccggartcctgacggctccsagcggccatgrtgctacactacggatccgcagatcgagcgagarttctgtgacctcccccgctgcgggtccgaggcacagccccgccaagaggccacaactgtcagctgcttccgcgggaagggtgagggctaccggggcacagccaataccaccactgcgggcgtaccttgccagcgttgggacgcgcaaatcccdcatcagcaccgatttacgccagaaaaatacgcgtgcaagtgaggtggggggggggggcgggcgttgggacgtgctgctgcgggtgagacgggaggarggtagtcacrggctyarggctggaggctggcgggctagggctgagtgsagcgcctgyttagagaccttcgggagaacttytgcyggaaccycgacggctcagaggcgccctggtgcttcacmctgcggcccggcaygcgcgcggscttttgctaccagatmcggygttgtacagacgacgtgcggccccagggtgaggcccaagcttgggggctacagagccgggctggaagcctggaaccggagggccggggcgrggtctcggcctgatggctgcccgcacccgccacagactgctaccacggcgcaggggagcagtaccgcggcacggtcagcaagacccgcaagggtgtccagtgccagcgcksgtccgctgagacgccgcacaagcygcagtgagagaacttctgccrgaacccagatrgggatagcyatgggccctggtgctacacgatggacccaaggaccccattckactactgtgccctgcgacgctgcgctgatgaccagccgccatcaatcctggaccccccagaccaggtgcagtttgagaagtgtggcaagagggtggatcggctggatcagcgkygttccaagctgcgcktggytgggggccatccgggcaactcaccctggacagtcagcttgsggaatyggcagggccagcatttctgcgsggggtctctagtraaggagcagtggatactgactgcccggcagtgcttctcctcctgagcttctctcccagccatatgcctctcacgggctatgaggtatggttgggcaccctgttccagaacccacagcatggagagccaagcctacagcgggtcccagtagccaagatgstgtgtgggccctcaggctcycagcttgtcctgctcaagctggagagatctgtgaccctgaaccagcgtgtggccctgatctgcctgccccctgaatgrtatgtggtgcctccagggaccaagtgtgagattgcaggcyggggtgagaccaaaggtacgggtaatgacacagtcctaaatgtggccttgctgaaygtcatctccaaccaggagtgtaacatcaagcaccgaggacgtgtgcgkgagagtgagatgtgcactgagggactgttggcccctgtggggscctgtgagrgtgactacgggggccyacttgcctgctttacccacaactgctgggtcctgraaggaattakaatccccaacygagtatgyrcaaggtccygctggccagctgtcttcacrcktgtctctgtgtttgtggactggattcacaaggtcatgagactgggttaggcccagccttgaygccatatgccttggggaggacaaaacttcttgtcagacataaagccatgtttcctctttatgcctgtacagatgcttcttagcctttgcttccaggaaatgtgtcagtgactccttgctagggctcgggtggcttgagcccagcacaccctgggctaggtgatctgtccagcctaggggcttccccaaccr

SEQ ID NO: 2946 - DNA, 3316 bp, Homo sapiens
cgctgagcctccagccgcgcacgcgcacyggcccgcgcccagcctccgckaggggaccccctccrtggcttcccaccrggttgttccaggcctcagcttcgccgaaaggcctcaccacctccgacctccgcctgcycyggggatgctcccagccctgctgcggcagaacgcgacrtgctaaccggaatccctaggccgcctgtctcctacccatacttagaggccccgctcagacggtcctkaaaacgtctgaaaggcsgttcctgccagagtccctgctacctgttacctccacccctatttagtcctagtggacagcytcgctcaccttccctgggatgacacttctggcggctgagatgagcgagcctctctgggctctgccgccgggtgtgggctgacctgcctacagctggggcctgataaggcagcagcaaaagggtggaggggaggcagtgttgaagctggggcaagtaattttccccaatttacagggaaaaaccgaaattcagaaaagtttaatgtcacccaggggctggagcccagacctctggcagctctcactttcacaatgcccttgggctgactaggctgcagaggggtttcaccccaaccccagggcacctcaagtgtccccaccaaaccttcctaacacctgtccactaagctgtactaggcccttgcaactgacctatgggacctgaggcctggcccctcatggctcctgtcaccaggtctcaggtcagggtccagcaggccctgagctgacgtgtggagccagagccacccaatcccgtagggacaggtttyrcaacttcccggatggggctgtggtgggtcacagtgcagcctccagccagaaggatggggtggctcycactcctgctgcttctgactcaatgcttaggggtccctggtaatgctccggggcacagagctacagcacctgctacatgcggtggtgcccrggccttggcaggaggatgtggcagatgctgaagagtgtgctggtcgctgtgggcccttaatggactgcygggcsttccactacaacgtgagcagccatggttgccaactgctgccatggactcaacactcrccccacacraggctgyggcgttctgggcgctrtgacctcttccagragaaaggcaagtgggggtacacgcccactctccggaatggcctggaagagaacttctgccrtaaccctgatggcgaccccggaggtccttggtgctacacaacagaccctgctgtgcgcttccagagctgcrgcatcaaatcctgccgggaggccgcgtgtgtctggtgcaatggcgaggaataccgcggcgcggtagaccgcacggagtcagggcgcgagtgccagcgctgggatcttcagcacccgcaccagcaccccttcgagccgggcaagttcctcgaccaaggtctggacgacaactattgccggartcctgacggctccsagcggccatgrtgctacactacggatccgcagatcgagcgagarttctgtgacctcccccgctgcgggtccgaggcacagccccgccaagaggccacaactgtcagctgcttccgcgggaagggtgagggctaccggggcacagccaataccaccactgcgggcgtaccttgccagcgttgggacgcgcaaatcccdcatcagcaccgatttacgccagaaaaatacgcgtgcaaagaccttcgggagaacttytgcyggaaccycgacggctcagaggcgccctggtgcttcacmctgcggcccggcaygcgcgcggscttttgctaccagatmcggygttgtacagacgacgtgcggccccagggtgaggcccaagcttgggggctacagagccgggctggaagcctggaaccggagggccggggcgrggtctcggcctgatggctgcccgcacccgccacagactgctaccacggcgcaggggagcagtaccgcggcacggtcagcaagacccgcaagggtgtccagtgccagcgcksgtccgctgagacgccgcacaagcygcagtgartccctggtgctccyggccccgccagggccctaaccctggggcggcatgctttgrtgtctgggaccagagcctggaaatggttgagactaccctgccacgaytttgctcccgctyccgcctmggttcacrtttacctccgaaccrcatgcacaactggaggagaacttctgccrgaacccagatrgggatagcyatgggccctggtgctacacgatggacccaaggaccccattckactactgtgccctgcgacgctgcgctgatgaccagccgccatcaatcctggaccccccagcccaccccatcctacagaccaggtgcagtttgagaagtgtggcaagagggtggatcggctggatcagcgkygttccaagctgcgcktggytgggggccatccgggcaactcaccctggacagtcagcttgsggaatyggcagggccagcatttctgcgsggggtctctagtraaggagcagtggatactgactgcccggcagtgcttctcctcctgccatatgcctctcacgggctatgaggtatggttgggcaccctgttccagaacccacagcatggagagccaagcctacagcgggtcccagtagccaagatgstgtgtgggccctcaggctcycagcttgtcctgctcaagctggagagatctgtgaccctgaaccagcgtgtggccctgatctgcctgccccctgaatgrtatgtggtgcctccagggaccaagtgtgagattgcaggcyggggtgagaccaaaggtacgggtaatgacacagtcctaaatgtggccttgctgaaygtcatctccaaccaggagtgtaacatcaagcaccgaggacgtgtgcgkgagagtgagatgtgcactgagggactgttggcccctgtggggscctgtgagrgtgactacgggggccyacttgcctgctttacccacaactgctgggtcctgraaggaattakaatccccaacygagtatgyrcaaggtccygctggccagctgtcttcacrcktgtctctgtgtttgtggactggattcacaaggtcatgagactgggttaggcccagccttgaygccatatgccttggggaggacaaaacttcttgtcagacataaagccatgtttcctctttatgcctgtacagatgcttcttagcctttgcttccaggaaatgtgtcagtgactccttgctagggctcgggtggcttgagcccagcacaccctgggctaggtgatctgtccagcctaggggcttccccaacca

SEQ ID NO: 2947 - DNA, 3204 bp, Homo sapiens
cgctgagcctccagccgcgcacgcgcacyggcccgcgcccagcctccgckaggggaccccctccrtggcttcccaccrggttgttccaggcctcagcttcgccgaaaggcctcaccacctccgacctccgcctgcycyggggatgctcccagccctgctgcggcagaacgcgacrtgctaaccggaatccctaggccgcctgtctcctacccatacttagaggccccgctcagacggtcctkaaaacgtctgaaaggcsgttcctgccagagtccctgctacctgttacctccacccctatttagtcctagtggacagcytcgctcaccttccctgggatgacacttctggcggctgagatgagcgagcctctctgggctctgccgccgggtgtgggctgacctgcctacagctggggcctgataaggcagcagcaaaagggtggaggggaggcagtgttgaagctggggcaagtaattttccccaatttacagggaaaaaccgaaattcagaaaagtttaatgtcacccaggggctggagcccagacctctggcagctctcactttcacaatgcccttgggctgactaggctgcagaggggtttcaccccaaccccagggcacctcaagtgtccccaccaaaccttcctaacacctgtccactaagctgtactaggcccttgcaactgacctatgggacctgaggcctggcccctcatggctcctgtcaccaggtctcaggtcagggtccagcaggccctgagctgacgtgtggagccagagccacccaatcccgtagggacaggtttyrcaacttcccggatggggctgtggtgggtcacagtgcagcctccagccagaaggatggggtggctcycactcctgctgcttctgactcaatgcttaggggtccctgggcagcgctcgccattgaatgacttccaagtgctccggggcacagagctacagcacctgctacatgcggtggtgcccrggccttggcaggaggatgtggcagatgctgaagagtgtgctggtcgctgtgggcccttaatggactgcygggcsttccactacaacgtgagcagccatggttgccaactgctgccatggactcaacactcrccccacacraggctgyggcgttctgggcgctrtgacctcttccagragaaagactacrtacggacctgcatcatgaacaatggggttgggtaccggggcaccatggccacgaccgtgggtggcctgccctgccaggcttggagccacaagttcccraaygatcacmagtacacgcccactctccggaatggcctggaagagaacttctgccrtaaccctgatggcgaccccggaggtccttggtgctacacaacagaccctgctgtgcgcttccagagctgcrgcatcaaatcctgccgggaggccgcgtgtgtctggtgcaatggcgaggaataccgcggcgcggtagaccgcacggagtcagggcgcgagtgccagcgctgggatcttcagcacccgcaccagcaccccttcgagccgggcaagttcctcgaccaaggtctggacgacaactattgccggartcctgacggctccsagcggccatgrtgctacactacggatccgcagatcgagcgagarttctgtgacctcccccgctgcgggtccgaggcacagccccgccaagaggccacaactgtcagctgcttccgcgggaagggtgagggctaccggggcacagccaataccaccactgcgggcgtaccttgccagcgttgggacgcgcaaatcccdcatcagcaccgatttacgccagaaaaatacgcgtgcaaagaccttcgggagaacttytgcyggaaccycgacggctcagaggcgccctggtgcttcacmctgcggcccggcaygcgcgcggscttttgctaccagatmcggygttgtacagacgacgtgcggccccaggactgctaccacggcgcaggggagcagtaccgcggcacggtcagcaagacccgcaagggtgtccagtgccagcgcksgtccgctgagacgccgcacaagcygcamttcacrtttacctccgaaccrcatgcacaactggaggagaacttctgccrgaacccagatrgggatagcyatgggccctggtgctacacgatggacccaaggaccccattckactactgtgccctgcgacgctgcgctgatgaccagccgccatcaatcctggaccccccagaccaggtgcagtttgagaagtgtggcaagagggtggatcggctggatcagcgkygttccaagctgcgcktggytgggggccatccgggcaactcaccctggacagtcagcttgsggaatyggcagggccagcatttctgcgsggggtctctagtraaggagcagtggatactgactgcccggcagtgcttctcctcctgccatatgcctctcacgggctatgaggtatggttgggcaccctgttccagaacccacagcatggagagccaagcctacagcgggtcccagtagccaagatgstgtgtgggccctcaggctcycagcttgtcctgctcaagctggagagatctgtgaccctgaaccagcgtgtggccctgatctgcctgccccctgaatgrtatgtggtgcctccagggaccaagtgtgagattgcaggcyggggtgagaccaaaggtacgggtaatgacacagtcctaaatgtggccttgctgaaygtcatctccaaccaggagtgtaacatcaagcaccgaggacgtgtgcgkgagagtgagatgtgcactgagggactgttggcccctgtggggscctgtgagrgtgactacgggggccyacttgcctgctttacccacaactgctgggtcctgraaggaattakaatccccaacygagtatgyrcaaggtccygctggccagctgtcttcacrcktgtctctgtgtttgtggactggattcacaaggtcatgagactgggttaggcccagccttgaygccatatgccttggggaggacaaaacttcttgtcagacataaagccatgtttcctctttatgcctgtacagatgcttcttagcctttgcttccaggaaatgtgtcagtgactccttgctagggctcgggtggcttgagcccagcacaccctgggctaggtgatctgtccagcctaggggcttccccaacca

SEQ ID NO: 2948 - DNA, 3037 bp, Homo sapiens
cgctgagcctccagccgcgcacgcgcacyggcccgcgcccagcctccgckaggggaccccctccrtggcttcccaccrggttgttccaggcctcagcttcgccgaaaggcctcaccacctccgacctccgcctgcycyggggatgctcccagccctgctgcggcagaacgcgacrtgctaaccggaatccctaggccgcctgtctcctacccatacttagaggccccgctcagacggtcctkaaaacgtctgaaaggcsgttcctgccagagtccctgctacctgttacctccacccctatttagtcctagtggacagcytcgctcaccttccctgggatgacacttctggcggctgagatgagcgagcctctctgggctctgccgccgggtgtgggctgacctgcctacagctggggcctgataaggcagcagcaaaagggtggaggggaggcagtgttgaagctggggcaagtaattttccccaatttacagggaaaaaccgaaattcagaaaagtttaatgtcacccaggggctggagcccagacctctggcagctctcactttcacaatgcccttgggctgactaggctgcagaggggtttcaccccaaccccagggcacctcaagtgtccccaccaaaccttcctaacacctgtccactaagctgtactaggcccttgcaactgacctatgggacctgaggcctggcccctcatggctcctgtcaccaggtctcaggtcagggtccagcaggccctgagctgacgtgtggagccagagccacccaatcccgtagggacaggtttyrcaacttcccggatggggctgtggtgggtcacagtgcagcctccagccagaaggatggggtggctcycactcctgctgcttctgactcaatgcttaggggtccctggtaatgctccggggcacagagctacagcacctgctacatgcggtggtgcccrggccttggcaggaggatgtggcagatgctgaagagtgtgctggtcgctgtgggcccttaatggactgcygggcsttccactacaacgtgagcagccatggttgccaactgctgccatggactcaacactcrccccacacraggctgyggcgttctgggcgctrtgacctcttccagragaaaggcaagtgggggtacacgcccactctccggaatggcctggaagagaacttctgccrtaaccctgatggcgaccccggaggtccttggtgctacacaacagaccctgctgtgcgcttccagagctgcrgcatcaaatcctgccgggaggccgcgtgtgtctggtgcaatggcgaggaataccgcggcgcggtagaccgcacggagtcagggcgcgagtgccagcgctgggatcttcagcacccgcaccagcaccccttcgagccgggcaagttcctcgaccaaggtctggacgacaactattgccggartcctgacggctccsagcggccatgrtgctacactacggatccgcagatcgagcgagarttctgtgacctcccccgctgcgggtccgaggcacagccccgccaagaggccacaactgtcagctgcttccgcgggaagggtgagggctaccggggcacagccaataccaccactgcgggcgtaccttgccagcgttgggacgcgcaaatcccdcatcagcaccgatttacgccagaaaaatacgcgtgcaaagaccttcgggagaacttytgcyggaaccycgacggctcagaggcgccctggtgcttcacmctgcggcccggcaygcgcgcggscttttgctaccagatmcggygttgtacagacgacgtgcggccccaggactgctaccacggcgcaggggagcagtaccgcggcacggtcagcaagacccgcaagggtgtccagtgccagcgcksgtccgctgagacgccgcacaagcygcamttcacrtttacctccgaaccrcatgcacaactggaggagaacttctgccrgaacccagatrgggatagcyatgggccctggtgctacacgatggacccaaggaccccattckactactgtgccctgcgacgctgcgaccaggtgcagtttgagaagtgtggcaagagggtggatcggctggatcagcgkygttccaagctgcgcktggytgggggccatccgggcaactcaccctggacagtcagcttgsggaatyggcagggccagcatttctgcgsggggtctctagtraaggagcagtggatactgactgcccggcagtgcttctcctcctgccatatgcctctcacgggctatgaggtatggttgggcaccctgttccagaacccacagcatggagagccaagcctacagcgggtcccagtagccaagatgstgtgtgggccctcaggctcycagcttgtcctgctcaagctggagagatctgtgaccctgaaccagcgtgtggccctgatctgcctgccccctgaatgrtatgtggtgcctccagggaccaagtgtgagattgcaggcyggggtgagaccaaaggtacgggtaatgacacagtcctaaatgtggccttgctgaaygtcatctccaaccaggagtgtaacatcaagcaccgaggacgtgtgcgkgagagtgagatgtgcactgagggactgttggcccctgtggggscctgtgagrgtgactacgggggccyacttgcctgctttacccacaactgctgggtcctgraaggaattakaatccccaacygagtatgyrcaaggtccygctggccagctgtcttcacrcktgtctctgtgtttgtggactggattcacaaggtcatgagactgggttaggcccagccttgaygccatatgccttggggaggacaaaacttcttgtcagacataaagccatgtttcctctttatgcctgtacagatgcttcttagcctttgcttccaggaaatgtgtcagtgactccttgctagggctcgggtggcttgagcccagcacaccctgggctaggtgatctgtccagcctaggggcttccccaacca

SEQ ID NO: 2949 - DNA, 2396 bp, Homo sapiens
crcgctagcrccgcccaggctggcacaaaggaggaagcctagtcccgcccctgcgtgcggcgcttctcccaggccccamcttccatccagtgccctggaccctcggctgggtagcgccaccagagcgaccaaacgtcccgcgccttccaggccgcactccagagccaaaagagctccatggcggcggcggccaagcccaacaacctttccctggtggtgcacggaccgggggacttgcgcctggagaactatcctatccctgaaccaggcccaaatggtgatcgtgttgccatcgagcctggtgctccccgagaaaatgatgaattctgcaagatgggccgatacaatctgtcaccttccatcttcttctgtgccacgccccccgatgacgggaacctctgccrgttctataagcacaatgcagccttttgttacaagcttcctgacaatgtcacctttgaggaaggcgccctgatcgagccactttctgtggggatccatgcctgcaggagaggcggagttaccctgggacacaaggtccttgtgtgtggagctgggccaatcgggatggtcactttgctcgtggccaaagcaatgggagcagctcaagtagtggtgactgatctgtctgctacccgattgtccaaagccaaggagattggggctgatttagtcctccagatctccaaggagagccctcaggaaatcgccaggaaagtagaaggtcwgctggggtgcaagccggaagtcaccatcgagtgcacgggggcagaggcctccatccaggcgggcatctacgccactcgctctggtgggamcctcgtgcttgtggggctgggctctgagatgaccaccgtacccctactgcatgcagccatccgggaggtggatatcaagggcgtgtttcgatactgcaacacgtggccagtggcgatttcgatgcttgcgtccaagtctgtgaatgtaaaacccctcgtcacccataggtttcctctggagaaagctctggaggcctttgaaacatttaaaaagggattggggttgaaaatcatgctcaagtgtgaccccagtgaccagaatcyctgatgttaatgggctctgccctcatccccacagtctygggatctcagggcacaayggmtggacabgrgtgggctctgatgcagaactttctcttttgaatgttaagaataactaatacaattcattgtgaacagaagtccttamgcagaggaattggtgtgccttaaagatacaatctgsgatagtttgggggaacttgtagccagaatgccctgttcatgctgagcaaagttcagcaagtagagcagagtttggcaggcaggtgccaggaactccccttcttcctggagtgccttcattgaggaaggaaatctggcccttgggtttcctggttccactgctactgacccrgaggggaatgagggctgagttatgaaaagataacttcatgaagacttaactggcccagaagctgattttcatgaaaatctgccactcagsgtctgggatgaaggcttgtcagcacttccagtttagaacgcaatgtttctagagacatattggctgtttgttttgatgataaaaggagaataagaaaaggcatcactttcctggatcmaggataattttwaaaccaatcaaatgaaaaaaacaaacaaacaaaaaaggaaatgtcatgtgaggttaaaccagtttgcattcccctaatgtggaaaaagtaagaggactactcagcactgtttgaagattgcctcttctacagcttctgagaattgtgttatttcacttgccaagtgaaggaccccctccccaacatgccccascccayccctaagyayggtcccttgtcaccaggcaaccaggaaactgctacttgtggacctcaccagagaccaggagggtttggttagctcacaggacttcccccaccccagaagattagcatsccatactagrctcatactcaactcaactaggctcatactcaaytgatgrttattagacaattccatttctttctggttattataaacagaaaatctttcctcttctcattrccagtaaaggctcttggtatctttctgttggaatgatttctatgaacttgtcttattttaatggtgggttttttttctggtaagatttrgacctaaatcgcatcaygccaacttgtgactttgagactattcatcaagaatgaggatatagtagccatgacatagcttgagctatagcctttaattccttactttggctatgggtggagggtgagtttgaaraggttctgattttcttgtaacctgggaaarccatgaccttgtgcccgattctttcagwttgctttgggtaataaatattggtggtggtatctg

SEQ ID NO: 2950 - DNA, 2222 bp, Homo sapiens
gtatatatgtgattaagatatgtatttctgacttgaagtgaaatattctggaaaactcacacaactatggagaactatcctatccctgaaccaggcccaaatggtgatcgtgttgccatcgagcctggtgctccccgagaaaatgatgaattctgcaagatgggccgatacaatctgtcaccttccatcttcttctgtgccacgccccccgatgacgggaacctctgccrgttctataagcacaatgcagccttttgttacaagcttcctgacaatgtcacctttgaggaaggcgccctgatcgagccactttctgtggggatccatgcctgcaggagaggcggagttaccctgggacacaaggtccttgtgtgtggagctgggccaatcgggatggtcactttgctcgtggccaaagcaatgggagcagctcaagtagtggtgactgatctgtctgctacccgattgtccaaagccaaggagattggggctgatttagtcctccagatctccaaggagagccctcaggaaatcgccaggaaagtagaaggtcwgctggggtgcaagccggaagtcaccatcgagtgcacgggggcagaggcctccatccaggcgggcatctacgccactcgctctggtgggamcctcgtgcttgtggggctgggctctgagatgaccaccgtacccctactgcatgcagccatccgggaggtggatatcaagggcgtgtttcgatactgcaacacgtggccagtggcgatttcgatgcttgcgtccaagtctgtgaatgtaaaacccctcgtcacccataggtttcctctggagaaagctctggaggcctttgaaacatttaaaaagggattggggttgaaaatcatgctcaagtgtgaccccagtgaccagaatcyctgatgttaatgggctctgccctcatccccacagtctygggatctcagggcacaayggmtggacabgrgtgggctctgatgcagaactttctcttttgaatgttaagaataactaatacaattcattgtgaacagaagtccttamgcagaggaattggtgtgccttaaagatacaatctgsgatagtttgggggaacttgtagccagaatgccctgttcatgctgagcaaagttcagcaagtagagcagagtttggcaggcaggtgccaggaactccccttcttcctggagtgccttcattgaggaaggaaatctggcccttgggtttcctggttccactgctactgacccrgaggggaatgagggctgagttatgaaaagataacttcatgaagacttaactggcccagaagctgattttcatgaaaatctgccactcagsgtctgggatgaaggcttgtcagcacttccagtttagaacgcaatgtttctagagacatattggctgtttgttttgatgataaaaggagaataagaaaaggcatcactttcctggatcmaggataattttwaaaccaatcaaatgaaaaaaacaaacaaacaaaaaaggaaatgtcatgtgaggttaaaccagtttgcattcccctaatgtggaaaaagtaagaggactactcagcactgtttgaagattgcctcttctacagcttctgagaattgtgttatttcacttgccaagtgaaggaccccctccccaacatgccccascccayccctaagyayggtcccttgtcaccaggcaaccaggaaactgctacttgtggacctcaccagagaccaggagggtttggttagctcacaggacttcccccaccccagaagattagcatsccatactagrctcatactcaactcaactaggctcatactcaaytgatgrttattagacaattccatttctttctggttattataaacagaaaatctttcctcttctcattrccagtaaaggctcttggtatctttctgttggaatgatttctatgaacttgtcttattttaatggtgggttttttttctggtaagatttrgacctaaatcgcatcaygccaacttgtgactttgagactattcatcaagaatgaggatatagtagccatgacatagcttgagctatagcctttaattccttactttggctatgggtggagggtgagtttgaaraggttctgattttcttgtaacctgggaaarccatgaccttgtgcccgattctttcagwttgctttgggtaataaatattggtggtggtatctg

SEQ ID NO: 2951 - DNA, 3888 bp, Homo sapiens
gaggctcggctgaggatgccgggaagggctggtggtcgggggcctagagcggcggttgcacttagttgcggctgctgtcaccatgtcccgcgttttggtgccttgccatgtgaaaggctccgtagccctccaggtgggcgacgtgcggacctcccaaggccggcctggcgtgctggtcatcgatgtcaccttccccagcgtcgctcccttcgagttgcaggaaatcacgtttaagaattactacacagcttttttgagcatccgtgtccgtcagtacacctcagcacacacacctgccaagtgggtgacctgcctgcgggactactgcctaatgcctgacccacacagtgaggagggagcccaggagtatgtatcgctgttcaagcatcagatgctgtgtgacatggctagaatatcggagctacgcctgattctgcggcagccatcaccactgtggctgtctttcacagtggaggagctgcagatctatcagcagggaccaaagagcccctccgtgacctttcccaagtggctctcccacccagtgccctgtgagcaacctgcactcctccgtgagggtctcccagaccccagcagggtatcctccgaggtgcagcagatgtgggcactgacagagatgatccgggccagtcrcacctccgcaaggatcggccgctttgatgtggatggctgttatgacctgaacttgctctcctacacttgaatggttgctcctagccaagatgttggcctttctgtgcccacccagacttggtttgggccaccagaggctgaagtgtatttcctgtgcattccaagtgttgcctgcatgcctgttctgtctgggccacattcacagattcaggattctcaggggcttaccgtgttacttcagcatgagctcctggcatgggggtgctctgtcttcgcctggctgcaactcaattcttccttctacccaaaaacactccagtcagttgtacttactgagaatccctgagtgccctctgccccttctggcaacatgcacattcctgtgatctgcctgccttggccttccaaagtgctgggattacaggcatgagccaccgcgcccgscctgcccctttccaagagatatgctcagcataatgagagatcaaccgtggtggggagtgggtccaagtaagggttctcattgttgccttttaagaggcctaagtcctgcattaactcagtccaaccattaagtgatgcaggctgctcttccctcatgtgagaaaaacctgtttccctctggttcttcctggctttgcacctggtggctattacaaagcagtactgcagtatgtcttggacctggaaagttggacatgtgtgtggctcaacagttttctcgggggagttcagtgaccttttggtggccaccctctgttctcacctgtgagttcttgcaggtggcgacttcatctgcaaggtcacttacatagccccactcagctgcttcggaaagcgtgacgaagcagtagtcctcagtgtgtgtgtaagtgaagaggaccttgtggtagcagggaccatgcttcattcgtggctgtgtccccatctgagggcctggtatgcartaagatcaataaatacttgtggaatgcatgactgctggctgcctgtgtctgcctggygggagagctgtggaactaggggtccacatgaggacagactactgtggtgctgcctacctgccaggctggcccaccttccccacccccacttgaccttactctcttgaggtcctaaaggtatgattcagacctttcagccctttccagaactttgaccctctggagacagggcggttctgcagggggcggtctagcccctagctttgttctgggcagcccaatcagctctggattgcccgagctgccctgaagagtcagccgaaagagctggaggcttcttccctgtggttgcgggttcctgcattctctgctctaaatcccagcctgcccttggggctgcccacgcccccttcagatcctttgctccggagagagacctgtccgagcagaggcctggactacatctcccggcgtgcctggcagtgtggtggcctctgtgcgccgtctgcactcgttgcaggcgacgatgcagagggctgtaagtgtggtggcccgtctgggctttcgcctgcaggcattccccccggccttgtgtcgtccacttagttgcgcacaggacaccgctctatgacttccacctggcccacggcrggaaaatggtggygtttgcgggttggagtctgccagtgcagtaccgggacagtcacactgactcgcacctgcacacacgccagcactgctcgctctttgacgtgtctcatatgctgcagaccaagatacttggtagtgaccgggtgaagctgatggagagtctagtggttggagacattgcagagctaagaccaaaccaggggacactgtcgctgtttaccaacgaggctggaggcatcttagatgacttgattgtaaccaatacttctgagggccacctgtatgtggtgtccaacgctggctgctgggagaaagatttggccctcatgcaggacaaggtcagggagcttcagaaccagggcagagatgtgggcctggaggtgttggataatgccctgctagctctgcaaggccccactgcagcccaggtactacaggccggcgtggcagatgacctgaggaaactgcccttcatgaccagtgctgtgatgraggtgtttggcgtgtctggctgccgcgtgacccgctgtggctacacaggagaggatggtgtggagatctcggtgccggtagcgggggcagttcacctggcaacagctattctgaaaaacccagaggtgaagctggcagggctggcagccagggacagcctgcgcctggaggcagrcctctgcctgtatgggaatsacattgatgaacacactacacctgtggagggcagcctcagttggacactggggaagcgccgccgagctgctatggacttccctggagccaaggtcattgttccccagctgaagggcagggtgcagcgraggcrtgtggggttgatgtgtgagggggcccccatgcgggcacacagtcccatcctgaacatggagggtaccaagattggtactgtgactagtggctgcccctccccctctctgaagaagaatgtggcgatgggttatgtgccctgcgagtacagtcgtccagggacaatgctgctggtagagcttccttcaggaccctgcttctgagtgacggaccagctcacacaatgtcttgtttcagtccatgatcccactgacctactcttgcctgctggagggtaatgagaagctttggttctgccatctctcccactctgccaggtgctggctgtggagcaaaggctcacctttgtggagaggataaaacctrcccaacctacctcaccatggtttttcacattgcaaagggtaataacatgggcagtgcggacttaggctaccccctccagtttgctttccgtaaatgcaaattgtccttactgcaagtcaggaatgattgctgactcacagtagggctgctatgcctgtgtgtaaacttggggatggctgagggaacatagactcactcttccacattcccaagttggtctagtgtgctgcccagtagcaaaccatggcagactcaccacctattctgagttccagggctgctgtagggcagggtgggcttcctcccagacytgccttaccctgggctgatctttgcycctggtatgcattaatggactccactgaatcctgaaaaaaaaattaaacttccttcttacttgccagtctctagcttcattgttctctgttcacagggttcctgaaatgccaaccca

SEQ ID NO: 2952 - DNA, 2266 bp, Homo sapiens
gaggctcggctgaggatgccgggaagggctggtggtcgggggcctagagcggcggttgcacttagttgcggctgctgtcaccatgtcccgcgttttggtgccttgccatgtgaaaggctccgtagccctccaggtgggcgacgtgcggacctcccaaggccggcctggcgtgctggtcatcgatgtcaccttccccagcgtcgctcccttcgagttgcaggaaatcacgtttaagaattactacacagcttttttgagcatccgtgtccgtcagtacacctcagcacacacacctgccaagtgggtgacctgcctgcgggactactgcctaatgcctgacccacacagtgaggagggagcccaggagtatgtatcgctgttcaagcatcagatgctgtgtgacatggctagaatatcggagctacgcctgattctgcggcagccatcaccactgtggctgtctttcacagtggaggagctgcagatctatcagcagggaccaaagagcccctccgtgacctttcccaagtggctctcccacccagtgccctgtgagcaacctgcactcctccgtgagggtctcccagaccccagcagggtatcctccgaggtgcagcagatgtgggcactgacagagatgatccgggccagtcrcacctccgcaaggatcggccgctttgatgtggatggctgttatgacctgaacttgctctcctacacttgaatggttgctcctagccaagatgttggcctttctgtgcccacccagacttggtttgggccaccagaggctgaagtgtatttcctgtgcattccaagtgttgcctgcatgcctgttctgtctgggccacattcacagattcaggattctcaggggcttaccgtgttacttcagcatgagctcctggcatgggggtgctctgtcttcgcctggctgcaactcaattcttccttctacccaaaaacactccagtcagttgtacttactgagaatccctgagtgccctctgccccttctggcaacatgcacattcctgtgatctgcctgccttggccttccaaagtgctgggattacaggcatgagccaccgcgcccgscctgcccctttccaagagatatgctcagcataatgagagatcaaccgtggtggggagtgggtccaagtaagggttctcattgttgccttttaagaggcctaagtcctgcattaactcagtccaaccattaagtgatgcaggctgctcttccctcatgtgagaaaaacctgtttccctctggttcttcctggctttgcacctggtggctattacaaagcagtactgcagtatgtcttggacctggaaagttggacatgtgtgtggctcaacagttttctcgggggagttcagtgaccttttggtggccaccctctgttctcacctgtgagttcttgcaggtggcgacttcatctgcaaggtcacttacatagccccactcagctgcttcggaaagcgtgacgaagcagtagtcctcagtgtgtgtgtaagtgaagaggaccttgtggtagcagggaccatgcttcattcgtggctgtgtccccatctgagggcctggtatgcartaagatcaataaatacttgtggaatgcatgactgctggctgcctgtgtctgcctggygggagagctgtggaactaggggtccacatgaggacagactactgtggtgctgcctacctgccaggctggcccaccttccccacccccacttgaccttactctcttgaggtcctaaaggtatgattcagacctttcagccctttccagaactttgaccctctggagacagggcggttctgcagggggcggtctagcccctagctttgttctgggcagcccaatcagctctggattgcccgagctgccctgaagagtcagccgaaagagctggaggcttcttccctgtggttgcgggttcctgcattctctgctctaaatcccagcctgcccttggggctgcccacgcccccttcagatcctttgctccggagagagacctgtccgagcagaggcctggactacatctcccggcgtgcctggcagtgtggtggcctctgtgcgccgtctgcactcgttgcaggcgacgatgcagagggctgtaagtgtggtggcccgtctgggctttcgcctgcaggcattccccccggccttgtgtcgtccacttagttgcgcacaggtgggatagagggtgctgatcttggagggtgggggagggaagcggctggggg

SEQ ID NO: 2953 - DNA, 3113 bp, Homo sapiens
gtgatctgcctgccttggccttccaaagtgctgggattacaggcatgagccaccgcgcccgscctgcccctttccaagagatatgctcagcataatgagagatcaaccgtggtggggagtgggtccaagtaagggttctcattgttgccttttaagaggcctaagtcctgcattaactcagtccaaccattaagtgatgcaggctgctcttccctcatgtgagaaaaacctgtttccctctggttcttcctggctttgcacctggtggctattacaaagcagtactgcagtatgtcttggacctggaaagttggacatgtgtgtggctcaacagttttctcgggggagttcagtgaccttttggtggccaccctctgttctcacctgtgagttcttgcaggtggcgacttcatctgcaaggtcacttacatagccccactcagctgcttcggaaagcgtgacgaagcagtagtcctcagtgtgtgtgtaagtgaagaggaccttgtggtagcagggaccatgcttcattcgtggctgtgtccccatctgagggcctggtatgcartaagatcaataaatacttgtggaatgcatgactgctggctgcctgtgtctgcctggygggagagctgtggaactaggggtccacatgaggacagactactgtggtgctgcctacctgccaggctggcccaccttccccacccccacttgaccttactctcttgaggtcctaaaggtatgattcagacctttcagccctttccagaactttgaccctctggagacagggcggttctgcagggggcggtctagcccctagctttgttctgggcagcccaatcagctctggattgcccgagctgccctgaagagtcagccgaaagagctggaggcttcttccctgtggttgcgggttcctgcattctctgctctaaatcccagcctgcccttggggctgcccacgcccccttcagatcctttgctccggagagagacctgtccgagcagaggcctggactacatctcccggcgtgcctggcagtgtggtggcctctgtgcgccgtctgcactcgttgcaggcgacgatgcagagggctgtaagtgtggtggcccgtctgggctttcgcctgcaggcattccccccggccttgtgtcgtccacttagttgcgcacaggaggtgctccgcaggacaccgctctatgacttccacctggcccacggcrggaaaatggtggygtttgcgggttggagtctgccagtgcagtaccgggacagtcacactgactcgcacctgcacacacgccagcactgctcgctctttgacgtgtctcatatgctgcagaccaagatacttggtagtgaccgggtgaagctgatggagagtctagtggttggagacattgcagagctaagaccaaaccaggggacactgtcgctgtttaccaacgaggctggaggcatcttagatgacttgattgtaaccaatacttctgagggccacctgtatgtggtgtccaacgctggctgctgggagaaagatttggccctcatgcaggacaaggtcagggagcttcagaaccagggcagagatgtgggcctggaggtgttggataatgccctgctagctctgcaaggccccactgcagcccaggtactacaggccggcgtggcagatgacctgaggaaactgcccttcatgaccagtgctgtgatgraggtgtttggcgtgtctggctgccgcgtgacccgctgtggctacacaggagaggatggtgtggagatctcggtgccggtagcgggggcagttcacctggcaacagctattctgaaaaacccagaggtgaagctggcagggctggcagccagggacagcctgcgcctggaggcagrcctctgcctgtatgggaatsacattgatgaacacactacacctgtggagggcagcctcagttggacactggggaagcgccgccgagctgctatggacttccctggagccaaggtcattgttccccagctgaagggcagggtgcagcgraggcrtgtggggttgatgtgtgagggggcccccatgcgggcacacagtcccatcctgaacatggagggtaccaagattggtactgtgactagtggctgcccctccccctctctgaagaagaatgtggcgatgggttatgtgccctgcgagtacagtcgtccagggacaatgctgctggtagaggtgcggcggaagcagcagatggctgtagtcagcaagatgccctttgtgcccacaaactactataccctcaagtgaagctggctcagggtggggctgtcccttccaggagttttgcccctacaaggggttagtcaagaagctgaggcagaactcactgggggtgggcagttaaggtggaggctgattctaattgtctggttgaggggccacaccacctattccccccacctaactcatgccattccagcttccttcaggaccctgcttctgagtgacggaccagctcacacaatgtcttgtttcagtccatgatcccactgacctactcttgcctgctggagggtaatgagaagctttggttctgccatctctcccactctgccaggtgctggctgtggagcaaaggctcacctttgtggagaggataaaacctrcccaacctacctcaccatggtttttcacattgcaaagggtaataacatgggcagtgcggacttaggctaccccctccagtttgctttccgtaaatgcaaattgtccttactgcaagtcaggaatgattgctgactcacagtagggctgctatgcctgtgtgtaaacttggggatggctgagggaacatagactcactcttccacattcccaagttggtctagtgtgctgcccagtagcaaaccatggcagactcaccacctattctgagttccagggctgctgtagggcagggtgggcttcctcccagacytgccttaccctgggctgatctttgcycctggtatgcattaatggactccactgaatcctgaaaaaaaaattaaacttccttcttacttgccagtctctagcttcattgttctctgttcacagggttcctgaaatgccaaccca

SEQ ID NO: 2954 - DNA, 1398 bp, Homo sapiens
gaggctcggctgaggatgccgggaagggctggtggtcgggggcctagagcggcggttgcacttagttgcggctgctgtcaccatgtcccgcgttttggtgccttgccatgtgaaaggctccgtagccctccaggtgggcgacgtgcggacctcccaaggccggcctggcgtgctggtcatcgatgtcaccttccccagcgtcgctcccttcgagttgcaggaaatcacgtttaagaattactacacagcttttttgagcatccgtgtccgtcagtacacctcagcacacacacctgccaagtgggtgacctgcctgcgggactactgcctaatgcctgacccacacagtgaggagggagcccaggagtatgtatcgctgttcaagcatcagatgctgtgtgacatggctagaatatcggagctacgcctgattctgcggcagccatcaccactgtggctgtctttcacagtggaggagctgcagatctatcagcagggaccaaagagcccctccgtgacctttcccaagtggctctcccacccagtgccctgtgagcaacctgcactcctccgtgagggtctcccagaccccagcagggtatcctccgaggtgcagcagatgtgggcactgacagagatgatccgggccagtcrcacctccgcaaggatcggccgctttgatgtggatggctgttatgacctgaacttgctctcctacacttgaatggttgctcctagccaagatgttggcctttctgtgcccacccagacttggtttgggccaccagaggctgaagtgtatttcctgtgcattccaagtgttgcctgcatgcctgttctgtctgggccacattcacagattcaggattctcaggggcttaccgtgttacttcagcatgagctcctggcatgggggtgctctgtcttcgcctggctgcaactcaattcttccttctacccaaaaacactccagtcagttgtacttactgagaatccctgagtgccctctgccccttctggcaacatgcacattcctgtcttctgcctgctccctcatgtcagtgcagttgggctgggctgacctactaaaacctgctccatgtatggacctggaaggccattgctgccatggcacttgggacacttgaggaagaaacagaaaccttatttcttcctgtgtgtcccctagtggttttctttccatttgtgttatgccacagagagaaatttcctgtctgaactcttctgctgcctgcctaggaaggaaacctgaagatttgggcagcctgagtctcttggtttctgagctggctcctgaatatatgttcaagtgggtgtgcccatagggcctgggcacgtgtctctagcaaaaccagggcctgagcataagaactggga

SEQ ID NO: 2955 - DNA, 4082 bp, Homo sapiens
ttcgagaccagcctggacaatatggtgaaacctcgtctctaccaaaaattaaaaaaaaaaaattagcagggcatggtggcgggcacctgtaatcccagctactagggaggctgaggcaggagaatcgcttgaatcccggagacggaggttgcagaaatcacgtttaagaattactacacagcttttttgagcatccgtgtccgtcagtacacctcagcacacacacctgccaagtgggtgacctgcctgcgggactactgcctaatgcctgacccacacagtgaggagggagcccaggagtatgtatcgctgttcaagcatcagatgctgtgtgacatggctagaatatcggagctacgcctgattctgcggcagccatcaccactgtggctgtctttcacagtggaggagctgcagatctatcagcagggaccaaagagcccctccgtgacctttcccaagtggctctcccacccagtgccctgtgagcaacctgcactcctccgtgagggtctcccagaccccagcagggtatcctccgaggtgcagcagatgtgggcactgacagagatgatccgggccagtcrcacctccgcaaggatcggccgctttgatgtggatggctgttatgacctgaacttgctctcctacacttgaatggttgctcctagccaagatgttggcctttctgtgcccacccagacttggtttgggccaccagaggctgaagtgtatttcctgtgcattccaagtgttgcctgcatgcctgttctgtctgggccacattcacagattcaggattctcaggggcttaccgtgttacttcagcatgagctcctggcatgggggtgctctgtcttcgcctggctgcaactcaattcttccttctacccaaaaacactccagtcagttgtacttactgagaatccctgagtgccctctgccccttctggcaacatgcacattcctgtgatctgcctgccttggccttccaaagtgctgggattacaggcatgagccaccgcgcccgscctgcccctttccaagagatatgctcagcataatgagagatcaaccgtggtggggagtgggtccaagtaagggttctcattgttgccttttaagaggcctaagtcctgcattaactcagtccaaccattaagtgatgcaggctgctcttccctcatgtgagaaaaacctgtttccctctggttcttcctggctttgcacctggtggctattacaaagcagtactgcagtatgtcttggacctggaaagttggacatgtgtgtggctcaacagttttctcgggggagttcagtgaccttttggtggccaccctctgttctcacctgtgagttcttgcaggtggcgacttcatctgcaaggtcacttacatagccccactcagctgcttcggaaagcgtgacgaagcagtagtcctcagtgtgtgtgtaagtgaagaggaccttgtggtagcagggaccatgcttcattcgtggctgtgtccccatctgagggcctggtatgcartaagatcaataaatacttgtggaatgcatgactgctggctgcctgtgtctgcctggygggagagctgtggaactaggggtccacatgaggacagactactgtggtgctgcctacctgccaggctggcccaccttccccacccccacttgaccttactctcttgaggtcctaaaggtatgattcagacctttcagccctttccagaactttgaccctctggagacagggcggttctgcagggggcggtctagcccctagctttgttctgggcagcccaatcagctctggattgcccgagctgccctgaagagtcagccgaaagagctggaggcttcttccctgtggttgcgggttcctgcattctctgctctaaatcccagcctgcccttggggctgcccacgcccccttcagatcctttgctccggagagagacctgtccgagcagaggcctggactacatctcccggcgtgcctggcagtgtggtggcctctgtgcgccgtctgcactcgttgcaggcgacgatgcagagggctgtaagtgtggtggcccgtctgggctttcgcctgcaggcattccccccggccttgtgtcgtccacttagttgcgcacaggaggtgctccgcaggacaccgctctatgacttccacctggcccacggcrggaaaatggtggygtttgcgggttggagtctgccagtgcagtaccgggacagtcacactgactcgcacctgcacacacgccagcactgctcgctctttgacgtgtctcatatgctgcagaccaagatacttggtagtgaccgggtgaagctgatggagagtctagtggttggagacattgcagagctaagaccaaaccaggggacactgtcgctgtttaccaacgaggctggaggcatcttagatgacttgattgtaaccaatacttctgagggccacctgtatgtggtgtccaacgctggctgctgggagaaagatttggccctcatgcaggacaaggtcagggagcttcagaaccagggcagagatgtgggcctggaggtgttggataatgccctgctagctctgcaaggccccactgcagcccaggtactacaggccggcgtggcagatgacctgaggaaactgcccttcatgaccagtgctgtgatgraggtgtttggcgtgtctggctgccgcgtgacccgctgtggctacacaggagaggatggtgtggagatctcggtgccggtagcgggggcagttcacctggcaacagctattctgaaaaacccagaggtgaagctggcagggctggcagccagggacagcctgcgcctggaggcagrcctctgcctgtatgggaatsacattgatgaacacactacacctgtggagggcagcctcagttggacactggggaagcgccgccgagctgctatggacttccctggagccaaggtcattgttccccagctgaagggcagggtgcagcgraggcrtgtggggttgatgtgtgagggggcccccatgcgggcacacagtcccatcctgaacatggagggtaccaagattggtactgtgactagtggctgcccctccccctctctgaagaagaatgtggcgatgggttatgtgccctgcgagtacagtcgtccagggacaatgctgctggtagaggtgcggcggaagcagcagatggctgtagtcagcaagatgccctttgtgcccacaaactactataccctcaagtgaagctggctcagggtggggctgtcccttccaggagttttgcccctacaaggggttagtcaagaagctgaggcagaactcactgggggtgggcagttaaggtggaggctgattctaattgtctggttgaggggccacaccacctattccccccacctaactcatgccattccagcttccttcaggaccctgcttctgagtgacggaccagctcacacaatgtcttgtttcagtccatgatcccactgacctactcttgcctgctggagggtaatgagaagctttggttctgccatctctcccactctgccaggtgctggctgtggagcaaaggctcacctttgtggagaggataaaacctrcccaacctacctcaccatggtttttcacattgcaaagggtaataacatgggcagtgcggacttaggctaccccctccagtttgctttccgtaaatgcaaattgtccttactgcaagtcaggaatgattgctgactcacagtagggctgctatgcctgtgtgtaaacttggggatggctgagggaacatagactcactcttccacattcccaagttggtctagtgtgctgcccagtagcaaaccatggcagactcaccacctattctgagttccagggctgctgtagggcagggtgggcttcctcccagacytgccttaccctgggctgatctttgcycctggtatgcattaatggactccactgaatcctgaaaaaaaaattaaacttccttcttacttgccagtctctagcttcattgttctctgttcacagggttcctgaaatgccaaccca

SEQ ID NO: 2956 - DNA, 4085 bp, Homo sapiens
ttcgagaccagcctggacaatatggtgaaacctcgtctctaccaaaaattaaaaaaaaaaaattagcagggcatggtggcgggcacctgtaatcccagctactagggaggctgaggcaggagaatcgcttgaatcccggagacggaggttgcagaaatcacgtttaagaattactacacagcttttttgagcatccgtgtccgtcagtacacctcagcacacacacctgccaagtgggtgacctgcctgcgggactactgcctaatgcctgacccacacagtgaggagggagcccaggagtatgtatcgctgttcaagcatcagatgctgtgtgacatggctagaatatcggagctacgcctgattctgcggcagccatcaccactgtggctgtctttcacagtggaggagctgcagatctatcagcagggaccaaagagcccctccgtgacctttcccaagtggctctcccacccagtgccctgtgagcaacctgcactcctccgtgagcagggtctcccagaccccagcagggtatcctccgaggtgcagcagatgtgggcactgacagagatgatccgggccagtcrcacctccgcaaggatcggccgctttgatgtggatggctgttatgacctgaacttgctctcctacacttgaatggttgctcctagccaagatgttggcctttctgtgcccacccagacttggtttgggccaccagaggctgaagtgtatttcctgtgcattccaagtgttgcctgcatgcctgttctgtctgggccacattcacagattcaggattctcaggggcttaccgtgttacttcagcatgagctcctggcatgggggtgctctgtcttcgcctggctgcaactcaattcttccttctacccaaaaacactccagtcagttgtacttactgagaatccctgagtgccctctgccccttctggcaacatgcacattcctgtgatctgcctgccttggccttccaaagtgctgggattacaggcatgagccaccgcgcccgscctgcccctttccaagagatatgctcagcataatgagagatcaaccgtggtggggagtgggtccaagtaagggttctcattgttgccttttaagaggcctaagtcctgcattaactcagtccaaccattaagtgatgcaggctgctcttccctcatgtgagaaaaacctgtttccctctggttcttcctggctttgcacctggtggctattacaaagcagtactgcagtatgtcttggacctggaaagttggacatgtgtgtggctcaacagttttctcgggggagttcagtgaccttttggtggccaccctctgttctcacctgtgagttcttgcaggtggcgacttcatctgcaaggtcacttacatagccccactcagctgcttcggaaagcgtgacgaagcagtagtcctcagtgtgtgtgtaagtgaagaggaccttgtggtagcagggaccatgcttcattcgtggctgtgtccccatctgagggcctggtatgcartaagatcaataaatacttgtggaatgcatgactgctggctgcctgtgtctgcctggygggagagctgtggaactaggggtccacatgaggacagactactgtggtgctgcctacctgccaggctggcccaccttccccacccccacttgaccttactctcttgaggtcctaaaggtatgattcagacctttcagccctttccagaactttgaccctctggagacagggcggttctgcagggggcggtctagcccctagctttgttctgggcagcccaatcagctctggattgcccgagctgccctgaagagtcagccgaaagagctggaggcttcttccctgtggttgcgggttcctgcattctctgctctaaatcccagcctgcccttggggctgcccacgcccccttcagatcctttgctccggagagagacctgtccgagcagaggcctggactacatctcccggcgtgcctggcagtgtggtggcctctgtgcgccgtctgcactcgttgcaggcgacgatgcagagggctgtaagtgtggtggcccgtctgggctttcgcctgcaggcattccccccggccttgtgtcgtccacttagttgcgcacaggaggtgctccgcaggacaccgctctatgacttccacctggcccacggcrggaaaatggtggygtttgcgggttggagtctgccagtgcagtaccgggacagtcacactgactcgcacctgcacacacgccagcactgctcgctctttgacgtgtctcatatgctgcagaccaagatacttggtagtgaccgggtgaagctgatggagagtctagtggttggagacattgcagagctaagaccaaaccaggggacactgtcgctgtttaccaacgaggctggaggcatcttagatgacttgattgtaaccaatacttctgagggccacctgtatgtggtgtccaacgctggctgctgggagaaagatttggccctcatgcaggacaaggtcagggagcttcagaaccagggcagagatgtgggcctggaggtgttggataatgccctgctagctctgcaaggccccactgcagcccaggtactacaggccggcgtggcagatgacctgaggaaactgcccttcatgaccagtgctgtgatgraggtgtttggcgtgtctggctgccgcgtgacccgctgtggctacacaggagaggatggtgtggagatctcggtgccggtagcgggggcagttcacctggcaacagctattctgaaaaacccagaggtgaagctggcagggctggcagccagggacagcctgcgcctggaggcagrcctctgcctgtatgggaatsacattgatgaacacactacacctgtggagggcagcctcagttggacactggggaagcgccgccgagctgctatggacttccctggagccaaggtcattgttccccagctgaagggcagggtgcagcgraggcrtgtggggttgatgtgtgagggggcccccatgcgggcacacagtcccatcctgaacatggagggtaccaagattggtactgtgactagtggctgcccctccccctctctgaagaagaatgtggcgatgggttatgtgccctgcgagtacagtcgtccagggacaatgctgctggtagaggtgcggcggaagcagcagatggctgtagtcagcaagatgccctttgtgcccacaaactactataccctcaagtgaagctggctcagggtggggctgtcccttccaggagttttgcccctacaaggggttagtcaagaagctgaggcagaactcactgggggtgggcagttaaggtggaggctgattctaattgtctggttgaggggccacaccacctattccccccacctaactcatgccattccagcttccttcaggaccctgcttctgagtgacggaccagctcacacaatgtcttgtttcagtccatgatcccactgacctactcttgcctgctggagggtaatgagaagctttggttctgccatctctcccactctgccaggtgctggctgtggagcaaaggctcacctttgtggagaggataaaacctrcccaacctacctcaccatggtttttcacattgcaaagggtaataacatgggcagtgcggacttaggctaccccctccagtttgctttccgtaaatgcaaattgtccttactgcaagtcaggaatgattgctgactcacagtagggctgctatgcctgtgtgtaaacttggggatggctgagggaacatagactcactcttccacattcccaagttggtctagtgtgctgcccagtagcaaaccatggcagactcaccacctattctgagttccagggctgctgtagggcagggtgggcttcctcccagacytgccttaccctgggctgatctttgcycctggtatgcattaatggactccactgaatcctgaaaaaaaaattaaacttccttcttacttgccagtctctagcttcattgttctctgttcacagggttcctgaaatgccaaccca

SEQ ID NO: 2957 - DNA, 5586 bp, Homo sapiens
caaaggaggctctggcgggcgacggaaggaaccctaaggactctgcaatatgaataattccctagagaacaccatctcctttgaagagtacatccgagtaaaggcacggtctgtcccgcaacacaggatgaaggaatttctggactcactggcctctaaggggccagaagcccttcaggagttccagcagacagccaccactaccatggtgtaccaacagggtgggaactgcatatacacagacagcactgaagtggctgggtctttgcttgaacttgcctgtccagtcaccaccagtgttcagccacaaacccagcaagaacagcagatccaggttcagcagccgcagcaggttcaggtccaggtgcaggtacagcagtctccgcaacaggtctcggctcagctctccccacaactcaccgttcaccagcctactgagcaacccatccaggtccaggtgcagatccaaggccaggcaccacagtcagcagccccctccattcagaccccgtctctgcagagtcccagtccctcgcagctgcaagcagctcagatccaggtgcagcacgtgcaagcagcccagcagatccaggctgcagaaatcccggaggagcacatcccacatcagcaaatccaggctcagctggtggctggccagtctcttgctggtggtcagcagatccaaatccagaccgtgggtgccctttccccaccaccatcccagcagggctcaccccgggaaggggagcggcgggttggcacggccagtgtcctccaaccagtgaagaagcgcaaagtggacatgcccatcactgtgtcctacgccatctcagggcagccggtggccaccgtgctggccattccacagggccagcagcagagttatgtgtctttgaggccagacttactgacagtagacagtgcccacctgtacagtgccactgggaccattactagccctacaggagaaacctggaccatccctgtttattctgcccagccccggggggaccctcagcagcagagcattacccacattgccattccccaggaagcctacaacgcagttcacgtcagtggctcacccacagccctggcagctgttaagctggaggatgacaaggagaagatggtgggcaccacatctgtagtgaaaaactcccatgaagaggtagtgcagacccttgcaaactctctctttccagcacagttcatgaatggcaacatccacattccagtggctgtgcaggctgtggcaggcacgtaccagaatacggctcaaactgtccatatatgggacccccaacagcagccgcagcagcaaactccccaggaacagacaccaccaccacagcagcagcagcagcaactccaagttacttgttcagctcaaactgtccaggttgctgaagttgaaccacagtcacagccacagccttccccagaacttctgcttccaaattctttgaagccagaagaagggcttgaagtatggaaaaactgggcccagaccaagaatgctgaactagagaaggatgctcagaacagattggcacccattgggaggcgccaactgctgcgattccaggaagatctcatctcctctgctgtggcagagttgaattatgggctctgtctaatgacacgggaagctcgaaatggagaaggtgaaccctatgacccagatgtgctctactatattttcctgtgtattcaaaagtatctttttgaaaatggaagggtagatgacattttctccgatctttattatgttcggttcacggagtggctacatgaagttctgaaggatgttcagccccgggtcactccacttggctatgtcttgcccagccacgtgactgaggagatgctatgggagtgcaagcagcttggggctcactccccctccaccttgctgaccaccctcatgttctttaataccaagtacttcctattgaagacagtggaccagcacatgaagctggccttctccaaggtcttgcgacagacaaagaagaacccctctaatcccaaggataaaagcacgagtatccggtacttgaaggcccttggaatacaccagactggccagaaagttacagatgacatgtatgcagaacagacggaaaatccagagaatccattgagatgtcccatcaagctctatgatttctacctcttcaaatgcccccagagtgtgaaaggccggaatgacaccttttacctgacacctgagccagtggtggcccccaacagcccaatctggtactcagtccagcctatcagcagagagcagatgggacaaatgctgacgcggatcctggtgataagagaaattcaggaggccatcgcagtggccartgcaagcactatgcactgagatgccttggccatggcacaagagaaaccagccaggaaaaaccagacagactttcacactaaagaagaggcctccatttttttttttcttttttttattggtgtagttacgaagcctttcaggctgcttctgtttaaaatataaaagaaaactttgccccctttgcatcttcataaacctgctgcggcagactcctcagccgatggtggctctgggtttccttgagtgtcatatgtcctagaaagttgctggctgactcttttttgtctggggcctggggaaagggcttggactgtgaaaagaaatgtggcccctttccatcttcaagagagatggaattaatgatggatggaccctggagggaatctccccagccgacttccactgggctgacagactttgctgaccacaggggaacgatgttcttttctttcttcatgatcagacataaacttagcatcttaatggaagaaaaatgaggggaacttcaattatgatttattaaagacaatttctattacaccctcctttatgacaagtgacattttagatgtaaaagtaaaaactttaccatgccttttttttttttgttggcctaacattgaggccttaaaacctgaggctcctgtgcctgatggaattcttgtaacatacacttgtgtatcatataaagataccactctgtttctcttatgtattcttamtctagttgtttattaagaatgacaagcacgtcttttcaacatgttagtgaacaacgtctctttattttggggaggagcccggcgggacagtagaagtaaacccttgcctgttaattgaactggccgaggtcctgcggggagtgtggggtgggacgtgaagtggcagctcctcagtgacaaggccactatgtgctatacgcatgcgctgtttcttcagcgccagctccgcccccgcygcagcgaggcgggtaggttccgcccgcgcgcactacgccctgacgtcagcgtcgcgcgcagcgcagtgacgaaatcggctggtttatattggcgcggcccagacggcagaggtctctgcggcgcggtcctcggagacacgcggcggtgtcctgtgttggccatggccgactacctgattagtgggggcacgtcctacgtgccagacgacggactcacagcacagacttctgctctgaccaagaaaatcactcttaagaccccactggtttcctctcccatggacacagtcacagaggctgggatggccatagcaatggcgcttacaggcggtattggcttcatccaccacaactgtacacctgaattccaggccaatgaagttcggaaagtgaagaaatatgaacagggattcatcacagaccctgtggtcctcagccccaaggatcgcgtgcgggatgtttttgaggccaaggcccggcatggtttctgcggtatcccaatcacagacacaggccggatggggagccgcttggtgggcatcatctcctccagggacattgattttctcaaagaggaggaacatgactgtttcttggaagagataatgacaaagagggaagacttggtggtagcccctgcaggcatcacactgaaggaggcaaatgaaattctgcagcgcagcaagaagggtgcccggacagacctgaagaagaatcgggactacccactagcctccaaagatgccaagaaacagctgctgtgtggggcagccattggcactcatgaggatgacaagtataggctggacttgctcgcccaggctggtgtggatgtagtggttttggactcttcccagggaaattccatcttccagatcaatatgatcaagtacatcaaagacaaataccctaatctccaagtcattggaggcaatgtggtcactgctgcccaggccaagaacctcattgatgcaggtgtggatgccctgcgggtgggcatgggaagtggctccatctgcattacgcaggaagtgctggcctgtgggcggccccaagcaacagcagtgtacaaggtgtcagagtatgcacggcgctttggtgttccggtcattgctgatggaggaatccaaaatgtgggtcatattgcgaaagccttggcccttggggcctccacagtcatgatgggctctctcctggctgccaccactgaggcccctggtgaatacttcttttccgatgggatccggctaaagaaatatcgcggtatgggttctctcgatgccatggacaagcacctcagcagccagaacagatatttcagtgaagctgacaaaatcaaagtggcccagggagtgtctggtgctgtgcaggacaaagggtcaatccacaaatttgtcccttacctgattgctggcatccaacactcatgccaggacattggtgccaagagcttgacccaaagccatgatgtactctggggagcttaagtttgagaagagaacgtcctcagcccaggtggaaggtggcgtccatagcctccattcgtatgagaagcggcttttctgaaaagggatccagcacacctcctcggtttttttttcaataaaagtttagaaagaaaaaagtgatgcctgatctttcaacagacakgtggggctctgtagctgccactaccacagatgcacacaaaaacagcaccctcatttccagggggagcytcagsscccgagataaatgtgctccatggacctggaagcgggtagttccaggtccaaaaagttcctcctgaggctgctcacaaaacagctgactatagctatagctatggctcttggggtttcagtctcacactgagcatctgactctggctcccaaggggtcaaagaacaagccctgggactggcatacacagggcatcctgctagcccatagcttggccatataggaccaggtcaacacacatatatattccctaacttgaatctctctcggccaggcacattggctcacgtctgtaatcccagcactttgggaggcaggtggatcacttgagrtcaggagttcgagaccatcctggccaacatggtgaaccctttctctactaaaaatacaaaaattagctgggcgtggtgatgcatacctctagtcccagctactcaggaggctgaggcaggagaatcactgaaacccaggaggcggaggttgcagtgagctgagactgcgccactgcactccaccctggcgaaagagcaagactcatctccag

SEQ ID NO: 2958 - DNA, 5947 bp, Homo sapiens
caaaggaggctctggcgggcgacggaaggaaccctaaggactctgcaatatgaataattccctagagaacaccatctcctttgaagagtacatccgagtaaaggcacggtctgtcccgcaacacaggatgaaggaatttctggactcactggcctctaaggggccagaagcccttcaggagttccagcagacagccaccactaccatggtgtaccaacagggtgggaactgcatatacacagacagcactgaagtggctgggtctttgcttgaacttgcctgtccagtcaccaccagtgttcagccacaaacccagcaagaacagcagatccaggttcagcagccgcagcaggttcaggtccaggtgcaggtacagcagtctccgcaacaggtctcggctcagctctccccacaactcaccgttcaccagcctactgagcaacccatccaggtccaggtgcagatccaaggccaggcaccacagtcagcagccccctccattcagaccccgtctctgcagagtcccagtccctcgcagctgcaagcagctcagatccaggtgcagcacgtgcaagcagcccagcagatccaggctgcagaaatcccggaggagcacatcccacatcagcaaatccaggctcagctggtggctggccagtctcttgctggtggtcagcagatccaaatccagaccgtgggtgccctttccccaccaccatcccagcagggctcaccccgggaaggggagcggcgggttggcacggccagtgtcctccaaccagtgaagaagcgcaaagtggacatgcccatcactgtgtcctacgccatctcagggcagccggtggccaccgtgctggccattccacagggccagcagcagagttatgtgtctttgaggccagacttactgacagtagacagtgcccacctgtacagtgccactgggaccattactagccctacaggagaaacctggaccatccctgtttattctgcccagccccggggggaccctcagcagcagagcattacccacattgccattccccaggaagcctacaacgcagttcacgtcagtggctcacccacagccctggcagctgttaagctggaggatgacaaggagaagatggtgggcaccacatctgtagtgaaaaactcccatgaagaggtagtgcagacccttgcaaactctctctttccagcacagttcatgaatggcaacatccacattccagtggctgtgcaggctgtggcaggcacgtaccagaatacggctcaaactgtccatatatgggacccccaacagcagccgcagcagcaaactccccaggaacagacaccaccaccacagcagcagcagcagcaactccaagttacttgttcagctcaaactgtccaggttgctgaagttgaaccacagtcacagccacagccttccccagaacttctgcttccaaattctttgaagccagaagaagggcttgaagtatggaaaaactgggcccagaccaagaatgctgaactagagaaggatgctcagaacagattggcacccattgggaggcgccaactgctgcgattccaggaagatctcatctcctctgctgtggcagagttgaattatgggctctgtctaatgacacgggaagctcgaaatggagaaggtgaaccctatgacccagatgtgctctactatattttcctgtgtattcaaaagtatctttttgaaaatggaagggtagatgacattttctccgatctttattatgttcggttcacggagtggctacatgaagttctgaaggatgttcagccccgggtcactccacttggctatgtcttgcccagccacgtgactgaggagatgctatgggagtgcaagcagcttggggctcactccccctccaccttgctgaccaccctcatgttctttaataccaagtaagtgttctagaggctccactgctggcatctgtccagtgaagagtgtggaarctatccaagaggccttctgaattcctctgacatatatttgagaaactgggctactgaaagccctaaccccacttggctgcattttatttggtaaccagtgaggcaaacacccttgccagacccctaccatccatcttgatgtggttcctgcactggacactgcttgggtacttcctattgaagacagtggaccagcacatgaagctggccttctccaaggtcttgcgacagacaaagaagaacccctctaatcccaaggataaaagcacgagtatccggtacttgaaggcccttggaatacaccagactggccagaaagttacagatgacatgtatgcagaacagacggaaaatccagagaatccattgagatgtcccatcaagctctatgatttctacctcttcaaatgcccccagagtgtgaaaggccggaatgacaccttttacctgacacctgagccagtggtggcccccaacagcccaatctggtactcagtccagcctatcagcagagagcagatgggacaaatgctgacgcggatcctggtgataagagaaattcaggaggccatcgcagtggccartgcaagcactatgcactgagatgccttggccatggcacaagagaaaccagccaggaaaaaccagacagactttcacactaaagaagaggcctccatttttttttttcttttttttattggtgtagttacgaagcctttcaggctgcttctgtttaaaatataaaagaaaactttgccccctttgcatcttcataaacctgctgcggcagactcctcagccgatggtggctctgggtttccttgagtgtcatatgtcctagaaagttgctggctgactcttttttgtctggggcctggggaaagggcttggactgtgaaaagaaatgtggcccctttccatcttcaagagagatggaattaatgatggatggaccctggagggaatctccccagccgacttccactgggctgacagactttgctgaccacaggggaacgatgttcttttctttcttcatgatcagacataaacttagcatcttaatggaagaaaaatgaggggaacttcaattatgatttattaaagacaatttctattacaccctcctttatgacaagtgacattttagatgtaaaagtaaaaactttaccatgccttttttttttttgttggcctaacattgaggccttaaaacctgaggctcctgtgcctgatggaattcttgtaacatacacttgtgtatcatataaagataccactctgtttctcttatgtattcttamtctagttgtttattaagaatgacaagcacgtcttttcaacatgttagtgaacaacgtctctttattttggggaggagcccggcgggacagtagaagtaaacccttgcctgttaattgaactggccgaggtcctgcggggagtgtggggtgggacgtgaagtggcagctcctcagtgacaaggccactatgtgctatacgcatgcgctgtttcttcagcgccagctccgcccccgcygcagcgaggcgggtaggttccgcccgcgcgcactacgccctgacgtcagcgtcgcgcgcagcgcagtgacgaaatcggctggtttatattggcgcggcccagacggcagaggtctctgcggcgcggtcctcggagacacgcggcggtgtcctgtgttggccatggccgactacctgattagtgggggcacgtcctacgtgccagacgacggactcacagcacagcagctcttcaactgcggagacggcctcacctacaatgactttctcattctccctgggtacatcgacttcactgcagaccaggtggacctgacttctgctctgaccaagaaaatcactcttaagaccccactggtttcctctcccatggacacagtcacagaggctgggatggccatagcaatggcgcttacaggcggtattggcttcatccaccacaactgtacacctgaattccaggccaatgaagttcggaaagtgaagaaatatgaacagggattcatcacagaccctgtggtcctcagccccaaggatcgcgtgcgggatgtttttgaggccaaggcccggcatggtttctgcggtatcccaatcacagacacaggccggatggggagccgcttggtgggcatcatctcctccagggacattgattttctcaaagaggaggaacatgactgtttcttggaagagataatgacaaagagggaagacttggtggtagcccctgcaggcatcacactgaaggaggcaaatgaaattctgcagcgcagcaagaagggaaagttgcccattgtaaatgaagatgatgagcttgtggccatcattgcccggacagacctgaagaagaatcgggactacccactagcctccaaagatgccaagaaacagctgctgtgtggggcagccattggcactcatgaggatgacaagtataggctggacttgctcgcccaggctggtgtggatgtagtggttttggactcttcccagggaaattccatcttccagatcaatatgatcaagtacatcaaagacaaataccctaatctccaagtcattggaggcaatgtggtcactgctgcccaggccaagaacctcattgatgcaggtgtggatgccctgcgggtgggcatgggaagtggctccatctgcattacgcaggaagtgctggcctgtgggcggccccaagcaacagcagtgtacaaggtgtcagagtatgcacggcgctttggtgttccggtcattgctgatggaggaatccaaaatgtgggtcatattgcgaaagccttggcccttggggcctccacagtcatgatgggctctctcctggctgccaccactgaggcccctggtgaatacttcttttccgatgggatccggctaaagaaatatcgcggtatgggttctctcgatgccatggacaagcacctcagcagccagaacagatatttcagtgaagctgacaaaatcaaagtggcccagggagtgtctggtgctgtgcaggacaaagggtcaatccacaaatttgtcccttacctgattgctggcatccaacactcatgccaggacattggtgccaagagcttgacccaagtccgagccatgatgtactctggggagcttaagtttgagaagagaacgtcctcagcccaggtggaaggtggcgtccatagcctccattcgtatgagaagcggcttttctgaaaagggatccagcacacctcctcggtttttttttcaataaaagtttagaaagaaaaaagtgatgcctgatctttcaacagacakgtggggctctgtagctgccactaccacagatgcacacaaaaacagcaccctcatttccagggggagcytcagsscccgagataaatgtgctccatggacctggaagcgggtagttccaggtccaaaaagttcctcctgaggctgctcacaaaacagctgactatagctatagctatggctcttggggtttcagtctcacactgagcatctgactctggctcccaaggggtcaaagaacaagccctgggactggcatacacagggcatcctgctagcccatagcttggccatataggaccaggtcaacacacatatatattccctaacttgaatctctctcggccaggcacattggctcacgtctgtaatcccagcactttgggaggcaggtggatcacttgagrtcaggagttcgagaccatcctggccaacatggtgaaccctttctctactaaaaatacaaaaattagctgggcgtggtgatgcatacctctagtcccagctactcaggaggctgaggcaggagaatcactgaaacccaggaggcggaggttgcagtgagctgagactgcgccactgcactccaccctggcgaaagagcaagactcatctccag

SEQ ID NO: 2959 - DNA, 5726 bp, Homo sapiens
caaaggaggctctggcgggcgacggaaggaaccctaaggactctgcaatatgaataattccctagagaacaccatctcctttgaagagtacatccgagtaaaggcacggtctgtcccgcaacacaggatgaaggaatttctggactcactggcctctaaggggccagaagcccttcaggagttccagcagacagccaccactaccatggtgtaccaacagggtgggaactgcatatacacagacagcactgaagtggctgggtctttgcttgaacttgcctgtccagtcaccaccagtgttcagccacaaacccagcaagaacagcagatccaggttcagcagccgcagcaggttcaggtccaggtgcaggtacagcagtctccgcaacaggtctcggctcagctctccccacaactcaccgttcaccagcctactgagcaacccatccaggtccaggtgcagatccaaggccaggcaccacagtcagcagccccctccattcagaccccgtctctgcagagtcccagtccctcgcagctgcaagcagctcagatccaggtgcagcacgtgcaagcagcccagcagatccaggctgcagaaatcccggaggagcacatcccacatcagcaaatccaggctcagctggtggctggccagtctcttgctggtggtcagcagatccaaatccagaccgtgggtgccctttccccaccaccatcccagcagggctcaccccgggaaggggagcggcgggttggcacggccagtgtcctccaaccagtgaagaagcgcaaagtggacatgcccatcactgtgtcctacgccatctcagggcagccggtggccaccgtgctggccattccacagggccagcagcagagttatgtgtctttgaggccagacttactgacagtagacagtgcccacctgtacagtgccactgggaccattactagccctacaggagaaacctggaccatccctgtttattctgcccagccccggggggaccctcagcagcagagcattacccacattgccattccccaggaagcctacaacgcagttcacgtcagtggctcacccacagccctggcagctgttaagctggaggatgacaaggagaagatggtgggcaccacatctgtagtgaaaaactcccatgaagaggtagtgcagacccttgcaaactctctctttccagcacagttcatgaatggcaacatccacattccagtggctgtgcaggctgtggcaggcacgtaccagaatacggctcaaactgtccatatatgggacccccaacagcagccgcagcagcaaactccccaggaacagacaccaccaccacagcagcagcagcagcaactccaagttacttgttcagctcaaactgtccaggttgctgaagttgaaccacagtcacagccacagccttccccagaacttctgcttccaaattctttgaagccagaagaagggcttgaagtatggaaaaactgggcccagaccaagaatgctgaactagagaaggatgctcagaacagattggcacccattgggaggcgccaactgctgcgattccaggaagatctcatctcctctgctgtggcagagttgaattatgggctctgtctaatgacacgggaagctcgaaatggagaaggtgaaccctatgacccagatgtgctctactatattttcctgtgtattcaaaagtatctttttgaaaatggaagggtagatgacattttctccgatctttattatgttcggttcacggagtggctacatgaagttctgaaggatgttcagccccgggtcactccacttggctatgtcttgcccagccacgtgactgaggagatgctatgggagtgcaagcagcttggggctcactccccctccaccttgctgaccaccctcatgttctttaataccaagtacttcctattgaagacagtggaccagcacatgaagctggccttctccaaggtcttgcgacagacaaagaagaacccctctaatcccaaggataaaagcacgagtatccggtacttgaaggcccttggaatacaccagactggccagaaagttacagatgacatgtatgcagaacagacggaaaatccagagaatccattgagatgtcccatcaagctctatgatttctacctcttcaaatgcccccagagtgtgaaaggccggaatgacaccttttacctgacacctgagccagtggtggcccccaacagcccaatctggtactcagtccagcctatcagcagagagcagatgggacaaatgctgacgcggatcctggtgataagagaaattcaggaggccatcgcagtggccartgcaagcactatgcactgagatgccttggccatggcacaagagaaaccagccaggaaaaaccagacagactttcacactaaagaagaggcctccatttttttttttcttttttttattggtgtagttacgaagcctttcaggctgcttctgtttaaaatataaaagaaaactttgccccctttgcatcttcataaacctgctgcggcagactcctcagccgatggtggctctgggtttccttgagtgtcatatgtcctagaaagttgctggctgactcttttttgtctggggcctggggaaagggcttggactgtgaaaagaaatgtggcccctttccatcttcaagagagatggaattaatgatggatggaccctggagggaatctccccagccgacttccactgggctgacagactttgctgaccacaggggaacgatgttcttttctttcttcatgatcagacataaacttagcatcttaatggaagaaaaatgaggggaacttcaattatgatttattaaagacaatttctattacaccctcctttatgacaagtgacattttagatgtaaaagtaaaaactttaccatgccttttttttttttgttggcctaacattgaggccttaaaacctgaggctcctgtgcctgatggaattcttgtaacatacacttgtgtatcatataaagataccactctgtttctcttatgtattcttamtctagttgtttattaagaatgacaagcacgtcttttcaacatgttagtgaacaacgtctctttattttggggaggagcccggcgggacagtagaagtaaacccttgcctgttaattgaactggccgaggtcctgcggggagtgtggggtgggacgtgaagtggcagctcctcagtgacaaggccactatgtgctatacgcatgcgctgtttcttcagcgccagctccgcccccgcygcagcgaggcgggtaggttccgcccgcgcgcactacgccctgacgtcagcgtcgcgcgcagcgcagtgacgaaatcggctggtttatattggcgcggcccagacggcagaggtctctgcggcgcggtcctcggagacacgcggcggtgtcctgtgttggccatggccgactacctgattagtgggggcacgtcctacgtgccagacgacggactcacagcacagcagctcttcaactgcggagacggcctcacctacaatgactttctcattctccctgggtacatcgacttcactgcagaccaggtggacctgacttctgctctgaccaagaaaatcactcttaagaccccactggtttcctctcccatggacacagtcacagaggctgggatggccatagcaatggcgcttacaggcggtattggcttcatccaccacaactgtacacctgaattccaggccaatgaagttcggaaagtgaagaaatatgaacagggattcatcacagaccctgtggtcctcagccccaaggatcgcgtgcgggatgtttttgaggccaaggcccggcatggtttctgcggtatcccaatcacagacacaggccggatggggagccgcttggtgggcatcatctcctccagggacattgattttctcaaagaggaggaacatgactgtttcttggaagagataatgacaaagagggaagacttggtggtagcccctgcaggcatcacactgaaggaggcaaatgaaattctgcagcgcagcaagaagggaaagttgcccattgtaaatgaagatgatgagcttgtggccatcattgcccggacagacctgaagaagaatcgggactacccactagcctccaaagatgccaagaaacagctgctgtgtggggcagccattggcactcatgaggatgacaagtataggctggacttgctcgcccaggctggtgtggatgtagtggttttggactcttcccagggaaattccatcttccagatcaatatgatcaagtacatcaaagacaaataccctaatctccaagtcattggaggcaatgtggtcactgctgcccaggccaagaacctcattgatgcaggtgtggatgccctgcgggtgggcatgggaagtggctccatctgcattacgcaggaagtgctggcctgtgggcggccccaagcaacagcagtgtacaaggtgtcagagtatgcacggcgctttggtgttccggtcattgctgatggaggaatccaaaatgtgggtcatattgcgaaagccttggcccttggggcctccacagtcatgatgggctctctcctggctgccaccactgaggcccctggtgaatacttcttttccgatgggatccggctaaagaaatatcgcggtatgggttctctcgatgccatggacaagcacctcagcagccagaacagatatttcagtgaagctgacaaaatcaaagtggcccagggagtgtctggtgctgtgcaggacaaagggtcaatccacaaatttgtcccttacctgattgctggcatccaacactcatgccaggacattggtgccaagagcttgacccaagtccgagccatgatgtactctggggagcttaagtttgagaagagaacgtcctcagcccaggtggaaggtggcgtccatagcctccattcgtatgagaagcggcttttctgaaaagggatccagcacacctcctcggtttttttttcaataaaagtttagaaagaaaaaagtgatgcctgatctttcaacagacakgtggggctctgtagctgccactaccacagatgcacacaaaaacagcaccctcatttccagggggagcytcagsscccgagataaatgtgctccatggacctggaagcgggtagttccaggtccaaaaagttcctcctgaggctgctcacaaaacagctgactatagctatagctatggctcttggggtttcagtctcacactgagcatctgactctggctcccaaggggtcaaagaacaagccctgggactggcatacacagggcatcctgctagcccatagcttggccatataggaccaggtcaacacacatatatattccctaacttgaatctctctcggccaggcacattggctcacgtctgtaatcccagcactttgggaggcaggtggatcacttgagrtcaggagttcgagaccatcctggccaacatggtgaaccctttctctactaaaaatacaaaaattagctgggcgtggtgatgcatacctctagtcccagctactcaggaggctgaggcaggagaatcactgaaacccaggaggcggaggttgcagtgagctgagactgcgccactgcactccaccctggcgaaagagcaagactcatctccag

SEQ ID NO: 2960 - DNA, 4978 bp, Homo sapiens
caaaggaggctctggcgggcgacggaaggaaccctaaggactctgcaatatgaataattccctagagaacaccatctcctttgaagagtacatccgagtaaaggcacggtctgtcccgcaacacaggatgaaggaatttctggactcactggcctctaaggggccagaagcccttcaggagttccagcagacagccaccactaccatggtgtaccaacagggtgggaactgcatatacacagacagcactgaagtggctgggtctttgcttgaacttgcctgtccagtcaccaccagtgttcagccacaaacccagcaagaacagcagatccaggttcagcagccgcagcaggttcaggtccaggtgcaggtacagcagtctccgcaacaggtctcggctcagctctccccacaactcaccgttcaccagcctactgagcaacccatccaggtccagcacagttcatgaatggcaacatccacattccagtggctgtgcaggctgtggcaggcacgtaccagaatacggctcaaactgtccatatatgggacccccaacagcagccgcagcagcaaactccccaggaacagacaccaccaccacagcagcagcagcagcaactccaagttacttgttcagctcaaactgtccaggttgctgaagttgaaccacagtcacagccacagccttccccagaacttctgcttccaaattctttgaagccagaagaagggcttgaagtatggaaaaactgggcccagaccaagaatgctgaactagagaaggatgctcagaacagattggcacccattgggaggcgccaactgctgcgattccaggaagatctcatctcctctgctgtggcagagttgaattatgggctctgtctaatgacacgggaagctcgaaatggagaaggtgaaccctatgacccagatgtgctctactatattttcctgtgtattcaaaagtatctttttgaaaatggaagggtagatgacattttctccgatctttattatgttcggttcacggagtggctacatgaagttctgaaggatgttcagccccgggtcactccacttggctatgtcttgcccagccacgtgactgaggagatgctatgggagtgcaagcagcttggggctcactccccctccaccttgctgaccaccctcatgttctttaataccaagtacttcctattgaagacagtggaccagcacatgaagctggccttctccaaggtcttgcgacagacaaagaagaacccctctaatcccaaggataaaagcacgagtatccggtacttgaaggcccttggaatacaccagactggccagaaagttacagatgacatgtatgcagaacagacggaaaatccagagaatccattgagatgtcccatcaagctctatgatttctacctcttcaaatgcccccagagtgtgaaaggccggaatgacaccttttacctgacacctgagccagtggtggcccccaacagcccaatctggtactcagtccagcctatcagcagagagcagatgggacaaatgctgacgcggatcctggtgataagagaaattcaggaggccatcgcagtggccartgcaagcactatgcactgagatgccttggccatggcacaagagaaaccagccaggaaaaaccagacagactttcacactaaagaagaggcctccatttttttttttcttttttttattggtgtagttacgaagcctttcaggctgcttctgtttaaaatataaaagaaaactttgccccctttgcatcttcataaacctgctgcggcagactcctcagccgatggtggctctgggtttccttgagtgtcatatgtcctagaaagttgctggctgactcttttttgtctggggcctggggaaagggcttggactgtgaaaagaaatgtggcccctttccatcttcaagagagatggaattaatgatggatggaccctggagggaatctccccagccgacttccactgggctgacagactttgctgaccacaggggaacgatgttcttttctttcttcatgatcagacataaacttagcatcttaatggaagaaaaatgaggggaacttcaattatgatttattaaagacaatttctattacaccctcctttatgacaagtgacattttagatgtaaaagtaaaaactttaccatgccttttttttttttgttggcctaacattgaggccttaaaacctgaggctcctgtgcctgatggaattcttgtaacatacacttgtgtatcatataaagataccactctgtttctcttatgtattcttamtctagttgtttattaagaatgacaagcacgtcttttcaacatgttagtgaacaacgtctctttattttggggaggagcccggcgggacagtagaagtaaacccttgcctgttaattgaactggccgaggtcctgcggggagtgtggggtgggacgtgaagtggcagctcctcagtgacaaggccactatgtgctatacgcatgcgctgtttcttcagcgccagctccgcccccgcygcagcgaggcgggtaggttccgcccgcgcgcactacgccctgacgtcagcgtcgcgcgcagcgcagtgacgaaatcggctggtttatattggcgcggcccagacggcagaggtctctgcggcgcggtcctcggagacacgcggcggtgtcctgtgttggccatggccgactacctgattagtgggggcacgtcctacgtgccagacgacggactcacagcacagcagctcttcaactgcggagacggcctcacctacaatgactttctcattctccctgggtacatcgacttcactgcagaccaggtggacctgacttctgctctgaccaagaaaatcactcttaagaccccactggtttcctctcccatggacacagtcacagaggctgggatggccatagcaatggcgcttacaggcggtattggcttcatccaccacaactgtacacctgaattccaggccaatgaagttcggaaagtgaagaaatatgaacagggattcatcacagaccctgtggtcctcagccccaaggatcgcgtgcgggatgtttttgaggccaaggcccggcatggtttctgcggtatcccaatcacagacacaggccggatggggagccgcttggtgggcatcatctcctccagggacattgattttctcaaagaggaggaacatgactgtttcttggaagagataatgacaaagagggaagacttggtggtagcccctgcaggcatcacactgaaggaggcaaatgaaattctgcagcgcagcaagaagggaaagttgcccattgtaaatgaagatgatgagcttgtggccatcattgcccggacagacctgaagaagaatcgggactacccactagcctccaaagatgccaagaaacagctgctgtgtggggcagccattggcactcatgaggatgacaagtataggctggacttgctcgcccaggctggtgtggatgtagtggttttggactcttcccagggaaattccatcttccagatcaatatgatcaagtacatcaaagacaaataccctaatctccaagtcattggaggcaatgtggtcactgctgcccaggccaagaacctcattgatgcaggtgtggatgccctgcgggtgggcatgggaagtggctccatctgcattacgcaggaagtgctggcctgtgggcggccccaagcaacagcagtgtacaaggtgtcagagtatgcacggcgctttggtgttccggtcattgctgatggaggaatccaaaatgtgggtcatattgcgaaagccttggcccttggggcctccacagtcatgatgggctctctcctggctgccaccactgaggcccctggtgaatacttcttttccgatgggatccggctaaagaaatatcgcggtatgggttctctcgatgccatggacaagcacctcagcagccagaacagatatttcagtgaagctgacaaaatcaaagtggcccagggagtgtctggtgctgtgcaggacaaagggtcaatccacaaatttgtcccttacctgattgctggcatccaacactcatgccaggacattggtgccaagagcttgacccaagtccgagccatgatgtactctggggagcttaagtttgagaagagaacgtcctcagcccaggtggaaggtggcgtccatagcctccattcgtatgagaagcggcttttctgaaaagggatccagcacacctcctcggtttttttttcaataaaagtttagaaagaaaaaagtgatgcctgatctttcaacagacakgtggggctctgtagctgccactaccacagatgcacacaaaaacagcaccctcatttccagggggagcytcagsscccgagataaatgtgctccatggacctggaagcgggtagttccaggtccaaaaagttcctcctgaggctgctcacaaaacagctgactatagctatagctatggctcttggggtttcagtctcacactgagcatctgactctggctcccaaggggtcaaagaacaagccctgggactggcatacacagggcatcctgctagcccatagcttggccatataggaccaggtcaacacacatatatattccctaacttgaatctctctcggccaggcacattggctcacgtctgtaatcccagcactttgggaggcaggtggatcacttgagrtcaggagttcgagaccatcctggccaacatggtgaaccctttctctactaaaaatacaaaaattagctgggcgtggtgatgcatacctctagtcccagctactcaggaggctgaggcaggagaatcactgaaacccaggaggcggaggttgcagtgagctgagactgcgccactgcactccaccctggcgaaagagcaagactcatctccag

SEQ ID NO: 2961 - DNA, 4074 bp, Homo sapiens
caaaggaggctctggcgggcgacggaaggaaccctaaggactctgcaatatgaataattccctagagaacaccatctcctttgaagagtacatccgagtaaaggcacggtctgtcccgcaacacaggatgaaggaatttctggactcactggcctctaaggggccagaagcccttcaggagttccagcagacagccaccactaccatggtgtaccaacagggtgggaactgcatatacacagacagcactgaagtggctgggtctttgcttgaacttgcctgtccagtcaccaccagtgttcagccacaaacccagcaagaacagcagatccaggttcagcagccgcagcaggttcaggtccaggtgcaggtacagcagtctccgcaacaggtctcggctcagctctccccacaactcaccgttcaccagcctactgagcaacccatccaggtccaggtgcagatccaaggccaggcaccacagtcagcagccccctccattcagaccccgtctctgcagagtcccagtccctcgcagctgcaagcagctcagatccaggtgcagcacgtgcaagcagcccagcagatccaggctgcagaaatcccggaggagcacatcccacatcagcaaatccaggctcagctggtggctggccagtctcttgctggtggtcagcagatccaaatccagaccgtgggtgccctttccccaccaccatcccagcagggctcaccccgggaaggggagcggcgggttggcacggccagtgtcctccaaccagtgaagaagcgcaaagtggacatgcccatcactgtgtcctacgccatctcagggcagccggtggccaccgtgctggccattccacagggccagcagcagagttatgtgtctttgaggccagacttactgacagtagacagtgcccacctgtacagtgccactgggaccattactagccctacaggagaaacctggaccatccctgtttattctgcccagccccggggggaccctcagcagcagagcattacccacattgccattccccaggaagcctacaacgcagttcacgtcagtggctcacccacagccctggcagctgttaagctggaggatgacaaggagaagatggtgggcaccacatctgtagtgaaaaactcccatgaagaggtagtgcagacccttgcaaactctctctttccagcacagttcatgaatggcaacatccacattccagtggctgtgcaggctgtggcaggcacgtaccagaatacggctcaaactgtccatatatgggacccccaacagcagccgcagcagcaaactccccaggaacagacaccaccaccacagcagcagcagcagcaactccaagttacttgttcagctcaaactgtccaggttgctgaagttgaaccacagtcacagccacagccttccccagaacttctgcttccaaattctttgaagccagaagaagggcttgaagtatggaaaaactgggcccagaccaagaatgctgaactagagaaggatgctcagaacagattggcacccattgggaggcgccaactgctgcgattccaggaagatctcatctcctctgctgtggcagagttgaattatgggctctgtctaatgacacgggaagctcgaaatggagaaggtgaaccctatgacccagatgtgctctactatattttcctgtgtattcaaaagtatctttttgaaaatggaagggtagatgacattttctccgatctttattatgttcggttcacggagtggctacatgaagttctgaaggatgttcagccccgggtcactccacttggctatgtcttgcccagccacgtgactgaggagatgctatgggagtgcaagcagcttggggctcactccccctccaccttgctgaccaccctcatgttctttaataccaagtacttcctattgaagacagtggaccagcacatgaagctggccttctccaaggtcttgcgacagacaaagaagaacccctctaatcccaaggataaaagcacgagtatccggtacttgaaggcccttggaatacaccagactggccagaaagttacagatgacatgtatgcagaacagacggaaaatccagagaatccattgagatgtcccatcaagctctatgatttctacctcttcaaatgcccccagagtgtgaaaggccggaatgacaccttttacctgacacctgagccagtggtggcccccaacagcccaatctggtactcagtccagcctatcagcagagagcagatgggacaaatgctgacgcggatcctggtgataagagaaattcaggaggccatcgcagtggccartgcaagcactatgcactgagatgccttggccatggcacaagagaaaccagccaggaaaaaccagacagactttcacactaaagaagaggcctccatttttttttttcttttttttattggtgtagttacgaagcctttcaggctgcttctgtttaaaatataaaagaaaactttgccccctttgcatcttcataaacctgctgcggcagactcctcagccgatggtggctctgggtttccttgagtgtcatatgtcctagaaagttgctggctgactcttttttgtctggggcctggggaaagggcttggactgtgaaaagaaatgtggcccctttccatcttcaagagagatggaattaatgatggatggaccctggagggaatctccccagccgacttccactgggctgacagactttgctgaccacaggggaacgatgttcttttctttcttcatgatcagacataaacttagcatcttaatggaagaaaaatgaggggaacttcaattatgatttattaaagacaatttctattacaccctcctttatgacaagtgacattttagatgtaaaagtaaaaactttaccatgccttttttttttttgttggcctaacattgaggccttaaaacctgaggctcctgtgcctgatggaattcttgtaacatacacttgtgtatcatataaagataccactctgtttctcttatgtattcttamtctagttgtttattaagaatgacaagcacgtcttttcaacatgttagtgaacaacgtctctttattttggggaggagcccggcgggacagtagaagtaaacccttgcctgttaattgaactggccgaggtcctgcggggagtgtggggtgggacgtgaagtggcagctcctcagtgacaaggccactatgtgctatacgcatgcgctgtttcttcagcgccagctccgcccccgcygcagcgaggcgggtaggttccgcccgcgcgcactacgccctgacgtcagcgtcgcgcgcagcgcagtgacgaaatcggctggtttatattggcgcggcccagacggcagaggtctctgcggcgcggtcctcggagacacgcggcggtgtcctgtgttggccatggccgactacctgattagtgggggcacgtcctacgtgccagacgacggactcacagcacagcagctcttcaactgcggagacggcctcacctacaagtgcgggcctatggggctcacctgggcgaagagaggggcggcaccctggggaaaaggccagatgggggcttccgagagccgccttgggcgtgggcgtgggggacaggtttcgggaattggccacccacctccggggctcactttgagacatctggagcggtgcttggggtacggagaagcatctcagtagtgcttggaatctcaggccggagattccatgctccagacacatggaattgtcagggtgccaggagcactgatgacagctcggtggcagaaaaggtcccctgtacccatttccaccttgtgctgtgcctgtgacacacagactctgtcagtgccactctctgctcacatgcgttacgggttgattggtacatggggatggagtctcatgctgccctaagctgagagctttactcccaattcactcccttccctcrcagtgactttctcattctccctgggtacatcgacttcactgcagaccaggtg

SEQ ID NO: 2962 - DNA, 5727 bp, Homo sapiens
caaaggaggctctggcgggcgacggaaggaaccctaaggactctgcaatatgaataattccctagagaacaccatctcctttgaagagtacatccgagtaaaggcacggtctgtcccgcaacacaggatgaaggaatttctggactcactggcctctaaggggccagaagcccttcaggagttccagcagacagccaccactaccatggtgtaccaacagggtgggaactgcatatacacagacagcactgaagtggctgggtctttgcttgaacttgcctgtccagtcaccaccagtgttcagccacaaacccagcaagaacagcagatccaggttcagcagccgcagcaggttcaggtccaggtgcaggtacagcagtctccgcaacaggtctcggctcagctctccccacaactcaccgttcaccagcctactgagcaacccatccaggtccaggtgcagatccaaggccaggcaccacagtcagcagccccctccattcagaccccgtctctgcagagtcccagtccctcgcagctgcaagcagctcagatccaggtgcagcacgtgcaagcagcccagcagatccaggctgcagaaatcccggaggagcacatcccacatcagcaaatccaggctcagctggtggctggccagtctcttgctggtggtcagcagatccaaatccagaccgtgggtgccctttccccaccaccatcccagcagggctcaccccgggaaggggagcggcgggttggcacggccagtgtcctccaaccagtgaagaagcgcaaagtggacatgcccatcactgtgtcctacgccatctcagggcagccggtggccaccgtgctggccattccacagggccagcagcagagttatgtgtctttgaggccagacttactgacagtagacagtgcccacctgtacagtgccactgggaccattactagccctacaggagaaacctggaccatccctgtttattctgcccagccccggggggaccctcagcagcagagcattacccacattgccattccccaggaagcctacaacgcagttcacgtcagtggctcacccacagccctggcagctgttaagctggaggatgacaaggagaagatggtgggcaccacatctgtagtgaaaaactcccatgaagaggtagtgcagacccttgcaaactctctctttccagcacagttcatgaatggcaacatccacattccagtggctgtgcaggctgtggcaggcacgtaccagaatacggctcaaactgtccatatatgggacccccaacagcagccgcagcagcaaactccccaggaacagacaccaccaccacagcagcagcagcagcaactccaagttacttgttcagctcaaactgtccaggttgctgaagttgaaccacagtcacagccacagccttccccagaacttctgcttccaaattctttgaagccagaagaagggcttgaagtatggaaaaactgggcccagaccaagaatgctgaactagagaaggatgctcagaacagattggcacccattgggaggcgccaactgctgcgattccaggaagatctcatctcctctgctgtggcagagttgaattatgggctctgtctaatgacacgggaagctcgaaatggagaaggtgaaccctatgacccagatgtgctctactatattttcctgtgtattcaaaagtatctttttgaaaatggaagggtagatgacattttctccgatctttattatgttcggttcacggagtggctacatgaagttctgaaggatgttcagccccgggtcactccacttggctatgtcttgcccagccacgtgactgaggagatgctatgggagtgcaagcagcttggggctcactccccctccaccttgctgaccaccctcatgttctttaataccaagtacttcctattgaagacagtggaccagcacatgaagctggccttctccaaggtcttgcgacagacaaagaagaacccctctaatcccaaggataaaagcacgagtatccggtacttgaaggcccttggaatacaccagactggccagaaagttacagatgacatgtatgcagaacagacggaaaatccagagaatccattgagatgtcccatcaagctctatgatttctacctcttcaaatgcccccagagtgtgaaaggccggaatgacaccttttacctgacacctgagccagtggtggcccccaacagcccaatctggtactcagtccagcctatcagcagagagcagatgggacaaatgctgacgcggatcctggtgataagagaaattcaggaggccatcgcagtggccartgcaagcactatgcactgagatgccttggccatggcacaagagaaaccagccaggaaaaaccagacagactttcacactaaagaagaggcctccatttttttttttcttttttttattggtgtagttacgaagcctttcaggctgcttctgtttaaaatataaaagaaaactttgccccctttgcatcttcataaacctgctgcggcagactcctcagccgatggtggctctgggtttccttgagtgtcatatgtcctagaaagttgctggctgactcttttttgtctggggcctggggaaagggcttggactgtgaaaagaaatgtggcccctttccatcttcaagagagatggaattaatgatggatggaccctggagggaatctccccagccgacttccactgggctgacagactttgctgaccacaggggaacgatgttcttttctttcttcatgatcagacataaacttagcatcttaatggaagaaaaatgaggggaacttcaattatgatttattaaagacaatttctattacaccctcctttatgacaagtgacattttagatgtaaaagtaaaaactttaccatgccttttttttttttgttggcctaacattgaggccttaaaacctgaggctcctgtgcctgatggaattcttgtaacatacacttgtgtatcatataaagataccactctgtttctcttatgtattcttamtctagttgtttattaagaatgacaagcacgtcttttcaacatgttagtgaacaacgtctctttattttggggaggagcccggcgggacagtagaagtaaacccttgcctgttaattgaactggccgaggtcctgcggggagtgtggggtgggacgtgaagtggcagctcctcagtgacaaggccactatgtgctatacgcatgcgctgtttcttcagcgccagctccgcccccgcygcagcgaggcgggtaggttccgcccgcgcgcactacgccctgacgtcagcgtcgcgcgcagcgcagtgacgaaatcggctggtttatattggcgcggcccagacggcagaggtctctgcggcgcggtcctcggagacacgcggcggtgtcctgtgttggccatggccgactacctgattagtgggggcacgtcctacgtgccagacgacggactcacagcacagcagctcttcaactgcggagacggcctcacctacaatgactttctcattctccctgggtacatcgacttcactgcagaccaggtggacctgacttctgctctgaccaagaaaatcactcttaagaccccactggtttcctctcccatggacacagtcacagaggctgggatggccatagcaatggcgcttacaggcggtattggcttcatccaccacaactgtacacctgaattccaggccaatgaagttcggaaagtgaagaaatatgaacagggattcatcacagaccctgtggtcctcagccccaaggatcgcgtgcgggatgtttttgaggccaaggcccggcatggtttctgcggtatcccaatcacagacacaggccggatggggagccgcttggtgggcatcatctcctccagggacattgattttctcaaagaggaggaacatgactgtttcttggaagagataatgacaaagagggaagacttggtggtagcccctgcaggcatcacactgaaggaggcaaatgaaattctgcagcgcagcaagaagggaaagttgcccattgtaaatgaagatgatgagcttgtggccatcattgcccggacagacctgaagaagaatcgggactacccactagcctccaaagatgccaagaaacagctgctgtgtggggcagccattggcactcatgaggatgacaagtataggctggacttgctcgcccaggctggtgtggatgtagtggttttggactcttcccagggaaattccatcttccagatcaatatgatcaagtacatcaaagacaaataccctaatctccaagtcattggaggcaatgtggtcactgctgcccaggccaagaacctcattgatgcaggtgtggatgccctgcgggtgggcatgggaagtggctccatctgcattacgcaggaagtgctggcctgtgggcggccccaagcaacagcagtgtacaaggtgtcagagtatgcacggcgctttggtgttccggtcattgctgatggaggaatccaaaatgtgggtcatattgcgaaagccttggcccttggggctgtccgcagtcatgatgggctctctcctggctgccaccactgaggcccctggtgaatacttcttttccgatgggatccggctaaagaaatatcgcggtatgggttctctcgatgccatggacaagcacctcagcagccagaacagatatttcagtgaagctgacaaaatcaaagtggcccagggagtgtctggtgctgtgcaggacaaagggtcaatccacaaatttgtcccttacctgattgctggcatccaacactcatgccaggacattggtgccaagagcttgacccaagtccgagccatgatgtactctggggagcttaagtttgagaagagaacgtcctcagcccaggtggaaggtggcgtccatagcctccattcgtatgagaagcggcttttctgaaaagggatccagcacacctcctcggtttttttttcaataaaagtttagaaagaaaaaagtgatgcctgatctttcaacagacakgtggggctctgtagctgccactaccacagatgcacacaaaaacagcaccctcatttccagggggagcytcagsscccgagataaatgtgctccatggacctggaagcgggtagttccaggtccaaaaagttcctcctgaggctgctcacaaaacagctgactatagctatagctatggctcttggggtttcagtctcacactgagcatctgactctggctcccaaggggtcaaagaacaagccctgggactggcatacacagggcatcctgctagcccatagcttggccatataggaccaggtcaacacacatatatattccctaacttgaatctctctcggccaggcacattggctcacgtctgtaatcccagcactttgggaggcaggtggatcacttgagrtcaggagttcgagaccatcctggccaacatggtgaaccctttctctactaaaaatacaaaaattagctgggcgtggtgatgcatacctctagtcccagctactcaggaggctgaggcaggagaatcactgaaacccaggaggcggaggttgcagtgagctgagactgcgccactgcactccaccctggcgaaagagcaagactcatctccag

SEQ ID NO: 2963 - DNA, 3539 bp, Homo sapiens
cccccagagtgtgaaaggccggaatgacaccttttacctgacacctgagccagtggtggcccccaacagcccaatctggtactcagtccagcctatcagcagagagcagatgggacaaatgctgacgcggatcctggtgataagagaaattcaggaggccatcgcagtggccartgcaagcactatgcactgagatgccttggccatggcacaagagaaaccagccaggaaaaaccagacagactttcacactaaagaagaggcctccatttttttttttcttttttttattggtgtagttacgaagcctttcaggctgcttctgtttaaaatataaaagaaaactttgccccctttgcatcttcataaacctgctgcggcagactcctcagccgatggtggctctgggtttccttgagtgtcatatgtcctagaaagttgctggctgactcttttttgtctggggcctggggaaagggcttggactgtgaaaagaaatgtggcccctttccatcttcaagagagatggaattaatgatggatggaccctggagggaatctccccagccgacttccactgggctgacagactttgctgaccacaggggaacgatgttcttttctttcttcatgatcagacataaacttagcatcttaatggaagaaaaatgaggggaacttcaattatgatttattaaagacaatttctattacaccctcctttatgacaagtgacattttagatgtaaaagtaaaaactttaccatgccttttttttttttgttggcctaacattgaggccttaaaacctgaggctcctgtgcctgatggaattcttgtaacatacacttgtgtatcatataaagataccactctgtttctcttatgtattcttamtctagttgtttattaagaatgacaagcacgtcttttcaacatgttagtgaacaacgtctctttattttggggaggagcccggcgggacagtagaagtaaacccttgcctgttaattgaactggccgaggtcctgcggggagtgtggggtgggacgtgaagtggcagctcctcagtgacaaggccactatgtgctatacgcatgcgctgtttcttcagcgccagctccgcccccgcygcagcgaggcgggtaggttccgcccgcgcgcactacgccctgacgtcagcgtcgcgcgcagcgcagtgacgaaatcggctggtttatattggcgcggcccagacggcagaggtctctgcggcgcggtcctcggagacacgcggcggtgtcctgtgttggccatggccgactacctgattagtgggggcacgtcctacgtgccagacgacggactcacagcacagcagctcttcaactgcggagacggcctcacctacaatgactttctcattctccctgggtacatcgacttcactgcagaccaggtggacctgacttctgctctgaccaagaaaatcactcttaagaccccactggtttcctctcccatggacacagtcacagaggctgggatggccatagcaatggcgcttacaggcggtattggcttcatccaccacaactgtacacctgaattccaggccaatgaagttcggaaagtgaagaaatatgaacagggattcatcacagaccctgtggtcctcagccccaaggatcgcgtgcgggatgtttttgaggccaaggcccggcatggtttctgcggtatcccaatcacagacacaggccggatggggagccgcttggtgggcatcatctcctccagggacattgattttctcaaagaggaggaacatgactgtttcttggaagagataatgacaaagagggaagacttggtggtagcccctgcaggcatcacactgaaggaggcaaatgaaattctgcagcgcagcaagaagggaaagttgcccattgtaaatgaagatgatgagcttgtggccatcattgcccggacagacctgaagaagaatcgggactacccactagcctccaaagatgccaagaaacagctgctgtgtggggcagccattggcactcatgaggatgacaagtataggctggacttgctcgcccaggctggtgtggatgtagtggttttggactcttcccagggaaattccatcttccagatcaatatgatcaagtacatcaaagacaaataccctaatctccaagtcattggaggcaatgtggtcactgctgcccaggccaagaacctcattgatgcaggtgtggatgccctgcgggtgggcatgggaagtggctccatctgcattacgcaggaagtgctggcctgtgggcggccccaagcaacagcagtgtacaaggtgtcagagtatgcacggcgctttggtgttccggtcattgctgatggaggaatccaaaatgtgggtcatattgcgaaagccttggcccttggggcctccacagtcatgatgggctctctcctggctgccaccactgaggcccctggtgaatacttcttttccgatgggatccggctaaagaaatatcgcggtatgggttctctcgatgccatggacaagcacctcagcagccagaacagatatttcagtgaagctgacaaaatcaaagtggcccagggagtgtctggtgctgtgcaggacaaagggtcaatccacaaatttgtcccttacctgattgctggcatccaacactcatgccaggacattggtgccaagagcttgacccaagtccgagccatgatgtactctggggagcttaagtttgagaagagaacgtcctcagcccaggtggaaggtggcgtccatagcctccattcgtatgagaagcggcttttctgaaaagggatccagcacacctcctcggtttttttttcaataaaagtttagaaagaaaaaagtgatgcctgatctttcaacagacakgtggggctctgtagctgccactaccacagatgcacacaaaaacagcaccctcatttccagggggagcytcagsscccgagataaatgtgctccatggacctggaagcgggtagttccaggtccaaaaagttcctcctgaggctgctcacaaaacagctgactatagctatagctatggctcttggggtttcagtctcacactgagcatctgactctggctcccaaggggtcaaagaacaagccctgggactggcatacacagggcatcctgctagcccatagcttggccatataggaccaggtcaacacacatatatattccctaacttgaatctctctcggccaggcacattggctcacgtctgtaatcccagcactttgggaggcaggtggatcacttgagrtcaggagttcgagaccatcctggccaacatggtgaaccctttctctactaaaaatacaaaaattagctgggcgtggtgatgcatacctctagtcccagctactcaggaggctgaggcaggagaatcactgaaacccaggaggcggaggttgcagtgagctgagactgcgccactgcactccaccctggcgaaagagcaagactcatctccag

SEQ ID NO: 2964 - DNA, 3716 bp, Homo sapiens
gtccaggtgcaggtacagcagtctccgcaacaggtctcggctcagctctccccacaactcaccgttcaccagcctactgagcaacccatccaggtccaggtgcagatccaaggccaggcaccacagtcagcagccccctccattcagaccccgtctctgcagagtcccagtccctcgcagctgcaagcagctcagatccaggtgcagcacgtgcaagcagcccagcagatccaggctgcagaaatcccggaggagcacatcccacatcagcaaatccaggctcagctggtggctggccagtctcttgctggtggtcagcagatccaaatccagaccgtgggtgccctttccccaccaccatcccagcagggctcaccccgggaaggggagcggcgggttggcacggccagtgtcctccaaccagtgaagaagcgcaaagtggacatgcccatcactgtgtcctacgccatctcagggcagccggtggccaccgtgctggccattccacagggccagcagcagagttatgtgtctttgaggccagacttactgacagtagacagtgcccacctgtacagtgccactgggaccattactagccctacaggagaaacctggaccatccctgtttattctgcccagccccggggggaccctcagcagcagagcattacccacattgccattccccaggaagcctacaacgcagttcacgtcagtggctcacccacagccctggcagctgttaagctggaggatgacaaggagaagatggtgggcaccacatctgtagtgaaaaactcccatgaagaggtagtgcagacccttgcaaactctctctttccagcacagttcatgaatggcaacatccacattccagtggctgtgcaggctgtggcaggcacgtaccagaatacggctcaaactgtccatatatgggacccccaacagcagccgcagcagcaaactccccaggaacagacaccaccaccacagcagcagcagcagcaactccaagttacttgttcagctcaaactgtccaggttgctgaagttgaaccacagtcacagccacagccttccccagaacttctgcttccaaattctttgaagccagaagaagggcttgaagtatggaaaaactgggcccagaccaagaatgctgaactagagaaggatgctcagaacagattggcacccattgggaggcgccaactgctgcgattccaggaagatctcatctcctctgctgtggcagagttgaattatgggctctgtctaatgacacgggaagctcgaaatggagaaggtgaaccctatgacccagatgtgctctactatattttcctgtgtattcaaaagtatctttttgaaaatggaagggtagatgacattttctccgatctttattatgttcggttcacggagtggctacatgaagttctgaaggatgttcagccccgggtcactccacttggctatgtcttgcccagccacgtgactgaggagatgctatgggagtgcaagcagcttggggctcactccccctccaccttgctgaccaccctcatgttctttaataccaagtacttcctattgaagacagtggaccagcacatgaagctggccttctccaaggtcttgcgacagacaaagaagaacccctctaatcccaaggataaaagcacgagtatccggtacttgaaggcccttggaatacaccagactggccagaaagttacagatgacatgtatgcagaacagacggaaaatccagagaatccattgagatgtcccatcaagctctatgatttctacctcttcaaatgcccccagagtgtgaaaggccggaatgacaccttttacctgacacctgagccagtggtggcccccaacagcccaatctggtactcagtccagcctatcagcagagagcagatgggacaaatgctgacgcggatcctggtgataagagaaattcaggaggccatcgcagtggccartgcaagcactatgcactgagatgccttggccatggcacaagagaaaccagccaggaaaaaccagacagactttcacactaaagaagaggcctccatttttttttttcttttttttattggtgtagttacgaagcctttcaggctgcttctgtttaaaatataaaagaaaactttgccccctttgcatcttcataaacctgctgcggcagactcctcagccgatggtggctctgggtttccttgagtgtcatatgtcctagaaagttgctggctgactcttttttgtctggggcctggggaaagggcttggactgtgaaaagaaatgtggcccctttccatcttcaagagagatggaattaatgatggatggaccctggagggaatctccccagccgacttccactgggctgacagactttgctgaccacaggggaacgatgttcttttctttcttcatgatcagacataaacttagcatcttaatggaagaaaaatgaggggaacttcaattatgatttattaaagacaatttctattacaccctcctttatgacaagtgacattttagatgtaaaagtaaaaactttaccatgccttttttttttttgttggcctaacattgaggccttaaaacctgaggctcctgtgcctgatggaattcttgtaacatacacttgtgtatcatataaagataccactctgtttctcttatgtattcttamtctagttgtttattaagaatgacaagcacgtcttttcaacatgttagtgaacaacgtctctttattttggggaggagcccggcgggacagtagaagtaaacccttgcctgttaattgaactggccgaggtcctgcggggagtgtggggtgggacgtgaagtggcagctcctcagtgacaaggccactatgtgctatacgcatgcgctgtttcttcagcgccagctccgcccccgcygcagcgaggcgggtaggttccgcccgcgcgcactacgccctgacgtcagcgtcgcgcgcagcgcagtgacgaaatcggctggtttatattggcgcggcccagacggcagaggtctctgcggcgcggtcctcggagacacgcggcggtgtcctgtgttggccatggccgactacctgattagtgggggcacgtcctacgtgccagacgacggactcacagcacagcagctcttcaactgcggagacggcctcacctacaagtgcgggcctatggggctcacctgggcgaagagaggggcggcaccctggggaaaaggccagatgggggcttccgagagccgccttgggcgtgggcgtgggggacaggtttcgggaattggccacccacctccggggctcactttgagacatctggagcggtgcttggggtacggagaagcatctcagtagtgcttggaatctcaggccggagattccatgctccagacacatggaattgtcagggtgccaggagcactgatgacagctcggtggcagaaaaggtcccctgtacccatttccaccttgtgctgtgcctgtgacacacagactctgtcagtgccactctctgctcacatgcgttacgggttgattggtacatggggatggagtctcatgctgccctaagctgagagctttactcccaattcactcccttccctcrcagtgactttctcattctccctgggtacatcgacttcactgcagaccaggtg

SEQ ID NO: 2965 - DNA, 736 bp, Homo sapiens
ggggagattcagtgtggtgggggactgagtgtggcagggactccccagcagtgagggtctctctcttcctcttgtgctcttgctggggctggtggtccargggtcttactccttggaggccatgtgggcmatgaggtccaycaccctgttgctgtagccaaattcgttgtcatacctagaaatgagcttgacaaagtggtcgttgagggcaatgccagccccagcgtcraagrtggaggagtgggtcaggtccaccactgacacgttggcagtggggacacggaaggccatgccagtgagcttcccgttcagctcagggatgaccttgcccacagccttggcagcgccagtagaggcagggatgatgttctggctgttgtcatacttctcatggttcacacccatgacgaacatgggggcrtcagcagagggggcagagatgatgacccttttggctcccccttgcctccccaaagcacatttcttccattctgtcttccactcactcctggaagatggtgatgggatttccattgatgacaagcttcccgttctcagccttgacggtgccatggaatttgccatgggtggaatcatattggaacatctttggggctcaccatgtagcactcaccatgtagttgaggtcaatgaaggggtcattgatggcaacaatatccactttaccagagttaaaagcagccctggtgaccaggcgcccaatacgaccaaatct

SEQ ID NO: 2966 - DNA, 4717 bp, Homo sapiens
ctcttcaggtgtcatgtgattctctgagggagcagctgcgtgagtggagatgctttcagtggtggagaatggactggacccccaggctgccatcccggtggactgtccaacccattccagggtctcatgaagctgggcaccgtggagcggcagggggcaatgggcatctggaaggagctcttctgcgagctctccccactggagttccgcctctacctgagcaacgaggagcacacctgtgtggagaactgctccctgcttcgctgtgagtctgtggggccagcccacagtgacgggcgctttgagctggtcttctctggcaagaagctggccctgcgcgcctcctcccaggacgaagctgaggactggctggacckggtgcgggaggccctgcagaaggtccggcctcagcaggaggatgagtgggtgaacgtgcagtacycagaccagcctgaggaaccccccgaggcgccccagggctgcctctctccctcagacctgctctcggagcccgcggccctccagggcacacagtytgactggtcgtccgcccaggttccagagcyagatgccatcaaggagtccctgctgtacttgtacatggacaggacctggatgccctatatattttctctgyccttggaggctctgaaatgtttccgcatcaggaacaatgagaagatgctgagtgacagccacggcgtggagaccatccgggacatcctgccagacaccagccttgggggcccatccttcttcaaaatcatcacggccaaggctgtcctgaagctgcaggccggaaacgccgaggaagccgccctgtggagggatctggtccgcaaagtcctggcatcctacttggagacagccgaggaggcggtgaccctgggcgggagcctggatgaaaactgtcaggaggtgctgaaatttgccacccgggagaatggcttcctgctgcagtacctggtggccatccccatggagaaaggccttgactcccaaggctgcttctgcgcaggctgctcccggcagatcggcttctcctttgtacgacccaagctctgtgccttctctggcctctattactgtgacatctgccaccaagacgatgcctcagtgattccggccaggatcatccacaactgggacctcaccaagcgcccgatctgcaggcaggccctgaagtttctgacgcagatccgggcccagcccctcatcaacctgcagatggtgaacgcgtctctgtacgagcatgtggagcggatgcacctcattgggaggagmcgggagcagctgaagctcctgggggattacctgggcctgtgccggagtggcgccctgaaggagctcagcaagaggctcaaccaccggaattatctcttggagtctccgcataggttccgtgttgctgacctccggcagatcgcagatgaggtatatgaaggattcctcaaggccctgattgaatttgcctcccagcatgtctaccactgcgacctgtgcacccagcgcrgcttcatctgccagatctgccagcaccacgacatcatcttcccctctgagtttgacaccacagtcaggtgtgccaagtgcaagaccgtcttccaccagagctgccaggctgtggtgaagaagggctgcccccgctgtgcycgcygrcgcaagtaccagsaacagaacrttttcgcctgatgcccmtctgctgaycccrctctgaargccgggggcgcgggcctggcccagaggcgacaggaagccaggacgccggggattgtctctcgcaaccgcagcccagccccagtccgggaggaagttctgccgggcgctctccgccggtgcctcactggttatagtgctatacaggaaacctggcagcgccggagccgcgcggtcgaggagggagcgcgggacgccgagcccacgcgcgcctgccgggacaagtggagacgaggccggcgagcggacgccccgaggtgcccgggcaggcagtgggccgccgagcgggagttgaggttggcgaaggagctgtggccgggtccccttcttatccagcccgagacactgcgctccggtgggcgtccctgcgctgggaatccctctcggagtttttccaggcccggccgggttgctccgggaaaggccctgttgggggaggtgggcccggagctggcaggtctacaatccggttggaagggctcgcagtgggtgattcagggtgccaatgacctccccgcgaacgggaacgcccgcactagacaaccagccccagaccggcattcccagagccgcaggcgggagggacgcagggactccgggacagcaaatccccgggggagaagggaagggggaaggcgggacaggggaggcccaccctccttgggctccgctagcgaccagccagcgccccttcagacgcagccttcctggctccggaccccggctttctgctccggtcctcgtcccaatgccccccaaggtccccagcagaggcattcaggttcctcctcgccccgcccagacgcagcttctttgggtatgggtgacagcactcctgagcgtcgctgtccctattcgctgccgttgccagctccgattccgcgaaacctctccggcaccacctcggaagccccgcccagggcgatggtccgggcctaacctgccggccccgcccacccggcccttgggctccctgaggcccgcccagcagacaccggagagcaatggtgtgatctccgcacactgcaacctctgcctccagggttcaagtggttctcctgcctcagcctcccaagcagatgggactacaggtactggtagttaactctcaaggagaaatttcacggttgagcaccgaaaagaaagtggtcatgaaaggaagtatcaacaattatcttaaattgggtcaagaagggaagtatcgcrtctaccacaatcaatactccactaattcatttgctttgaataagcaccagcacagagaagaccatgataagagaaggcatcttgcacataagttctgtctractccagcaggagagttcaaatggaacggttctgtccatgggtccaaagttcttaccatatctactctgagactgactatcacccaattagaaaacaacatcccttcatcctttcttcatcccaaccgggcatcacatagggcaaactggatcaaggcagttcagatgtgtagcaaactcagagaatttgcattggctttagccattttggagtgtgcagttaaaccagttgtgatgctaccaatatggcgagaatctttaggacataccagctttctccctttgtctcataaccatgtccaccaatgagaatgctaatacacaagctgcccatcttcacagatytaagaacaagggaaaggacagtacagaaacgaggcgtcacagaatagaggtcaatgtggagctgaggaaagctaagaaggatgaccagatgctgaagaggagaaatgtaagctcatttcctgatgatgctacttctccgctgcaggaaaactgcaacaaccagggactcctgccctragagccatagggaatatcgtcactggtacagatgaacagactcaggttgtgattgatgcaggagcactcgccgtctttcccagcctgctcaccaaccccaaaactaacattcagaaggaagctacgtggacaatgtcaaacatcacagccrgccgccaggaccagatacagcaagttgtgaatcatggattagtcccattccttgtcagygwtctctctaaggcagattttgagacacaaaaggaagctgtatgggccgtggaacagttgaacagattgtgtaccttgttcactgtggcataatagaaccgttgatgaacctcttamctgcaaaagataccaagattattctggttatcctggatgccatttcaaatatctttcaggctgctgagaaactaggtgaaactgagaaacttagtataatgattgaagaatgtggaggcgtagacaaaattgaagctctacaaaaccatgaaaatgagtctgtatataaggcttcattaagcttaactgagaagtatttctctgtagaggaagaggaagatcaaaacgttgtgccagaaactacctctgaaggctacactttccaagttcaggatggggctcctgggacctttaacttttagatcatgtagctgagrcataaatttgttgtgtactaygtttggtattttgtcttattgtttctctactaagaactctttcttaaatgtggtttgttaytgtagcactttttacactgaaactatacttgaacagttccaactgtacatactgtatgaagcttgtcctctgactaggtttctaatttctatgtggaatttcctatcttgcagcatcctgtaaataaacattcaagtccacccttttcttgacttcaccatgcctatgtgttgctttctaatttggggtctttaatgttgctagtgaaaggtaacccgtccaaactgatgggattaaccagaggtagtcctggctgcagtttttacagaagaatgaataaaattttccagaarccctcagccagtgtctccttaagtctccttggccagggagatgcgctaaacactgtaaatttaatcataaatctctcctggagctacaagtggaattcattcctcccaaacttcaaggctgaatgggattccaaggtaaaatcatggctgcac

SEQ ID NO: 2967 - DNA, 946 bp, Homo sapiens
gaatgtggaggcgtagacaaaattgaagctctacaaaaccatgaaaatgagtctgtatataaggcttcattaagcttaactgagaagtatttctctgtagagagatgaagtgtggcagctgcttcaggtatgagtccttggaccacatggcttgggtgaccatctgggccaattccatagctgccagagcagagctgagccacccattgctggagaggacatccacgcaggcctggacgagccggactgccttactaaggatttcctccgtatctgactgcaactcagcactcagctgcatgcgggacaggaagaggaagatcaaaacgttgtgccagaaactacctctgaaggctacactttccaagttcaggatggggctcctgggacctttaacttttagatcatgtagctgagrcataaatttgttgtgtactaygtttggtattttgtcttattgtttctctactaagaactctttcttaaatgtggtttgttaytgtagcactttttacactgaaactatacttgaacagttccaactgtacatactgtatgaagcttgtcctctgactaggtttctaatttctatgtggaatttcctatcttgcagcatcctgtaaataaacattcaagtccacccttttcttgacttcaccatgcctatgtgttgctttctaatttggggtctttaatgttgctagtgaaaggtaacccgtccaaactgatgggattaaccagaggtagtcctggctgcagtttttacagaagaatgaataaaattttccagaarccctcagccagtgtctccttaagtctccttggccagggagatgcgctaaacactgtaaatttaatcataaatctctcctggagctacaagtggaattcattcctcccaaacttcaaggctgaatgggattccaaggtaaaatcatggctgcac

SEQ ID NO: 2968 - DNA, 1422 bp, Homo sapiens
ctttctccctttgtctcataaccatgtccaccaatgagaatgctaatacacaagctgcccatcttcacagatytaagaacaagggaaaggacagtacagaaacgaggcgtcacagaatagaggtcaatgtggagctgaggaaagctaagaaggatgaccagatgctgaagaggagaaatgtaagctcatttcctgatgatgctacttctccgctgcaggaaaactgcaacaaccagggactcctgccctragagccatagggaatatcgtcactggtacagatgaacagactcaggttgtgattgatgcaggagcactcgccgtctttcccagcctgctcaccaaccccaaaactaacattcagaaggaagctacgtggacaatgtcaaacatcacagccrgccgccaggaccagatacagcaagttgtgaatcatggattagtcccattccttgtcagygwtctctctaaggcagattttgagacacaaaaggaagctgtatgggccgtggaacagttgaacagattgtgtaccttgttcactgtggcataatagaaccgttgatgaacctcttamctgcaaaagataccaagattattctggttatcctggatgccatttcaaatatctttcaggctgctgagaaactaggtgaaactgagaaacttagtataatgattgaagaatgtggaggcgtagacaaaattgaagctctacaaaaccatgaaaatgagtctgtatataaggcttcattaagcttaactgagaagtatttctctgtagaggaagaggaagatcaaaacgttgtgccagaaactacctctgaaggctacactttccaagttcaggatggggctcctgggacctttaacttttagatcatgtagctgagrcataaatttgttgtgtactaygtttggtattttgtcttattgtttctctactaagaactctttcttaaatgtggtttgttaytgtagcactttttacactgaaactatacttgaacagttccaactgtacatactgtatgaagcttgtcctctgactaggtttctaatttctatgtggaatttcctatcttgcagcatcctgtaaataaacattcaagtccacccttttcttgacttcaccatgcctatgtgttgctttctaatttggggtctttaatgttgctagtgaaaggtaacccgtccaaactgatgggattaaccagaggtagtcctggctgcagtttttacagaagaatgaataaaattttccagaarccctcagccagtgtctccttaagtctccttggccagggagatgcgctaaacactgtaaatttaatcataaatctctcctggagctacaagtggaattcattcctcccaaacttcaaggctgaatgggattccaaggtaaaatcatggctgcac

SEQ ID NO: 2969 - DNA, 2103 bp, Homo sapiens
actgtttatgaccagtggttcatcaccctttttaacattgtttacacatcactgcctgttttagccatggggatttttgaccaggatgtgagtgaccagaacagcgtggactgtccccagctctacaaaccaggacagctgaatctgctttttaacaagcgtaaatttttcatttgcgtgttgcatggaatctacacctcattagtccttttcttcatcccctatggggccttttacaacgtggctggagaagatgggcaacatattgctgactaccagtcctttgcagttaccatggccacatctttggtcattgtggtcagtgwgcagatagccttggataccagttactggactttcattaatcacgtcttcatctgggggagcattgccatttatttctccattttatttacaatgcacagtaatggcatctttggcatcttcccaaaccwgtttccatttgttggtaatgcacgacattccctgacccagaagtgcatctggcttgtaattctcttaacaacagtggcttcagttatgccagtggtggcattcagatttttgaaggtggatttatacccaaccctgagtgatcagatccgccggtggcagaaggctcaaaagaaggcaaggcctccaagtagccgaaggcctcggacccgcaggtcaagctcaagaaggtctggatatgcttttgctcaccaagaaggctatggagagcttatcacatctggaaaaaatatgcgagctaaaaatccacccccaacatcagggctggaaaagacacattataawagcactagctggattgaaaatttatgtaagaaaaccacagacaccgtgagcagctttagccaggataaaacagtgaaactgtgagtcaatatgaatttaaaccacgtagttatcttttcacttcaggtggagctgaaattctgctggctccagagtttgagatttgaggcaagaggtggggcaggcagattgcctcacttwacttaaatctgcggcagacaactgccagtgcccatcaaacaggagtgtgcgctatggaaaaccaggccagagggtcactgtctagtttgtgatttggtggacaaaacwctcgctgttacaagtacagattttttttttttaaatcaacctagataccaattgacctgaactttaraatcttatttatggagaaaaacttgtaaagctgcatattcactgaatggatcctcaggcggataaaagggtgcattttaaaggtatatatccaagctgaaaagcatgcctattgacagataaacatgtatctgtaagatcagcctttcccaaggtatacttttaaaatttaaagcgtgtactgtgttgctttcagactgagttgcatgtcactctttagtcttgatatctacctgtctgttcagccaggacaacaaatggcttccaagcctgaagaatacaaaagtgtgcttgtgtttctcatttttataccagtctagggacaaaggagactgaacatctttgcagcaggataggctggtaatttgatcaaatttattcaaaaagctctcagtctgtgtcatgtaaggacatgcttatgaaatgtgagagaggctcgccactaagtattctaaatacttttcaatggcttttctaacaacctcagtagtaatttgctgagcatcatccagaccattaatagaatcagcaaagcactggaatttcacactttaatgataatattccayatagtctatgggcaaatattttcaacatttccaatttttaaagcttcagaattgaagccaaacaaattaataaataattgttttaattactatttwaaaactcaggtttagattgtttaaaattagttgcttttgatactcagctgtcatgtttataattcaaacatgtagtaaacatatgtaggtaaggttgtttttttggagatgttgcagctcaaatttcagtccacatatgaatcatcagtgtattttccataaagtgattygggcatatttgtgtgaaaacctcagttctgtcacttcttacctctataaacttggacgataatgtgccttctctgagactcagtttcttcctctg

SEQ ID NO: 2970 - DNA, 2133 bp, Homo sapiens
ttctcacttatatgttatatttcttttcagactgtttatgaccagtggttcatcaccctttttaacattgtttacacatcactgcctgttttagccatggggatttttgaccaggatgtgagtgaccagaacagcgtggactgtccccagctctacaaaccaggacagctgaatctgctttttaacaagcgtaaatttttcatttgcgtgttgcatggaatctacacctcattagtccttttcttcatcccctatggggccttttacaacgtggctggagaagatgggcaacatattgctgactaccagtcctttgcagttaccatggccacatctttggtcattgtggtcagtgwgcagatagccttggataccagttactggactttcattaatcacgtcttcatctgggggagcattgccatttatttctccattttatttacaatgcacagtaatggcatctttggcatcttcccaaaccwgtttccatttgttggtaatgcacgacattccctgacccagaagtgcatctggcttgtaattctcttaacaacagtggcttcagttatgccagtggtggcattcagatttttgaaggtggatttatacccaaccctgagtgatcagatccgccggtggcagaaggctcaaaagaaggcaaggcctccaagtagccgaaggcctcggacccgcaggtcaagctcaagaaggtctggatatgcttttgctcaccaagaaggctatggagagcttatcacatctggaaaaaatatgcgagctaaaaatccacccccaacatcagggctggaaaagacacattataawagcactagctggattgaaaatttatgtaagaaaaccacagacaccgtgagcagctttagccaggataaaacagtgaaactgtgagtcaatatgaatttaaaccacgtagttatcttttcacttcaggtggagctgaaattctgctggctccagagtttgagatttgaggcaagaggtggggcaggcagattgcctcacttwacttaaatctgcggcagacaactgccagtgcccatcaaacaggagtgtgcgctatggaaaaccaggccagagggtcactgtctagtttgtgatttggtggacaaaacwctcgctgttacaagtacagattttttttttttaaatcaacctagataccaattgacctgaactttaraatcttatttatggagaaaaacttgtaaagctgcatattcactgaatggatcctcaggcggataaaagggtgcattttaaaggtatatatccaagctgaaaagcatgcctattgacagataaacatgtatctgtaagatcagcctttcccaaggtatacttttaaaatttaaagcgtgtactgtgttgctttcagactgagttgcatgtcactctttagtcttgatatctacctgtctgttcagccaggacaacaaatggcttccaagcctgaagaatacaaaagtgtgcttgtgtttctcatttttataccagtctagggacaaaggagactgaacatctttgcagcaggataggctggtaatttgatcaaatttattcaaaaagctctcagtctgtgtcatgtaaggacatgcttatgaaatgtgagagaggctcgccactaagtattctaaatacttttcaatggcttttctaacaacctcagtagtaatttgctgagcatcatccagaccattaatagaatcagcaaagcactggaatttcacactttaatgataatattccayatagtctatgggcaaatattttcaacatttccaatttttaaagcttcagaattgaagccaaacaaattaataaataattgttttaattactatttwaaaactcaggtttagattgtttaaaattagttgcttttgatactcagctgtcatgtttataattcaaacatgtagtaaacatatgtaggtaaggttgtttttttggagatgttgcagctcaaatttcagtccacatatgaatcatcagtgtattttccataaagtgattygggcatatttgtgtgaaaacctcagttctgtcacttcttacctctataaacttggacgataatgtgccttctctgagactcagtttcttcctctg

SEQ ID NO: 2971 - DNA, 1144 bp, Homo sapiens
gcttttctccttggcatggtcacggaatggatacctgtttgatcttcctgcactgctgagaaawcttccttttgggggagaggattaagtctgggttgaggtaggccacctgttgagacctggtgaaagatcaggtataataatgttctgcagtgaaaagaaattgcgtgaagtggaacrgatagtgaaagccaatgaccgtgaatataatgaaaagttccagtatgcggataatcgtatccacacatcgaaatataatattctcaccttcttgccaattaatttatttgaacagttccaaagagtggcaaatgcctattttctttgccttctgattttacagctaattccagaaatttcctccttgacctggtttaccaccattgtgcctttggtcctggtgataactatgacagctgtcaaagatgccacagatgactattttcgccacaagagtgataatcaagtgaataatcggcagtctgaagtgctcatcaacagcaaactgcagaatgaaaaatggatgaatgtcaaagtgggagacatcattaaattagaaaataaccaatttgttgctgctgatttacttctcctatcaagtagtgagccacatggtctctgttatgttgaaactgctgagcttgatggggaaacgaacctaaaagtccgccatgcactatcagttacttcagaacttggagcagatatcagcagacttgcagggtttgatgggattgttgtctgtgaggtgcctaacaacaagttagataaattcatgggaatcctttcttggaaagacagcaagcattccctcaacaatgagaagataatcctgagaggctgcatcctgagaaataccagctggtgttttggaatggttatttttgcaggtcctgacactaaactaatgcagaatagtggtaagacaaagtttaaaaggacaagcattgatagattgatgaatactctagtactatgggaaattcaatctgggagagtcaaactggggaccaattcagaactttcctcttttggaatgaaggagagaagagctctgtgttctccggattcttaacattctggtcatatattattattctcaatacagttgtacccatttccttatatgtgaggtaagatgaga

SEQ ID NO: 2972 - DNA, 4470 bp, Homo sapiens
ggaagaagatttatcctggtcctgagaaaaatactgcagaatgaaaaatggatgaatgtcaaagtgggagacatcattaaattagaaaataaccaatttgttgctgctgatttacttctcctatcaagtagtgagccacatggtctctgttatgttgaaactgctgagcttgatggggaaacgaacctaaaagtccgccatgcactatcagttacttcagaacttggagcagatatcagcagacttgcagggtttgatgggattgttgtctgtgaggtgcctaacaacaagttagataaattcatgggaatcctttcttggaaagacagcaagcattccctcaacaatgagaagataatcctgagaggctgcatcctgagaaataccagctggtgttttggaatggttatttttgcaggtcctgacactaaactaatgcagaatagtggtaagacaaagtttaaaaggacaagcattgatagattgatgaatactctagtactatggatttttgggtttctgatatgcttgggaattattcttgcaataggaaattcaatctgggagagtcaaactggggaccaattcagaactttcctcttttggaatgaaggagagaagagctctgtgttctccggattcttaacattctggtcatatattattattctcaatacagttgtacccatttccttatatgtgagtgtggaagtaattcgtctaggacacagttattttataaactgggaccggaagatgtattattctcgaaaagcaatacctgcagtggctcgaacgaccacgctcaatgaggaactggggcagattgagtacattttctccgacaaaacgggtaccctcactcaaaacatcatgacctttaaaagatgttccattaatgggagaatctatggtgaagtacatgatgacctggatcagaagacagaaataactcaggaaaaagagcctgtggatttctcagtcaaatctcaagcggatagagaatttcagttctttgaccacmatctgatggaatccattaaaatgggtgatcccaaagttcatgaattccttaggttacttgctctctgccacactgtaatgtcagaagagaatagcgcaggagagctgatttaccaagttcagtcacctgatgaaggggctctagtgactgccgctagaaattttgggttcatttttaaatcccggaccccagagaccataacaatagaagaattgggaacactagttacttatcaattacttgcctttttggatttcaacaacaccagaaaaaggatgtctgtcatagttcgaaacccagaaggacagataaagctttattccaaaggagcagatactattctgtttgaaaaacttcatccttccaatgaagtccttttgtctttgacgtcagaccacctcagtgaatttgcaggggaaggccttcggaccttggccatcgcatacagagacctggatgacaagtactttaaagagtggcataagatgcttgaagatgcgaatgctgccacagaagagagggatgaacgaatagctgggctatatgaagaaattgaaagagatttgatgctactaggtgccactgctgtagaagataagttacaggagggtgttattgaaacagttacaagtttatcactagccaatattaagatctgggtcctaacaggagacaaacaagaaactgccatcaacatcggttatgcctgcaacatgctgactgacgacatgaatgatgtgtttgtgatagcagggaataatgctgtggaagtgagagaagaactcaggaaagcaaaacaaaatttgtttggacaaaacagaaatttttccaatggccatgtagtttgtgaaaaaaagcagcagctggagttggattctattgtagaagaaaccataacaggagattatgccttaatcataaatggccacagtttggctcatgccctagaaagtgatgtcaagaatgatctcctagaacttgcttgcatgtgtaagactgtaatttgctgcagggtcactccactccagaaagcccaagtggtagagctggtgaagaagtacagaaatgctgttactttggccattggtgatggagccaatgatgtcagcatgattaaaagtgctcacattggtgttggcatcagcggccaggaaggattgcaagcagtcttagccagcgactattcatttgcacagtttagatatctccaaaggcttctccttgttcatggaaggtggtcttatttccgaatgtgcaaattcttatgctatttcttctataagaattttgcatttacacttgtgcatttctggtttggtttcttctgtggtttctcagcccagactgtttatgaccagtggttcatcaccctttttaacattgtttacacatcactgcctgttttagccatggggatttttgaccaggatgtgagtgaccagaacagcgtggactgtccccagctctacaaaccaggacagctgaatctgctttttaacaagcgtaaatttttcatttgcgtgttgcatggaatctacacctcattagtccttttcttcatcccctatggggccttttacaacgtggctggagaagatgggcaacatattgctgactaccagtcctttgcagttaccatggccacatctttggtcattgtggtcagtgwgcagatagccttggataccagttactggactttcattaatcacgtcttcatctgggggagcattgccatttatttctccattttatttacaatgcacagtaatggcatctttggcatcttcccaaaccwgtttccatttgttggtaatgcacgacattccctgacccagaagtgcatctggcttgtaattctcttaacaacagtggcttcagttatgccagtggtggcattcagatttttgaaggtggatttatacccaaccctgagtgatcagatccgccggtggcagaaggctcaaaagaaggcaaggcctccaagtagccgaaggcctcggacccgcaggtcaagctcaagaaggtctggatatgcttttgctcaccaagaaggctatggagagcttatcacatctggaaaaaatatgcgagctaaaaatccacccccaacatcagggctggaaaagacacattataawagcactagctggattgaaaatttatgtaagaaaaccacagacaccgtgagcagctttagccaggataaaacagtgaaactgtgagtcaatatgaatttaaaccacgtagttatcttttcacttcaggtggagctgaaattctgctggctccagagtttgagatttgaggcaagaggtggggcaggcagattgcctcacttwacttaaatctgcggcagacaactgccagtgcccatcaaacaggagtgtgcgctatggaaaaccaggccagagggtcactgtctagtttgtgatttggtggacaaaacwctcgctgttacaagtacagattttttttttttaaatcaacctagataccaattgacctgaactttaraatcttatttatggagaaaaacttgtaaagctgcatattcactgaatggatcctcaggcggataaaagggtgcattttaaaggtatatatccaagctgaaaagcatgcctattgacagataaacatgtatctgtaagatcagcctttcccaaggtatacttttaaaatttaaagcgtgtactgtgttgctttcagactgagttgcatgtcactctttagtcttgatatctacctgtctgttcagccaggacaacaaatggcttccaagcctgaagaatacaaaagtgtgcttgtgtttctcatttttataccagtctagggacaaaggagactgaacatctttgcagcaggataggctggtaatttgatcaaatttattcaaaaagctctcagtctgtgtcatgtaaggacatgcttatgaaatgtgagagaggctcgccactaagtattctaaatacttttcaatggcttttctaacaacctcagtagtaatttgctgagcatcatccagaccattaatagaatcagcaaagcactggaatttcacactttaatgataatattccayatagtctatgggcaaatattttcaacatttccaatttttaaagcttcagaattgaagccaaacaaattaataaataattgttttaattactatttwaaaactcaggtttagattgtttaaaattagttgcttttgatactcagctgtcatgtttataattcaaacatgtagtaaacatatgtaggtaaggttgtttttttggagatgttgcagctcaaatttcagtccacatatgaatcatcagtgtattttccataaagtgattygggcatatttgtgtgaaaacctcagttctgtcacttcttacctctataaacttggacgataatgtgccttctctgagactcagtttcttcctctg

SEQ ID NO: 2973 - DNA, 4813 bp, Homo sapiens
gcttttctccttggcatggtcacggaatggatacctgtttgatcttcctgcactgctgagaaawcttccttttgggggagaggattaagtctgggttgaggtaggccacctgttgagacctggtgaaagatcaggtataataatgttctgcagtgaaaagaaattgcgtgaagtggaacrgatagtgaaagccaatgaccgtgaatataatgaaaagttccagtatgcggataatcgtatccacacatcgaaatataatattctcaccttcttgccaattaatttatttgaacagttccaaagagtggcaaatgcctattttctttgccttctgattttacagctaattccagaaatttcctccttgacctggtttaccaccattgtgcctttggtcctggtgataactatgacagctgtcaaagatgccacagatgactattttcgccacaagagtgataatcaagtgaataatcggcagtctgaagtgctcatcaacagcaaactgcagaatgaaaaatggatgaatgtcaaagtgggagacatcattaaattagaaaataaccaatttgttgctgctgatttacttctcctatcaagtagtgagccacatggtctctgttatgttgaaactgctgagcttgatggggaaacgaacctaaaagtccgccatgcactatcagttacttcagaacttggagcagatatcagcagacttgcagggtttgatgttaaccttaaccacacttctatcttatttcagatttttgggtttctgatatgcttgggaattattcttgcaataggaaattcaatctgggagagtcaaactggggaccaattcagaactttcctcttttggaatgaaggagagaagagctctgtgttctccggattcttaacattctggtcatatattattattctcaatacagttgtacccatttccttatatgtgagtgtggaagtaattcgtctaggacacagttattttataaactgggaccggaagatgtattattctcgaaaagcaatacctgcagtggctcgaacgaccacgctcaatgaggaactggggcagattgagtacattttctccgacaaaacgggtaccctcactcaaaacatcatgacctttaaaagatgttccattaatgggagaatctatggtaagagaaacaataattattggaatgaggttttggttatttttgttgttgttgttctcctacaggaaaaagagcctgtggatttctcagtcaaatctcaagcggatagagaatttcagttctttgaccacmatctgatggaatccattaaaatgggtgatcccaaagttcatgaattccttaggttacttgctctctgccacactgtaatgtcagaagagaatagcgcaggagagctgatttaccaagttcagtcacctgatgaaggggctctagtgactgccgctagaaattttgggttcatttttaaatcccggaccccagagaccataacaatagaagaattgggaacactagttacttatcaattacttgcctttttggatttcaacaacaccagaaaaaggatgtctgtcatagttcgaaacccagaaggacagataaagctttattccaaaggagcagatactattctgtttgaaaaacttcatccttccaatgaagtccttttgtctttgacgtcagaccacctcagtgaatttgcaggggaaggccttcggaccttggccatcgcatacagagacctggatgacaagtactttaaagagtggcataagatgcttgaagatgcgaatgctgccacagaagagagggatgaacgaatagctgggctatatgaagaaattgaaagagatttgatgctactaggtgccactgctgtagaagataagttacaggagggtgttattgaaacagttacaagtttatcactagccaatattaagatctgggtcctaacaggagacaaacaagaaactgccatcaacatcggttatgcctgcaacatgctgactgacgacatgaatgatgtgtttgtgatagcagggaataatgctgtggaagtgagagaagaactcagtaatgaattattgtcttcaggcctccaacatttctcaactatttttagaaaagaatttcaaatcagctatgttgagttgtcctttaaaattgtgctttgaaatttttccaatggccatgtagtttgtgaaaaaaagcagcagctggagttggattctattgtagaagaaaccataacaggagattatgccttaatcataaatggccacagtttggctcatgccctagaaagtgatgtcaagaatgatctcctagaacttgcttgcatgtgtaagactgtaatttgctgcagggtcactccactccagaaagcccaagtggtagagctggtgaagaagtacagaaatgctgttactttggccattggtgatggagccaatgatgtcagcatgattaaaagtgctcacattggtgttggcatcagcggccaggaaggattgcaagcagtcttagccagcgactattcatttgcacagtttagatatctccaaaggcttctccttgttcatggaaggtggtcttatttccgaatgtgcaaattcttatgctatttcttctataagaattttgcatttacacttgtgcatttctggtttggtttcttctgtggtttctcagcccagactgtttatgaccagtggttcatcaccctttttaacattgtttacacatcactgcctgttttagccatggggatttttgaccaggatgtgagtgaccagaacagcgtggactgtccccagctctacaaaccaggacagctgaatctgctttttaacaagcgtaaatttttcatttgcgtgttgcatggaatctacacctcattagtccttttcttcatcccctatggggccttttacaacgtggctggagaagatgggcaacatattgctgactaccagtcctttgcagttaccatggccacatctttggtcattgtggtcagtgwgcagatagccttggataccagttactggactttcattaatcacgtcttcatctgggggagcattgccatttatttctccattttatttacaatgcacagtaatggcatctttggcatcttcccaaaccwgtttccatttgttggtaatgcacgacattccctgacccagaagtgcatctggcttgtaattctcttaacaacagtggcttcagttatgccagtggtggcattcagatttttgaaggtggatttatacccaaccctgagtgatcagatccgccggtggcagaaggctcaaaagaaggcaaggcctccaagtagccgaaggcctcggacccgcaggtcaagctcaagaaggtctggatatgcttttgctcaccaagaaggctatggagagcttatcacatctggaaaaaatatgcgagctaaaaatccacccccaacatcagggctggaaaagacacattataawagcactagctggattgaaaatttatgtaagaaaaccacagacaccgtgagcagctttagccaggataaaacagtgaaactgtgagtcaatatgaatttaaaccacgtagttatcttttcacttcaggtggagctgaaattctgctggctccagagtttgagatttgaggcaagaggtggggcaggcagattgcctcacttwacttaaatctgcggcagacaactgccagtgcccatcaaacaggagtgtgcgctatggaaaaccaggccagagggtcactgtctagtttgtgatttggtggacaaaacwctcgctgttacaagtacagattttttttttttaaatcaacctagataccaattgacctgaactttaraatcttatttatggagaaaaacttgtaaagctgcatattcactgaatggatcctcaggcggataaaagggtgcattttaaaggtatatatccaagctgaaaagcatgcctattgacagataaacatgtatctgtaagatcagcctttcccaaggtatacttttaaaatttaaagcgtgtactgtgttgctttcagactgagttgcatgtcactctttagtcttgatatctacctgtctgttcagccaggacaacaaatggcttccaagcctgaagaatacaaaagtgtgcttgtgtttctcatttttataccagtctagggacaaaggagactgaacatctttgcagcaggataggctggtaatttgatcaaatttattcaaaaagctctcagtctgtgtcatgtaaggacatgcttatgaaatgtgagagaggctcgccactaagtattctaaatacttttcaatggcttttctaacaacctcagtagtaatttgctgagcatcatccagaccattaatagaatcagcaaagcactggaatttcacactttaatgataatattccayatagtctatgggcaaatattttcaacatttccaatttttaaagcttcagaattgaagccaaacaaattaataaataattgttttaattactatttwaaaactcaggtttagattgtttaaaattagttgcttttgatactcagctgtcatgtttataattcaaacatgtagtaaacatatgtaggtaaggttgtttttttggagatgttgcagctcaaatttcagtccacatatgaatcatcagtgtattttccataaagtgattygggcatatttgtgtgaaaacctcagttctgtcacttcttacctctataaacttggacgataatgtgccttctctgagactcagtttcttcctctg

SEQ ID NO: 2974 - DNA, 3437 bp, Homo sapiens
ggtgtcgcacttctcccgagaggctccggcgaggggcagggccgcgttcgtccgggacccgcctcaagcctcgcagcctttcacccagtttcctcccgattcttgctgggacaacaaaattgggaagcggttctcgaaacatactgtcaaggcgtagttgcagtgagttgtgaagaaatgttgatcccagagaaaagtttgcattttgcccacctcaaagatattttgatttttggtcgcccaactcacattgaagcytaagacccagctgatttctcttcatttctgcaaagttactgtaccatggcaggccaacgaacatgtcaaaggaggagcagcagagctggccccgggaaaatgcaagaacctccaaagagcattgaagaattcttaaagtttcaaaattgggattattggccaagggaaatccattttagagatgatgataaatggtcatgcactctgaaaaaaataaaagaagatagttcatttgtttcaatttatacacacctatgggaaaatgttcctcgaatatttgaagcacttttgatcatggaatcaaaattaaaggaatattcacttattttgcaaaaccacacctctgaaatatttaagtggaaaagcatgatttctgagacaagttcttatagaaaattggaacgatatggggaatttctaaagaagtaccataagaaaaaaaagataatgctttcagatgaaatggagacagagaagaatatagagggttgcagcttcacaggattcaaagcaaatgaacttactcagctacccagacatttggatgctgaacaaatttatctttttattttaaaagcccataattttgatgaaagagtttttaaaatctggaagactcattttctctcagaagcctccattgctcttttgcatgactccttttggtggtggtttctccataaatttaggcctgacagagaaaaccaagattgcttattcgatagaatttcagaaagttatgtgacacttttcatgagcatacctctaagtcgaaaggatgcattttttcagatatatcctgattgtttggcacaagccatatatgcaacgttccatgaagcatttccagaatcgagttacctctttaatgatgaatttaaagaagatctagggaataacatttttctttggtgttcaggtttaaaacctcaaaaaggcttttggatccactggaaactgaaagaactctccacaaccaccattcatggtagcaaaaaagcacctgcaaaatcagtaaaggaaagaattgcagacagtcaagaacatatatcaactagtatcgacttcaatattataaagattctgaacaacccaagagcatatacgttgcccatatccaaggaagaatcaagattatcaagactagcaacaaagtcgcactatagtagtactggtccagagtttaatcgtgttctcttcaattttggaggtcagagtccattgattttatattatcttaagatgcatgagctggctggtatttccaaagcacctaagaaaaccaagattaaactcactaagatattccaggaacacactacctgctccaacataccgtgatgttataaaggaggcaaaaagacaatttgcaaggaaccaaaaggattttaggatactccaagcaaaggctaccaagaaacctcatgaagtgaaacaggactttgagaagttcctacataaactgcgttccgaagctgaaattgagagagaatgtgtggcatcactatcgtcatcatcatcatcatcaccatcatcaacagacaactacaactttgaggaagaagaatactaagagaaaccagaaatgaactctattcaagaataatgcatacaattcagtggtatcagtttaattgtaacaatatatttaattcaagtccaatccatgtaatcagtattaagagtgtgttttaccattcatctttaaaatcttcaaatcaataaatctcagtaagttattcttaaaagatctgtccaagcatgatcttggctcttaatagtaaaaccatattttaagatggaaaaagaatcattatgaagcatagagagctttcaaccatttctttgaaaatatatcttgatataatagcaaccgttcatcataatacaaaacagaaggaagattaatttactgtggcacagaaagtcctgccaattcctaagtgccctaagtagtttctctcagactttttacattttttcaggcctcaagcaaaaccaaagccccrcctccaggtttggtagcaaacaaactttgcttctccggtgctaagcttccatcactcctctggtaataagctttgtgcacatttgctagaaagctgggcagcttgtccgcaggtaccattgatactgtrcagcctccccatcctgctccagtaagtcgtgacccttgagccccaaacttcctaaaacagtgaggaaaaaaatattagaacctataaatgaaaatacaagggatttgcttggtgtttgtagaacacatagcctatctaagttctaagaagaaaatacatgcggggtttttaggtgtcatcaaacattttaggacattaagacatttatactgtttcagagagtgatttggaattttttcattgtatctaaatctagtccctggttttgactccaagtggtaagtcaacagtactcctcccatttcatgactggcaataacccactgtaatattgattccataaagtagccacttgaagagttgtatagcaagcttacacgtaaatcaggaaggaggcgttaagataaaacaggcaatggtaaaagaaatgtaggcaaccctgaatcagaaggtcactccaaatgaggacaaatcaaaatttaaaatgtacagtcttatacaagttttccccaatggctatttcagctgcattcttaaggccgggctgtttcaaagaagaatcagtcccctagaacagatagcctagttcactgaataaacttatcaacaaaaagcttgttattaaactccaggttgggtcggtggttggttgaatctctaatggaaaattaaccaagcctttccacaaagcagagggcagtccctagaggtccacaccaccttccctgtgccttctggagctagtctgattattggactcagaagttgacatcagatgagatatatctgattgggatgataacaactatataaaggaccacacagctagagttaattttagttactgtaaaccaggcacagtttcaaacctaagatttcaaccaaagtgaaaggccctatcacaatgtacacagatcacttagctttaaaagatgcaatttatcctgacacgaaagttaacatgtacttacaattaattcttcttaataaaattcactccaaattactagtggattaaaggctctatgattaatttagcac

SEQ ID NO: 2975 - DNA, 3185 bp, Homo sapiens
acgacagcggggggggggttagacgggaagttccgcctcagcctctcaatcagcggcggtgtcgcacttctcccgagaggctccggcgaggggcagggccgcgttcgtccgggacccgcctcaagcctcgcagcctttcacccagtttcctcccgattcttgctgggacaacaaaattgggaagcggttctcgaaacatactgtcaaggcgtagttgcatttggtcgcccaactcacattgaagcytaagacccagctgatttctcttcatttctgcaaagttactgtaccatggcaggccaacgaacatgtcaaaggaggagcagcagagctggccccgggaaaatgcaagaacctccaaagagcattgaagaattcttaaagtttcaaaattgggattattggccaagggaaatccattttagagatgatgataaatggtcatgcactctgaaaaaaataaaagaagatagttcatttgtttcaatttatacacacctatgggaaaatgttcctcgaatatttgaagcacttttgatcatggaatcaaaattaaaggaatattcacttattttgcaaaaccacacctctgaaatatttaagtggaaaagcatgatttctgagacaagttcttatagaaaattggaacgatatggggaatttctaaagaagtaccataagaaaaaaaagataatgctttcagatgaaatggagacagagaagaatatagagggttgcagcttcacaggattcaaagcaaatgaacttactcagctacccagacatttggatgctgaacaaatttatctttttattttaaaagcccataattttgatgaaagagtttttaaaatctggaagactcattttctctcagaagcctccattgctcttttgcatgactccttttggtggtggtttctccataaatttaggcctgacagagaaaaccaagattgcttattcgatagaatttcagaaagttatgtgacacttttcatgagcatacctctaagtcgaaaggatgcattttttcagatatatcctgattgtttggcacaagccatatatgcaacgttccatgaagcatttccagaatcgagttacctctttaatgatgaatttaaagaagatctagggaataacatttttctttggtgttcaggtttaaaacctcaaaaaggcttttggatccactggaaactgaaagaactctccacaaccaccattcatggtagcaaaaaagcacctgcaaaatcagtaaaggaaagaattgcagacagtcaagaacatatatcaactagtatcgacttcaatattataaagattctgaacaacccaagagcatatacgttgcccatatccaaggaagaatcaagattatcaagactagcaacaaagactccaagcaaaggctaccaagaaacctcatgaagtgaaacaggactttgagaagttcctacataaactgcgttccgaagctgaaattgagagagaatgtgtggcatcactatcgtcatcatcatcatcatcaccatcatcaacagacaactacaactttgaggaagaagaatactaagagaaaccagaaatgaactctattcaagaataatgcatacaattcagtggtatcagtttaattgtaacaatatatttaattcaagtccaatccatgtaatcagtattaagagtgtgttttaccattcatctttaaaatcttcaaatcaataaatctcagtaagttattcttaaaagatctgtccaagcatgatcttggctcttaatagtaaaaccatattttaagatggaaaaagaatcattatgaagcatagagagctttcaaccatttctttgaaaatatatcttgatataatagcaaccgttcatcataatacaaaacagaaggaagattaatttactgtggcacagaaagtcctgccaattcctaagtgccctaagtagtttctctcagactttttacattttttcaggcctcaagcaaaaccaaagccccrcctccaggtttggtagcaaacaaactttgcttctccggtgctaagcttccatcactcctctggtaataagctttgtgcacatttgctagaaagctgggcagcttgtccgcaggtaccattgatactgtrcagcctccccatcctgctccagtaagtcgtgacccttgagccccaaacttcctaaaacagtgaggaaaaaaatattagaacctataaatgaaaatacaagggatttgcttggtgtttgtagaacacatagcctatctaagttctaagaagaaaatacatgcggggtttttaggtgtcatcaaacattttaggacattaagacatttatactgtttcagagagtgatttggaattttttcattgtatctaaatctagtccctggttttgactccaagtggtaagtcaacagtactcctcccatttcatgactggcaataacccactgtaatattgattccataaagtagccacttgaagagttgtatagcaagcttacacgtaaatcaggaaggaggcgttaagataaaacaggcaatggtaaaagaaatgtaggcaaccctgaatcagaaggtcactccaaatgaggacaaatcaaaatttaaaatgtacagtcttatacaagttttccccaatggctatttcagctgcattcttaaggccgggctgtttcaaagaagaatcagtcccctagaacagatagcctagttcactgaataaacttatcaacaaaaagcttgttattaaactccaggttgggtcggtggttggttgaatctctaatggaaaattaaccaagcctttccacaaagcagagggcagtccctagaggtccacaccaccttccctgtgccttctggagctagtctgattattggactcagaagttgacatcagatgagatatatctgattgggatgataacaactatataaaggaccacacagctagagttaattttagttactgtaaaccaggcacagtttcaaacctaagatttcaaccaaagtgaaaggccctatcacaatgtacacagatcacttagctttaaaagatgcaatttatcctgacacgaaagttaacatgtacttacaattaattcttcttaataaaattcactccaaattactagtggattaaaggctctatgattaatttagcac

SEQ ID NO: 2976 - DNA, 3185 bp, Homo sapiens
gcctttccagggccggggaaccccaggaggaagctgctgagccatgggcgcctacgcgcgggcttcgggggtctgcgctcgcggctgcctggactcagcaggcccctggaccatgtcccgcgccctgcggccaccgctcccgcctctctgctttttccttttgttgctggcggctgccggtgctcgggccgggggatacgagacatgccccacagtgcagccgaacatgctgaacgtgcacctgctgcctcacacacwtgatgacgtgggctggctcaaaaccgtggaccagtacttttatggaatcaagaatgacatccagcacgccggtgtgcagtacatcctggactcggtcatctctgccttgctggcagatcccacccgtcgcttcatttacgtggagattgccttcttctcccgttggtggcaccagcagacaaatgccacacaggaagtcgtgcgagaccttgtgcgccaggggcgcytggagttcgccartggtggctgggtgatgaacgatgaggcagccacccactacggtgccatcgtggaccagatgacacttgggctgcgctttctggaggacacatttggcaatgatgggcgaccccgtgtggcytggcacattgaccccttcggccactctcgggagcaggcctcgctgtttgcgcagatgggcttcgacggcttcttctttgggcgccttgattatcaagataagtgggtacggatgcagaagctggagatggagcaggtgtggcgggccagcaccagcctgaagcccccracykcggacctcttcactggtgtgcttcccaatggttacaacccgccaaggaatctgtgctgggatgtgctgtgtgtcgatcagccgstggtggaggaccctcgcagccccgagtacaacgccaaggagctggtcgattacttcctaaatgtggccactgcccagggccggtattaycgcaccaaccacaytgtgatgaccatgggctcggacttccaatatgagaatgccaacatgtggttcaagaaccttgacaagctcatccrgctggtaaatgcgcaggcaaaaggaagcagtgtccatgttctctactccacccccgcttgttacctctgggagctgaacaaggccaacctcacctggtcagtgaaacatgacgacttcttcccttacgcggatggcccccaccagttctggaccggttacttttccagtcggccggccctcaaacgctacgagcgcctcagctacaacttcctgcaggtgtgcarccagctggaggcgctggtgggcctggcggccaacgtgggaccctatggctccggagacagtgcacccctcaatgaggcgatggctgtgctccagcatcacgacgccgtcagcggcacctcccgccagcacgtggccaacgactacgcgcgccagcttgcggcaggctgggggccttgcgaggttcttctgagcaacgcgctgkcgcggctcagaggcttcaaagatcacttcaccttttgccaacagctaaacatcagcatctgcccgctcagccagacggcggcgcgcttccaggtcatcgtttataatcccctggggcggaaggtgaattggatggtacggctgccggtcagcgaaggcgttttcgttgtgaaggaccccaatggcaggacagtgcccagcgatgtggtaatatttcccagctcagacagccaggcgcaccctccgkagctgctgttctcagcctcactgcccgccctgggcttcagcacctattcagtagcccaggtgcctcgctggaagccccaggcccgcgcaccacagcccatccccagaagatcctggtcccctgctttaaccatcgaaaatgagcacatccgggcaacgtttgatcctgacacagggctgttgatggagattatgaacatgaatcagcaactcctgctgcctgttcgcyagaccttcttctggtacaaygccagtataggtgacaacgaaagtgaccaggcctcaggtgcctacatcttcagacccaaccaacagaaaccgctgcctgtgagccgctgggctcagatccacctggtgaagacacccttggtgcaggaggtgcaccagaacttctcagcttggtgttcccaggtggttcgcctgtacccaggacagcggcacctggagctagagtggtcggtggggccgatacctgtgggcgacacctgggggaaggaggtcatcagccgttttgacacaccgctggagacaaagggacgcttctacacagacagcaatggcygggagatcctggagaggaggcgggattatygacccacctggaaactgaaccagacggagccygtggcaggaaactactatccagtcaacacccggatttacatcacggatggaaacatgcagctgactgtgctgactgaccgctcccaggggggcagcagcctgagagatggctcgcyggagctcatggtgcaccgaaggctgctgaaggacgatggacgcggagtatcggagccactaatggagaacgggtcgggggcgtgggtgcgagggcgccacctggtgctgctggacacagcccaggctgcagccgcsggacaccggctcctggcggagcaggaggtcctggcccctcaggtggtgctggccccgggtggcggcgccgcctacaatctcggggctcctccgcgcacgcagttctcagggctgcgcagggacctgccgccctcggtgcacctgctcacgctggccagctggggccccgaaatggtgctgctgcgcttggagcaccagtttgccgtaggagaggattccggacgtaacctgagcgcccccgttaccttgaacttgagggacctgttctccaccttcaccatcacccgcctgcaggagaccacgctggtggccaaccagctccgcgaggcagcctccaggctcaagtggacaacaaacacaggccccacaccccaccaaactccgtaccagctggacccggccaacatcacgctggaacccatggaaatccgcactttcctggcctcagttcaatggaaggaggtggatggttaggtctgctgggatgggccctccaagcccaagcctcctgctccgggggcagaccagactctgactctcctcttggggctgctgccattaaaacgctactactaagastcag

SEQ ID NO: 2977 - DNA, 3796 bp, Homo sapiens
gcctttccagggccggggaaccccaggaggaagctgctgagccatgggcgcctacgcgcgggcttcgggggtctgcgctcgcggctgcctggactcagcaggcccctggaccatgtcccgcgccctgcggccaccgctcccgcctctctgctttttccttttgttgctggcggctgccggtgctcgggccgggggatacgagacatgccccacagtgcagccgaacatgctgaacgtgcacctgctgcctcacacacwtgatgacgtgggctggctcaaaaccgtggaccagtacttttatggaatcaagaatgacatccagcacgccggtgtgcagtacatcctggactcggtcatctctgccttgctggcagatcccacccgtcgcttcatttacgtggagattgccttcttctcccgttggtggcaccagcagacaaatgccacacaggaagtcgtgcgagaccttgtgcgccaggggcgcytggagttcgccartggtggctgggtgatgaacgatgaggcagccacccactacggtgccatcgtggaccagatgacacttgggctgcgctttctggaggacacatttggcaatgatgggcgaccccgtgtggcytggcacattgaccccttcggccactctcgggagcaggcctcgctgtttgcgcagatgggcttcgacggcttcttctttgggcgccttgattatcaagataagtgggtacggatgcagaagctggagatggagcaggtgtggcgggccagcaccagcctgaagcccccracykcggacctcttcactggtgtgcttcccaatggttacaacccgccaaggaatctgtgctgggatgtgctgtgtgtcgatcagccgstggtggaggaccctcgcagccccgagtacaacgccaaggagctggtcgattacttcctaaatgtggccactgcccagggccggtattaycgcaccaaccacaytgtgatgaccatgggctcggacttccaatatgagaatgccaacatgtggttcaagaaccttgacaagctcatccrgctggtaaatgcgcaggtcagtgaaacatgacgacttcttcccttacgcggatggcccccaccagttctggaccggttacttttccagtcggccggccctcaaacgctacgagcgcctcagctacaacttcctgcaggtgtgcarccagctggaggcgctggtgggcctggcggccaacgtgggaccctatggctccggagacagtgcacccctcaatgaggcgatggctgtgctccagcatcacgacgccgtcagcggcacctcccgccagcacgtggccaacgactacgcgcgccagcttgcggcaggctgggggccttgcgaggttcttctgagcaacgcgctgkcgcggctcagaggcttcaaagatcacttcaccttttgccaacagctaaacatcagcatctgcccgctcagccagacggcggcgcgcttccaggtcatcgtttataatcccctggggcggaaggtgaattggatggtacggctgccggtcagcgaaggcgttttcgttgtgaaggaccccaatggcaggacagtgcccagcgatgtgagcccaaacaacgaatattcccccgctgggactcctcccccagtgggcatttcctcatcgcccccatggatatcgcctgcttccatgaatacctcccactcatgcatatctcttcccccctcttgtatcttctccctctgccccttaatatcagtctccccttgggaacatatgcctcctgtgagtggtcctcccttttttttttttttttgagacggagtctcgctctgtcacccaggctggaktgcagtggcgcgatcttggctcacttcaaactccgcctgctggattataggcatgagccaccgtgcctggctggtcctccattttaataccccgcttccccaggaaaatttattgctgtttatggacatctccttcattccagaaaacgtcctcccccaaacctcttcctcccccgagaacctgcctcaagggtttcttcccctacttcctccttcactcccccgactccatggtctctccaccctcccggtgggtttttttttccacctggtgaatcttctctgcaatcatttccttggaatctgactgtccccccaccacacacacctccatttcctttccccatctcaggactcttttccttccttgagttttttgtctccatgcatgtatagctttccatgggtactcttgactcagtttccctcctcctttatccgaggtggtaatatttcccagctcagacagccaggcgcaccctccgkagctgctgttctcagcctcactgcccgccctgggcttcagcacctattcagtagcccaggtgcctcgctggaagccccaggcccgcgcaccacagcccatccccagaagatcctggtcccctgctttaaccatcgaaaatgagcacatccgggcaacgtttgatcctgacacagggctgttgatggagattatgaacatgaatcagcaactcctgctgcctgttcgcyagaccttcttctggtacaaygccagtataggtgacaacgaaagtgaccaggcctcaggtgcctacatcttcagacccaaccaacagaaaccgctgcctgtgagccgctgggctcagatccacctggtgaagacacccttggtgcaggaggtgcaccagaacttctcagcttggtgttcccaggtggttcgcctgtacccaggacagcggcacctggagctagagtggtcggtggggccgatacctgtgggcgacacctgggggaaggaggtcatcagccgttttgacacaccgctggagacaaagggacgcttctacacagacagcaatggcygggagatcctggagaggaggcgggattatygacccacctggaaactgaaccagacggagccygtggcaggaaactactatccagtcaacacccggatttacatcacggatggaaacatgcagctgactgtgctgactgaccgctcccaggggggcagcagcctgagagatggctcgcyggagctcatggtgcaccgaaggctgctgaaggacgatggacgcggagtatcggagccactaatggagaacgggtcgggggcgtgggtgcgagggcgccacctggtgctgctggacacagcccaggctgcagccgcsggacaccggctcctggcggagcaggaggtcctggcccctcaggtggtgctggccccgggtggcggcgccgcctacaatctcggggctcctccgcgcacgcagttctcagggctgcgcagggacctgccgccctcggtgcacctgctcacgctggccagctggggccccgaaatggtgctgctgcgcttggagcaccagtttgccgtaggagaggattccggacgtaacctgagcgcccccgttaccttgaacttgagggacctgttctccaccttcaccatcacccgcctgcaggagaccacgctggtggccaaccagctccgcgaggcagcctccaggctcaagtggacaacaaacacaggccccacaccccaccaaactccgtaccagctggacccggccaacatcacgctggaacccatggaaatccgcactttcctggcctcagttcaatggaaggaggtggatggttaggtctgctgggatgggccctccaagcccaagcctcctgctccgggggcagaccagactctgactctcctcttggggctgctgccattaaaacgctactactaagastcag

SEQ ID NO: 2978 - DNA, 3188 bp, Homo sapiens
gcctttccagggccggggaaccccaggaggaagctgctgagccatgggcgcctacgcgcgggcttcgggggtctgcgctcgcggctgcctggactcagcaggcccctggaccatgtcccgcgccctgcggccaccgctcccgcctctctgctttttccttttgttgctggcggctgccggtgctcgggccgggggatacgagacatgccccacagtgcagccgaacatgctgaacgtgcacctgctgcctcacacacwtgatgacgtgggctggctcaaaaccgtggaccagtacttttatggaatcaagaatgacatccagcacgccggtgtgcagtacatcctggactcggtcatctctgccttgctggcagatcccacccgtcgcttcatttacgtggagattgccttcttctcccgttggtggcaccagcagacaaatgccacacaggaagtcgtgcgagaccttgtgcgccaggggcgcytggagttcgccartggtggctgggtgatgaacgatgaggcagccacccactacggtgccatcgtggaccagatgacacttgggctgcgctttctggaggacacatttggcaatgatgggcgaccccgtgtggcytggcacattgaccccttcggccactctcgggagcaggcctcgctgtttgcgcagatgggcttcgacggcttcttctttgggcgccttgattatcaagataagtgggtacggatgcagaagctggagatggagcaggtgtggcgggccagcaccagcctgaagcccccracykcggacctcttcactggtgtgcttcccaatggttacaacccgccaaggaatctgtgctgggatgtgctgtgtgtcgatcagccgstggtggaggaccctcgcagccccgagtacaacgccaaggagctggtcgattacttcctaaatgtggccactgcccagggccggtattaycgcaccaaccacaytgtgatgaccatgggctcggacttccaatatgagaatgccaacatgtggttcaagaaccttgacaagctcatccrgctggtaaatgcgcagcaggcaaaaggaagcagtgtccatgttctctactccacccccgcttgttacctctgggagctgaacaaggccaacctcacctggtcagtgaaacatgacgacttcttcccttacgcggatggcccccaccagttctggaccggttacttttccagtcggccggccctcaaacgctacgagcgcctcagctacaacttcctgcaggtgtgcarccagctggaggcgctggtgggcctggcggccaacgtgggaccctatggctccggagacagtgcacccctcaatgaggcgatggctgtgctccagcatcacgacgccgtcagcggcacctcccgccagcacgtggccaacgactacgcgcgccagcttgcggcaggctgggggccttgcgaggttcttctgagcaacgcgctgkcgcggctcagaggcttcaaagatcacttcaccttttgccaacagctaaacatcagcatctgcccgctcagccagacggcggcgcgcttccaggtcatcgtttataatcccctggggcggaaggtgaattggatggtacggctgccggtcagcgaaggcgttttcgttgtgaaggaccccaatggcaggacagtgcccagcgatgtggtaatatttcccagctcagacagccaggcgcaccctccgkagctgctgttctcagcctcactgcccgccctgggcttcagcacctattcagtagcccaggtgcctcgctggaagccccaggcccgcgcaccacagcccatccccagaagatcctggtcccctgctttaaccatcgaaaatgagcacatccgggcaacgtttgatcctgacacagggctgttgatggagattatgaacatgaatcagcaactcctgctgcctgttcgcyagaccttcttctggtacaaygccagtataggtgacaacgaaagtgaccaggcctcaggtgcctacatcttcagacccaaccaacagaaaccgctgcctgtgagccgctgggctcagatccacctggtgaagacacccttggtgcaggaggtgcaccagaacttctcagcttggtgttcccaggtggttcgcctgtacccaggacagcggcacctggagctagagtggtcggtggggccgatacctgtgggcgacacctgggggaaggaggtcatcagccgttttgacacaccgctggagacaaagggacgcttctacacagacagcaatggcygggagatcctggagaggaggcgggattatygacccacctggaaactgaaccagacggagccygtggcaggaaactactatccagtcaacacccggatttacatcacggatggaaacatgcagctgactgtgctgactgaccgctcccaggggggcagcagcctgagagatggctcgcyggagctcatggtgcaccgaaggctgctgaaggacgatggacgcggagtatcggagccactaatggagaacgggtcgggggcgtgggtgcgagggcgccacctggtgctgctggacacagcccaggctgcagccgcsggacaccggctcctggcggagcaggaggtcctggcccctcaggtggtgctggccccgggtggcggcgccgcctacaatctcggggctcctccgcgcacgcagttctcagggctgcgcagggacctgccgccctcggtgcacctgctcacgctggccagctggggccccgaaatggtgctgctgcgcttggagcaccagtttgccgtaggagaggattccggacgtaacctgagcgcccccgttaccttgaacttgagggacctgttctccaccttcaccatcacccgcctgcaggagaccacgctggtggccaaccagctccgcgaggcagcctccaggctcaagtggacaacaaacacaggccccacaccccaccaaactccgtaccagctggacccggccaacatcacgctggaacccatggaaatccgcactttcctggcctcagttcaatggaaggaggtggatggttaggtctgctgggatgggccctccaagcccaagcctcctgctccgggggcagaccagactctgactctcctcttggggctgctgccattaaaacgctactactaagastcag

SEQ ID NO: 2979 - DNA, 1725 bp, Homo sapiens
crtagtacacaacaaatttatgyctcagctacatgatctaaaagttaaaggtcccaggagccccatcctgaacttggaaagtgtagccttcagaggtagtttctggcacaacgttttgatcttcctcttcctggaaatatattaaaaaataagtataaaaataataagtattccaagcagcagcctacctgaagtctgtatttaatctctaggtcttgatctgcatattacacctttaatcctgtatggtattgtagtatctgacataggggagggagggtctctgaaactttgccaattcataagtgctagctactacagtaacagaaacaggccgagattttttttcttccccaaccgtcacttttcaataggaaaagactgtattaggcccagagcatggtggtgggtttggcctacttctctatcacctcctacaatgacacccgttaacttaccctcaagatattctaagattctcaaggctgttcatttgaaactaatctggtgacttttaaaatctcacctcaacgccaagaccaaggtgcgagggcttattgagatcatctccaatgcagcagggtacgagaatatccccatccagcaccatgaagaaaacttcctgaggcagttggctcagaaggtccctgacaagctgaataaccctaagttcaatgatccgcacatcaagaccaacctgctcctgcaggctcacctgtcccgcatgcagctgagtgctgagttgcagtcagatacggaggaaatccttagtaaggcagtccggctcgtccaggcctgcgtggatgtcctctccagcaatgggtggctcagctctgctctggcagctatggaattggcccagatggtcacccaagccatgtggtccaaggactcatacctgaagcagctgccacacttcatctctgagcatatcaaacgttgcacagacaagggagtgaagagtgttttcgacatcatggagatggaggatgaagaacggaacacaattcttcagctgactgacagccagattacagatgtggctcgcttttgtaactgctaccctaatatcgaactatcttaggaggtggtggataaggacagcatccgcagtggcgggccagcggtggtgctggtgcagctggagcgagaggaggaagtcacaggccctgtcattgcgcctctcttcccgcagaaacgtgaagagggctggtgggtggtgattggagacaccaagtccaatagcctcatctccatcaagaggctgatcctgcagcagaaggccaaggtgaagttggactttgtggctccagccactggtgcccacaactacactctatacttcatgagtgatgcttacatgggatgtgaccaggagtacaaattcagcatggatgtgaaagaagccgagacggacagtgattcagattgagtcctgaggcatttactcttgggtaaaggagagttgagcctgaattaggaatgtgtatattgtagggatcctggtggttatggggaccacgtctgtgggcctgaggtctggccagccagggctggtgctgtccctgcccacatccacttccttttcccttgttcacactctggatccagtgacagcaggtgtcacgggtcaagcataaatcatatatagcatgttcaggcatgttactggtagttccttttgagtctgacattctaataaaataatttgtagaaaccaaagct

SEQ ID NO: 2980 - DNA, 1278 bp, Homo sapiens
gaaatccaggctggggaaagaggtttaatatcccggtacaccgtggtgagaagcctgggcaaagcatctgcacagacaggtgtgtgtggttgagcccaccaggtcccactttctctcatcccagtccctccctaaggtgctgcctagaattctgcacacacattcttactcccccaaagcacagggctttcttccagattgctttttgaaggaggcgtttaaaccagaagggcaaagatgctgacacagagtttggtttttattgttatgtgtttggctgggkgcaraactgccctcaccacccctggccaccctggyctyttgggaggaacaggcaragaggtggcttcagatggctcttggctgccactctaggcctcggggcttatacaatgagcakkgggctctaccttccaayaggaagtgcaaactaattcgaagtcacacttcaccaggagggagagatggtcttggctgaaggcactttaatcagggagcaaacccagtgccggagtttgtcttctmgttactctgataaatctagacaccactctgttggagaaccagcactgccggcagctggggttagtgcactgactgagcgaggcatgaggcctgctcrctggtagaacttcttgttagggctgttagcatggtcagctagcagctggcatggggtgaactgttttccataggcagcttcatatttcttgagccggtccactatcttctgggcgccatacagatccacaaagcggaaaggccctcccagacaaggcgggaagccaagcccaaagacggctccgatgtctccctctgcaggtgtggccaagatcccctcttgcaggcacatgactgcctcattcacaaatcttgtcaccaggcggaactggatgtcttcgtctgatgagacttcagacttaggaggcagcttcagactcgctaaaatactatccatgtcagaattcaaatccttcctcttcacaccctcctgatagatgtaaaagcccttcccagatttacgacctaggaagcccttggacaccatctgtgtcagcagttctgggtytccacctccaaaccgctccccaaagactttgcccagatcttccgccacatgtttcgctacatccacaccaacttcatccaccagtgtggcggcacccacaggaaagccaaagcttgtggtcagggaatccagcttcttcgggtcaactccttcctggaggattcggatgacttcagacatcatgggcgcaagacacctggtagtataga

SEQ ID NO: 2981 - DNA, 1271 bp, Homo sapiens
gtgggagrgaactattgagaggaacaaagagcttataaatacattaggacctggaattcagttgtcgagccaggacggtgacagcgtttaacaaagcttagagaaacctccaggagactgctatcatggcagagaagcccaagctccactactycaatryacggggcagaatggagtccacccggtggctcctggctgcagctggagtagagtttgaagagaaatttataaaatctgcagaagatttggacaagttaagaaatgatggatatttgatgttccagcaagtgccaatggttgagattgatgggatgawgctggtgcagaccagagccattctcaactacattgccagcaaatacaacctctatgggaaagacataaaggagagagccctgattgatatgtatatagaaggtatagcagatttgggtgaaatgatcctycttctgcccktatstcmacctgaggaamaagatgccaagcttgccttgatcmargagaaaataaaaaatcgctacttccctgcctttgaaaaagtcttaaagagccatggacaagactaccttgttggcaacaagctgagccgggctgacattcayctggtggaacttctctactacgtsgargagcttgactccagtcttatctccagcttccctctgctgaaggccctgaaaaccagaatcagcaacctgcccacagtgaagaagtttctacagcctggcagcccaaggaagcctcccatggatgmgaaatctttagaagaakcaaggaagattttcaggttttaataacgcagycatrgaggycaagaacwtgcaakaccartrttctaaagttttgcaacaatwaagtrctttacctaagtgttgattgtgcctgttgtgaagctaatgaactctttcaaattatatgctaattaaataatacaactcctattcrcysacttagttaaaattgatttsttytcattaggatctgatgtgaattcagwtttccaatctyctcctagccaacmattttcytggaattamaaattcagtaaaaaaggaaactatagattatgtggtttgtttgacttttccaagaattgtcccgtaacatacaatttgtcatacaatctattaaaatgtcaatgtagaaatgcacttctgacattttcaggtatgcacaggagaagagttaccatcctggataatggcataaagacattttcttcttttcctggacagtcattttatttctgataaaagcgttctttcttatgc

SEQ ID NO: 2982 - DNA, 3236 bp, Homo sapiens
ggcgcggaggggccgctcaccccgcagcccggcctcggcctccgccgcttgtygtcgcgccccgcccgcgagcccgccccgcacgtcccccgccggcggccaccatgagcacaggcctgcggtacaagagcaagctggcgaccccaggtgagcccagacattgacaagcagtacgtgggcttcgccacactgcccaaccaggtgcaccgcaagtcggtgaagaaaggctttgacttcacactcatggtggctggtgagtcaggcctggggaagtccacactggtccacagcctcttcctgacagacttgtacaaggaccggaagctgctcagtgctgaggagcgcatcagccagacggtagagattctaaaacacacggtggacattgaggagaagggagtcaagctgaagctcaccatcgtggacacgccgggattcggggacgctgtcaacaacaccgagtgctggaagcccatcaccgactatgtggaccagcagtttgagcagtacttccgtgatgagagcggcctcaaccgaaagaacatccaagacaaccgagtgcactgctgcctatacttcatctcccccttcgggcatgggctgcggccagtggatgtgggtttcatgaaggcattgcatgagaaggtcaacatcgtgcctctcatcgccaaagctgactgtcttgtccccagtgagatccggaagctgaaggagcggatccgggaggagattgacaagtttgggatccatgtataccagttccctgagtgtractcggacgaggatgaggacttcaagcagcaggaccgggaactgaaggagagcgcgcccttcgccgttataggcagcaacacggtggtggaggccaaggggcagcgggtccggggccgactgtacccctgggggatcgtggaggtggagaaccaggcgcattgcgacttcgtgaagctgcgcaacatgctcatccgcacgcatatgcacgacctcaaggacgtgacgtgcgacgtgcactacgagaactaccgcgcgcactgcatccagcagatgaccagcaaactgacccaggacagccgcatggagagccccatcccgatcctgccgctgcccaccccggacgccgagactgagaagcttatcaggatgaaggatgaggaactgaggcgcatgcaggagatgctgcagaggatgaagcagcagatgcaggaccagtgacgctcgccgcggacacaccgtccgtctccgggacgccctcgcacccctggacaccagaccggactgttcccgacccggagacgcggggccacagcccccagctgaccctaatttattctcagcaccaccccctcccaggtcattgtgtctgtttccgaggggcctggaccgtagcccccgcccagctggccctctctgaccttgggggatcaggagcgaagttgggcgggacttcagagatccgcctcccttgcccttcccccgcccccggacggtcacagcacccaaaccgcaggccctgctctggcaggcaggcaaagctaggcagaagaggattcccaggatcctgggtctgttccctgccccagtgctgcagaacggacttgggagccctcctttgcctgctcccgcgggtcacccagcgagtgctgagaccccattttctgtcgaggcsggccgagtcttcccttatccccagacgcctagcgggcagggttgggctgaatcaaatgggagccctccagacataaggaggccagaggctgcaaggagcggggtcgtgaccgcttamaccccttctccacagcccggcccgacctggagggcccccggggcactgggcggtgagccacctcctggcaactctcggtgccgtcccctgccctcgctcgaggcctcttctccccagcaccgctgtggtgtgccgggatcctgagcctaggcctcccgatgttcccacccgcatgatcccttcccgccacacgatgctccgttttcttccgttgtgaatgccgcgtcctgtcctggtgacaggagaacaatgttggtgaacgtcgcagcgggtgtccgagtgctccgtgtgcccctgagagcgggtgggagcggaagcctgagcggcctgcggcctccggcgatagtgtgctatctgccgctgcagcgcgcgtccgcgcggcctctgggctatttctggccaggccgcagcactgtggtcggtgcgggcgtggcaggggcggggcggccttatcgctcggctctcccgcctacgcctcccgctgcagagtaagccgggctgccgtcttctcgccatgggctccgggccgcgcggggcgctgagcttactgctcctgctgctggccccgccgagccgcccggccgcaggttgcccggcgccctgtagctgcgcggggacgctcgtggactgcgggcgcygcgggctgacttrggcctcgctgccgaccgccttccytgtcgacacaaccgagctggtgctgaccggcaacaacctgacggcgctgccgccggggctgctggacgcgctgcccgcgctgcgcaccgcacacctgggcgccaacccctggcgctgcgactgccgccttgtgcsgctgcgcgcctggctggccggccgccccgagcgtgcgccctrccgcgacctgcgttgcgtggcgcccccagcgctgcgcggccgcctgctgccctatctgsccgaggacgagctgcgcgccgcttgcgctcccggcccgctctgctrgggggcgctggcggcgcagcttgcgctgctgggccttgggctgctgcacgcgttgctgctggtgctgctgctgtgccgcctgcggaggctgcgggcccgggcccgcgctcgcgccgcagcccggctgtcgctgaccgacccgctggtggccgagcgagccggaaccgacgagtcctgaggagagaaccggtgcgtcctgaggagagaaccggcgctgggcaacacgggcctgcaaactcgacaggaccctgcccgaggggccctcgcgccaacctggaccggtcyccgcctcctccgctgcccaatctctcagacccaccccacctgcaggcccagaccacgtgggacagaactcctgcccaccctaccccgagggaggcgaacccgcacttccaggcttgggaggaccatggggcacaatgcggtccagaccctgctgcgtctcccttccaaactctggtgctgaataaacccttctgatctggtcttctctgca

SEQ ID NO: 2983 - DNA, 2711 bp, Homo sapiens
cctcctgctgtcctggagcccggactgaggccccgggggcgcggcagggctcccggtccacgcgagccatggcccgaccgcgcctcggctcagccctgccctccgcagccgctttcgggtggctccgcccgcggcccaatttccaggcgaccgtttcccggcgacggcgggcggggccgtctctgccgccccccgccgcgcgctccgcgggcgcctgcgacgccccgcctctggctcgggtgcgggagcggggcctgcccggactgcgacgccgccacagcttggggccagttcgcccagtcagggggatggctcggtcggcctcgggggtcgacgatcccccgggtaggcgacgtgccctgtccaggcctcacttcccgcgtccgcaaaacggggtggacaacgcagcctaaggcagagccgcgccaaggtccctcgctgtcgccgggctctggcggcctgaccgggcctggggtccgagcgtgcccccgggcctgggggggtcgccgcgatggactcgctggcagcgccccaggaccgcctggtggagcagctgctgtcgccgcggacccaggcccagaggcggctcaaggacattgacaagcagtacgtgggcttcgccacactgcccaaccaggtgcaccgcaagtcggtgaagaaaggctttgacttcacactcatggtggctggtgagtcaggcctggggaagtccacactggtccacagcctcttcctgacagacttgtacaaggaccggaagctgctcagtgctgaggagcgcatcagccagacggtagagattctaaaacacacggtggacattgaggagaagggagtcaagctgaagctcaccatcgtggacacgccgggattcggggacgctgtcaacaacaccgagtgctggaagcccatcaccgactatgtggaccagcagtttgagcagtacttccgtgatgagagcggcctcaaccgaaagaacatccaagacaaccgagtgcactgctgcctatacttcatctcccccttcgggcatgggctgcggccagtggatgtgggtttcatgaaggcattgcatgagaaggtcaacatcgtgcctctcatcgccaaagctgactgtcttgtccccagtgagatccggaagctgaaggagcggatccgggaggagattgacaagtttgggatccatgtataccagttccctgagtgtractcggacgaggatgaggacttcaagcagcaggaccgggaactgaaggagagcgcgcccttcgccgttataggcagcaacacggtggtggaggccaaggggcagcgggtccggggccgactgtacccctgggggatcgtggagggcgcattgcgacttcgtgaagctgcgcaacatgctcatccgcacgcatatgcacgacctcaaggacgtgacgtgcgacgtgcactacgagaactaccgcgcgcactgcatccagcagatgaccagcaaactgacccaggacagccgcatggagagccccatcccgatcctgccgctgcccaccccggacgccgagactgagaagcttatcaggatgaaggatgaggaactgaggcgcatgcaggagatgctgcagaggatgaagcagcagatgcaggaccagtgacgctcgccgcggacacaccgtccgtctccgggacgccctcgcacccctggacaccagaccggactgttcccgacccggagacgcggggccacagcccccagctgaccctaatttattctcagcaccaccccctcccaggtcattgtgtctgtttccgaggggcctggaccgtagcccccgcccagctggccctctctgaccttgggggatcaggagcgaagttgggcgggacttcagagatccgcctcccttgcccttcccccgcccccggacggtcacagcacccaaaccgcaggccctgctctggcaggcaggcaaagctaggcagaagaggattcccaggatcctgggtctgttccctgccccagtgctgcagaacggacttgggagcctgtcgaggcsggccgagtcttcccttatccccagacgcctagcgggcagggttgggctgaatcaaatgggagccctccagacataaggaggccagaggctgcaaggagcggggtcgtgaccgcttamaccccttctccacagtgagcctaggcctcccgatgttcccacccgcatgatcccttcccgccacacgatgctccgttttcttccgttgtgaatgccgcgtcctgtcctggtgacaggagaacaatgttggtgaacgtcgcagcgggtgtccgagtgctccgtgtgcccctgagagcgggtgggagcggaagcctgagcggcctgcggcctccggcgatagtgtgctatctgccgctgcagcgcgcgtccgcgcggcctctgggctatttctggccaggccgcagcactgtggtcggtgcgggcgtggcaggggcggggcggccttatcgctcggctctcccgcctacgcctcccgctgcagagtaagccgggctgccgtcttctcgccatgggctccggtgagtctggagtccggtcgggcccccggctgctccctaggccgacccgggttgagaggagctctggtcstttggctgcagctggragagacttgggtcagacttagaggggacttccagccggcgtgcggggtggtcagggtggagaggctggcgg

SEQ ID NO: 2984 - DNA, 2722 bp, Homo sapiens
cctcctgctgtcctggagcccggactgaggccccgggggcgcggcagggctcccggtccacgcgagccatggcccgaccgcgcctcggctcagccctgccctccgcagccgctttcgggtggctccgcccgcggcccaatttccaggcgaccgtttcccggcgacggcgggcggggccgtctctgccgccccccgccgcgcgctccgcgggcgcctgcgacgccccgcctctggctcgggtgcgggagcggggcctgcccggactgcgacgccgccacagcttggggccagttcgcccagtcagggggatggctcggtcggcctcgggggtcgacgatcccccgggtaggcgacgtgccctgtccaggcctcacttcccgcgtccgcaaaacggggtggacaacgcagcctaaggcagagccgcgccaaggtccctcgctgtcgccgggctctggcggcctgaccgggcctggggtccgagcgtgcccccgggcctgggggggtcgccgcgatggactcgctggcagcgccccaggaccgcctggtggagcagctgctgtcgccgcggacccaggcccagaggcggctcaaggacattgacaagcagtacgtgggcttcgccacactgcccaaccaggtgcaccgcaagtcggtgaagaaaggctttgacttcacactcatggtggctggtgagtcaggcctggggaagtccacactggtccacagcctcttcctgacagacttgtacaaggaccggaagctgctcagtgctgaggagcgcatcagccagacggtagagattctaaaacacacggtggacattgaggagaagggagtcaagctgaagctcaccatcgtggacacgccgggattcggggacgctgtcaacaacaccgagtgctggaagcccatcaccgactatgtggaccagcagtttgagcagtacttccgtgatgagagcggcctcaaccgaaagaacatccaagacaaccgagtgcactgctgcctatacttcatctcccccttcgggcatgggctgcggccagtggatgtgggtttcatgaaggcattgcatgagaaggtcaacatcgtgcctctcatcgccaaagctgactgtcttgtccccagtgagatccggaagctgaaggagcggatccgggaggagattgacaagtttgggatccatgtataccagttccctgagtgtractcggacgaggatgaggacttcaagcagcaggaccgggaactgaaggagagcgcgcccttcgccgttataggcagcaacacggtggtggaggccaaggggcagcgggtccggggccgactgtacccctgggggatcgtggaggtggagaaccaggcgcattgcgacttcgtgaagctgcgcaacatgctcatccgcacgcatatgcacgacctcaaggacgtgacgtgcgacgtgcactacgagaactaccgcgcgcactgcatccagcagatgaccagcaaactgacccaggacagccgcatggagagccccatcccgatcctgccgctgcccaccccggacgccgagactgagaagcttatcaggatgaaggatgaggaactgaggcgcatgcaggagatgctgcagaggatgaagcagcagatgcaggaccagtgacgctcgccgcggacacaccgtccgtctccgggacgccctcgcacccctggacaccagaccggactgttcccgacccggagacgcggggccacagcccccagctgaccctaatttattctcagcaccaccccctcccaggtcattgtgtctgtttccgaggggcctggaccgtagcccccgcccagctggccctctctgaccttgggggatcaggagcgaagttgggcgggacttcagagatccgcctcccttgcccttcccccgcccccggacggtcacagcacccaaaccgcaggccctgctctggcaggcaggcaaagctaggcagaagaggattcccaggatcctgggtctgttccctgccccagtgctgcagaacggacttgggagcctgtcgaggcsggccgagtcttcccttatccccagacgcctagcgggcagggttgggctgaatcaaatgggagccctccagacataaggaggccagaggctgcaaggagcggggtcgtgaccgcttamaccccttctccacagtgagcctaggcctcccgatgttcccacccgcatgatcccttcccgccacacgatgctccgttttcttccgttgtgaatgccgcgtcctgtcctggtgacaggagaacaatgttggtgaacgtcgcagcgggtgtccgagtgctccgtgtgcccctgagagcgggtgggagcggaagcctgagcggcctgcggcctccggcgatagtgtgctatctgccgctgcagcgcgcgtccgcgcggcctctgggctatttctggccaggccgcagcactgtggtcggtgcgggcgtggcaggggcggggcggccttatcgctcggctctcccgcctacgcctcccgctgcagagtaagccgggctgccgtcttctcgccatgggctccggtgagtctggagtccggtcgggcccccggctgctccctaggccgacccgggttgagaggagctctggtcstttggctgcagctggragagacttgggtcagacttagaggggacttccagccggcgtgcggggtggtcagggtggagaggctggcgg

SEQ ID NO: 2985 - DNA, 2328 bp, Homo sapiens
cgaccgtttcccggcgacggcgggcggggccgtctctgccgccccccgccgcgcgctccgcgggcgcctgcgacgccccgcctctggctcgggtgcgggagcggggcctgcccggactgcgacgccgccacagcttggggccagttcgcccagtcagggggatggctcggtcggcctcgggggtcgacgatcccccgggacattgacaagcagtacgtgggcttcgccacactgcccaaccaggtgcaccgcaagtcggtgaagaaaggctttgacttcacactcatggtggctggtgagtcaggcctggggaagtccacactggtccacagcctcttcctgacagacttgtacaaggaccggaagctgctcagtgctgaggagcgcatcagccagacggtagagattctaaaacacacggtggacattgaggagaagggagtcaagctgaagctcaccatcgtggacacgccgggattcggggacgctgtcaacaacaccgagtgctggaagcccatcaccgactatgtggaccagcagtttgagcagtacttccgtgatgagagcggcctcaaccgaaagaacatccaagacaaccgagtgcactgctgcctatacttcatctcccccttcgggcatgggctgcggccagtggatgtgggtttcatgaaggcattgcatgagaaggtcaacatcgtgcctctcatcgccaaagctgactgtcttgtccccagtgagatccggaagctgaaggagcggatccgggaggagattgacaagtttgggatccatgtataccagttccctgagtgtractcggacgaggatgaggacttcaagcagcaggaccgggaactgaaggagagcgcgcccttcgccgttataggcagcaacacggtggtggaggccaaggggcagcgggtccggggccgactgtacccctgggggatcgtggaggtggagaaccaggcgcattgcgacttcgtgaagctgcgcaacatgctcatccgcacgcatatgcacgacctcaaggacgtgacgtgcgacgtgcactacgagaactaccgcgcgcactgcatccagcagatgaccagcaaactgacccaggacagccgcatggagagccccatcccgatcctgccgctgcccaccccggacgccgagactgagaagcttatcaggatgaaggatgaggaactgaggcgcatgcaggagatgctgcagaggatgaagcagcagatgcaggaccagtgacgctcgccgcggacacaccgtccgtctccgggacgccctcgcacccctggacaccagaccggactgttcccgacccggagacgcggggccacagcccccagctgaccctaatttattctcagcaccaccccctcccaggtcattgtgtctgtttccgaggggcctggaccgtagcccccgcccagctggccctctctgaccttgggggatcaggagcgaagttgggcgggacttcagagatccgcctcccttgcccttcccccgcccccggacggtcacagcacccaaaccgcaggccctgctctggcaggcaggcaaagctaggcagaagaggattcccaggatcctgggtctgttccctgccccagtgctgcagaacggacttgggagcctgtcgaggcsggccgagtcttcccttatccccagacgcctagcgggcagggttgggctgaatcaaatgggagccctccagacataaggaggccagaggctgcaaggagcggggtcgtgaccgcttamaccccttctccacagtgagcctaggcctcccgatgttcccacccgcatgatcccttcccgccacacgatgctccgttttcttccgttgtgaatgccgcgtcctgtcctggtgacaggagaacaatgttggtgaacgtcgcagcgggtgtccgagtgctccgtgtgcccctgagagcgggtgggagcggaagcctgagcggcctgcggcctccggcgatagtgtgctatctgccgctgcagcgcgcgtccgcgcggcctctgggctatttctggccaggccgcagcactgtggtcggtgcgggcgtggcaggggcggggcggccttatcgctcggctctcccgcctacgcctcccgctgcagagtaagccgggctgccgtcttctcgccatgggctccggtgagtctggagtccggtcgggcccccggctgctccctaggccgacccgggttgagaggagctctggtcstttggctgcagctggragagacttgggtcagacttagaggggacttccagccggcgtgcggggtggtcagggtggagaggctggcgg

SEQ ID NO: 2986 - DNA, 2184 bp, Homo sapiens
atgagcacaggcctgcggtacaagagcaagctggcgaccccagaggacaagcaggacattgacaagcagtacgtgggcttcgccacactgcccaaccaggtgcaccgcaagtcggtgaagaaaggctttgacttcacactcatggtggctggtgagtcaggcctggggaagtccacactggtccacagcctcttcctgacagacttgtacaaggaccggaagctgctcagtgctgaggagcgcatcagccagacggtagagattctaaaacacacggtggacattgaggagaagggagtcaagctgaagctcaccatcgtggacacgccgggattcggggacgctgtcaacaacaccgagtgctggaagcccatcaccgactatgtggaccagcagtttgagcagtacttccgtgatgagagcggcctcaaccgaaagaacatccaagacaaccgagtgcactgctgcctatacttcatctcccccttcgggcatgggctgcggccagtggatgtgggtttcatgaaggcattgcatgagaaggtcaacatcgtgcctctcatcgccaaagctgactgtcttgtccccagtgagatccggaagctgaaggagcggatccgggaggagattgacaagtttgggatccatgtataccagttccctgagtgtractcggacgaggatgaggacttcaagcagcaggaccgggaactgaaggagagcgcgcccttcgccgttataggcagcaacacggtggtggaggccaaggggcagcgggtccggggccgactgtacccctgggggatcgtggaggtggagaaccaggcgcattgcgacttcgtgaagctgcgcaacatgctcatccgcacgcatatgcacgacctcaaggacgtgacgtgcgacgtgcactacgagaactaccgcgcgcactgcatccagcagatgaccagcaaactgacccaggacagccgcatggagagccccatcccgatcctgccgctgcccaccccggacgccgagactgagaagcttatcaggatgaaggatgaggaactgaggcgcatgcaggagatgctgcagaggatgaagcagcagatgcaggaccagtgacgctcgccgcggacacaccgtccgtctccgggacgccctcgcacccctggacaccagaccggactgttcccgacccggagacgcggggccacagcccccagctgaccctaatttattctcagcaccaccccctcccaggtcattgtgtctgtttccgaggggcctggaccgtagcccccgcccagctggccctctctgaccttgggggatcaggagcgaagttgggcgggacttcagagatccgcctcccttgcccttcccccgcccccggacggtcacagcacccaaaccgcaggccctgctctggcaggcaggcaaagctaggcagaagaggattcccaggatcctgggtctgttccctgccccagtgctgcagaacggacttgggagcctgtcgaggcsggccgagtcttcccttatccccagacgcctagcgggcagggttgggctgaatcaaatgggagccctccagacataaggaggccagaggctgcaaggagcggggtcgtgaccgcttamaccccttctccacagtgagcctaggcctcccgatgttcccacccgcatgatcccttcccgccacacgatgctccgttttcttccgttgtgaatgccgcgtcctgtcctggtgacaggagaacaatgttggtgaacgtcgcagcgggtgtccgagtgctccgtgtgcccctgagagcgggtgggagcggaagcctgagcggcctgcggcctccggcgatagtgtgctatctgccgctgcagcgcgcgtccgcgcggcctctgggctatttctggccaggccgcagcactgtggtcggtgcgggcgtggcaggggcggggcggccttatcgctcggctctcccgcctacgcctcccgctgcagagtaagccgggctgccgtcttctcgccatgggctccggtgagtctggagtccggtcgggcccccggctgctccctaggccgacccgggttgagaggagctctggtcstttggctgcagctggragagacttgggtcagacttagaggggacttccagccggcgtgcggggtggtcagggtggagaggctggcgg

SEQ ID NO: 2987 - DNA, 3337 bp, Homo sapiens
caccccgcagcccggcctcggcctccgccgcttgtygtcgcgccccgcccgcgagcccgccccgcacgtcccccgccggcggccaccatgagcacaggcctgcggtacaagagcaagctggcgaccccaggtgagcccagcgacattgacaagcagtacgtgggcttcgccacactgcccaaccaggtgcaccgcaagtcggtgaagaaaggctttgacttcacactcatggtggctggtgagtcaggcctggggaagtccacactggtccacagcctcttcctgacagacttgtacaaggaccggaagctgctcagtgctgaggagcgcatcagccagacggtagagattctaaaacacacggtggacattgaggagaagggagtcaagctgaagctcaccatcgtggacacgccgggattcggggacgctgtcaacaacaccgagtgctggaagcccatcaccgactatgtggaccagcagtttgagcagtacttccgtgatgagagcggcctcaaccgaaagaacatccaagacaaccgagtgcactgctgcctatacttcatctcccccttcgggcatgggctgcggccagtggatgtgggtttcatgaaggcattgcatgagaaggtcaacatcgtgcctctcatcgccaaagctgactgtcttgtccccagtgagatccggaagctgaaggagcggatccgggaggagattgacaagtttgggatccatgtataccagttccctgagtgtractcggacgaggatgaggacttcaagcagcaggaccgggaactgaaggagagcgcgcccttcgccgttataggcagcaacacggtggtggaggccaaggggcagcgggtccggggccgactgtacccctgggggatcgtggaggtggagaaccaggcgcattgcgacttcgtgaagctgcgcaacatgctcatccgcacgcatatgcacgacctcaaggacgtgacgtgcgacgtgcactacgagaactaccgcgcgcactgcatccagcagatgaccagcaaactgacccaggacagccgcatggagagccccatcccgatcctgccgctgcccaccccggacgccgagactgagaagcttatcaggatgaaggatgaggaactgaggcgcatgcaggagatgctgcagaggatgaagcagcagatgcaggaccagtgacgctcgccgcggacacaccgtccgtctccgggacgccctcgcacccctggacaccagaccggactgttcccgacccggagacgcggggccacagcccccagctgaccctaatttattctcagcaccaccccctcccaggtcattgtgtctgtttccgaggggcctggaccgtagcccccgcccagctggccctctctgaccttgggggatcaggagcgaagttgggcgggacttcagagatccgcctcccttgcccttcccccgcccccggacggtcacagcacccaaaccgcaggccctgctctggcaggcaggcaaagctaggcagaagaggattcccaggatcctgggtctgttccctgccccagtgctgcagaacggacttgggagccctcctttgcctgctcccgcgggtcacccagcgagtgctgagaccccattttctgtcgaggcsggccgagtcttcccttatccccagacgcctagcgggcagggttgggctgaatcaaatgggagccctccagacataaggaggccagaggctgcaaggagcggggtcgtgaccgcttamaccccttctccacagcccggcccgacctggagggcccccggggcactgggcggtgagccacctcctggcaactctcggtgccgtcccctgccctcgctcgaggcctcttctccccagcaccgctgtggtgtgccgggatcctgagcctaggcctcccgatgttcccacccgcatgatcccttcccgccacacgatgctccgttttcttccgttgtgaatgccgcgtcctgtcctggtgacaggagaacaatgttggtgaacgtcgcagcgggtgtccgagtgctccgtgtgcccctgagagcgggtgggagcggaagcctgagcggcctgcggcctccggcgatagtgtgctatctgccgctgcagcgcgcgtccgcgcggcctctgggctatttctggccaggccgcagcactgtggtcggtgcgggcgtggcaggggcggggcggccttatcgctcggctctcccgcctacgcctcccgctgcagagtaagccgggctgccgtcttctcgccatgggctccggtgagtctggagtccggtcgggcccccggctgctccctaggccgacccgggttgagaggagctctggtcstttggctgcagctggragagacttgggtcagacttagaggggacttccagccggcgtgcggggtggtcagggtggagaggctggcgggctaccgggacgccgggcatcaggggctggatggagccgggccggcagtctgggtactcagagatgtcgcccaggtgcccgccgaccgctcggcttactgcggcgcttcccttgcagggccgcgcggggcgctgagcttactgctcctgctgctggccccgccgagccgcccggccgcaggttgcccggcgccctgtagctgcgcggggacgctcgtggactgcgggcgcygcgggctgacttrggcctcgctgccgaccgccttccytgtcgacacaaccgagctggtgctgaccggcaacaacctgacggcgctgccgccggggctgctggacgcgctgcccgcgctgcgcaccgcacacctgggcgccaacccctggcgctgcgactgccgccttgtgcsgctgcgcgcctggctggccggccgccccgagcgtgcgccctrccgcgacctgcgttgcgtggcgcccccagcgctgcgcggccgcctgctgccctatctgsccgaggacgagctgcgcgccgcttgcgctcccggcccgctctgctrgggggcgctggcggcgcagcttgcgctgctgggccttgggctgctgcacgcgttgctgctggtgctgctgctgtgccgcctgcggaggctgcgggcccgggcccgcgctcgcgccgcagcccggctgtcgctgaccgacccgctggtggccgagcgagccggaaccgacgagtcctgaggagagaaccggtgcgtcctgaggagagaaccggcgctgggcaacacgggcctgcaaactcgacaggaccctgcccgaggggccctcgcgccaaccccaatctctcagacccaccccacctgcaggcccagaccacgtgggacagaactcctgcccaccc

SEQ ID NO: 2988 - DNA, 1856 bp, Homo sapiens
ttcgccgctgctgtagttccccggctggatgcggtgactggtgccagtgctcaggcgcccgctgcccttgacctcccgccccgcgagccctaactcagcgcaggaggaccggctgccgccgccgctctgatggtggtgtctggtagaaggttactcacagctctgctgcaggctcagaagtggccctttcaaccctccagagacatgagactagtgcagttctgggcaccccacctggtggggcctcacttgggcctggagacagggaatggtagagggattatcaacctcaatgcctttgaccccacactcccraagacaatgacgcagttcctagagcagggagaggccaccctctcagtggcaagaagagccttggctgcccagttgccagtcctaccatggtcggaggtaaccttcctggctccagtcacatggccagataaggtggtgtgtgtgggcatgaattatgtggaccactgcaaagaacagaacgtgcccgtgcccaaggagcccatcatcttcagcaagtttgccagctccatcgtggggccctatgatgaggtggtcctcccaccacagagccaggaggtagattgggaagtggagctggccgtggtcattggaaagaaaggcaagcacatcaaggccacagatgccatggcccacgtggccggcttcactgtggctcatgacgtgagtgctcgtgactggctaacaagacgcaatgggaaacagtggctgctgggaaaaaccttcgacaccttctgccctctgggccctgccttggtgaccaaggacagtgtagcagatccacacaacttaaagatctgctgtcgagtgaatggggaagtggtccagagcagcaacaccaaccagatggtattcaagacagaggacctgatagcctgggtgtcccagtttgttaccttttacccaggggatgtcatcctgactgggacccccccacctccacccaggtgtcggtgtattcaggaaacctcctgtctttctcaagaagggggatgaagtccagtgtgagattgaagaactaggtgtcatcatcaacaaggtggtgtgatggctcctgcacaggcccgacataggatgagggcatctgctcccactcagcctagcccagggaaaggcccagtgacaggtgtggacaggtgccagccctgcaagccgcctcttctcggtagaagggagaaggacagagctctcttcaataaattcgtcgggtcaaagcagcagcttggcttctgctgtttgtcttcgtttgggctttgtttcatgggacaagttagggcattttgtgggactggggaagaagagagcaaatacacacacatacaccaaaaagatgctgctgggctggggaaaagacaactcgtctcgtccccttgtttatcacatcaaagaagggaaaaagcaagagatggcaagggacaatcaagcctcaatgattatatttatagagcagctaagggtttgcagcctcctctccatcttctggctctaggacacagctgtgttctggggctgagaagtctcagcacaggctcctcctcacagttctagctacaaatgaactgccggatgaactgttctagtttttcctgattgtccaggctggcaaaagtaggggacaggtggagcctggggcctgcagggctcggcgtctgctgcagaacctgggccatggaagataagccgtgagtgcgctcaccacagggactgtgtacacatggcccaggggccaggcctgtcccccagaaacctgccttgagacctctggccccttagacctcaatgtttgcgtgcaaatgctgccgcaaagcagtcccaatacccca

SEQ ID NO: 2989 - DNA, 2136 bp, Homo sapiens
ttcgccgctgctgtagttccccggctggatgcggtgactggtgccagtgctcaggcgcccgctgcccttgacctcccgccccgcgagccctaactcagcgcaggaggaccggctgccgccgccgccgctctgatggtggtgtctggtagaaggttactcacagctctgctgcaggctcagaagtggccctttcaaccctccagagacatgagactagtgcagttctgggcaccccacctggtggggcctcacttgggcctggagacagggaatggtagagggattatcaacctcaatgcctttgaccccacactcccraagacaatgacgcagttcctagagcagggagaggccaccctctcagtggcaagaagagccttggctgcccagttgccagtcctaccatggtcggaggtaaccttcctggctccagtcacatggccagataaggtggtgtgtgtgggcatgaattatgtggaccactgcaaagaacagaacgtgcccgtgcccaaggagcccatcatcttcagcaagtttgccagctccatcgtggggccctatgatgaggtggtcctcccaccacagagccaggaggtagattgggaagtggagctggccgtggtcattggaaagaaaggcaagcacatcaaggtgaggtggaaagggtgggctcccaggccagagtgcagcagaggccccagctcctgcctctcctagttctgacctcactcaccgacacatggtgccagctgtccctgacactaggaagcagtcagcctccttgctccctgacactgcctttcccttcacccacctttggctggctctggctactaacatgggataacagctttgagatcccttgccacaggtgttggtgtcacccgtgatctaacctcctgtatggccaaatcccctgcccccataggccacagatgccatggcccacgtggccggcttcactgtggctcatgacgtgagtgctcgtgactggctaacaagacgcaatgggaaacagtggctgctgggaaaaaccttcgacaccttctgccctctgggccctgccttggtgaccaaggacagtgtagcagatccacacaacttaaagatctgctgtcgagtgaatggggaagtggtccagagcagcaacaccaaccagatggtattcaagacagaggacctgatagcctgggtgtcccagtttgttaccttttacccaggggatgtcatcctgactgggacccccccacctccacccaggtgtcggtgtattcaggaaacctcctgtctttctcaagaagggggatgaagtccagtgtgagattgaagaactaggtgtcatcatcaacaaggtggtgtgatggctcctgcacaggcccgacataggatgagggcatctgctcccactcagcctagcccagggaaaggcccagtgacaggtgtggacaggtgccagccctgcaagccgcctcttctcggtagaagggagaaggacagagctctcttcaataaattcgtcgggtcaaagcagcagcttggcttctgctgtttgtcttcgtttgggctttgtttcatgggacaagttagggcattttgtgggactggggaagaagagagcaaatacacacacatacaccaaaaagatgctgctgggctggggaaaagacaactcgtctcgtccccttgtttatcacatcaaagaagggaaaaagcaagagatggcaagggacaatcaagcctcaatgattatatttatagagcagctaagggtttgcagcctcctctccatcttctggctctaggacacagctgtgttctggggctgagaagtctcagcacaggctcctcctcacagttctagctacaaatgaactgccggatgaactgttctagtttttcctgattgtccaggctggcaaaagtaggggacaggtggagcctggggcctgcagggctcggcgtctgctgcagaacctgggccatggaagataagccgtgagtgcgctcaccacagggactgtgtacacatggcccaggggccaggcctgtcccccagaaacctgccttgagacctctggccccttagacctcaatgtttgcgtgcaaatgctgccgcaaagcagtcccaatacccca

SEQ ID NO: 2990 - DNA, 2046 bp, Homo sapiens
acgtcacaggacgcgcccgcttctcgctggagtgcgcaccgagcggcagtgacttcgccgctgctgtagttccccggctggatgcggtgactggtgccagtgctcaggcgcccgctgcccttgacctcccgccccgcgagccctaactcagcgcaggaggaccggctgccgccgccgccgccgccagcagagccaagcacagtgggaactttcagaaagcactggttgaaggaacactggaatccctgggacttactgcgtagcatgtagtagttgctcctgtagaaaagtttcaccttatgaagaatagcaggctctgatggtggtgtctggtagaaggttactcacagctctgctgcaggctcagaagtggccctttcaaccctccagagacatgagactagtgcagttctgggcaccccacctggtggggcctcacttgggcctggagacagggaatggtagagggattatcaacctcaatgcctttgaccccacactcccraagacaatgacgcagttcctagagcagggagaggccaccctctcagtggcaagaagagccttggctgcccagttgccagtcctaccatggtcggaggtaaccttcctggctccagtcacatggccagataaggtggtgtgtgtgggcatgaattatgtggaccactgcaaagaacagaacgtgcccgtgcccaaggagcccatcatcttcagcaagtttgccagctccatcgtggggccctatgatgaggtggtcctcccaccacagagccaggaggtagattgggaagtggagctggccgtggtcattggaaagaaaggcaagcacatcaaggccacagatgccatggcccacgtggccggcttcactgtggctcatgacgtgagtgctcgtgactggctaacaagacgcaatgggaaacagtggctgctgggaaaaaccttcgacaccttctgccctctgggccctgccttggtgaccaaggacagtgtagcagatccacacaacttaaagatctgctgtcgagtgaatggggaagtggtccagagcagcaacaccaaccagatggtattcaagacagaggacctgatagcctgggtgtcccagtttgttaccttttacccaggggatgtcatcctgactgggacccccccacctccacccaggtgtcggtgtattcaggaaacctcctgtctttctcaagaagggggatgaagtccagtgtgagattgaagaactaggtgtcatcatcaacaaggtggtgtgatggctcctgcacaggcccgacataggatgagggcatctgctcccactcagcctagcccagggaaaggcccagtgacaggtgtggacaggtgccagccctgcaagccgcctcttctcggtagaagggagaaggacagagctctcttcaataaattcgtcgggtcaaagcagcagcttggcttctgctgtttgtcttcgtttgggctttgtttcatgggacaagttagggcattttgtgggactggggaagaagagagcaaatacacacacatacaccaaaaagatgctgctgggctggggaaaagacaactcgtctcgtccccttgtttatcacatcaaagaagggaaaaagcaagagatggcaagggacaatcaagcctcaatgattatatttatagagcagctaagggtttgcagcctcctctccatcttctggctctaggacacagctgtgttctggggctgagaagtctcagcacaggctcctcctcacagttctagctacaaatgaactgccggatgaactgttctagtttttcctgattgtccaggctggcaaaagtaggggacaggtggagcctggggcctgcagggctcggcgtctgctgcagaacctgggccatggaagataagccgtgagtgcgctcaccacagggactgtgtacacatggcccaggggccaggcctgtcccccagaaacctgccttgagacctctggccccttagacctcaatgtttgcgtgcaaatgctgccgcaaagcagtcccaatacccca

SEQ ID NO: 2991 - DNA, 2902 bp, Homo sapiens
gctggctcttccatcagctgccttccccgggcgtctccccgcaacctcctcaacttccctagtcagtgacgcggcgccggccagaaatccgaccggaccgggctcgggggagcgtgagttgcagttaaaagaagatggatgcacagtgttcagccaaggtcaatgcaaggaagaggagaaaagaggcgcccggacccaacggggcaacagaagaagatggggttccttccaaagtgcagcgctgtgcagtgggcttacggcaaccagctcctttttctgatgaaattgaagttgactttagtaagccctatgtcagggtaactatggaagaagccagcagaggaactccttgtgagcgacctgtgagagtttatgccgatggaatatttgacttatttcactctggtcacgcccgagctctgatgcaagcgaagaaccttttccctaatacgtacctcattgtgggagtttgcagtgatgagctcacacacaacttcaaaggcttcacggtgatgaacgagaatgagcgctatgacgcagtccagcactgccgctacgtggatgaggtggtgaggaatgcgccctggacgctgacacccgagttcctggccgaacaccggattgattttgtagcccatgatgatattccttattcatctgctggcagtgatgatgtttataagcacatcaaggaggcaggcatgtttgctccaacacagaggacagaaggtatctccacatcagacatcatcacccgaattgtgcgggattatgatgtgtatgcgaggcggaacctgcagaggggctacacagcaaaggagctcaatgtcagctttatcaacgagaagaaataccacttgcaggagagggttgacaaagtaaagaagaaagtgaaagatgtggaggaaaagtcaaaagaatttgttcagaaggtggaggaaaaaagcattgacctcattcagaagtgggaggagaagtcccgagaattcattggaagttttctggaaatgtttggtccggaaggagcactgaaacatatgctgaaagaggggaagggccggatgctgcaggccatcagcccgaagcagagccccagcagcagccctactcgcgagsgctccccctccccstctttccgatggcccttctccggcaagacttccccaccttgctccccagcaaatctctccaggcacaaggctgcagcctatgatatcagtgaggatgaagaagactaatgtttcctccctcctttcctgtcytccctttctgtcccattaccttcagragctctctgttgaattccaaattgtgaccccaacactaaacctaaggacagctacaaaggaaagacaactggggaaagaagacctaggactgggggaacccaaacagcctgtcctgcaagtgacatcactcacccacacgaaggagggggactgcaccttagaagcctgctctgcatccatttaccccccyccaagggctttgtttcactgtttatgttcacgtgatctcaacagggaaattgtcattttcattaattttttaaaaaattcgtctttcaaatgtagaactaattttttgcccctgaggagtgggcagaagaaggaggtagtgtaatacgcagaggccttttcttcccggtatactatagcatttgccttccgttctgaagctawgtggcttgccaagtccttcacgaaatgagccacgctgatgggtaatttgtggagaaatatcttaattttgatttccttaaggaaaagcgaaaagcagagttacagtcacaaatcccctgaacgtactgctgtcaccagtgtcattgtggctgcgggaaggagatctgaacctaacttttcttactccctgaggagtttcttgttggacccaatggggtccatgaagacactratggggatggaagcagacccatggcatcaactgcagtgtttctgctgtgttcatcttctcagaaaactctgtgacccagttctttgggagcttttgtcagtctctttcgtgccatctaccttcgaaggaaggaacacttttagagttacaatgatgaggagaggagcgggacaatactcaatcctataccaagtcrattgagattagtttcctactgggagtaagtgcctggccctgctactcctatttgaatgctattaatattacctagccttttacaaaggatactttgtaaatgtctgctgttggaacttgatgttaatccattttggtcatagccatattagagagatttgcacagaatgtaaaggcaaaagcataggaaacaccttcctttctaaagcaacagccttatcaccttgacctctgtccctcttcagaacattcttccctggaaccagtgctccacatctttcttttcctctgagagctgcagctggcagggacctccctctgctgctcctccagcaagccacagagcataccctcacgtgacaagagtgtggtaggttttctccccacttytcacacacgcctggtggttgtggttccatctgccttgttggcttgcccggggggattcaacacttgactttcaaatcaaagaatgctaatgcttagcacttgctgttgagcatgctctaacttttaaagccctggcctcctgtctccttagctgcttagctacgcggsctagcagatcatcacccatcagtaatcctgtggctagatccaggggaaaattgcttatgtccaggccccacccctgtcactcataaataccccttgkgggggtggaattttagtgttttcagctaagaaaaccacattttctctttccttgcctctgctaggactgtgagcatctcatagtccactccctaaacactttctggtaacacctagttttccrcctgagggtcagagg

SEQ ID NO: 2992 - DNA, 1277 bp, Homo sapiens
gggctctccggggagcggaagcgccttcaatgcaggcctgtgggcaggggcgtgggggcgcgcacacacacacgcctgggtgacctctacgtatatacagagcctccctggccctcctggaaagagtcctggaaagacaaccttcaggtccagccctggagctggaggagtggagccccactctgaagacgcagcctttctccaggttctgtctctcccattctgattcttgacaccagatgcagaaatgggatttgaccgatacaaaatggtggtgcaagtagtgattggagaacaaagaggtgaaggagtattttaaaagaagatggatgcacagtgttcagccaaggtcaatgcaaggaagaggagaaaagaggcgcccggacccaacggggcaacagaagaagatggggttccttccaaagtgcagcgctgtgcagtgggcttacggcaaccagctcctttttctgatgaaattgaagttgactttagtaagccctatgtcagggtaactatggaagaagccagcagaggaactccttgtgagcgacctgtgagagtttatgccgatggaatatttgacttatttcactctggtcacgcccgagctctgatgcaagcgaagaaccttttccctaatacgtacctcattgtgggagtttgcagtgatgagctcacacacaacttcaaaggcttcacggtgatgaacgagaatgagcgctatgacgcagtccagcactgccgctacgtggatgaggtggtgaggaatgcgccctggacgctgacacccgagttcctggccgaacaccggattgattttgtagcccatgatgatattccttattcatctgctggcagtgatgatgtttataagcacatcaaggaggcaggcatgtttgctccaacacagaggacagaaggtatctccacatcagacatcatcacccgaattgtgcgggattatgatgtgtatgcgaggcggaacctgcagaggggctacacagcaaaggagctcaatgtcagctttatcaacgtgagttccagccttaccccagagttccctgactctgtaggagacatatcacctcccactccatctcagctgaactggctttgcagttggctttgatgatcactcccaaaagttcagtgaatgaattaccactatgttaactgttcacaaaaagaatgaaacagacagtttctgcygttacggtctggtaccaacacattcgtataaagccatacagccaactaaataaatgagtaatttatat

SEQ ID NO: 2993 - DNA, 3093 bp, Homo sapiens
gggctctccggggagcggaagcgccttcaatgcaggcctgtgggcaggggcgtgggggcgcgcacacacacacgcctgggtgacctctacgtatatacagagcctccctggccctcctggaaagagtcctggaaagacaaccttcaggtccagccctggagctggaggagtggagccccactctgaagacgcagcctttctccaggttctgtctctcccattctgattcttgacaccagatgcagaaatgggatttgaccgatacaaaatggtggtgcaagtagtgattggagaacaaagaggtgaaggagtattttaaaagaagatggatgcacagtgttcagccaaggtcaatgcaaggaagaggagaaaagaggcgcccggacccaacggggcaacagaagaagatggggttccttccaaagtgcagcgctgtgcagtgggcttacggcaaccagctcctttttctgatgaaattgaagttgactttagtaagccctatgtcagggtaactatggaagaagccagcagaggaactccttgtgagcgacctgtgagagtttatgccgatggaatatttgacttatttcactctggtcacgcccgagctctgatgcaagcgaagaaccttttccctaatacgtacctcattgtgggagtttgcagtgatgagctcacacacaacttcaaaggcttcacggtgatgaacgagaatgagcgctatgacgcagtccagcactgccgctacgtggatgaggtggtgaggaatgcgccctggacgctgacacccgagttcctggccgaacaccggattgattttgtagcccatgatgatattccttattcatctgctggcagtgatgatgtttataagcacatcaaggaggcaggcatgtttgctccaacacagaggacagaaggtatctccacatcagacatcatcacccgaattgtgcgggattatgatgtgtatgcgaggcggaacctgcagaggggctacacagcaaaggagctcaatgtcagctttatcaacgagaagaaataccacttgcaggagagggttgacaaagtaaagaagaaagtgaaagatgtggaggaaaagtcaaaagaatttgttcagaaggtggaggaaaaaagcattgacctcattcagaagtgggaggagaagtcccgagaattcattggaagttttctggaaatgtttggtccggaaggagcactgaaacatatgctgaaagaggggaagggccggatgctgcaggccatcagcccgaagcagagccccagcagcagccctactcgcgagsgctccccctccccstctttccgatggcccttctccggcaagacttccccaccttgctccccagcaaatctctccaggcacaaggctgcagcctatgatatcagtgaggatgaagaagactaatgtttcctccctcctttcctgtcytccctttctgtcccattaccttcagragctctctgttgaattccaaattgtgaccccaacactaaacctaaggacagctacaaaggaaagacaactggggaaagaagacctaggactgggggaacccaaacagcctgtcctgcaagtgacatcactcacccacacgaaggagggggactgcaccttagaagcctgctctgcatccatttaccccccyccaagggctttgtttcactgtttatgttcacgtgatctcaacagggaaattgtcattttcattaattttttaaaaaattcgtctttcaaatgtagaactaattttttgcccctgaggagtgggcagaagaaggaggtagtgtaatacgcagaggccttttcttcccggtatactatagcatttgccttccgttctgaagctawgtggcttgccaagtccttcacgaaatgagccacgctgatgggtaatttgtggagaaatatcttaattttgatttccttaaggaaaagcgaaaagcagagttacagtcacaaatcccctgaacgtactgctgtcaccagtgtcattgtggctgcgggaaggagatctgaacctaacttttcttactccctgaggagtttcttgttggacccaatggggtccatgaagacactratggggatggaagcagacccatggcatcaactgcagtgtttctgctgtgttcatcttctcagaaaactctgtgacccagttctttgggagcttttgtcagtctctttcgtgccatctaccttcgaaggaaggaacacttttagagttacaatgatgaggagaggagcgggacaatactcaatcctataccaagtcrattgagattagtttcctactgggagtaagtgcctggccctgctactcctatttgaatgctattaatattacctagccttttacaaaggatactttgtaaatgtctgctgttggaacttgatgttaatccattttggtcatagccatattagagagatttgcacagaatgtaaaggcaaaagcataggaaacaccttcctttctaaagcaacagccttatcaccttgacctctgtccctcttcagaacattcttccctggaaccagtgctccacatctttcttttcctctgagagctgcagctggcagggacctccctctgctgctcctccagcaagccacagagcataccctcacgtgacaagagtgtggtaggttttctccccacttytcacacacgcctggtggttgtggttccatctgccttgttggcttgcccggggggattcaacacttgactttcaaatcaaagaatgctaatgcttagcacttgctgttgagcatgctctaacttttaaagccctggcctcctgtctccttagctgcttagctacgcggsctagcagatcatcacccatcagtaatcctgtggctagatccaggggaaaattgcttatgtccaggccccacccctgtcactcataaataccccttgkgggggtggaattttagtgttttcagctaagaaaaccacattttctctttccttgcctctgctaggactgtgagcatctcatagtccactccctaaacactttctggtaacacctagttttccrcctgagggtcagagg

SEQ ID NO: 2994 - DNA, 1512 bp, Homo sapiens
gggctctccggggagcggaagcgccttcaatgcaggcctgtgggcaggggcgtgggggcgcgcacacacacacgcctgggtgacctctacgtatatacagagcctccctggccctcctggaaagagtcctggaaagacaaccttcaggtccagccctggagctggaggagtggagccccactctgaagacgcagcctttctccaggttctgtctctcccattctgattcttgacaccagatgcagaaatgggatttgaccgatacaaaatggtggtgcaagtagtgattggagaacaaagaggtgaaggagtattttaaaagaagatggatgcacagtgttcagccaaggtcaatgcaaggaagaggagaaaagaggcgcccggacccaacggggcaacagaagaagatggggttccttccaaagtgcagcgctgtgcagtgggcttacggcaaccagctcctttttctgatgaaattgaagttgactttagtaagccctatgtcagggtaactatggaagaagccagcagaggaactccttgtgagcgacctgtgagagtttatgccgatggaatatttgacttatttcactctggtcacgcccgagctctgatgcaagcgaagaaccttttccctaatacgtacctcattgtgggagtttgcagtgatgagctcacacacaacttcaaaggcttcacggtgatgaacgagaatgagcgctatgacgcagtccagcactgccgctacgtggatgaggtggtgaggaatgcgccctggacgctgacacccgagttcctggccgaacaccggattgattttgtagcccatgatgatattccttattcatctgctggcagtgatgatgtttataagcacatcaaggaggcaggcatgtttgctccaacacagaggacagaaggtatctccacatcagacatcatcacccgaattgtgcgggattatgatgtgtatgcgaggcggaacctgcagaggggctacacagcaaaggagctcaatgtcagctttatcaacgagaagaaataccacttgcaggagagggttgacaaagtaaagaagaaagtgaaagatgtggaggaaaagtcaaaagaatttgttcagaaggtggaggaaaaaagcattgacctcattcagaagtgggaggagaagtcccgagaattcattggaagttttctggaaatgtttggtccggaaggagcactgaaacatatgctgaaagaggggaagggccggatgctgcaggccatcagcccgaagcagagccccagcagcagccctactcgcgagsgctccccctccccstctttccgatggcccttctccggcaagacttccccaccttgctccccagcaaatctctccaggcacaaggctgcagcctatgatatcaaatagactgccatcggataaagagtggtccctagcttctatttttccaagyaaataagtagaacatgttcttgggattataccattaaatgttaattttcttg

SEQ ID NO: 2995 - DNA, 1394 bp, Homo sapiens
cctatctttgcgtctctgtttgagaggacaaactgtggggctgggaccgcgaggtgactgtgactgaggaagagtggtaagtgacagcgagggcagtgggagccaggggctgggaggctactgtgaccgagggccagtgacagcgaggggactgtgacccaggagcagtgaatgcgaaacacggtgacctcggagagcgcgaggccggggctgcgacggcacttggaccgaggaagtatgaggcagtgactgcaagggactatgatcaaggggcaaggactccaaggagactctgatcgattggtagtgactgtgggggatccggacctaagggaacacgagcagcggccgcgaggggactccgacccagagcagtgacttcgaggggctgacttggagaagaggatggcatccgtgatgggcgatggcgctttaaaagaagatggatgcacagtgttcagccaaggtcaatgcaaggaagaggagaaaagaggcgcccggacccaacggggcaacagaagaagatggggttccttccaaagtgcagcgctgtgcagtgggcttacggcaaccagctcctttttctgatgaaattgaagttgactttagtaagccctatgtcagggtaactatggaagaagccagcagaggaactccttgtgagcgacctgtgagagtttatgccgatggaatatttgacttatttcactctggtcacgcccgagctctgatgcaagcgaagaaccttttccctaatacgtacctcattgtgggagtttgcagtgatgagctcacacacaacttcaaaggcttcacggtgatgaacgagaatgagcgctatgacgcagtccagcactgccgctacgtggatgaggtggtgaggaatgcgccctggacgctgacacccgagttcctggccgaacaccggattgattttgtagcccatgatgatattccttattcatctgctggcagtgatgatgtttataagcacatcaaggaggcaggcatgtttgctccaacacagaggacagaaggtatctccacatcagacatcatcacccgaattgtgcgggattatgatgtgtatgcgaggcggaacctgcagaggggctacacagcaaaggagctcaatgtcagctttatcaacgtgagttccagccttaccccagagttccctgactctgtaggagacatatcacctcccactccatctcagctgaactggctttgcagttggctttgatgatcactcccaaaagttcagtgaatgaattaccactatgttaactgttcacaaaaagaatgaaacagacagtttctgcygttacggtctggtaccaacacattcgtataaagccatacagccaactaaataaatgagtaatttatat

SEQ ID NO: 2996 - DNA, 1141 bp, Homo sapiens
ctccggggagcggaagcgccttcaatgcaggcctgtgggcaggggcgtgggggcgcgcacacacacacgcctgggtgacctctacgtatatacagagcctccctggccctcctggaaagagtcctggaaagacaaccttcaggtccagccctggagctggaggagtggagccccactctgaagacgcagcctttctccaggttctgtctctcccattctgattcttgacaccagatgcaggatggtgtcctctccctgcacgcmggcaagctcacggacttgctcccgtatcctgggactgagccttgggactgcagccctgtttgctgctggggccaacgtggcactcctccttcctaactgggatgtcacctacctgttgaggggcctccttggcaggcatgccatgctgggaactgggctctggggaggaggcctcatggtactcactgcagctatcctcatctccttgatgggctggagatacggctgcttcagtaagagtgggctctgtcgaagcgtgcttactgctctgttgtcaggtggcctggctttacttggagccctgatttgctttgtcacttctggagttgctctgaaagatggtcctttttgcatgtttgatgtttcatccttcaatcagacacaagcttggaaatatggttacccattcaaagacctgcatagtaggaattayctgtatgaccgttcgctctggaactccrtctgcctggagccctctgcagctgttgtctggcacgtgtccctcttctccgcccttctgtgcatcagcctgctccagcttctcctggtggtcgttcatgtcatcaacagcctcctgggccttttctgcagcctctgcgagaagtgacaggcagaaccttcacttgcaagcatgggtgttttcatcatcggctgtcttgaatcctttctacaaggagtgggtacgaattataaacaaacttcccctttaggtatccctggagtaataatgacaacaaaattcactgcaggtcggtggaatgatagaatgcattttaaatcacattgtaaacttccaggtgatccatggataggataaataactaagttattataattgtttaggaatttatagtccataaaatatcctccagccagg

SEQ ID NO: 2997 - DNA, 1381 bp, Homo sapiens
cctatctttgcgtctctgtttgagaggacaaactgtggggctgggaccgcgaggtgactgtgactgaggaagagtggtaagtgacagcgagggcagtgggagccaggggctgggaggctactgtgaccgagggccagtgacagcgaggggactgtgacccaggagcagtgaatgcgaaacacggtgacctcggagagcgcgaggccggggctgcgacggcacttggaccgaggaagtatgaggcagtgactgcaagggactatgatcaaggggcaaggactccaaggagactctgatcgattggtagtgactgtgggggatccggacctaagggaacacgagcagcggccgcgaggggactccgacccagagcagtgacttcgaggggctgacttggagaagaggatggcatccgtgatgggcgatggcgctttaaaagaagatggatgcacagtgttcagccaaggtcaatgcaaggaagaggagaaaagaggcgcccggacccaacggggcaacagaagaagatggggttccttccaaagtgcagcgctgtgcagtgggcttacggcaaccagctcctttttctgatgaaattgaagttgactttagtaagccctatgtcagggtaactatggaagaagccagcagaggaactccttgtgagcgacctgtgagagtttatgccgatggaatatttgacttatttcactctggtcacgcccgagctctgatgcaagcgaagaaccttttccctaatacgtacctcattgtgggagtttgcagtgatgagctcacacacaacttcaaaggcttcacggtgatgaacgagaatgagcgctatgacgcagtccagcactgccgctacgtggatgaggtggtgaggaatgcgccctggacgctgacacccgagttcctggccgaacaccggattgattttgtagcccatgatgatattccttattcatctgctggcagtgatgatgtttataagcacatcaaggaggcaggcatgtttgctccaacacagaggacagaaggtatctccacatcagacatcatcacccgaattgtgcgggattatgatgtgtatgcgaggcggaacctgcagaggggctacacagcaaaggagctcaatgtcagctttatcaacgagaagaaataccacttgcaggagagggttgacaaagtaaagaagaaagtgaaagatgtggaggaaaagtcaaaagaatttgttcagaaggtggaggaaaaaagcattgacctcattcagaatcttcctcaagtggggttcagtctgtaattttcctgtctgttcttagtttgttytgagttaytttggattttgttctttagccaaataaaggcartgtggttttacctg

SEQ ID NO: 2998 - DNA, 1940 bp, Homo sapiens
ttagcagctgctgcatttccccggctggctgcggtcactggtggcagtgctcaggcgcccgcygcccttgaccttcsgccccgcgagccagcagagccaagcacagtgggaactttcagaaagcactggttgaaggaacgctggaatccctgggacttactgcgtagcatgtagtagttgctcctctagaaaagtttcaccttatgaagtatagcaggctctgatgctggtgtctggtagaagaaggttactcacagttctgctgcaggctcagaagtggccctttcaaccctccagagacatgagactagtgcagttccgggcaccccacctggtggggcctcacttgggcctggagacagggaatggtggaggggttatcaacctcaatgcctttgaccccacactcccgaagacgatgacgcagttcctagagcagggagaggccaccctctcagtggcaagaagagccctggctgcccagttgccagtcctaccacggtcggaggtaaccttcctggctccagtcacacgaccagataaggtggtgtgtgtgggcatgaattatgtggaccactgcaaagaacagaacgtgcccgtgcccaaggagcccatcatcttcagcaagtttgccagctccatcgtggggccctatgatgaggtggtcctcccaccacagagccaggaggtagattgggaagtggagctggccgtggtcattggaaagaaaggcaagcacatcaaggccacagatgctatggcccacgtggccggcttcactgtggctcatgacgtgagtgctcgtgactggcwaayragacgyaatgggaaacartggctgctgggaaaaaccttcgacaccttctgccctctgggccctgccttggtgaccaaggacagtgtagcagatccacacaacttaaagatctgctgccgagtgaatggggaagtggtccagagcggcaacaccaaccagatggtattcaagacagaggacctgatagcctgggtctcccagtttgttaccttttacccaggggatgtcatcctaactgggacccccccaggtgtcggtgtattcaggaaacctcctgtctttctcaagaagggggatgaagtccagtgtgagattgaagaactaggtgtcatcatcaacaaggtggtgtgatggctcctgcacaggccctgcacataggatgagggcatctgctcccactcagcctagcccagggaaaggcccagtgacaggtgtggacaggtgccagccctgcaagccgcctcttctcggtagaagggagaaggacagagctctcttcaataaattcgtcaggtcaaagcagcagctttgcttctgctgtttgtcttcttttgggctttgtttcatgggacaagttggggcattttgtgggactggggaagaagagagcaaatacacacacatatgccaaaaagatgctgctgggctggggaaaagacaattcgtgtcgtccccttgtttatcacatcaaagaagggaaaaagcaagagatggcaagggacaatcaagcctcaatgattatatttatagctaagggtttgcagcctcctctccatcttctggctctaggacacagctgtgttctggggctcagaagtctcagcacaggctccttctcacagttctagctacaagtgaactgccggatgaactgttctagtttttcctgattgtccaggctggcaaaagtaggggacaggtggagcctggggcctgcagggctcggcgtctgctgcagaacctgggccatggaagatgggccgtgagtgcactcaccacagggactgtgtccacatggcccaggggccaggcctgtcccccagaaacctgccttgagacctctgaccccttaggcctcagtgtttgagtgcaaatgctgcctcaaagcagccccaatacccca

SEQ ID NO: 2999 - DNA, 2173 bp, Homo sapiens
tcgcgcccgcttttctctcgggtgatccggccgagtggccctgggttagcagctgctgcatttccccggctggctgcggtcactggtggcagtgctcaggcgcccgcygcccttgaccttcsgccccgcgagctctaaccctacagcgcaggaagatcggccgccgcggccaggctctgatgctggtgtctggtagaagaaggttactcacagttctgctgcaggctcagaagtggccctttcaaccctccagagacatgagactagtgcagttccgggcaccccacctggtggggcctcacttgggcctggagacagggaatggtggaggggttatcaacctcaatgcctttgaccccacactcccgaagacgatgacgcagttcctagagcagggagaggccaccctctcagtggcaagaagagccctggctgcccagttgccagtcctaccacggtcggaggtaaccttcctggctccagtcacacgaccagataaggtggtgtgtgtgggcatgaattatgtggaccactgcaaagaacagaacgtgcccgtgcccaaggagcccatcatcttcagcaagtttgccagctccatcgtggggccctatgatgaggtggtcctcccaccacagagccaggaggtagattgggaagtggagctggccgtggtcattggaaagaaaggcaagcacatcaaggtgaggkggaaagggtgggctcccagkccagagtgcagcagaggccccagctcctgcctctcctagttctgaccycactcaccaacacacggtgccagctgtccctgacactaggaagcagtcagcctccttgctccctgacactgcctttcccttcacccacctttggctggctctggctactaacatgggataacagcttwgagatcccttgccayaggtgttggtgtcacccrtgatctaacctcctgtatggccaaatcccctgcccccataggccacagatgctatggcccacgtggccggcttcactgtggctcatgacgtgagtgctcgtgactggcwaayragacgyaatgggaaacartggctgctgggaaaaaccttcgacaccttctgccctctgggccctgccttggtgaccaaggacagtgtagcagatccacacaacttaaagatctgctgccgagtgaatggggaagtggtccagagcggcaacaccaaccagatggtattcaagacagaggacctgatagcctgggtctcccagtttgttaccttttacccaggggatgtcatcctaactgggacccccccaggtgtcggtgtattcaggaaacctcctgtctttctcaagaagggggatgaagtccagtgtgagattgaagaactaggtgtcatcatcaacaaggtggtgtgatggctcctgcacaggccctgcacataggatgagggcatctgctcccactcagcctagcccagggaaaggcccagtgacaggtgtggacaggtgccagccctgcaagccgcctcttctcggtagaagggagaaggacagagctctcttcaataaattcgtcaggtcaaagcagcagctttgcttctgctgtttgtcttcttttgggctttgtttcatgggacaagttggggcattttgtgggactggggaagaagagagcaaatacacacacatatgccaaaaagatgctgctgggctggggaaaagacaattcgtgtcgtccccttgtttatcacatcaaagaagggaaaaagcaagagatggcaagggacaatcaagcctcaatgattatatttatagctaagggtttgcagcctcctctccatcttctggctctaggacacagctgtgttctggggctcagaagtctcagcacaggctccttctcacagttctagctacaagtgaactgccggatgaactgttctagtttttcctgattgtccaggctggcaaaagtaggggacaggtggagcctggggcctgcagggctcggcgtctgctgcagaacctgggccatggaagatgggccgtgagtgcactcaccacagggactgtgtccacatggcccaggggccaggcctgtcccccagaaacctgccttgagacctctgaccccttaggcctcagtgtttgagtgcaaatgctgcctcaaagcagccccaatacccca

SEQ ID NO: 3000 - DNA, 2028 bp, Homo sapiens
tcgcgcccgcttttctctcgggtgatccggccgagtggccctgggttagcagctgctgcatttccccggctggctgcggtcactggtggcagtgctcaggcgcccgcygcccttgaccttcsgccccgcgagctctaaccctacagcgcaggaagatcggccgccgcggccagctacagcagagccaagcacagtgggaactttcagaaagcactggttgaaggaacgctggaatccctgggacttactgcgtagcatgtagtagttgctcctctagaaaagtttcaccttatgaagtatagcaggctctgatgctggtgtctggtagaagaaggttactcacagttctgctgcaggctcagaagtggccctttcaaccctccagagacatgagactagtgcagttccgggcaccccacctggtggggcctcacttgggcctggagacagggaatggtggaggggttatcaacctcaatgcctttgaccccacactcccgaagacgatgacgcagttcctagagcagggagaggccaccctctcagtggcaagaagagccctggctgcccagttgccagtcctaccacggtcggaggtaaccttcctggctccagtcacacgaccagataaggtggtgtgtgtgggcatgaattatgtggaccactgcaaagaacagaacgtgcccgtgcccaaggagcccatcatcttcagcaagtttgccagctccatcgtggggccctatgatgaggtggtcctcccaccacagagccaggaggtagattgggaagtggagctggccgtggtcattggaaagaaaggcaagcacatcaaggccacagatgctatggcccacgtggccggcttcactgtggctcatgacgtgagtgctcgtgactggcwaayragacgyaatgggaaacartggctgctgggaaaaaccttcgacaccttctgccctctgggccctgccttggtgaccaaggacagtgtagcagatccacacaacttaaagatctgctgccgagtgaatggggaagtggtccagagcggcaacaccaaccagatggtattcaagacagaggacctgatagcctgggtctcccagtttgttaccttttacccaggggatgtcatcctaactgggacccccccaggtgtcggtgtattcaggaaacctcctgtctttctcaagaagggggatgaagtccagtgtgagattgaagaactaggtgtcatcatcaacaaggtggtgtgatggctcctgcacaggccctgcacataggatgagggcatctgctcccactcagcctagcccagggaaaggcccagtgacaggtgtggacaggtgccagccctgcaagccgcctcttctcggtagaagggagaaggacagagctctcttcaataaattcgtcaggtcaaagcagcagctttgcttctgctgtttgtcttcttttgggctttgtttcatgggacaagttggggcattttgtgggactggggaagaagagagcaaatacacacacatatgccaaaaagatgctgctgggctggggaaaagacaattcgtgtcgtccccttgtttatcacatcaaagaagggaaaaagcaagagatggcaagggacaatcaagcctcaatgattatatttatagctaagggtttgcagcctcctctccatcttctggctctaggacacagctgtgttctggggctcagaagtctcagcacaggctccttctcacagttctagctacaagtgaactgccggatgaactgttctagtttttcctgattgtccaggctggcaaaagtaggggacaggtggagcctggggcctgcagggctcggcgtctgctgcagaacctgggccatggaagatgggccgtgagtgcactcaccacagggactgtgtccacatggcccaggggccaggcctgtcccccagaaacctgccttgagacctctgaccccttaggcctcagtgtttgagtgcaaatgctgcctcaaagcagccccaatacccca

SEQ ID NO: 3001 - DNA, 2022 bp, Homo sapiens
tcgcgcccgcttttctctcgggtgatccggccgagtggccctgggttagcagctgctgcatttccccggctggctgcggtcactggtggcagtgctcaggcgcccgcygcccttgaccttcsgccccgcgagctctaaccctacagcgcaggaagatcggccgccgcggccagcagagccaagcacagtgggaactttcagaaagcactggttgaaggaacgctggaatccctgggacttactgcgtagcatgtagtagttgctcctctagaaaagtttcaccttatgaagtatagcaggctctgatgctggtgtctggtagaagaaggttactcacagttctgctgcaggctcagaagtggccctttcaaccctccagagacatgagactagtgcagttccgggcaccccacctggtggggcctcacttgggcctggagacagggaatggtggaggggttatcaacctcaatgcctttgaccccacactcccgaagacgatgacgcagttcctagagcagggagaggccaccctctcagtggcaagaagagccctggctgcccagttgccagtcctaccacggtcggaggtaaccttcctggctccagtcacacgaccagataaggtggtgtgtgtgggcatgaattatgtggaccactgcaaagaacagaacgtgcccgtgcccaaggagcccatcatcttcagcaagtttgccagctccatcgtggggccctatgatgaggtggtcctcccaccacagagccaggaggtagattgggaagtggagctggccgtggtcattggaaagaaaggcaagcacatcaaggccacagatgctatggcccacgtggccggcttcactgtggctcatgacgtgagtgctcgtgactggcwaayragacgyaatgggaaacartggctgctgggaaaaaccttcgacaccttctgccctctgggccctgccttggtgaccaaggacagtgtagcagatccacacaacttaaagatctgctgccgagtgaatggggaagtggtccagagcggcaacaccaaccagatggtattcaagacagaggacctgatagcctgggtctcccagtttgttaccttttacccaggggatgtcatcctaactgggacccccccaggtgtcggtgtattcaggaaacctcctgtctttctcaagaagggggatgaagtccagtgtgagattgaagaactaggtgtcatcatcaacaaggtggtgtgatggctcctgcacaggccctgcacataggatgagggcatctgctcccactcagcctagcccagggaaaggcccagtgacaggtgtggacaggtgccagccctgcaagccgcctcttctcggtagaagggagaaggacagagctctcttcaataaattcgtcaggtcaaagcagcagctttgcttctgctgtttgtcttcttttgggctttgtttcatgggacaagttggggcattttgtgggactggggaagaagagagcaaatacacacacatatgccaaaaagatgctgctgggctggggaaaagacaattcgtgtcgtccccttgtttatcacatcaaagaagggaaaaagcaagagatggcaagggacaatcaagcctcaatgattatatttatagctaagggtttgcagcctcctctccatcttctggctctaggacacagctgtgttctggggctcagaagtctcagcacaggctccttctcacagttctagctacaagtgaactgccggatgaactgttctagtttttcctgattgtccaggctggcaaaagtaggggacaggtggagcctggggcctgcagggctcggcgtctgctgcagaacctgggccatggaagatgggccgtgagtgcactcaccacagggactgtgtccacatggcccaggggccaggcctgtcccccagaaacctgccttgagacctctgaccccttaggcctcagtgtttgagtgcaaatgctgcctcaaagcagccccaatacccca

SEQ ID NO: 3002 - DNA, 1896 bp, Homo sapiens
tcgcgcccgcttttctctcgggtgatccggccgagtggccctgggttagcagctgctgcatttccccggctggctgcggtcactggtggcagtgctcaggcgcccgcygcccttgaccttcsgccccgcgagctctaaccctacagcgcaggaagatcggccgccgcggccaggctctgatgctggtgtctggtagaagaaggttactcacagttctgctgcaggctcagaagtggccctttcaaccctccagagacatgagactagtgcagttccgggcaccccacctggtggggcctcacttgggcctggagacagggaatggtggaggggttatcaacctcaatgcctttgaccccacactcccgaagacgatgacgcagttcctagagcagggagaggccaccctctcagtggcaagaagagccctggctgcccagttgccagtcctaccacggtcggaggtaaccttcctggctccagtcacacgaccagataaggtggtgtgtgtgggcatgaattatgtggaccactgcaaagaacagaacgtgcccgtgcccaaggagcccatcatcttcagcaagtttgccagctccatcgtggggccctatgatgaggtggtcctcccaccacagagccaggaggtagattgggaagtggagctggccgtggtcattggaaagaaaggcaagcacatcaaggccacagatgctatggcccacgtggccggcttcactgtggctcatgacgtgagtgctcgtgactggcwaayragacgyaatgggaaacartggctgctgggaaaaaccttcgacaccttctgccctctgggccctgccttggtgaccaaggacagtgtagcagatccacacaacttaaagatctgctgccgagtgaatggggaagtggtccagagcggcaacaccaaccagatggtattcaagacagaggacctgatagcctgggtctcccagtttgttaccttttacccaggggatgtcatcctaactgggacccccccaggtgtcggtgtattcaggaaacctcctgtctttctcaagaagggggatgaagtccagtgtgagattgaagaactaggtgtcatcatcaacaaggtggtgtgatggctcctgcacaggccctgcacataggatgagggcatctgctcccactcagcctagcccagggaaaggcccagtgacaggtgtggacaggtgccagccctgcaagccgcctcttctcggtagaagggagaaggacagagctctcttcaataaattcgtcaggtcaaagcagcagctttgcttctgctgtttgtcttcttttgggctttgtttcatgggacaagttggggcattttgtgggactggggaagaagagagcaaatacacacacatatgccaaaaagatgctgctgggctggggaaaagacaattcgtgtcgtccccttgtttatcacatcaaagaagggaaaaagcaagagatggcaagggacaatcaagcctcaatgattatatttatagctaagggtttgcagcctcctctccatcttctggctctaggacacagctgtgttctggggctcagaagtctcagcacaggctccttctcacagttctagctacaagtgaactgccggatgaactgttctagtttttcctgattgtccaggctggcaaaagtaggggacaggtggagcctggggcctgcagggctcggcgtctgctgcagaacctgggccatggaagatgggccgtgagtgcactcaccacagggactgtgtccacatggcccaggggccaggcctgtcccccagaaacctgccttgagacctctgaccccttaggcctcagtgtttgagtgcaaatgctgcctcaaagcagccccaatacccca

SEQ ID NO: 3003 - DNA, 6214 bp, Homo sapiens
gccccatgagcgcgccgcggcccgggctggcgtgcgggtgcggctgcggcggccgcgcggcggggccccgggaggcgggtcgctgagcggggcgckcggccccgaggatgcgggagcgggagcgggagcagcgctggcgtcaatgctcccttcctcgggccattggagactccgttgctttttaatggcggcagcggctgctgggtgagcagctggaggccggacagtgttcgtcccatmcggagaggatcgctttctcctggcgtcaccagcgctgggttggtgggggtagcttttccctctttgctcctccattcttgaagaaagaagaagatgccactgccatttgggttgaaactgaaacgcacccggcgctacacggtgtccagcaagagttgcctggttgcccggatccaactgcttaataacgagtttgtggagttcaccctgtccgtggagagcactggccaggaaagcctcgaggccgtggcccagaggctggagctgcgggaggtcacttacttcagcctctggtactacaacaagcaaaatcagcgccggtgggtagatttggaaaaacctttgaagaagcagctggataaatatgcattggaacctaccgtctattttggagtggtgttttatgtgccttcagtttctcagctgcagcaggagattaccaggtatcagtattatctgcaactgaagaaagatatcttggaaggaagtattccttgtaccttagaacaagcaattcagctagcaggcttagctgttcaagcggattttggtgactttgatcagtatgaatcccaggactttcttcagaaatttgccttgtttcctgtgggatggttacaagatgaaaaagtattggaagaagcaacccaaaaagtggccttactacatcagaaatacagagggctcacagctcctgatgctgaaatgctgtacatgcaggaggtagagagaatggatggctatggagaagagagctaccctgctaaggatagccaaggaagtgacatatccattggagcgtgtcttgaaggtatctttgtgaaacacaagaatggaaggcatcctgtggtatttaggtggcatgacattgccaacatgtcccacaacaagtccttttttgcattagagctggcaaataaagaggagaccatycaatttcaaactgaagacatggaaacagcaaaatacatttggagactctgtgttgcgcgacacaagttttacagactaaaccagtgtaacctgcaaactcagactgtcacagtgaacccaatcaggaggaggtcttcttcaaggatgtctctgcctaaaccccagccctacgtgatgcctcccccaccgcagttgcactataatggacattatacagaaccatatgcttcttcccaagataacctctttgtgcccaaccagaacggatactactgtcactctcagacaagcttggatagagcccagattgacytcaacggtcggatccgtaatggcagtgtctacagtgcacacagcaccaactccttaaataatcctcagccctacttgcagccctcgccgatgtcgtccaaccctagcatcaccgggagtgacgtcatgaggcctgactacctcccgtcccatcggcacagcgccgtgatacccccgtcctaccgccccaccccagactatgagactgtgatgaagcagctcaacaggggcctggtgcatgcggaacggcagagccactcgctgcgaaacctcaacatcggcagctcgtacgcctacagcaggcccgcggcgctggtctacagccagcccgagatccgcgagcacgcacagctcccctcgccagcggccgcacactgcccgttcagcctgagctacagcttccacagcccgtctccctacccctaccctgccgagcggcggcccgtggtgggcgcggtcagcgtgccggagctgaccaatgcgcagctgcaggcgcaggactacccgtctcccaacatcatgcggacgcaggtgtaccggccacccccaccctacccgccccccaggcccgccaacagcacgccagacctgtcccgccacctttacatcagcagcagcaaccccgacctcatcacgcggcgcgtgcaccwctcggtgcaaacgttccaggaggacagcctgcccgtggcgcaytcgctgcaggaggtcagcgagcccctcaccgccgcgcgccacgcgcagctgcacaaacggaacagcatcgaggtggccgggctcagccacggcctggagggcctgcggctcaaggagcgsaccctatccgcgtcggcggcagaggtggcgccgcgagccgtctcggtgggctcccagcccagcgttttcaccgagaggacacagcgagaagggccggaggaggcggagggcttgaggtacggccataagaagtccctgtcggacgccaccatgctaatccacagcagcgaggaggaggaggacgaggacttcgaggaggagagcggggcccgggcgccycctgcacgtgcgcgcgagcctcggcccggcctggcccaggacccacctggctgccctcgcgtcctgctcgccgggccyctgcacatcctggagcccaaggcccacgtcccagacgcggagaagaggatgatggacagcagccccgtccgcacgaccgcagaggcccagcggccctggagagacsggctgctgatgccctccatgtcggagtccgacctcaccacgtcaggccgctaccgagcccggagggactctctgaagaaaaggccggtgtcggaccttctctctgggaagaagaacatcgtggaagggctcccgcctctagggggaatgaaaaagactcgagtagatgcaaaaaaaattggtcctcttaaactggctgccctaaatggactctccctatctcgagtgcctctgcctgatgaaggaaaggaagtggctaccagagcaacgaatgatgaaaggtgtaaaattctggaacaacgattagaacaaggaatggtattcacagaatatgaaagaattcttaagaaacggctagttgatggggagtgctcaacagcacgactccctgaaaatgcagaaagaaatcgattccaagatgttcttccttatgatgatgygagagtggagttggtcccaactaaagaaaacaacactggttacatcaaygcatcacatattaaggtctctgtcagtggaatcgaatgggattatattgccacacagggaccattacagaatacctgtcaagatttttggcagatggtatgggaacagggaattgcaattatagcaatggtgacagcagaagaggagggtggaagggagaagagctttaggtactggccacgacttggttccaggcacaacactgtcacctatggaaggtttaagatcacgacccggttccgcacagactctggctgctatgccaccacaggcctgaagatgaagcacctccttacygggcaagagaggaccgtctggcacctccaatacacagactggcctgaacatggctgtccagaagacctcaagggatttttatcatatcttgaagagatccagtctgttcgacgccatacaaatagcacaagtgatccccaaarccccaaccctccgttgttggtccactgcagtgctggggtaggaaggactggcgtggtgattttgtcggagatcatgatygcctgcctggaacacaatgaggtgctggacatcccgagagtgctggacatgctgaggcaacagagaatgatgctggtgcagactctctgccagtacacatttgtgtacagagtcctcatccagttcctgaaaagctccaggctcatctaagctcccacaatttcttacggggccagtcatgtgaagcgtttacagcttaaaaaaaaagcgcttgcctaactcatactttccygttgacacttgatccacgcagcgtggcactgggacgtaagtggcgcagtctgaatggcggcacgctgaaggaaacgtgcgaagcacaggctgaagaggggtttctaacctgggaaaggtgctcaaggaggacttggtttcaagggccttgccctgccccggtctgtccggtttgcagtacttgcacacattttggagattgtattttctagacaattctctattttactgaagctatgctgggcaattctggcaatcattaaagtgcatagatttctatcttaaactaatttttgataatggagtttttattttatgacaaatatttagggatttttctagtgagaaacaactttgtgtaaggatgatccacagatatgagttgctcctatataactttgtatttaaaaatcatgttattatcttttgttattttttaaaaaccttgggtacttaataatggtttagttgccaaactgaaaactatactgagaatctgtgttattttgaaacatcaaaaggatttttctatccagaacattttttatcctaaaaattctatatagttgtaccttctgtttttcaaatgagagctcaattcatttagatactgaaatgagtcagttaatgtaaagttgaggatgaaggcacattatttaaaatgtaagagaataagcattattttttcagtattattcatagatctaaatgaatttgattttattggttgaaaatgaagtgaaaaacaattgcctagggtggttttaagcacttttttgttaaaaacaaatctgagttttaatatatgtgttgctttgtagatgacacaataacaatgggcgctgagaagcgttttgggagagattaaggactaagagtatgtaagatgactaggacaagagtaggtggagtgtgatggtaaatgcaggatgccttcgtctttacaaaaatgcagtattatctatactcagactgaggtgctgggatggcgagcaggggaccccacagcactgtccccagggaattcaagtcctgtgacygccagtgacttactccgtttccttggggcttttcccacctcaacctgtattgtttctttttcataaataaattcagcattatagtatcattaaaagaagccttaaagaggcgtatttttccttttggttgaaggaagggaatagttaataatagttttcacctcttctcccaaaaagtacagtccaaatttgtgcacagagattgctgtggtattcaagaggtacttgcattttagctccttaattccctggccagtgttagctgtttagtgccccctcacccatcccatttaggcacatcccaatagacagagccaggctgagttacagggggagagtgtcatctctggccccgattaagatggccttgtcacagtgaccgctgagtaggcatggatgagtgggatatttagctgaggaaccctttcccttttccttctttttggggtctcttcttacagtgaacttccaaaatgtcaaatctagggctgtttcccaaattacactattctaggcatcattttgattcccatgtcactccttaactcacttccttgagcactacatgtatgttgtcagccacgagacaggacttcctaaatagtgtgtgcaccagcctaactctgccttacccagaaaccaaccacctaagaggaaaactcagaagatattaatgaaaactaattgaaagtacgcacacttctcatgtaggaacaaaattaaaattttacatttttattttacaaaattaaaaaattacattttgtaggaacaaaatgtaaattttgtaaatacaaaattctttttaaagtcctgtttaaagaacagtagaactaagtgaaaatattcagaacgagctccttagaagaaaggaataagaactttttactggaactattttccatctctagaaaaagtgcttcttcccctccccctccctctccatggtacgtttttgtgaaaatgcttttctgtcaggtttaaacaaacagtttgacatagctcgttgacaagaacatattgtaaaacaaatctaattaaagagtaatatgtggtctatttgtgttcctgttgtaataatttgataagtaaacttctgagggcaaaattactgtttaatattactcttaaaatgttgcatgtttggcgtcattcctaagagccatgtaattttaaacttttaattgcagttagtgaatatgaaaggatttctgaataaaaatctatccacatta

SEQ ID NO: 3004 - DNA, 2844 bp, Homo sapiens
gccccatgagcgcgccgcggcccgggctggcgtgcgggtgcggctgcggcggccgcgcggcggggccccgggaggcgggtcgctgagcggggcgckcggccccgaggatgcgggagcgggagcgggagcagcgctggcgtcaatgctcccttcctcgggccattggagactccgttgctttttaatggcggcagcggctgctgggtgagcagctggaggccggacagtgttcgtcccatmcggagaggatcgctttctcctggcgtcaccagcgctgggttggtgggggtagcttttccctctttgctcctccattcttgaagaaagaagaagatgccactgccatttgggttgaaactgaaacgcacccggcgctacacggtgtccagcaagagttgcctggttgcccggatccaactgcttaataacgagtttgtggagttcaccctgtccgtggagagcactggccaggaaagcctcgaggccgtggcccagaggctggagctgcgggaggtcacttacttcagcctctggtactacaacaagcaaaatcagcgccggtgggtagatttggaaaaacctttgaagaagcagctggataaatatgcattggaacctaccgtctattttggagtggtgttttatgtgccttcagtttctcagctgcagcaggagattaccaggtatcagtattatctgcaactgaagaaagatatcttggaaggaagtattccttgtaccttagaacaagcaattcagctagcaggcttagctgttcaagcggattttggtgactttgatcagtatgaatcccaggactttcttcagaaatttgccttgtttcctgtgggatggttacaagatgaaaaagtattggaagaagcaacccaaaaagtggccttactacatcagaaatacagagggctcacagctcctgatgctgaaatgctgtacatgcaggaggtagagagaatggatggctatggagaagagagctaccctgctaaggatagccaaggaagtgacatatccattggagcgtgtcttgaaggtatctttgtgaaacacaagaatggaaggcatcctgtggtatttaggtggcatgacattgccaacatgtcccacaacaagtccttttttgcattagagctggcaaataaagaggagaccatycaatttcaaactgaagacatggaaacagcaaaatacatttggagactctgtgttgcgcgacacaagttttacagactaaaccagtgtaacctgcaaactcagactgtcacagtgaacccaatcaggaggaggtcttcttcaaggatgtctctgcctaaaccccagccctacgtgatgcctcccccaccgcagttgcactataatggacattatacagaaccatatgcttcttcccaagataacctctttgtgcccaaccagaacggatactactgtcactctcagacaagcttggatagagcccagattgacytcaacggtcggatccgtaatggcagtgtctacagtgcacacagcaccaactccttaaataatcctcagccctacttgcagccctcgccgatgtcgtccaaccctagcatcaccgggagtgacgtcatgaggcctgactacctcccgtcccatcggcacagcgccgtgatacccccgtcctaccgccccaccccagactatgagactgtgatgaagcagctcaacaggggcctggtgcatgcggaacggcagagccactcgctgcgaaacctcaacatcggcagctcgtacgcctacagcaggcccgcggcgctggtctacagccagcccgagatccgcgagcacgcacagctcccctcgccagcggccgcacactgcccgttcagcctgagctacagcttccacagcccgtctccctacccctaccctgccgagcggcggcccgtggtgggcgcggtcagcgtgccggagctgaccaatgcgcagctgcaggcgcaggactacccgtctcccaacatcatgcggacgcaggtgtaccggccacccccaccctacccgccccccaggcccgccaacagcacgccagacctgtcccgccacctttacatcagcagcagcaaccccgacctcatcacgcggcgcgtgcaccwctcggtgcaaacgttccaggaggacagcctgcccgtggcgcaytcgctgcaggaggtcagcgagcccctcaccgccgcgcgccacgcgcagctgcacaaacggaacagcatcgaggtggccgggctcagccacggcctggagggcctgcggctcaaggagcgsaccctatccgcgtcggcggcagaggtggcgccgcgagccgtctcggtgggctcccagcccagcgttttcaccgagaggacacagcgagaagggccggaggaggcggagggcttgaggtacggccataagaagtccctgtcggacgccaccatgctaatccacagcagcgaggaggaggaggacgaggacttcgaggaggagagcggggcccgggcgccycctgcacgtgcgcgcgagcctcggcccggcctggcccaggacccacctggctgccctcgcgtcctgctcgccgggccyctgcacatcctggagcccaaggcccacgtcccagacgcggagaagaggatgatggacagcagccccgtccgcacgaccgcagaggcccagcggccctggagagacsggctgctgatgccctccatgtcggagtccgacctcaccacgtcaggccgctaccgagcccggagggactctctgaagaaaaggccggtgtcggaccttctctctgggaagaagaacatcgtggaagggctcccgcctctaggg

SEQ ID NO: 3005 - DNA, 2983 bp, Homo sapiens
cggggcctccgagtctactggttggcctggcaacgccgcgtgctcttcccaaggggaggacgcgggagaagccggggcctgagtgctccaaggccccgtgggcttcttgggtttgttgcctccggccgctcattaactcaggatggcgtggaagacctcgcccgcctccccttctgggccgcggctccgcttaggtgaaggcctgtttgggcgtccccaccctggagaggggccggggtctggattttcagaactgccactcttctagtgcgctggcgtcaatgctcccttcctcgggccattggagactccgttgctttttaatggcggcagcggctgctgggtgagcagctggaggccggacagtgttcgtcccatmcggagaggatcgctttctcctggcgtcaccagcgctgggttggtgggggtagcttttccctctttgctcctccattcttgaagaaagaagaagatgccactgccatttgggttgaaactgaaacgcacccggcgctacacggtgtccagcaagagttgcctggttgcccggatccaactgcttaataacgagtttgtggagttcaccctgtccgtggagagcactggccaggaaagcctcgaggccgtggcccagaggctggagctgcgggaggtcacttacttcagcctctggtactacaacaagcaaaatcagcgccggtgggtagatttggaaaaacctttgaagaagcagctggataaatatgcattggaacctaccgtctattttggagtggtgttttatgtgccttcagtttctcagctgcagcaggagattaccaggtatcagtattatctgcaactgaagaaagatatcttggaaggaagtattccttgtaccttagaacaagcaattcagctagcaggcttagctgttcaagcggattttggtgactttgatcagtatgaatcccaggactttcttcagaaatttgccttgtttcctgtgggatggttacaagatgaaaaagtattggaagaagcaacccaaaaagtggccttactacatcagaaatacagagggctcacagctcctgatgctgaaatgctgtacatgcaggaggtagagagaatggatggctatggagaagagagctaccctgctaaggatagccaaggaagtgacatatccattggagcgtgtcttgaaggtatctttgtgaaacacaagaatggaaggcatcctgtggtatttaggtggcatgacattgccaacatgtcccacaacaagtccttttttgcattagagctggcaaataaagaggagaccatycaatttcaaactgaagacatggaaacagcaaaatacatttggagactctgtgttgcgcgacacaagttttacagactaaaccagtgtaacctgcaaactcagactgtcacagtgaacccaatcaggaggaggtcttcttcaaggatgtctctgcctaaaccccagccctacgtgatgcctcccccaccgcagttgcactataatggacattatacagaaccatatgcttcttcccaagataacctctttgtgcccaaccagaacggatactactgtcactctcagacaagcttggatagagcccagattgacytcaacggtcggatccgtaatggcagtgtctacagtgcacacagcaccaactccttaaataatcctcagccctacttgcagccctcgccgatgtcgtccaaccctagcatcaccgggagtgacgtcatgaggcctgactacctcccgtcccatcggcacagcgccgtgatacccccgtcctaccgccccaccccagactatgagactgtgatgaagcagctcaacaggggcctggtgcatgcggaacggcagagccactcgctgcgaaacctcaacatcggcagctcgtacgcctacagcaggcccgcggcgctggtctacagccagcccgagatccgcgagcacgcacagctcccctcgccagcggccgcacactgcccgttcagcctgagctacagcttccacagcccgtctccctacccctaccctgccgagcggcggcccgtggtgggcgcggtcagcgtgccggagctgaccaatgcgcagctgcaggcgcaggactacccgtctcccaacatcatgcggacgcaggtgtaccggccacccccaccctacccgccccccaggcccgccaacagcacgccagacctgtcccgccacctttacatcagcagcagcaaccccgacctcatcacgcggcgcgtgcaccwctcggtgcaaacgttccaggaggacagcctgcccgtggcgcaytcgctgcaggaggtcagcgagcccctcaccgccgcgcgccacgcgcagctgcacaaacggaacagcatcgaggtggccgggctcagccacggcctggagggcctgcggctcaaggagcgsaccctatccgcgtcggcggcagaggtggcgccgcgagccgtctcggtgggctcccagcccagcgttttcaccgagaggacacagcgagaagggccggaggaggcggagggcttgaggtacggccataagaagtccctgtcggacgccaccatgctaatccacagcagcgaggaggaggaggacgaggacttcgaggaggagagcggggcccgggcgccycctgcacgtgcgcgcgagcctcggcccggcctggcccaggacccacctggctgccctcgcgtcctgctcgccgggccyctgcacatcctggagcccaaggcccacgtcccagacgcggagaagaggatgatggacagcagccccgtccgcacgaccgcagaggcccagcggccctggagagacsggctgctgatgccctccatgtcggagtccgacctcaccacgtcaggccgctaccgagcccggagggactctctgaagaaaaggccggtgtcggaccttctctctgggaagaagaacatcgtggaagggctcccgcctctaggg

SEQ ID NO: 3006 - DNA, 2152 bp, Homo sapiens
cgcctgttcgcgggtcaagccggccctattgggcagtctcttcttgattcctcccccggagagggcggggcggccgagcgccccgaggctagacgccgccgtccgagagacgagggggcgtgtaggcggtgacgccctgcaaagtggccggcgtgcttatcattaccgagcttccgcgggcctgcagagcctggcggactcagacttctctccggagcgggatgcggccctaccgcggcctcacacttctcgccggcttcccgagttcycgggggcggggcttgtgtttttacttccggatcccacagctatgacaccggaagccggaagcgtggtagggaagggcgaccgcgaaactgggactttctcggagcgccggggccctaccagcgttcacagtccgccgctcccacccttctcacgtctgacggactctgctgacagcccttgccctgttggatgaataggcacctctggaagagccaactgtgtgagatggtgcagcccagtggtggcccggcagcagatcaggacgtactgggcgaagagtctcctctggggaagccagccatgctgcacctgccttcagaacagggcgctcctgagaccctccagcgctgcctggagragaatcaagagctcygagatgccatccggcagagcaaccagattctgcgggagcgctgcgaggagcttctgcatttccaagccagccagagggaggagaaggagttcctcatgtgcaagttccaggaggccaggaaactggtggagagactcggcctggagaagctcgatactgaagaggcagaaggagcaggctactgcgggaggtggagcacctgaagagatgccagcagcagatggctgaggacaaggcctctgtgaaagcccaggtgacgtccttgctcggggagctgcaggagagccagagtcgcttggaggctgccactaaggaatgccaggctctggagggtcggaggaagcyggcccagttgcaggtggcctatcaccagctcttccaagaatasgacaaccacatcaagagcagcgtggtgggcagtgagcggaagcgaggaatgcagctggaagatctcaaacagcagctccagcaggccgaggaggccctggtggccaaacaggaggtgatcgataagctgaaggaggaggscgagyagcacaagattgtgatggagaccgttccggtgctgaaggcccaggcggatatctacaaggcgracttccaggctgagaggcaggcccgggagaagctggccgagaagaaggagctcctgcaggagcagctggagcagctgcagagggagtacagcaaactgaaggccagctgtcaggagtcggccaggatcgaggacatgaggaagcggcatgtcgaggtctcccaggcccccttgccccccgcccctgcctacctctcctctcccctggccctgcccagccagaggaggagcccccccgagkagccacctgacttctgctgtcccaagtgccagtatcaggcccctgwtrtggacaccctgcagatacatgtcatggagykcattgagtrgggccggccagtgcaaggccactgcctgccgaggacgtgcccgggaccgtgcagtctgcgctttcctctcccgcctgcctagcccaggatgaagggctgggtggccacaactgggatgccacctggagccccacccaggagctggccgcggcaccttacgcttcagctgttgatccgctggtcccctcttttggggtagatgcggccccgatcaggcctgactcgctgctctttttgttcccttctgtctgctcgaaccacttgcctcgggctaatccctccctcttcctccacccggcactggggaagtcaagaatggggcctggggctctcagggagaactgcttcccctggcagagctgggtggcagctcttcctcccaccggacaccgacccgcccgcygctgtgccctgggagtgctgccctcttaccatgcacacgggtgctctccttttgggctgcatgctattccattttgcagccagaccgatgtgtatttaaccagtcactattgatggacatttgggttgtttcccatctttttgttaccataaataatggcatagtaaaaatccttgtgcatt

SEQ ID NO: 3007 - DNA, 2556 bp, Homo sapiens
ctcattacggatcccggctgaaagccattttgtttttcagctcacttcaagggtacctgaagcgaattggcaccaaagcagcagctgtattgccgcagttctagcttcaccttcacgatgtttcccttggtcaaaagcgcactaaatcgtctccaagttcgaagmattcagcaaacaatggcaaggcagagccaccagaaacgtacacctgattttcatgacaaatacggtaatgctgtattagctagtggagccactttctgtattgttacatggacatatgtagcaacacaagtcggaatagaatggaacctgtcccctgttggcagagttaccccaaaggaatggaggaatcagtaatcatcccagctggtgtaataatgaattgtttaaaaaacagctcataattgatgccaaattaaagcmctgtgtacccattaagatatggcattattgaagaaataaagtacatttgaaaccttcattgtaggttttgtttctttgtaaatgaaactaagcttgatcactttagcctttatgttaatattaaagtcaaatgctgtgcagcttcttaaataggtttttttttttttttttttttttttttgggacgaagtctcactttgtcccccaggctggagtgcagtggcaccatctcagctcactgcgacctctgcctcctgagttcaagtgattctcctgtctcagcctcccgagtagccagaactacaggcacatgccatgacgcccagctaattttttttttttttgagacggagtctcactctgttgcccaggctggaatgcaatggcgtgatctcggctcctgcaacctccgcctcccgggttcaagcgattctcctgtctcagccttccaagtagctgggattacaggtgcacgccaccaggcccggctaatttttgtatttttagtagagacggggtttcaccatgttggtcaggctggtctcgagctcctgatctcgtgatccacccaccttggtctcccaaagtgctgggattacaggtgtgagccaccgtgcccggcaatttttgtatttttagtagagacagggtttcaccatattggtcaggctggtttcaaactcacgacctcaggtgatccgcctgccttggcctcccaaagtggtaggattacaggcgtgagccacggcacccagcccttaaatggcttttatgaggtaatgtgaaaggaaaatttgcctttgacctggaagtcaactttatagtaagctgaaattataaataactgatcatggaactattgcagatcacctttgagccaaaaatttggcctggattttggttatgcctactactatgtgcctctcatttgtatttatacctggaattggcattattaactccttttcactcctgcctagaaaacttaaagtgtcaccagacccaagggcggagtggtcctataaaacaaactcgtagcctgtctgaagactagctactagctccttggctgttttggcatattcatcttgattatagctcttggtctttcatcatattagggatgtttatgatgttattaaagaaaatcttgtcaaatgcagtctgttcctagttatctactatcagtcacctgttgtataattataacaatgtttggatttgtggattattattttagtatataacattggattttatgtatgttacctgaagaagagcaatatctgtaccacatatttctttgtttttcttttttgagatgaagtctcactctgttgcccaggctggagtgcagtggtgtgatcttgacacactgcaacctttgcctcccggattcaagtgattctcctgtctcagcctccctagtaactggaattacaggcgcctgccaccatgcctggctaatttttgtatttttagtagagatggggtttcaccatgttggccaacctggtcttgaactcctgacctcaggcgatccacccacctcagcctcccaaagtgctaggcttacaggcatgagacaccgcgcccggcttatatatcattactttcttggctgagagctgtagtctgtggtagttgttttgttttgttttttgttttttttttgtagttttcttgatcgtgatcaattaagcagaaagtagaatttcagtcaggtaacctgtctatattagctaaattatcttttgcttattacatagagtgctagaagtatgctgtcatggcatatgtcctagtttctcatcaaatggaccaaagtcagtgattttatttgaagaggaaaaattgaacgtcattgtaaattaagttgcaagtttagtaaccatattgtaccactgtttgataaatttgaacgctttatggtatttcatatttagaatgttcaaaatagtactgaagtattcaaatacatacaaccctgagcgatattgaagtaaaataaacatgtatttaaggaagtgtcaaccttcaattatatacctttttgtcactgaattaacacttatttctcacgacgtggaagcagtttcagtatggtttgtactaagctaagtgatagtt

SEQ ID NO: 3008 - DNA, 8556 bp, Homo sapiens
ccgccgcggcggggggtgggaaaagagaagcagagggaggagttgttgctgccgccgccgcagccgcagctactgtgacttctccgattgtgtgagctttgttggagcctgcgtacgtggatttatcgctgccacggtctgcgtagctccagaggtttaaccataggatagagaaaccaggaatgtaatgaggaaatcaaaatggatccaagtatgggtgtgaattctgttaccatttctgttgagggtatgacttgcaattcctgtgtttggaccattgagcagcagattggaaaagtgaatggtgtgcatcacattaaggtatcactggaagaaaaaaatgcaactattatttatgaccctaaactacagactccaaagaccctacaggaagctattgatgacatgggctttgatgctgttatccataatcctgaccctctccctgttttaactgacaccttgtttctgactgttacggcgtcactgactttgccatgggaccatatccaaagcacattgctgaaraccaagggtgtgacagacattaaaatttaccctcagaaaagaactgtagcagtgacaataatcccttctatagtgaatgccaatcagataaaagagstggttccagaactcagtttagatactgggacactggagaaaaagtcaggagcttgtgaagatcatagtatggctyaagctggtgaagtcgtgctgaagatgaaagtggaagggatgacctgccattcatgtactagcactattgaaggaaaaattgggaaactgcaaggtgttcagcgaattaaagtctccctggacaatcaagaagctactattgtttatcaacctcatcttatctcagtagaggaaatgaaaaagcagattgaagctatgggctttccagcatttgtcaaaaagcagcccaagtacctcaaattgggagctattgatgtagaacgtctaaagaacacaccagttaaatcctcagaagggtcacagcaaaggagtccatcatataccaatgattcaacagccactttcatcattgatggcatgcattgtaaatcatgtgtgtcaaatattgaaagtactttatctgcactccaatatgtaagcagcatagtagtttctttagagaataggtctgccattgtgaagtataatgcaagctcagtcactccagaatccctgagaaaagcaatagaggctgtatcaccggggctatatagagttagtatcacaagtgaagttgagagtacctcaaactctccctccagctcatctcttcagaagattcctttgaatgtagttagccagcctctgacacaagaaactgtgataaacattgatggcatgacttgtaattcctgtgtgcagtctattgagggtgtcatatcaaaaaagccaggtgtaaaatccataygagtctcccttgcaaatagcaatgggactgttgagtatgatcctctactaacctctccagaaacgttgagaggagcaatagaagacatgggatttgatgctaccttgtcagacacgaatgagccgttggtagtaatagctcagccttcatcggaaatgccgcttytgacttcaactaatgaattttatactaaagggatgacaccagttcaagacaaggaggaaggaaagaattmatctaagtgttacatacaggtcactggcatgacttgcgcttcctgtgtagcaaacattgaacggaatttaaggcgggaagaaggaatatattctatacttgtggccctgatggctggcaaggcakaagtaaggtataatcctgctgttatacaacccccaatgatagcagagttcatccgagaacttggatttggagccactgtgatagaaaatgctgatgaaggagatggtgttttggaacttgttgtgaggggaatgacgtgtgcctcctgcgtacataaaatagagtctagtctcacaaaacacagagggatcctatactgctccgtggccctggcaaccaacaaagcacatattaaatrtgacccagaaattattggtcctagagatattatccatacaattgaaagcttaggttttgaascttctttggtcaagaaggatcggtcagcaagtcacttagatcataaaygakaaataagacaatggagacggtcttttcttgtgagtctgtttttctgtattcctgtaatggggctgatgayatatatgatggttatggaccaccactttgcaactcttcaccataatcaaaacatgagtaaakaagaaatgatcaaccttcattcttctatgttcctggagcrccagattcktccaggattgtctgttatgaatttgctgtccttttwattgtgtgtacctgtacaggcaagtgaattgttagcaaatatattttttttcrgaggctggtacttctacattcaggcttataaagcactgaagcataagacagcaaatatggacgtactgattgtgctggcaaccaccattgcatttgcctactctttgattattcttctasttgcaatgtatgagagagccaaagtgaaccctattactttctttgacacaccccctatgctgtttgtgtttattgcactaggccgatggctggaacatatagcaaagggcaaaacatcagaggctcttgcaaagttaatttcactacaagctacagaagcaactattgtaactcttgattctgataatatcctcctcagtgaagaacaagtggatgtggaacttgtacaacgtggagatatcattaaagtagttccaggaggcaaatttccagtggatggtcgtgttattgaaggacattctatggtrgatgagtccckcatcacaggggaggcaatgcctgtggctaagaaacctggcagcacagtgattgctggttccattaacyagaacgggtcactgcttatctgcgcaacacatgttggagcagacacaaccctttctcaaattgtcaaacttgtggaagaggcayaaacatcaaaggctcctatccagcagtttgcagacaaactcagtggctattttgttccttttattgtttttgtttccattgccaccctcttggtatrgattgtaattggatttctgaattttgaaattgtggaaacctactttcctggctacaatagaagtatctcccgaacagaaacgataatacgatttgctttccaagcctctatcacagttctgtgtattgcatgtccctgttcactgggacyggccactccaactgctgtgatggtgggtacaggagtagrtgctcaaaatggcatactaataaaaggtggagagccattggagatggctcataaggtaaaggtagtggtatttgataagactggaaccattactcacggaaccccagtggtgaatcaagtaaaggttctaactgaaagtaacagaatatcacaccataaaatcttggccattgtgggaactgctkaaagtaacagtgaacaccctctaggaacagccataaccaaatattgcaaacaggagctggacactgaaaccttgggtacctgcatagatttccaggttgtgccaggctgtgrtattagctgtaaagtcaccaatattgaaggcttgctacataagaataactggaatatagaggacaataatattaaaaatgcatccctggttcaaattgatgccagtaatgaacagtcatcaacttcgtcttccatgattattgatgcccagatctcaaatgctcttaatgctcagcagtataaagtcctcattggtaaccgggagtggatgattagaaatggtcttgtcattaataacgatgtaaatgatttcatgactgaacatgagagaaaaggtcggactgctgtattagtagcagttgatgatgagctgtgtggcttgatagccattgcagacacagtgaagcctgaagcagaactggctatccatattctgaaatctatgggcttagaagtagttctgatgactggagacaacagtaaaacagctagatctattgcttctcaggttggcattactaaggtgtttgctgaagttctaccttctcacaaggttgctaaagtgaagyaacttcaagaggaggggaaacgggtagcaatggtgggagatrgaatcaatgactccccagctctggcaatggctaatgtgggaattgctattggcacaggcacagatgtagccattgaagcagctgatgtggttttgataaggaatgatcttctggatgtagtggcaagtattgacttatcaagaragacagtcaagaggattcggataaattttgtctttgctctaatttataatctggttggaattcccatagctgctggagtttttatgcccattggtttggttttgcagccctggatgggatctgcagcaatggctgcttcatctgtttctgtagtactttcttctctcttccttaaactttacaggaaaccaacttacgagagttatgaactgcctgcccggagccagataggacagaagagtccttcagaaatcagcgttcatgttggaatagatgatacctcaaggaattctcctaaactgggtttgctggaccggattgttaattatagcagagcctctrtaaactcactactgtctgataaacgctccctaaacagtgttgttaccagtgaacctgacaagcactcactcctggtgggagacttcagggaagatgatgacactgcattataaaaggccatggagagtgctgccagtttaacttgtcatgcastgacacagcattcatgatgttaccttcacttttcaaaatattgtagaaggatttttctcatgctcttatattagggattctatttgagttgcgtttatctgttggcaaaaatatctttttcaaggcatcagctctgaacctagctttatttaaactgaatttccagtatatttttgttttcactaacaacagataaggtagagcagtgaggtttacaacaagccctacaattagagattgctgaactgctgctaaagtgattttttttttatttgaccaaaaaaaaaaaggcccaagaagaagaaaatgaaaaatttgaagatttgagagcatgaagatattcatgcttttgaactcaaaatattgaagatactctcaagcctgtatccctgccccactggggagcaatgactttcaaagcactgtgtataaaacatctagttttagaagggaaacagttgaaactgtttaaaaatagatgtgccttatttattgcaggctttctttcccccattctccctgcatccttgtccttgcaggtgcttttttagatgctccaatatgtcttcttttgttattttctttcgagctaaccaagtttaggtggtttttcattgattaaaaataactgacaactgttctaatattttgctcctttttaaattttgtagctcaaaagaccttaaaggtctgtagggttccctgcctcccatctttccactgttgtaaaaagtatatcaaattattccttcaagtttcctagctctgtgctcagtttcagttcactcctgccaagttggactctaagttattcttcatgtagtctgctgatctcagtctggaaacttaacattatgagccttttctgctcaaaaaattttcaaagattaaaactattatacatatacaggtcatataaaattacctggattcactaaatttgtttgttgttgttgttgttgttgttgttgttgttgagacagagtcttgttttgcagcccaggctggagtgcagtggcaccatcttggctcactgcaacctctgcctaccggattcaaggaattctccctgcctcagcctcctgagtagctaggattacaggtgcctgccaccacacccggctaattttcatatttttcagtagagacggggtttcgccatgttggctagcctggtcttaaactcctaacctcaggtgatccacccgccttggcctcccaaagtgctgggattacaggtgtgagcctccatgcccagcctaaatttgtattttttgaattgagtataatcactttgctagtatatataatttaatagattttatttatcttttagtgtttcagataacctctcaaaaagactttaaaataatgctattacacaaagctgcatttaccaaaaaatacagtaaaatcataatacagaaactaaaatttccctaggttatgacgctttttagctaaatatatactcttctctagtttaaaacatttgaacttgcctagttagtgtggttggcaaatttaggagcttgttcccattgccaaatggatttagaaattcccttgtgagtgcctggtagctaatacactggtcagagatctggtacttgtaagactatttaaatttctttgttagttgcaagatggatttcatatgcagaatatgtaaatgaagaggactcataagtaaattcctaacattttgttcccattaccagaagcaaagctgctgctaacccaacatctggcacataggatttgtactcggtaaatgtyagttcttttctccccttgaggtcagtaataaatacaaaaaaatcatttttctagagcagagtcttaaaatcaggtgggggtaggggatggasttcttcctttcctaccccttttctcttttatcctttcatatatacacaygcaaagtttacaaccttattccatgctgtctttcagatttagaaaagatctaatttctgtctcagctgtcttaaagagagaactgaagcttttgatgaaggtgctattaatctagaaaggcaaacccatttcactgaaatatcaatgggtttgcatatctaggccctttttttagaccaatgcctatgccatcctccatgctttcagtttgagttttattatttattattttaattccagtggcccatcttataatacaacttgtttcttctagaagacagagctgatagggtaaatgttgaaaaaagaagcatgcctccttctccctcccacccacctcaagcagttgaacacagccagttattcttccattattatgtgtaccttggagtcatcctcttggtcttgtattcatattgtgggacagtgggaatagcagcttgtagtattgaaataatcaaagagataatttcagctcttacaacaagaacagaaaacatgctaattagaaaaagtcctgctttaagtaatatgtagccacatttgaatcctctaccacaagtctttttkgcaatcttgaactttcattagcttcaaagagaagctgtmtttacaggagaaagaggtgattatggagggaatcaaaawtactgctttcagytagtagctagctttwagtcaggagttagtaatgagaaattttataaatgtgtatttctgtgtattcacatacatatatatatacacacatatatatgtacatacacatacatacatattaccatactgaagggaaatggatttatatttgaatttgatatttgaatatttgaagttctctatttatatttcatttatcactcttctgtattcactcagcaaccatgcccttagtctgaagataacaaggatactttaatatccagtgccggttcagactcacctatgtggcaccttaaacttaaatatccaaagatgccttttgaatttcaaagattaaaacacagctagagtagtagtattgtagtctcaagatgtatggtgtgtcatttgtgaaaatagaaacgttatttttcctagtttagtatcaacattttagaatgtcaaatttgatgccttgtgaacaagtaattttatattgtgctttaattttttaaaaagtattctttattcatatgtatagaatgcttaaaatagcactgtagacaagatgtttccaaaactttaagtgcgcatatcttttctgtatacagcttaaaatcaaaaatgtatgttaagagaattttttctattacttatggatcatgctttaaaatgatttttcttgatatttattttactccattttgtttttttctctgggtgaggcatctggttactggttattttaaaaagaataaagacattcctggaatcactccttttgggtttttgtttgttttgtttcttttctacatttttaagtattattttacaaaatagaaaaaatatagattcatgccaaattattacctatttttacactaactttctgcagtccctccatctggtatgagtaaccagatagagcacaaagcatgagttcttgttcttcagttaaaagagcttctttcacagtgttgataacaaatgccttttgtagccaaaaccaggcgtctcaaccttacgtttttagttaaagaaatgtttagctaaacgytgttgaacattgattgtttggtaccgaaaacagcagtggacgatgttgtgcaatatccatctactgtagttaagatattcagtagtttgtttttcataagcatgtaattgatcatatttctgccaaggatgtgccttcaactttataattatagtgttgtaaaata

SEQ ID NO: 3009 - DNA, 8529 bp, Homo sapiens
ccgccgcggcggggggtgggaaaagagaagcagagggaggagttgttgctgccgccgccgcagccgcagctactgtgacttctccgattgtgtgagctttgttggagcctgcgtacgtggatttatcgctgccacggtctgcgtagctccagaggtttaaccataggatagagaaaccaggaatgtaatgaggaaatcaaaatggatccaagtatgggtgtgaattctgttaccatttctgttgagggtatgacttgcaattcctgtgtttggaccattgagcagcagattggaaaagtgaatggtgtgcatcacattaaggtatcactggaagaaaaaaatgcaactattatttatgaccctaaactacagactccaaagaccctacaggaagctattgatgacatgggctttgatgctgttatccataatcctgaccctctccctgttttaactgacaccttgtttctgactgttacggcgtcactgactttgccatgggaccatatccaaagcacattgctgaaraccaagggtgtgacagacattaaaatttaccctcagaaaagaactgtagcagtgacaataatcccttctatagtgaatgccaatcagataaaagagstggttccagaactcagtttagatactgggacactggagaaaaagtcaggagcttgtgaagatcatagtatggctyaagctggtgaagtcgtgctgaagatgaaagtggaagggatgacctgccattcatgtactagcactattgaaggaaaaattgggaaactgcaaggtgttcagcgaattaaagtctccctggacaatcaagaagctactattgtttatcaacctcatcttatctcagtagaggaaatgaaaaagcagattgaagctatgggctttccagcatttgtcaaaaagcagcccaagtacctcaaattgggagctattgatgtagaacgtctaaagaacacaccagttaaatcctcagaagggtcacagcaaaggagtccatcatataccaatgattcaacagccactttcatcattgatggcatgcattgtaaatcatgtgtgtcaaatattgaaagtactttatctgcactccaatatgtaagcagcatagtagtttctttagagaataggtctgccattgtgaagtataatgcaagctcagtcactccagaatccctgagaaaagcaatagaggctgtatcaccggggctatatagagttagtatcacaagtgaagttgagagtacctcaaactctccctccagctcatctcttcagaagattcctttgaatgtagttagccagcctctgacacaagaaactgtgataaacattgatggcatgacttgtaattcctgtgtgcagtctattgagggtgtcatatcaaaaaagccaggtgtaaaatccataygagtctcccttgcaaatagcaatgggactgttgagtatgatcctctactaacctctccagaaacgttgagaggagcaatagaagacatgggatttgatgctaccttgtcagacacgaatgagccgttggtagtaatagctcagccttcatcggaaatgccgcttytgacttcaactaatgaattttatactaaagggatgacaccagttcaagacaaggaggaaggaaagaattmatctaagtgttacatacaggtcactggcatgacttgcgcttcctgtgtagcaaacattgaacggaatttaaggcgggaagaaggaatatattctatacttgtggccctgatggctggcaaggcakaagtaaggtataatcctgctgttatacaacccccaatgatagcagagttcatccgagaacttggatttggagccactgtgatagaaaatgctgatgaaggagatggtgttttggaacttgttgtgaggggaatgacgtgtgcctcctgcgtacataaaatagagtctagtctcacaaaacacagagggatcctatactgctccgtggccctggcaaccaacaaagcacatattaaatrtgacccagaaattattggtcctagagatattatccatacaattgaaagcttaggttttgaascttctttggtcaagaaggatcggtcagcaagtcacttagatcataaaygakaaataagacaatggagacggtcttttcttgtgagtctgtttttctgtattcctgtaatggggctgatgayatatatgatggttatggaccaccactttgcaactcttcaccataatcaaaacatgagtaaakaagaaatgatcaaccttcattcttctatgttcctggagcrccagattcktccaggattgtctgttatgaatttgctgtccttttwattgtgtgtacctgtacagtttttcrgaggctggtacttctacattcaggcttataaagcactgaagcataagacagcaaatatggacgtactgattgtgctggcaaccaccattgcatttgcctactctttgattattcttctasttgcaatgtatgagagagccaaagtgaaccctattactttctttgacacaccccctatgctgtttgtgtttattgcactaggccgatggctggaacatatagcaaagggcaaaacatcagaggctcttgcaaagttaatttcactacaagctacagaagcaactattgtaactcttgattctgataatatcctcctcagtgaagaacaagtggatgtggaacttgtacaacgtggagatatcattaaagtagttccaggaggcaaatttccagtggatggtcgtgttattgaaggacattctatggtrgatgagtccckcatcacaggggaggcaatgcctgtggctaagaaacctggcagcacagtgattgctggttccattaacyagaacgggtcactgcttatctgcgcaacacatgttggagcagacacaaccctttctcaaattgtcaaacttgtggaagaggcayaaacatcaaaggctcctatccagcagtttgcagacaaactcagtggctattttgttccttttattgtttttgtttccattgccaccctcttggtatrgattgtaattggatttctgaattttgaaattgtggaaacctactttcctggctacaatagaagtatctcccgaacagaaacgataatacgatttgctttccaagcctctatcacagttctgtgtattgcatgtccctgttcactgggacyggccactccaactgctgtgatggtgggtacaggagtagrtgctcaaaatggcatactaataaaaggtggagagccattggagatggctcataaggtaaaggtagtggtatttgataagactggaaccattactcacggaaccccagtggtgaatcaagtaaaggttctaactgaaagtaacagaatatcacaccataaaatcttggccattgtgggaactgctkaaagtaacagtgaacaccctctaggaacagccataaccaaatattgcaaacaggagctggacactgaaaccttgggtacctgcatagatttccaggttgtgccaggctgtgrtattagctgtaaagtcaccaatattgaaggcttgctacataagaataactggaatatagaggacaataatattaaaaatgcatccctggttcaaattgatgccagtaatgaacagtcatcaacttcgtcttccatgattattgatgcccagatctcaaatgctcttaatgctcagcagtataaagtcctcattggtaaccgggagtggatgattagaaatggtcttgtcattaataacgatgtaaatgatttcatgactgaacatgagagaaaaggtcggactgctgtattagtagcagttgatgatgagctgtgtggcttgatagccattgcagacacagtgaagcctgaagcagaactggctatccatattctgaaatctatgggcttagaagtagttctgatgactggagacaacagtaaaacagctagatctattgcttctcaggttggcattactaaggtgtttgctgaagttctaccttctcacaaggttgctaaagtgaagyaacttcaagaggaggggaaacgggtagcaatggtgggagatrgaatcaatgactccccagctctggcaatggctaatgtgggaattgctattggcacaggcacagatgtagccattgaagcagctgatgtggttttgataaggaatgatcttctggatgtagtggcaagtattgacttatcaagaragacagtcaagaggattcggataaattttgtctttgctctaatttataatctggttggaattcccatagctgctggagtttttatgcccattggtttggttttgcagccctggatgggatctgcagcaatggctgcttcatctgtttctgtagtactttcttctctcttccttaaactttacaggaaaccaacttacgagagttatgaactgcctgcccggagccagataggacagaagagtccttcagaaatcagcgttcatgttggaatagatgatacctcaaggaattctcctaaactgggtttgctggaccggattgttaattatagcagagcctctrtaaactcactactgtctgataaacgctccctaaacagtgttgttaccagtgaacctgacaagcactcactcctggtgggagacttcagggaagatgatgacactgcattataaaaggccatggagagtgctgccagtttaacttgtcatgcastgacacagcattcatgatgttaccttcacttttcaaaatattgtagaaggatttttctcatgctcttatattagggattctatttgagttgcgtttatctgttggcaaaaatatctttttcaaggcatcagctctgaacctagctttatttaaactgaatttccagtatatttttgttttcactaacaacagataaggtagagcagtgaggtttacaacaagccctacaattagagattgctgaactgctgctaaagtgattttttttttatttgaccaaaaaaaaaaaggcccaagaagaagaaaatgaaaaatttgaagatttgagagcatgaagatattcatgcttttgaactcaaaatattgaagatactctcaagcctgtatccctgccccactggggagcaatgactttcaaagcactgtgtataaaacatctagttttagaagggaaacagttgaaactgtttaaaaatagatgtgccttatttattgcaggctttctttcccccattctccctgcatccttgtccttgcaggtgcttttttagatgctccaatatgtcttcttttgttattttctttcgagctaaccaagtttaggtggtttttcattgattaaaaataactgacaactgttctaatattttgctcctttttaaattttgtagctcaaaagaccttaaaggtctgtagggttccctgcctcccatctttccactgttgtaaaaagtatatcaaattattccttcaagtttcctagctctgtgctcagtttcagttcactcctgccaagttggactctaagttattcttcatgtagtctgctgatctcagtctggaaacttaacattatgagccttttctgctcaaaaaattttcaaagattaaaactattatacatatacaggtcatataaaattacctggattcactaaatttgtttgttgttgttgttgttgttgttgttgttgttgagacagagtcttgttttgcagcccaggctggagtgcagtggcaccatcttggctcactgcaacctctgcctaccggattcaaggaattctccctgcctcagcctcctgagtagctaggattacaggtgcctgccaccacacccggctaattttcatatttttcagtagagacggggtttcgccatgttggctagcctggtcttaaactcctaacctcaggtgatccacccgccttggcctcccaaagtgctgggattacaggtgtgagcctccatgcccagcctaaatttgtattttttgaattgagtataatcactttgctagtatatataatttaatagattttatttatcttttagtgtttcagataacctctcaaaaagactttaaaataatgctattacacaaagctgcatttaccaaaaaatacagtaaaatcataatacagaaactaaaatttccctaggttatgacgctttttagctaaatatatactcttctctagtttaaaacatttgaacttgcctagttagtgtggttggcaaatttaggagcttgttcccattgccaaatggatttagaaattcccttgtgagtgcctggtagctaatacactggtcagagatctggtacttgtaagactatttaaatttctttgttagttgcaagatggatttcatatgcagaatatgtaaatgaagaggactcataagtaaattcctaacattttgttcccattaccagaagcaaagctgctgctaacccaacatctggcacataggatttgtactcggtaaatgtyagttcttttctccccttgaggtcagtaataaatacaaaaaaatcatttttctagagcagagtcttaaaatcaggtgggggtaggggatggasttcttcctttcctaccccttttctcttttatcctttcatatatacacaygcaaagtttacaaccttattccatgctgtctttcagatttagaaaagatctaatttctgtctcagctgtcttaaagagagaactgaagcttttgatgaaggtgctattaatctagaaaggcaaacccatttcactgaaatatcaatgggtttgcatatctaggccctttttttagaccaatgcctatgccatcctccatgctttcagtttgagttttattatttattattttaattccagtggcccatcttataatacaacttgtttcttctagaagacagagctgatagggtaaatgttgaaaaaagaagcatgcctccttctccctcccacccacctcaagcagttgaacacagccagttattcttccattattatgtgtaccttggagtcatcctcttggtcttgtattcatattgtgggacagtgggaatagcagcttgtagtattgaaataatcaaagagataatttcagctcttacaacaagaacagaaaacatgctaattagaaaaagtcctgctttaagtaatatgtagccacatttgaatcctctaccacaagtctttttkgcaatcttgaactttcattagcttcaaagagaagctgtmtttacaggagaaagaggtgattatggagggaatcaaaawtactgctttcagytagtagctagctttwagtcaggagttagtaatgagaaattttataaatgtgtatttctgtgtattcacatacatatatatatacacacatatatatgtacatacacatacatacatattaccatactgaagggaaatggatttatatttgaatttgatatttgaatatttgaagttctctatttatatttcatttatcactcttctgtattcactcagcaaccatgcccttagtctgaagataacaaggatactttaatatccagtgccggttcagactcacctatgtggcaccttaaacttaaatatccaaagatgccttttgaatttcaaagattaaaacacagctagagtagtagtattgtagtctcaagatgtatggtgtgtcatttgtgaaaatagaaacgttatttttcctagtttagtatcaacattttagaatgtcaaatttgatgccttgtgaacaagtaattttatattgtgctttaattttttaaaaagtattctttattcatatgtatagaatgcttaaaatagcactgtagacaagatgtttccaaaactttaagtgcgcatatcttttctgtatacagcttaaaatcaaaaatgtatgttaagagaattttttctattacttatggatcatgctttaaaatgatttttcttgatatttattttactccattttgtttttttctctgggtgaggcatctggttactggttattttaaaaagaataaagacattcctggaatcactccttttgggtttttgtttgttttgtttcttttctacatttttaagtattattttacaaaatagaaaaaatatagattcatgccaaattattacctatttttacactaactttctgcagtccctccatctggtatgagtaaccagatagagcacaaagcatgagttcttgttcttcagttaaaagagcttctttcacagtgttgataacaaatgccttttgtagccaaaaccaggcgtctcaaccttacgtttttagttaaagaaatgtttagctaaacgytgttgaacattgattgtttggtaccgaaaacagcagtggacgatgttgtgcaatatccatctactgtagttaagatattcagtagtttgtttttcataagcatgtaattgatcatatttctgccaaggatgtgccttcaactttataattatagtgttgtaaaata

SEQ ID NO: 3010 - DNA, 2149 bp, Homo sapiens
atgactgcagctcatgcaaaagctctcatctcttacctggaattagaagaggcacccaagctcctgctgggatcagaggctatcctggccaacccscagtctgcttttctaacatgtaacattagcagagaccatcatttatccggatctgtgaagcctcccagaagagmctgcaaggtgaacagcagccaaaaatcagtgctgtggaaaaatgtgagcttctacctcacatgcctcctttcctgtttccygcagtgttcagagatggctactcaaggtcatggttaccctcacacacagattctgaaggctactcttggctacaattcaggtaatgtccaacagggcaaagtgagagtgtcctgttttcatgcagtaaagaaggcaatgcagtatggcttccttaatttcaactcatttaaccttgatgaatatgaacactatgaaaaagcagaaaacggagatttaaattggctaataccagaccgatttattgccttctgtggacctcattcaagagccagacttgaaagtggttaccaccaacattctcccgagacttatattcaatattttaagaatcacaatgttactaccattattcgtctgaataaaaggatrtatgatgccaaacgctttacggatgctggcttcgatcaccatgatcttttctttgcrgatggcagcacccctactgatgccattgtcaaaagatttctggatatctgtgaaaatgctgagggtgccattgcagtacattgtaaagctggccttggtcgcacaggcactctgatagcctgctacatcatgaagcattacaggatgacagcagccgagaccattgcgtgggtaaggatctgcagacctggcttggtgatcgggcctcmgcagcagtttttggtgatgaagcaaacaagcctctggctggaaggggactattttcgtcagargttaaaggggcaggagaatggacaacacagagcagccttctccaaacttctctctggtgttgatgacatttccataaatggggtcgagaatcaagaccagcaagaacccaaaccttacrgtgatgaygacgaaatcaatggagtgacacaaggtgatagaagtcgggccctgaaaaggcraagacaatcaaaaacaaacgatattcttctcccatctcccctggctgtgctgacctttacactgtgtagtgttgtcatctggtggattgtttgtgactacattcttcccatcctgctatytaaaaykgttttgcattaagtaaaaacctgtgaccagaactgaaggaagactctaggaactgaaaactgcaacagaaattagcacaatttgaaaacagtgtaaatacccaagccctctggtacycagggagctggctggtctgtggtgcatgtgtgtccttgtgatggcaagcattgtagttgmtggccttcagaagaattgaggatctgatggaggttttttaatgtatttattttctgttcagcttgygaccctgtgtcaaaatttgtaaagatacaaaaggcattactgaaatggtactttctgtaatttgatactatttggctttaycatcttcacttgactgtttgtaatactgtagtaatattaactctgataagtacccaagctgcttgtcttctaccaaagagtgctttattaacaagaatctgtgaaaaccacattttaaacactgttgcatgttgtaataycaggtgataccttggtaacctaaaacttgcaagagaatattartggtagctttagaagactcaggaggagaaactgacttcagagytggaagatgttgcaagtcattcctttttctgtcctttagggactgaagaactgggaggttgcccattgtttggttgccagtcatacaaattaaaatcatatttccttccatgcatggaaaaaacacactattggtttttcgccttggaaacagcaatcycaaataatgtcggctttaaaaaaaaaawgttaccgcttttttagagtccttctctgtaayattggatttttttttccttatgagatcagcctaagkccattgataaggcctgtgatctcagtaacaatgatctgcttctgaatctcactgytgcctttggctagggaacacaactagtaactc

SEQ ID NO: 3011 - DNA, 2003 bp, Homo sapiens
tccccttcctgtgtcctgttttcatgcagtaaagaaggcaatgcagtatggcttccttaatttcaactcatttaaccttgatgaatatgaacactatgaaaaagcagaaaacggagatttaaattggctaataccagaccgatttattgccttctgtggacctcattcaagagccagacttgaaagtggttaccaccaacattctcccgagacttatattcaatattttaagaatcacaatgttactaccattattcgtctgaataaaaggatrtatgatgccaaacgctttacggatgctggcttcgatcaccatgatcttttctttgcrgatggcagcacccctactgatgccattgtcaaaagatttctggatatctgtgaaaatgctgagggtgccattgcagtacattgtaaagctggccttggtcgcacaggcactctgatagcctgctacatcatgaagcattacaggatgacagcagccgagaccattgcgtgggtaaggatctgcagacctggcttggtgatcgggcctcmgcagcagtttttggtgatgaagcaaacaagcctctggctggaaggggactattttcgtcagargttaaaggggcaggagaatggacaacacagagcagccttctccaaacttctctctggtgttgatgacatttccataaatggggtcgagaatcaagaccagcaagaacccaaaccttacrgtgatgaygacgaaatcaatggagtgacacaaggtgatagaagtcgggccctgaaaaggcraagacaatcaaaaacaaacgatattagatagctgcttctctccatttcaaggactaaaaykgttttgcattaagtaaaaacctgtgaccagaactgaaggaagactctaggaactgaaaactgcaacagaaattagcacaatttgaaaacaaaacaaaattgcaaaagacttagttgctttccacctaagaagctaatcaatggrgaaaatgtccactggggtttcagtaatgaacttttgagtttgggtgcaagcaaatgtaccaagactcaaagaaaggcccagctctcaagctgaatgacaaaaatgctgttgtaaatttagtctcaggtgtaaatacccaagccctctggtacycagggagctggctggtctgtggtgcatgtgtgtccttgtgatggcaagcattgtagttgmtggccttcagaagaattgaggatctgatggaggttttttaatgtatttattttctgttcagcttgygaccctgtgtcaaaatttgtaaagatacaaaaggcattactgaaatggtactttctgtaatttgatactatttggctttaycatcttcacttgactgtttgtaatactgtagtaatattaactctgataagtacccaagctgcttgtcttctaccaaagagtgctttattaacaagaatctgtgaaaaccacattttaaacactgttgcatgttgtaataycaggtgataccttggtaacctaaaacttgcaagagaatattartggtagctttagaagactcaggaggagaaactgacttcagagytggaagatgttgcaagtcattcctttttctgtcctttagggactgaagaactgggaggttgcccattgtttggttgccagtcatacaaattaaaatcatatttccttccatgcatggaaaaaacacactattggtttttcgccttggaaacagcaatcycaaataatgtcggctttaaaaaaaaaawgttaccgcttttttagagtccttctctgtaayattggatttttttttccttatgagatcagcctaagkccattgataaggcctgtgatctcagtaacaatgatctgcttctgaatctcactgytgcctttggctagggaacacaactagtaactctgcagagtgccttctcccgcaaccctactggaamacagcagagtctgtgccatgaagaaattagagaaacagaattgtttygctgct

SEQ ID NO: 3012 - DNA, 2985 bp, Homo sapiens
atgactgcagctcatgcaaaagctctcatctcttacctggaattagaagaggcacccaagctcctgctgggatcagaggctatcctggccaacccscagtctgcttttctaacatgtaacattagcagagaccatcatttatccggatctgtgaagcctcccagaagagmctgcaaggtgaacagcagccaaaaatcagtgctgtggaaaaatgtgagcttctacctcacatgcctcctttcctgtttccygcagtgttcagagatggctactcaaggtcatggttaccctcacacacagattctgaaggctactcttggctacaattcaggtaatgtccaacagggcaaagtgagagtgtcctgttttcatgcagtaaagaaggcaatgcagtatggcttccttaatttcaactcatttaaccttgatgaatatgaacactatgaaaaagcagaaaacggagatttaaattggctaataccagaccgatttattgccttctgtggacctcattcaagagccagacttgaaagtggttaccaccaacattctcccgagacttatattcaatattttaagaatcacaatgttactaccattattcgtctgaataaaaggatrtatgatgccaaacgctttacggatgctggcttcgatcaccatgatcttttctttgcrgatggcagcacccctactgatgccattgtcaaaagatttctggatatctgtgaaaatgctgagggtgccattgcagtacattgtaaagctggccttggtcgcacaggcactctgatagcctgctacatcatgaagcattacaggatgacagcagccgagaccattgcgtgggtaaggatctgcagacctggcttggtgatcgggcctcmgcagcagtttttggtgatgaagcaaacaagcctctggctggaaggggactattttcgtcagargttaaaggggcaggagaatggacaacacagagcagccttctccaaacttctctctggtgttgatgacatttccataaatggggtcgagaatcaagaccagcaagaacccaaaccttacrgtgatgaygacgaaatcaatggagtgacacaaggtgatagaagtcgggccctgaaaaggcraagacaatcaaaaacaaacgatattcttctcccatctcccctggctgtgctgacctttacactgtgtagtgttgtcatctggtggattgtttgtgactacattcttcccatcctgctatyctgactcraagatttcagaacatagactaaaaykgttttgcattaagtaaaaacctgtgaccagaactgaaggaagactctaggaactgaaaactgcaacagaaattagcacaatttgaaaacaaaacaaaattgcaaaagacttagttgctttccacctaagaagctaatcaatggrgaaaatgtccactggggtttcagtaatgaacttttgagtttgggtgcaagcaaataatgactcaaagaaaggcccagctctcaagctgaatgacaaaaatgctgttgtaaatttagtctcaggtgtaaatacccaagccctctggtacycagggagctggctggtctgtggtgcatgtgtgtccttgtgatggcaagcattgtagttgmtggccttcagaagaattgaggatctgatggaggttttttaatgtatttattttctgttcagcttgygaccctgtgtcaaaatttgtaaagatacaaaaggcattactgaaatggtactttctgtaatttgatactatttggctttaycatcttcacttgactgtttgtaatactgtagtaatattaactctgataagtacccaagctgcttgtcttctaccaaagagtgctttattaacaagaatctgtgaaaaccacattttaaacactgttgcatgttgtaataycaggtgataccttggtaacctaaaacttgcaagagaatattartggtagctttagaagactcaggaggagaaactgacttcagagytggaagatgttgcaagtcattcctttttctgtcctttagggactgaagaactgggaggttgcccattgtttggttgccagtcatacaaattaaaatcatatttccttccatgcatggaaaaaacacactattggtttttcgccttggaaacagcaatcycaaataatgtcggctttaaaaaaaaaawgttaccgcttttttagagtccttctctgtaayattggatttttttttccttatgagatcagcctaagkccattgataaggcctgtgatctcagtaacaatgatctgcttctgaatctcactgytgcctttggctagggaacacaactagtaactctgcagagtgccttctcccgcaaccctactggaamacagcagagtctgtgccatgaagaaattagagaaacagaattgtttygctgctaaaaaaaaaaagggggggcccaaaataaaagaatatttagtactcacctcagttccttccataagaagtgggtggtttaatgattgttaacccatttttgcctgtgctgggagcatggagggctgagatgttgacaggcagtgggaaacaaatgccctcctaagtcacaaggcgtgcgccagatcaggaggcaactccattttaagaagctgcctttttcataaaactgtaagaaaccaaagcagttggaataaacaagttaaagtctttaatgcaaaaagtaattgaaaggcagtgcctccattttggtgtactttcttggaagaaagtacgaaattgaccggcatcakgagagacggaagatgccgtattctcagccaaacaagtgactctttccctgccaagcactayggggtggggtcaggctagcttttaaacactggggactggatcacagaaaaacagtggttttctgtccctggaaatgaataggcacaaagacccacttggctgtgggaagaccactcttcaataagattttggtgg

SEQ ID NO: 3013 - DNA, 1985 bp, Homo sapiens
cttcctgtgtcctgttttcatgcagtaaagaaggcaatgcagtatggcttccttaatttcaactcatttaaccttgatgaatatgaacactatgaaaaagcagaaaacggagatttaaattggctaataccagaccgatttattgccttctgtggacctcattcaagagccagacttgaaagtggttaccaccaacattctcccgagacttatattcaatattttaagaatcacaatgttactaccattattcgtctgaataaaaggatrtatgatgccaaacgctttacggatgctggcttcgatcaccatgatcttttctttgcrgatggcagcacccctactgatgccattgtcaaaagatttctggatatctgtgaaaatgctgagggtgccattgcagtacattgtaaagctggccttggtcgcacaggcactctgatagcctgctacatcatgaagcattacaggatgacagcagccgagaccattgcgtgggtaaggatctgcagacctggcttggtgatcgggcctcmgcagcagtttttggtgatgaagcaaacaagcctctggctggaaggggactattttcgtcagargttaaaggggcaggagaatggacaacacagagcagccttctccaaacttctctctggtgttgatgacatttccataaatggggtcgagaatcaagaccagcaagaacccaaaccttacrgtgatgaygacgaaatcaatggagtgacacaaggtgatagaagtcgggccctgaaaaggcraagacaatcaaaaacaaacgatattcttctcccctgcttctctccatttcaaggactaaaaykgttttgcattaagtaaaaacctgtgaccagaactgaaggaagactctaggaactgaaaactgcaacagaaattagcacaatttgaaaacaaaacaaaattgcaaaagacttagttgctttccacctaagaagctaatcaatggrgaaaatgtccactggggtttcagtaatgaacttttgagtttgggtgcaagcaaataatgactcaaagaaaggcccagctctcaagctgaatgacaaaaatgctgttgtaaatttagtctcaggtgtaaatacccaagccctctggtacycagggagctggctggtctgtggtgcatgtgtgtccttgtgatggcaagcattgtagttgmtggccttcagaagaattgaggatctgatggaggttttttaatgtatttattttctgttcagcttgygaccctgtgtcaaaatttgtaaagatacaaaaggcattactgaaatggtactttctgtaatttgatactatttggctttaycatcttcacttgactgtttgtaatactgtagtaatattaactctgataagtacccaagctgcttgtcttctaccaaagagtgctttattaacaagaatctgtgaaaaccacattttaaacactgttgcatgttgtaataycaggtgataccttggtaacctaaaacttgcaagagaatattartggtagctttagaagactcaggaggagaaactgacttcagagytggaagatgttgcaagtcattcctttttctgtcctttagggactgaagaactgggaggttgcccattgtttggttgccagtcatacaaattaaaatcatatttccttccatgcatggaaaaaacacactattggtttttcgccttggaaacagcaatcycaaataatgtcggctttaaaaaaaaaawgttaccgcttttttagagtccttctctgtaayattggatttttttttccttatgagatcagcctaagkccattgataaggcctgtgatctcagtaacaatgatctgcttctgaatctcactgytgcctttggctagggaacacaactaagtgccttctcccgcaaccctactggaamacagcagagtctgtgccatgaagaaattagagaaacagaattgtttygctgct

SEQ ID NO: 3014 - DNA, 4021 bp, Homo sapiens
cagcggccgggaaggggcggtgcgggaggcggggtgtggggcggtagtgtgggccctgttcctgcccgcgsggtgttccgcattctgcaagcctccggagcgcacgtcggcagtcggctccctcgttgaccgaatcaccgacctctctccccagctgtatttccaaaatgtcgctttctaacaagctgacgctggacaagctggacgttaaagggaagcgggtcgttatgagagtcgacttcaatgttcctatgaagaacaaccagataacaaacaaccagaggattaaggctgctgtcccaagcatcaaattctgcttggacaatggagccaagtcggtagtccttatgagccacctaggccggcctgatggtgtgcccatgcctgacaagtactccttagagccagttgctgtagaactcaaatctctgctgggcaagtaagtgccaggctctggtgctggtagactttgtggcgggggaagttgtcaagcacgttgttactggtttttaactttcatactgctcaagtgtcttcatctcttcctcttctcagggatgttctgttcttgaaggactgtgtaggcccagaagtggagaaagcctgtgccaacccagctgctgggtctgtcatcctgctggagaacctccgctttcatgtggaggaagaagggaagggaaaagatgcttctgggaacaaggttaaagccgagccagccaaaatagaagctttccgagcttcactttccaagctagkggatgtctatgtcaatgatgcttttggcactgctcacagagcccacagctccatggtaggagtcaatctgccacagaaggctggtgggtttttgatgaagaaggagctgaactactttgcaaaggccttggagagcccagagcgacccttcctggccatcctgggcggagctaaagttgcagacaagatccagctcatcaataatatgctggacaaagtcaatgagatgattattggtggtggaatggcttttaccttccttaaggtgctcaacaacatggagattggcacttctctgtttgatgaagagggagccaagattgtcaaagacctaatgtccaaagctgagaagaatggtgtgaagattaccttgcctgttgactttgtcactgctgacaagtttgatgagaatgccaagactggccaagccactgtggcttctggcatacctgctggctggatgggcttggactgtggtcctgaaagcagcaagaagtatgctgaggctgtcactcgggctaagcagattgtgtggaatggtcctgtgggggtatttgaatgggaagcttttgcccggggaaccaaagctctcatggatgaggtggtgaaagccacttctaggggctgcatcaccatcataggtggtggagacactgccacttgctgtgccaaatggaacacggaggataaagtcagccatgtgagcactgggggtggtgccagtttggagctcctggaaggtaaagtccttcctggggtggatgctctcagcaatatttagtactttcctgccttttagttcctgtgcacagcccctaagtcaacttagcattttctgcatctccacttggcattagctaaaaccttccatgtcaagattcagctagtggccaagagatgcagtgccaggaacccttaaacagttgcacagcatctcagctcatcttcactgcaccctggatttgcatacattcttcaagatcccatttgaattttttagtgactaaaccattgtgcattctagagtgcatatatttatattttgcctgttaaaaagaaagtgagcagtgttagcttagttctcttttgatgtaggttattatgattagctttgtcactgtttcactactcagcatggaaacaagatgaaattccatttgtaggtagtgagacaaaattgatgatccattaagtaaacaataaaagtgtccattgaaaccgtgatttttttttttttcctgtcatactttgttaggaagggtgagaatagaatcttgaggaacggatcagatgtctatattgctgaatgcaagaagtggggcagcagcagtggagagatgggacaattagataaatgtccattctttatcaagggcctactttatggcagacattgtgctagtgcttttattctaacttttatttttatcagttacacatgatcataatttaaaaagtcaaggcttataacaaaaaagccccagcccattcctcccattcaagattcccactccccagaggtgaccactttcaactcttgagtttttcaggtatatacctccatgtttctaagtaatatgcttatattgttcacttcttttttttttwttttttaaagaaatctatttcataccatggaggaaggctctgttccacatatatttccacttcttcattctctcggtatagttttgtcacaattatagattagatcaaaagtctacataactaatacagctgagctatgtagtatgctatgattaaatttacttatgtaacttttattgtctttggcattaacagtgtttcaaaaaattttctgtgtatacccatcagtgattcattcccaaatcttctagaagcataagtgtctcaatatattaaaacatattgaataatccttgttagagttatccctgcaggagtccttagtgctcctttatccaatttgtacttgatgccctctaggcagggtgtacagctagctgttgctctggtatttcctataaccttcttggggatttcttttacctcctgtgttagactcctgttttctggattcccccttttccctctttcttggtctactttttgtagaacacaagactctactagcttcctgagaaagggtgcctgggaggcaaaatctctaagactttgtaagtctgaaaatgtctttattcgacccttatacttgattcctagtttggctatatatagaattttagcctgagtatcactttttgagactcgaagccactgtttcattgtcactattgagaatctaaatggccattcggattctttcatcatctttataattttaccttcctatttctttcctgtccttttaatggagttttgggagagagcagaggtaaacatgatttgaaaaagccatgtctgaccagaaattctgtgctggmaagatatgtatttcacctttagggacaaagaaataaacttttggacaggaccacagagctagtaagtaacagcagggattcaagtccaggtttgtctggttccagtggctgatgcttttccaatgtgcctccgtccctgacatgatgcttctaggctatagatgcttctagactctatccctgacatgatgcttctagactattttgtttaaccctggatagaatagcaaaagaaaattttggtggttgctctaaacaaaacasaaatttgaaagctcaagttttttcttcatttgtattttagttaatactgtacccatatttgtagttaattttaaattgtaccatgtttctgcatacctctatgggtactcaggaattctagtccaatttttgtgactttttcctactgattacctttcctccaacgttttaaaaattatttcaaatggaactgaaagaagcataaactcccataaacccagcacctagactctacaattgccaacattatctatccaacaatctctgactgtaccttttaagtactttctactggactgtttccaggatcacccctcatttatttgggttgttaacctaaagaatgaatgggggaatctccagtcataaacaacttgtcaattaggcaaatatttgagttccttctatgtgcttaaagacgtgatagagggaatataagagcatttatgttctgaaggaatttttaacctaaccaaagaagatagtagataacttgtgtgcatataagctagaacagtataaggggccgggcatggtggcttacgcctgtratcccaggactttgggaggccrag

SEQ ID NO: 3015 - DNA, 3905 bp, Homo sapiens
cagcggccgggaaggggcggtgcgggaggcggggtgtggggcggtagtgtgggccctgttcctgcccgcgsggtgttccgcattctgcaagcctccggagcgcacgtcggcagtcggctccctcgttgaccgaatcaccgacctctctccccagctgtatttccaaaatgtcgctttctaacaagctgacgctggacaagctggacgttaaagggaagcgggtcgttatgagagtcgacttcaatgttcctatgaagaacaaccagataacaaacaaccagaggattaaggctgctgtcccaagcatcaaattctgcttggacaatggagccaagtcggtagtccttatgagccacctaggccggcctgatggtgtgcccatgcctgacaagtactccttagagccagttgctgtagaactcaaatctctgctgggcaaggatgttctgttcttgaaggactgtgtaggcccagaagtggagaaagcctgtgccaacccagctgctgggtctgtcatcctgctggagaacctccgctttcatgtggaggaagaagggaagggaaaagatgcttctgggaacaaggttaaagccgagccagccaaaatagaagctttccgagcttcactttccaagctagkggatgtctatgtcaatgatgcttttggcactgctcacagagcccacagctccatggtaggagtcaatctgccacagaaggctggtgggtttttgatgaagaaggagctgaactactttgcaaaggccttggagagcccagagcgacccttcctggccatcctgggcggagctaaagttgcagacaagatccagctcatcaataatatgctggacaaagtcaatgagatgattattggtggtggaatggcttttaccttccttaaggtgctcaacaacatggagattggcacttctctgtttgatgaagagggagccaagattgtcaaagacctaatgtccaaagctgagaagaatggtgtgaagattaccttgcctgttgactttgtcactgctgacaagtttgatgagaatgccaagactggccaagccactgtggcttctggcatacctgctggctggatgggcttggactgtggtcctgaaagcagcaagaagtatgctgaggctgtcactcgggctaagcagattgtgtggaatggtcctgtgggggtatttgaatgggaagcttttgcccggggaaccaaagctctcatggatgaggtggtgaaagccacttctaggggctgcatcaccatcataggtggtggagacactgccacttgctgtgccaaatggaacacggaggataaagtcagccatgtgagcactgggggtggtgccagtttggagctcctggaaggtaaagtccttcctggggtggatgctctcagcaatatttagtactttcctgccttttagttcctgtgcacagcccctaagtcaacttagcattttctgcatctccacttggcattagctaaaaccttccatgtcaagattcagctagtggccaagagatgcagtgccaggaacccttaaacagttgcacagcatctcagctcatcttcactgcaccctggatttgcatacattcttcaagatcccatttgaattttttagtgactaaaccattgtgcattctagagtgcatatatttatattttgcctgttaaaaagaaagtgagcagtgttagcttagttctcttttgatgtaggttattatgattagctttgtcactgtttcactactcagcatggaaacaagatgaaattccatttgtaggtagtgagacaaaattgatgatccattaagtaaacaataaaagtgtccattgaaaccgtgatttttttttttttcctgtcatactttgttaggaagggtgagaatagaatcttgaggaacggatcagatgtctatattgctgaatgcaagaagtggggcagcagcagtggagagatgggacaattagataaatgtccattctttatcaagggcctactttatggcagacattgtgctagtgcttttattctaacttttatttttatcagttacacatgatcataatttaaaaagtcaaggcttataacaaaaaagccccagcccattcctcccattcaagattcccactccccagaggtgaccactttcaactcttgagtttttcaggtatatacctccatgtttctaagtaatatgcttatattgttcacttcttttttttttwttttttaaagaaatctatttcataccatggaggaaggctctgttccacatatatttccacttcttcattctctcggtatagttttgtcacaattatagattagatcaaaagtctacataactaatacagctgagctatgtagtatgctatgattaaatttacttatgtaacttttattgtctttggcattaacagtgtttcaaaaaattttctgtgtatacccatcagtgattcattcccaaatcttctagaagcataagtgtctcaatatattaaaacatattgaataatccttgttagagttatccctgcaggagtccttagtgctcctttatccaatttgtacttgatgccctctaggcagggtgtacagctagctgttgctctggtatttcctataaccttcttggggatttcttttacctcctgtgttagactcctgttttctggattcccccttttccctctttcttggtctactttttgtagaacacaagactctactagcttcctgagaaagggtgcctgggaggcaaaatctctaagactttgtaagtctgaaaatgtctttattcgacccttatacttgattcctagtttggctatatatagaattttagcctgagtatcactttttgagactcgaagccactgtttcattgtcactattgagaatctaaatggccattcggattctttcatcatctttataattttaccttcctatttctttcctgtccttttaatggagttttgggagagagcagaggtaaacatgatttgaaaaagccatgtctgaccagaaattctgtgctggmaagatatgtatttcacctttagggacaaagaaataaacttttggacaggaccacagagctagtaagtaacagcagggattcaagtccaggtttgtctggttccagtggctgatgcttttccaatgtgcctccgtccctgacatgatgcttctaggctatagatgcttctagactctatccctgacatgatgcttctagactattttgtttaaccctggatagaatagcaaaagaaaattttggtggttgctctaaacaaaacasaaatttgaaagctcaagttttttcttcatttgtattttagttaatactgtacccatatttgtagttaattttaaattgtaccatgtttctgcatacctctatgggtactcaggaattctagtccaatttttgtgactttttcctactgattacctttcctccaacgttttaaaaattatttcaaatggaactgaaagaagcataaactcccataaacccagcacctagactctacaattgccaacattatctatccaacaatctctgactgtaccttttaagtactttctactggactgtttccaggatcacccctcatttatttgggttgttaacctaaagaatgaatgggggaatctccagtcataaacaacttgtcaattaggcaaatatttgagttccttctatgtgcttaaagacgtgatagagggaatataagagcatttatgttctgaaggaatttttaacctaaccaaagaagatagtagataacttgtgtgcatataagctagaacagtataaggggccgggcatggtggcttacgcctgtratcccaggactttgggaggccrag

SEQ ID NO: 3016 - DNA, 2364 bp, Homo sapiens
cagcggccgggaaggggcggtgcgggaggcggggtgtggggcggtagtgtgggccctgttcctgcccgcgsggtgttccgcattctgcaagcctccggagcgcacgtcggcagtcggctccctcgttgaccgaatcaccgacctctctccccagctgtatttccaaaatgtcgctttctaacaagctgacgctggacaagctggacgttaaagggaagcgggtcgttatgagagtcgacttcaatgttcctatgaagaacaaccagataacaaacaaccagaggattaaggctgctgtcccaagcatcaaattctgcttggacaatggagccaagtcggtagtccttatgagccacctaggccggcctgatggtgtgcccatgcctgacaagtactccttagagccagttgctgtagaactcaaatctctgctgggcaaggatgttctgttcttgaaggactgtgtaggcccagaagtggagaaagcctgtgccaacccagctgctgggtctgtcatcctgctggagaacctccgctttcatgtggaggaagaagggaagggaaaagatgcttctgggaacaaggttaaagccgagccagccaaaatagaagctttccgagcttcactttccaagctagkggatgtctatgtcaatgatgcttttggcactgctcacagagcccacagctccatggtaggagtcaatctgccacagaaggctggtgggtttttgatgaagaaggagctgaactactttgcaaaggccttggagagcccagagcgacccttcctggccatcctgggcggagctaaagttgcagacaagatccagctcatcaataatatgctggacaaagtcaatgagatgattattggtggtggaatggcttttaccttccttaaggtgctcaacaacatggagattggcacttctctgtttgatgaagagggagccaagattgtcaaagacctaatgtccaaagctgagaagaatggtgtgaagattaccttgcctgttgactttgtcactgctgacaagtttgatgagaatgccaagactggccaagccactgtggcttctggcatacctgctggctggatgggcttggactgtggtcctgaaagcagcaagaagtatgctgaggctgtcactcgggctaagcagattgtgtggaatggtcctgtgggggtatttgaatgggaagcttttgcccggggaaccaaagctctcatggatgaggtggtgaaagccacttctaggggctgcatcaccatcataggtggtggagacactgccacttgctgtgccaaatggaacacggaggataaagtcagccatgtgagcactgggggtggtgccagtttggagctcctggaagttcctgtgcacagcccctaagtcaacttagcattttctgcatctccacttggcattagctaaaaccttccatgtcaagattcagctagtggccaagagatgcagtgccaggaacccttaaacagttgcacagcatctcagctcatcttcactgcaccctggatttgcatacattcttcaagatcccatttgaattttttagtgactaaaccattgtgcattctagagtgcatatatttatattttgcctgttaaaaagaaagtgagcagtgttagcttagttctcttttgatgtaggttattatgattagctttgtcactgtttcactactcagcatggaaacaagatgaaattccatttgtaggtagtgagacaaaattgatgatccattaagtaaacaataaaagtgtccattgaaaccgtgatttttttttttttcctgtcatactttgttaggaagggtgagaatagaatcttgaggaacggatcagatgtctatattgctgaatgcaagaagtggggcagcagcagtggagagatgggacaattagataaatgtccattctttatcaagggcctactttatggcagacattgtgctagtgcttttattctaacttttatttttatcagttacacatgatcataatttaaaaagtcaaggcttataacaaaaaagccccagcccattcctcccattcaagattcccactccccagaggtgaccactttcaactcttgagtttttcaggtatatacctccatgtttctaagtaatatgcttatattgttcacttcttttttttttwttttttaaagaaatctatttcataccatggaggaaggctctgttccacatatatttccacttcttcattctctcggtatagttttgtcacaattatagattagatcaaaagtctacataactaatacagctgagctatgtagtatgctatgattaaatttacttatgtaactttt

SEQ ID NO: 3017 - DNA, 4058 bp, Homo sapiens
cagcggccgggaaggggcggtgcgggaggcggggtgtggggcggtagtgtgggccctgttcctgcccgcgsggtgttccgcattctgcaagcctccggagcgcacgtcggcagtcggctccctcgttgaccgaatcaccgacctctctccccagctgtatttccaaaatgtcgctttctaacaagctgacgctggacaagctggacgttaaagggaagcgggtcgttatgagagtcgacttcaatgttcctatgaagaacaaccagataacaaacaaccagaggattaaggctgctgtcccaagcatcaaattctgcttggacaatggagccaagtcggtagtccttatgagccacctaggccggcctgatggtgtgcccatgcctgacaagtactccttagagccagttgctgtagaactcaaatctctgctgggcaaggatgttctgttcttgaaggactgtgtaggcccagaagtggagaaagcctgtgccaacccagctgctgggtctgtcatcctgctggagaacctccgctttcatgtggaggaagaagggaagggaaaagatgcttctgggaacaaggttaaagccgagccagccaaaatagaagctttccgagcttcactttccaagctagkggatgtctatgtcaatgatgcttttggcactgctcacagagcccacagctccatggtaggagtcaatctgccacagaaggctggtgggtttttgatgaagaaggagctgaactactttgcaaaggccttggagagcccagagcgacccttcctggccatcctgggcggagctaaagttgcagacaagatccagctcatcaataatatgctggacaaagtcaatgagatgattattggtggtggaatggcttttaccttccttaaggtgctcaacaacatggagattggcacttctctgtttgatgaagagggagccaagattgtcaaagacctaatgtccaaagctgagaagaatggtgtgaagattaccttgcctgttgactttgtcactgctgacaagtttgatgagaatgccaagactggccaagccactgtggcttctggcatacctgctggctggatgggcttggactgtggtcctgaaagcagcaagaagtatgctgaggctgtcactcgggctaagcagattgtgtggaatggtcctgtgggggtatttgaatgggaagcttttgcccggggaaccaaagctctcatggatgaggtggtgaaagccacttctaggggctgcatcaccatcataggtggtggagacactgccacttgctgtgccaaatggaacacggaggataaagtcagccatgtgagcactgggggtggtgccagtttggagctcctggaaggtaaagtccttcctggggtggatgctctcagcaatatttagtactttcctgccttttagttcctgtgcacagcccctaagtcaacttagcattttctgcatctccacttggcattagctaaaaccttccatgtcaagattcagctagtggccaagagatgcagtgccaggaacccttaaacagttgcacagcatctcagctcatcttcactgcaccctggatttgcatacattcttcaagatcccatttgaattttttagtgactaaaccattgtgcattctagagtgcatatatttatattttgcctgttaaaaagaaagtgagcagtgttagcttagttctcttttgatgtaggttattatgattagctttgtcactgtttcactactcagcatggaaacaagatgaaattccatttgtaggtagtgagacaaaattgatgatccattaagtaaacaataaaagtgtccattgaaaccgtgatttttttttttttcctgtcatactttgttaggaagggtgagaatagaatcttgaggaacggatcagatgtctatattgctgaatgcaagaagtggggcagcagcagtggagagatgggacaattagataaatgtccattctttatcaagggcctactttatggcagacattgtgctagtgcttttattctaacttttatttttatcagttacacatgatcataatttaaaaagtcaaggcttataacaaaaaagccccagcccattcctcccattcaagattcccactccccagaggtgaccactttcaactcttgagtttttcaggtatatacctccatgtttctaagtaatatgcttatattgttcacttcttttttttttwttttttaaagaaatctatttcataccatggaggaaggctctgttccacatatatttccacttcttcattctctcggtatagttttgtcacaattatagattagatcaaaagtctacataactaatacagctgagctatgtagtatgctatgattaaatttacttatgtaacttttattgtctttggcattaacagtgtttcaaaaaattttctgtgtatacccatcagtgattcattcccaaatcttctagaagcataagtgtctcaatatattaaaacatattgaataatccttgttagagttatccctgcaggagtccttagtgctcctttatccaatttgtacttgatgccctctaggcagggtgtacagctagctgttgctctggtatttcctataaccttcttggggatttcttttacctcctgtgttagactcctgttttctggattcccccttttccctctttcttggtctactttttgtagaacacaagactctactagcttcctgagaaagggtgcctgggaggcaaaatctctaagactttgtaagtctgaaaatgtctttattcgacccttatacttgattcctagtttggctatatatagaattttagcctgagtatcactttttgagactcgaagccactgtttcattgtcactattgagaatctaaatggccattcggattctttcatcatctttataattttaccttcctatttctttcctgtccttttaatggagttttgggagagagcagaggtaaacatgatttgaaaaagccatgtctgaccagaaattctgtgctggmaagatatgtatttcacctttagggacaaagaaataaacttttggacaggaccacagagctagtaagtaacagcagggattcaagtccaggtttgtctggttccagtggctgatgcttttccaatgtgcctccgtccctgacatgatgcttctaggctatagatgcttctagactctatccctgacatgatgcttctagactattttgtttaaccctggatagaatagcaaaagaaaattttggtggttgctctaaacaaaacasaaatttgaaagctcaagttttttcttcatttgtattttagttaatactgtacccatatttgtagttaattttaaattgtaccatgtttctgcatacctctatgggtactcaggaattctagtccaatttttgtgactttttcctactgattacctttcctccaacgttttaaaaattatttcaaatggaactgaaagaagcataaactcccataaacccagcacctagactctacaattgccaacattatctatccaacaatctctgactgtaccttttaagtactttctactggactgtttccaggatcacccctcatttatttgggttgttaacctaaagaatgaatgggggaatctccagtcataaacaacttgtcaattaggcaaatatttgagttccttctatgtgcttaaagacgtgatagagggaatataagagcatttatgttctgaaggaatttttaacctaaccaaagaagatagtagataacttgtgtgcatataagctagaacagtataaggggccgggcatggtggcttacgcctgtratcccaggactttgggaggccraggctggtctcgaactcctggcctcaagtgatcctcccgcctcggtctcccaaagtgctgggattacaggtgtgagccattgtaccctgccaataattgtgtatatgtacgggatataatgtgatgttctgatctatgtatagataaagattaaa

SEQ ID NO: 3018 - DNA, 5559 bp, Homo sapiens
ttgcactccggcctgggcaacagagcgagactccgtctcaaacaaacaaacaaaggaacgaaaacctccggtctccggcacggcaagctctgcgtgaattactttctccattgcaactcccctgtcttgataaatgggctctgtctaagcagcgggcaaggtgaactcgttgggctgttacaggaccagtgacagaccaagggcatgccactgaaggaatccctagacgcacccttctggatgtgagacaggcggatctcacccacgcctgccagcagctcctcggagaactgtgttcctgggtcagccctggcccagaggagcgccggggacccgcagagtgctgctgaagtcaaggctacaactcacctrggatctggggcgccagccctccggtgggcagggcgttctcctcccccaccccctccccgcacgatgacatcaagtgtttggcgttgagttgctccataaaagctgcccggggaagccaggagagcgaagggcggacgtactcgccacggcacccaggctgcgcgcacgcggtcccggtgtgcagctggagagcgagcrgccaccgggagcccccggcacagcccgcgcccgccccgcaggagcccgcgaagatgccccggcgcagcctgcacgcggcggccgtgctcctgctggtgatcttaaaggaacagccttccagcccggccccagtgaacggttccaagtggacttattttggtcctgatggggagaatagctggtccaagaagtacccgtcgtgtgggggcctgctgcagtcccccatagacctgcacagtgacatcctccagtatgacgccagcctcacgcccctcgagttccaaggctacaatctgtctgccaacaagcagtttctcctgaccaacaatggccattcagtgaagctgaacctgccctcggacatgcacatccagggcctccagtctcgctacagtgccacgcagctgcacctgcactgggggaacccgaatgacccgcacggctctgagcacaccgtcagcggacagcacttcgccgccgagctgcacattgtccattataactcagacctttatcctgacgccagcactgccagcaacaagtcagaaggcctcgctgtcctggctgttctcattgagatgggctccttcaatccgtcctatgacaagatcttcagtcaccttcaacatgtaaagtacaaaggccaggaagcattcgtcccgggattcaacattgaagagctgcttcyggagaggaccgctgaatattaccgctaccgggggtccctgaccacacccccttgcaaccccactgtgctctggacagttttccgaaaccccgtgcaaatttcccaggagcawctgctggctttggagacagccctgtactgcacacacatggacgacccttcccccagagaaatgatcaacaacttccggcaggtccagaagttcgatgagaggctggtatacacctccttctcccaagtgcaagtctgtactgcggcaggactgagtctgggcatcatcctctcactggccctggctggcattcttggcatctgtattgtggtggtggtgtccatttggcttttcagaaggaagagtatcaaaaaaggtgataacaagggagtcatttacaagccagccaccaagatggagactgaggcccacgcttgaggtccccggagctcccgggcacatccaggaaggaccttgctttggaccctacacacttcggctctctggacacttgcgacacctcaaggtgttctctgtagctcaatctgcaaacatgccaggcctcagggatcctctgctgggtgcctccttgccttgggaccatggccaccccagagccatccgatcgatggatgggatgcactctcagaccaagcagcaggaattcaaagytgcttgctgtaactgtgtgagattgtgaagtggtctgaattctggaatcacaaaccaagccatgctggtgggccattaatggttggaaaacactttcatccggggctttgccagagcgtgctttcaagtgtcctggaaaktctgctgcttctccaagctttcagacaagaatgtgcactctctgcttaggttttgcttgggaaactcaacttctttcytctggagacggggcatctccctctgatttccttctgctatgacaaaacctttaatctgcaccttacaactcggggacaaatggggacaggaaggatcaagttgtagagagaaaaagaaaacaagagatatacattgtgatatattagggacactttcacagtcctgtcctctggatcacagacactgcacagaccttagggaatggcaggttcaagttccacttcttggtggggatgagaagggagagagagctagagggacaaagagaatgagaagacatggatgatctgggagagtctcastttggaatcagaattggaatcacattctgtttatcaagccataatgtaaggacagaataatacaatattaagtccaaatccaacctcctgtcagtggagcagttatgttttatactctacagattttacaaataatgaggctgttccttgaaaatgtgttgttgctgtgtcctggaggagacatgagttccgagatgacccaatctgcctttgaatctggaggaaataggcagaaacaaaatgactgtagaacttattctctgtaggccaaatttcatttcagccacttctgcaggatccctactgccaacctggaatggagacttttatctacttctctctctctgaagatgtcaaatcgtggtttagatcaaatatatttcaagctataaaagcaggaggttatctgtgcagggggctggcatcatgtatttaggggcaagtaataatggaatgctactaagatactccatattcttccccgaatcacacagacagtttctgacaggcgcaactcctccattttcctcccgcaggygagaaccctgtggagatgagtcagtgccatgactgagaaggaaccgacccctagttgagagcaccttgcagttccccgagaactttctgattcacagtctcattttgacagcatgaaatgtcctcttgaagcatagctttttaaatatctttttccttctactcctccctctgactctaagaattctctcttctggaatcgcttgaacccaggaggcggaggttgcagtaagccaaggtcatgccactgcactctagcctgggtgacagagcgagactccatctcaaaaaaaaaaaaaaaaaaattattctgtaccatcacaacttttcacaacgatggcaagccttatgtcttgggagcctgttttgctaggcaaagttacaagtgacctaatgggagctcaaatgtgtgtgtgtctctctgtgtgtttgkgtgtgtgtgtgcactcaagacctctaacagcctcgaagcctggggtggcatcccggccttgccattagcatgcctcatgcatcatyagatgacaaggacaaccctcatgacgaagcaacatgaattagggggcctcttggccttggtccaaaattgtcaatcagaaatgaacataaaggactccagagcagtgggachgtctgtcaaaagactctgtatatcttttgtggatgagttttgtgagagaacagagagaccattgtacctggcacaagggctsttcatgaaaagggagacttactgggaggtgcaagacagtggcatttctcctctcctcttgctgctcagcacagccctggattgcagccccgaggctgagaccagacaaagcccgggaggcagaaagatgctccaagaaccaacactatcaatgtctttgcaaatcctcacaggattcctgtgggtccagctttggaactgggaaacctttcttcggatccgcactcattccactratgccagctgcccctgaaggatgccagtactgtggtgtgtgagtctcagcagccgcccacacgctcctaactctgctgcatggcagatgcctaggtggaaatagcaaaaacaaggcccaggctggggccagggccagaggggaaggccctggattctcactcatgtgagatcttgaatctctttctttgttctgtttgtttagttagtatcatctggtaaaatagttaaaaaacaacaaaaaactctgtatctgtttctagcatgtgctgcattgactctattaatcacatttcaaattcaccctacattcctctcctcttcactagcctctctgaaggtgtcctggccagccctggagaagcactggtgtctgcagcacccctcagttcctgtgcctcagcccacaggccactgtgataatggtctgtttagcacttctgtatttattgtaagaatgattataatgaagatacacactrtaactacaagaaattataaatgtttttcacatcaggctgttctttttttttttttggaggcgaggttaaagcattactatttgcaaagcactstgtagctccctgttatggggataggtaactaatcagaataataatgtcactcgcatccacttcttagaacctggctccaaaggaaaataagctgatagactcaatcactttcctgaggatggaggcctatggcatgtgtggctgcaggtcgcgaagctgcttaatggtgctgggaagcctagaggaattaaataaagaccctggaggaggtgggatcggagctgcaccttgaacaaatagctcagatttgaacagatggatggaaaagagggaggtgttcccaaccaaggggacatgatacagggaacaggtcctatgtctctttactcctgagagtattaaacctagtaggtgggcagcccctcttggttgcctgttaccttattttgaattctttttgcaaaacatactatcacccgtccaaataatcttttgtctaaatccagacttcacattctgactggggcaaaaagaggcagtccagtaaaggttataaaataggtaccatcattgtttgccttatttagaaaagcwtccaattttcactataatcaccctaagcctgagagaggtgaactgttcaagggtactttggctccagtgggtgacagtacctggcccagctttggaattgaaacatttctgatggtctgtrctctgctagaacacaggatgcttctgctctccctgctctggcatcctgccaggtgtcatggccacgcacaggcatgaagacagccgggaagccagagttcccacgaagcactcactccttggacttgctcccaccccactggggagagcactcctggagcaggaaatgagcatctctcatctccctgaattccacatccactggctgaatgatcagggaggcatagcagtgagagccataggtcggcagagggaactcaggccctcctttaggatggccatcacctcatctcaatccagccaaatcaaccatctagagcacacaggccgagagaaatgtaataaaatataacatgagacacgtatgaaatttaaactttccggtagccacactagaaaaaggt

SEQ ID NO: 3019 - DNA, 5297 bp, Homo sapiens
ttacaggaccagtgacagaccaagggcatgccactgaaggaatccctagacgcacccttctggatgtgagacaggcggatctcacccacgcctgccagcagctcctcggagaactgtgttcctgggtcagccctggcccagaggagcgccggggacccgcagagtgctgctgaagtcaaggctacaactcacctrggatctggggcgccagccctccggtgggcagggcgttctcctcccccaccccctccccgcacgatgacatcaagtgtttggcgttgagttgctccataaaagctgcccggggaagccaggagagcgaagggcggacgtactcgccacggcacccaggctgcgcgcacgcggtcccggtgtgcagctggagagcgagcrgccaccgggagcccccggcacagcccgcgcccgccccgcaggagcccgcgaagatgccccggcgcagcctgcacgcggcggccgtgctcctgctggtgatcttaaaggaacagccttccagcccggccccagtgaacggttccaagtggacttattttggtcctgatggggagaatagctggtccaagaagtacccgtcgtgtgggggcctgctgcagtcccccatagacctgcacagtgacatcctccagtatgacgccagcctcacgcccctcgagttccaaggctacaatctgtctgccaacaagcagtttctcctgaccaacaatggccattcagtgaagctgaacctgccctcggacatgcacatccagggcctccagtctcgctacagtgccacgcagctgcacctgcactgggggaacccgaatgacccgcacggctctgagcacaccgtcagcggacagcacttcgccgccgagctgcacattgtccattataactcagacctttatcctgacgccagcactgccagcaacaagtcagaaggcctcgctgtcctggctgttctcattgagatgggctccttcaatccgtcctatgacaagatcttcagtcaccttcaacatgtaaagtacaaaggccaggaagcattcgtcccgggattcaacattgaagagctgcttcyggagaggaccgctgaatattaccgctaccgggggtccctgaccacacccccttgcaaccccactgtgctctggacagttttccgaaaccccgtgcaaatttcccaggagcawctgctggctttggagacagccctgtactgcacacacatggacgacccttcccccagagaaatgatcaacaacttccggcaggtccagaagttcgatgagaggctggtatacacctccttctcccaagtgcaagtctgtactgcggcaggactgagtctggtatcaaaaaaggtgataacaagggagtcatttacaagccagccaccaagatggagactgaggcccacgcttgaggtccccggagctcccgggcacatccaggaaggaccttgctttggaccctacacacttcggctctctggacacttgcgacacctcaaggtgttctctgtagctcaatctgcaaacatgccaggcctcagggatcctctgctgggtgcctccttgccttgggaccatggccaccccagagccatccgatcgatggatgggatgcactctcagaccaagcagcaggaattcaaagytgcttgctgtaactgtgtgagattgtgaagtggtctgaattctggaatcacaaaccaagccatgctggtgggccattaatggttggaaaacactttcatccggggctttgccagagcgtgctttcaagtgtcctggaaaktctgctgcttctccaagctttcagacaagaatgtgcactctctgcttaggttttgcttgggaaactcaacttctttcytctggagacggggcatctccctctgatttccttctgctatgacaaaacctttaatctgcaccttacaactcggggacaaatggggacaggaaggatcaagttgtagagagaaaaagaaaacaagagatatacattgtgatatattagggacactttcacagtcctgtcctctggatcacagacactgcacagaccttagggaatggcaggttcaagttccacttcttggtggggatgagaagggagagagagctagagggacaaagagaatgagaagacatggatgatctgggagagtctcastttggaatcagaattggaatcacattctgtttatcaagccataatgtaaggacagaataatacaatattaagtccaaatccaacctcctgtcagtggagcagttatgttttatactctacagattttacaaataatgaggctgttccttgaaaatgtgttgttgctgtgtcctggaggagacatgagttccgagatgacccaatctgcctttgaatctggaggaaataggcagaaacaaaatgactgtagaacttattctctgtaggccaaatttcatttcagccacttctgcaggatccctactgccaacctggaatggagacttttatctacttctctctctctgaagatgtcaaatcgtggtttagatcaaatatatttcaagctataaaagcaggaggttatctgtgcagggggctggcatcatgtatttaggggcaagtaataatggaatgctactaagatactccatattcttccccgaatcacacagacagtttctgacaggcgcaactcctccattttcctcccgcaggygagaaccctgtggagatgagtcagtgccatgactgagaaggaaccgacccctagttgagagcaccttgcagttccccgagaactttctgattcacagtctcattttgacagcatgaaatgtcctcttgaagcatagctttttaaatatctttttccttctactcctccctctgactctaagaattctctcttctggaatcgcttgaacccaggaggcggaggttgcagtaagccaaggtcatgccactgcactctagcctgggtgacagagcgagactccatctcaaaaaaaaaaaaaaaaaaattattctgtaccatcacaacttttcacaacgatggcaagccttatgtcttgggagcctgttttgctaggcaaagttacaagtgacctaatgggagctcaaatgtgtgtgtgtctctctgtgtgtttgkgtgtgtgtgtgcactcaagacctctaacagcctcgaagcctggggtggcatcccggccttgccattagcatgcctcatgcatcatyagatgacaaggacaaccctcatgacgaagcaacatgaattagggggcctcttggccttggtccaaaattgtcaatcagaaatgaacataaaggactccagagcagtgggachgtctgtcaaaagactctgtatatcttttgtggatgagttttgtgagagaacagagagaccattgtacctggcacaagggctsttcatgaaaagggagacttactgggaggtgcaagacagtggcatttctcctctcctcttgctgctcagcacagccctggattgcagccccgaggctgagaccagacaaagcccgggaggcagaaagatgctccaagaaccaacactatcaatgtctttgcaaatcctcacaggattcctgtgggtccagctttggaactgggaaacctttcttcggatccgcactcattccactratgccagctgcccctgaaggatgccagtactgtggtgtgtgagtctcagcagccgcccacacgctcctaactctgctgcatggcagatgcctaggtggaaatagcaaaaacaaggcccaggctggggccagggccagaggggaaggccctggattctcactcatgtgagatcttgaatctctttctttgttctgtttgtttagttagtatcatctggtaaaatagttaaaaaacaacaaaaaactctgtatctgtttctagcatgtgctgcattgactctattaatcacatttcaaattcaccctacattcctctcctcttcactagcctctctgaaggtgtcctggccagccctggagaagcactggtgtctgcagcacccctcagttcctgtgcctcagcccacaggccactgtgataatggtctgtttagcacttctgtatttattgtaagaatgattataatgaagatacacactrtaactacaagaaattataaatgtttttcacatcaggctgttctttttttttttttggaggcgaggttaaagcattactatttgcaaagcactstgtagctccctgttatggggataggtaactaatcagaataataatgtcactcgcatccacttcttagaacctggctccaaaggaaaataagctgatagactcaatcactttcctgaggatggaggcctatggcatgtgtggctgcaggtcgcgaagctgcttaatggtgctgggaagcctagaggaattaaataaagaccctggaggaggtgggatcggagctgcaccttgaacaaatagctcagatttgaacagatggatggaaaagagggaggtgttcccaaccaaggggacatgatacagggaacaggtcctatgtctctttactcctgagagtattaaacctagtaggtgggcagcccctcttggttgcctgttaccttattttgaattctttttgcaaaacatactatcacccgtccaaataatcttttgtctaaatccagacttcacattctgactggggcaaaaagaggcagtccagtaaaggttataaaataggtaccatcattgtttgccttatttagaaaagcwtccaattttcactataatcaccctaagcctgagagaggtgaactgttcaagggtactttggctccagtgggtgacagtacctggcccagctttggaattgaaacatttctgatggtctgtrctctgctagaacacaggatgcttctgctctccctgctctggcatcctgccaggtgtcatggccacgcacaggcatgaagacagccgggaagccagagttcccacgaagcactcactccttggacttgctcccaccccactggggagagcactcctggagcaggaaatgagcatctctcatctccctgaattccacatccactggctgaatgatcagggaggcatagcagtgagagccataggtcggcagagggaactcaggccctcctttaggatggccatcacctcatctcaatccagccaaatcaaccatctagagcacacaggccgagagaaatgtaataaaatataacatgagacacgtatgaaatttaaactttccggtagccacactagaaaaaggt

SEQ ID NO: 3020 - DNA, 3092 bp, Homo sapiens
ttacaggaccagtgacagaccaagggcatgccactgaaggaatccctagacgcacccttctggatgtgagacaggcggatctcacccacgcctgccagcagctcctcggagaactgtgttcctgggtcagccctggcccagaggagcgccggggacccgcagagtgctgctgaagtcaaggctacaactcacctrggatctggggcgccagccctccggtgggcagggcgttctcctcccccaccccctccccgcacgatgacatcaagtgtttggcgttgagttgctccataaaagctgcccggggaagccaggagagcgaagggcggacgtactcgccacggcacccaggctgcgcgcacgcggtcccggtgtgcagctggagagcgagcrgccaccgggagcccccggcacagcccgcgcccgccccgcaggagcccgcgaagatgccccggcgcagcctgcacgcggcggccgtgctcctgctggtgatcttaaaggaacagccttccagcccggccccagtgaacggtaaacatggatctctgtgtccaggtcctgatggggagaatagctggtccaagaagtacccgtcgtgtgggggcctgctgcagtcccccatagacctgcacagtgacatcctccagtatgacgccagcctcacgcccctcgagttccaaggctacaatctgtctgccaacaagcagtttctcctgaccaacaatggccattcagtgaagctgaacctgccctcggacatgcacatccagggcctccagtctcgctacagtgccacgcagctgcacctgcactgggggaacccgaatgacccgcacggctctgagcacaccgtcagcggacagcacttcgccgccgagctgcacattgtccattataactcagacctttatcctgacgccagcactgccagcaacaagtcagaaggcctcgctgtcctggctgttctcattgagatgggctccttcaatccgtcctatgacaagatcttcagtcaccttcaacatgtaaagtacaaaggccaggaagcattcgtcccgggattcaacattgaagagctgcttcyggagaggaccgctgaatattaccgctaccgggggtccctgaccacacccccttgcaaccccactgtgctctggacagttttccgaaaccccgtgcaaatttcccaggagcawctgctggctttggagacagccctgtactgcacacacatggacgacccttcccccagagaaatgatcaacaacttccggcaggtccagaagttcgatgagaggctggtatacacctccttctcccaagtgcaagtctgtactgcggcaggactgagtctgggcatcatcctctcactggccctggctggcattcttggcatctgtattgtggtggtggtgtccatttggcttttcagaaggaagagtatcaaaaaaggtgataacaagggagtcatttacaagccagccaccaagatggagactgaggcccacgcttgaggtccccggagctcccgggcacatccaggaaggaccttgctttggaccctacacacttcggctctctggacacttgcgacacctcaaggtgttctctgtagctcaatctgcaaacatgccaggcctcagggatcctctgctgggtgcctccttgccttgggaccatggccaccccagagccatccgatcgatggatgggatgcactctcagaccaagcagcaggaattcaaagytgcttgctgtaactgtgtgagattgtgaagtggtctgaattctggaatcacaaaccaagccatgctggtgggccattaatggttggaaaacactttcatccggggctttgccagagcgtgctttcaagtgtcctggaaaktctgctgcttctccaagctttcagacaagaatgtgcactctctgcttaggttttgcttgggaaactcaacttctttcytctggagacggggcatctccctctgatttccttctgctatgacaaaacctttaatctgcaccttacaactcggggacaaatggggacaggaaggatcaagttgtagagagaaaaagaaaacaagagatatacattgtgatatattagggacactttcacagtcctgtcctctggatcacagacactgcacagaccttagggaatggcaggttcaagttccacttcttggtggggatgagaagggagagagagctagagggacaaagagaatgagaagacatggatgatctgggagagtctcastttggaatcagaattggaatcacattctgtttatcaagccataatgtaaggacagaataatacaatattaagtccaaatccaacctcctgtcagtggagcagttatgttttatactctacagattttacaaataatgaggctgttccttgaaaatgtgttgttgctgtgtcctggaggagacatgagttccgagatgacccaatctgcctttgaatctggaggaaataggcagaaacaaaatgactgtagaacttattctctgtaggccaaatttcatttcagccacttctgcaggatccctactgccaacctggaatggagacttttatctacttctctctctctgaagatgtcaaatcgtggtttagatcaaatatatttcaagctataaaagcaggaggttatctgtgcagggggctggcatcatgtatttaggggcaagtaataatggaatgctactaagatactccatattcttccccgaatcacacagacagtttctgacaggcgcaactcctccattttcctcccgcaggygagaaccctgtggagatgagtcagtgccatgactgagaaggaaccgacccctagttgagagcaccttgcagttccccgagaactttctgattcacagtctcattttgacagcatgaaatgtcctcttgaagcatagctttttaaatatctttttccttctactcctccctctgactctaagaattctctcttctggaatcgcttgaacccaggaggcggaggttgcagtaagccaaggtcatgccactgcactctagcctgggtgacagagcgagactccatctc

SEQ ID NO: 3021 - DNA, 5526 bp, Homo sapiens
ttgcactccggcctgggcaacagagcgagactccgtctcaaacaaacaaacaaaggaacgaaaacctccggtctccggcacggcaagctctgcgtgaattactttctccattgcaactcccctgtcttgataaatgggctctgtctaagcagcgggcaaggtgaactcgttgggctgttacaggaccagtgacagaccaagggcatgccactgaaggaatccctagacgcacccttctggatgtgagacaggcggatctcacccacgcctgccagcagctcctcggagaactgtgttcctgggtcagccctggcccagaggagcgccggggacccgcagagtgctgctgaagtcaaggctacaactcacctrggatctggggcgccagccctccggtgggcagggcgttctcctcccccaccccctccccgcacgatgacatcaagtgtttggcgttgagttgctccataaaagctgcccggggaagccaggagagcgaagggcggacgtactcgccacggcacccaggctgcgcgcacgcggtcccggtgtgcagctggagagcgagcrgccaccgggagcccccggcacagcccgcgcccgccccgcaggagcccgcgaagatgccccggcgcagcctgcacgcggcggccgtgctcctgctggtgatcttaaaggaacagccttccagcccggccccagtgaacggttccaagtggacttattttggtcctgatggggagaatagctggtccaagaagtacccgtcgtgtgggggcctgctgcagtcccccatagacctgcacagtgacatcctccagtatgacgccagcctcacgcccctcgagttccaaggctacaatctgtctgccaacaagcagtttctcctgaccaacaatggccattcagtgaagctgaacctgccctcggacatgcacatccagggcctccagtctcgctacagtgccacgcagctgcacctgcactgggggaacccgaatgacccgcacggctctgagcacaccgtcagcggacagcacttcgccgccgagctgcacattgtccattataactcagacctttatcctgacgccagcactgccagcaacaagtcagaaggcctcgctgtcctggctgttctcattgagatgggctccttcaatccgtcctatgacaagatcttcagtcaccttcaacatgtaaagtacaaaggccaggaagcattcgtcccgggattcaacattgaagagctgcttcyggagaggaccgctgaatattaccgctaccgggggtccctgaccacacccccttgcaaccccactgtgctctggacagttttccgaaaccccgtgcaaatttcccaggagcawctgctggctttggagacagccctgtactgcacacacatggacgacccttcccccagagaaatgatcaacaacttccggcaggtccagaagttcgatgagaggctggtatacacctccttctcccaaggcatcatcctctcactggccctggctggcattcttggcatctgtattgtggtggtggtgtccatttggcttttcagaaggaagagtatcaaaaaaggtgataacaagggagtcatttacaagccagccaccaagatggagactgaggcccacgcttgaggtccccggagctcccgggcacatccaggaaggaccttgctttggaccctacacacttcggctctctggacacttgcgacacctcaaggtgttctctgtagctcaatctgcaaacatgccaggcctcagggatcctctgctgggtgcctccttgccttgggaccatggccaccccagagccatccgatcgatggatgggatgcactctcagaccaagcagcaggaattcaaagytgcttgctgtaactgtgtgagattgtgaagtggtctgaattctggaatcacaaaccaagccatgctggtgggccattaatggttggaaaacactttcatccggggctttgccagagcgtgctttcaagtgtcctggaaaktctgctgcttctccaagctttcagacaagaatgtgcactctctgcttaggttttgcttgggaaactcaacttctttcytctggagacggggcatctccctctgatttccttctgctatgacaaaacctttaatctgcaccttacaactcggggacaaatggggacaggaaggatcaagttgtagagagaaaaagaaaacaagagatatacattgtgatatattagggacactttcacagtcctgtcctctggatcacagacactgcacagaccttagggaatggcaggttcaagttccacttcttggtggggatgagaagggagagagagctagagggacaaagagaatgagaagacatggatgatctgggagagtctcastttggaatcagaattggaatcacattctgtttatcaagccataatgtaaggacagaataatacaatattaagtccaaatccaacctcctgtcagtggagcagttatgttttatactctacagattttacaaataatgaggctgttccttgaaaatgtgttgttgctgtgtcctggaggagacatgagttccgagatgacccaatctgcctttgaatctggaggaaataggcagaaacaaaatgactgtagaacttattctctgtaggccaaatttcatttcagccacttctgcaggatccctactgccaacctggaatggagacttttatctacttctctctctctgaagatgtcaaatcgtggtttagatcaaatatatttcaagctataaaagcaggaggttatctgtgcagggggctggcatcatgtatttaggggcaagtaataatggaatgctactaagatactccatattcttccccgaatcacacagacagtttctgacaggcgcaactcctccattttcctcccgcaggygagaaccctgtggagatgagtcagtgccatgactgagaaggaaccgacccctagttgagagcaccttgcagttccccgagaactttctgattcacagtctcattttgacagcatgaaatgtcctcttgaagcatagctttttaaatatctttttccttctactcctccctctgactctaagaattctctcttctggaatcgcttgaacccaggaggcggaggttgcagtaagccaaggtcatgccactgcactctagcctgggtgacagagcgagactccatctcaaaaaaaaaaaaaaaaaaattattctgtaccatcacaacttttcacaacgatggcaagccttatgtcttgggagcctgttttgctaggcaaagttacaagtgacctaatgggagctcaaatgtgtgtgtgtctctctgtgtgtttgkgtgtgtgtgtgcactcaagacctctaacagcctcgaagcctggggtggcatcccggccttgccattagcatgcctcatgcatcatyagatgacaaggacaaccctcatgacgaagcaacatgaattagggggcctcttggccttggtccaaaattgtcaatcagaaatgaacataaaggactccagagcagtgggachgtctgtcaaaagactctgtatatcttttgtggatgagttttgtgagagaacagagagaccattgtacctggcacaagggctsttcatgaaaagggagacttactgggaggtgcaagacagtggcatttctcctctcctcttgctgctcagcacagccctggattgcagccccgaggctgagaccagacaaagcccgggaggcagaaagatgctccaagaaccaacactatcaatgtctttgcaaatcctcacaggattcctgtgggtccagctttggaactgggaaacctttcttcggatccgcactcattccactratgccagctgcccctgaaggatgccagtactgtggtgtgtgagtctcagcagccgcccacacgctcctaactctgctgcatggcagatgcctaggtggaaatagcaaaaacaaggcccaggctggggccagggccagaggggaaggccctggattctcactcatgtgagatcttgaatctctttctttgttctgtttgtttagttagtatcatctggtaaaatagttaaaaaacaacaaaaaactctgtatctgtttctagcatgtgctgcattgactctattaatcacatttcaaattcaccctacattcctctcctcttcactagcctctctgaaggtgtcctggccagccctggagaagcactggtgtctgcagcacccctcagttcctgtgcctcagcccacaggccactgtgataatggtctgtttagcacttctgtatttattgtaagaatgattataatgaagatacacactrtaactacaagaaattataaatgtttttcacatcaggctgttctttttttttttttggaggcgaggttaaagcattactatttgcaaagcactstgtagctccctgttatggggataggtaactaatcagaataataatgtcactcgcatccacttcttagaacctggctccaaaggaaaataagctgatagactcaatcactttcctgaggatggaggcctatggcatgtgtggctgcaggtcgcgaagctgcttaatggtgctgggaagcctagaggaattaaataaagaccctggaggaggtgggatcggagctgcaccttgaacaaatagctcagatttgaacagatggatggaaaagagggaggtgttcccaaccaaggggacatgatacagggaacaggtcctatgtctctttactcctgagagtattaaacctagtaggtgggcagcccctcttggttgcctgttaccttattttgaattctttttgcaaaacatactatcacccgtccaaataatcttttgtctaaatccagacttcacattctgactggggcaaaaagaggcagtccagtaaaggttataaaataggtaccatcattgtttgccttatttagaaaagcwtccaattttcactataatcaccctaagcctgagagaggtgaactgttcaagggtactttggctccagtgggtgacagtacctggcccagctttggaattgaaacatttctgatggtctgtrctctgctagaacacaggatgcttctgctctccctgctctggcatcctgccaggtgtcatggccacgcacaggcatgaagacagccgggaagccagagttcccacgaagcactcactccttggacttgctcccaccccactggggagagcactcctggagcaggaaatgagcatctctcatctccctgaattccacatccactggctgaatgatcagggaggcatagcagtgagagccataggtcggcagagggaactcaggccctcctttaggatggccatcacctcatctcaatccagccaaatcaaccatctagagcacacaggccgagagaaatgtaataaaatataacatgagacacgtatgaaatttaaactttccggtagccacactagaaaaaggt

SEQ ID NO: 3022 - DNA, 2876 bp, Homo sapiens
ttacaggaccagtgacagaccaagggcatgccactgaaggaatccctagacgcacccttctggatgtgagacaggcggatctcacccacgcctgccagcagctcctcggagaactgtgttcctgggtcagccctggcccagaggagcgccggggacccgcagagtgctgctgaagtcaaggctacaactcacctrggatctggggcgccagccctccggtgggcagggcgttctcctcccccaccccctccccgcacgatgacatcaagtgtttggcgttgagttgctccataaaagctgcccggggaagccaggagagcgaagggcggacgtactcgccacggcacccaggctgcgcgcacgcggtcccggtgtgcagctggagagcgagcrgccaccgggagcccccggcacagcccgcgcccgccccgcaggagcccgcgaagatgccccggcgcagcctgcacgcggcggccgtgctcctgctggtgatcttaaaggaacagccttccagcccggccccagtgaacggttccaagtggacttattttgtgaagctgaacctgccctcggacatgcacatccagggcctccagtctcgctacagtgccacgcagctgcacctgcactgggggaacccgaatgacccgcacggctctgagcacaccgtcagcggacagcacttcgccgccgagctgcacattgtccattataactcagacctttatcctgacgccagcactgccagcaacaagtcagaaggcctcgctgtcctggctgttctcattgagatgggctccttcaatccgtcctatgacaagatcttcagtcaccttcaacatgtaaagtacaaaggccaggaagcattcgtcccgggattcaacattgaagagctgcttcyggagaggaccgctgaatattaccgctaccgggggtccctgaccacacccccttgcaaccccactgtgctctggacagttttccgaaaccccgtgcaaatttcccaggagcawctgctggctttggagacagccctgtactgcacacacatggacgacccttcccccagagaaatgatcaacaacttccggcaggtccagaagttcgatgagaggctggtatacacctccttctcccaaggcatcatcctctcactggccctggctggcattcttggcatctgtattgtggtggtggtgtccatttggcttttcagaaggaagagtatcaaaaaaggtgataacaagggagtcatttacaagccagccaccaagatggagactgaggcccacgcttgaggtccccggagctcccgggcacatccaggaaggaccttgctttggaccctacacacttcggctctctggacacttgcgacacctcaaggtgttctctgtagctcaatctgcaaacatgccaggcctcagggatcctctgctgggtgcctccttgccttgggaccatggccaccccagagccatccgatcgatggatgggatgcactctcagaccaagcagcaggaattcaaagytgcttgctgtaactgtgtgagattgtgaagtggtctgaattctggaatcacaaaccaagccatgctggtgggccattaatggttggaaaacactttcatccggggctttgccagagcgtgctttcaagtgtcctggaaaktctgctgcttctccaagctttcagacaagaatgtgcactctctgcttaggttttgcttgggaaactcaacttctttcytctggagacggggcatctccctctgatttccttctgctatgacaaaacctttaatctgcaccttacaactcggggacaaatggggacaggaaggatcaagttgtagagagaaaaagaaaacaagagatatacattgtgatatattagggacactttcacagtcctgtcctctggatcacagacactgcacagaccttagggaatggcaggttcaagttccacttcttggtggggatgagaagggagagagagctagagggacaaagagaatgagaagacatggatgatctgggagagtctcastttggaatcagaattggaatcacattctgtttatcaagccataatgtaaggacagaataatacaatattaagtccaaatccaacctcctgtcagtggagcagttatgttttatactctacagattttacaaataatgaggctgttccttgaaaatgtgttgttgctgtgtcctggaggagacatgagttccgagatgacccaatctgcctttgaatctggaggaaataggcagaaacaaaatgactgtagaacttattctctgtaggccaaatttcatttcagccacttctgcaggatccctactgccaacctggaatggagacttttatctacttctctctctctgaagatgtcaaatcgtggtttagatcaaatatatttcaagctataaaagcaggaggttatctgtgcagggggctggcatcatgtatttaggggcaagtaataatggaatgctactaagatactccatattcttccccgaatcacacagacagtttctgacaggcgcaactcctccattttcctcccgcaggygagaaccctgtggagatgagtcagtgccatgactgagaaggaaccgacccctagttgagagcaccttgcagttccccgagaactttctgattcacagtctcattttgacagcatgaaatgtcctcttgaagcatagctttttaaatatctttttccttctactcctccctctgactctaagaattctctcttctggaatcgcttgaacccaggaggcggaggttgcagtaagccaaggtcatgccactgcactctagcctgggtgacagagcgagactccatctc

SEQ ID NO: 3023 - DNA, 1090 bp, Homo sapiens
cttggcctcccaaagtgctgggattacaggtgaatctggactgggaaagtygacattaatcaactcattattcctcacagatttgtattctccagagtatccaggtccttctcagagaattaaaaagactgtacaggtggaacaatccaaagttttaatcaaagaaggtggtattcagttgctgcttacaatagttgataccccaggatttggagatgcagtggataatagtaattgctggcagcctgttatcaattayattgatagtaaatttgaggactacctaaatgcagaatcgcaagtgaacagatgtcagatgcctggtaacagggtgcactgttgtttatacttcattgctccttcaggacatggacttaaaccattggatattgagtttacaaagcatttgcatgaaaaagtgaatatcatcccacttattgccaaagcagacacactcatgccagaggaatgccaacagtttaaaaaacaggaccatttacctcttgctgtggtgggtagtaatactatcattgaagttaatggcaaaagggtcataggaaggcagtatccttggagtgttgctgaagttgaaaatggtgaacattgtgattttacagttctaagaaatatgttgataaggcaaaagagggagcgagctgaggaaaagttagaactaggcttctttaaactattaatagaagcaaactcttgccgtttatttatgacagaacacacgcaggacttgaaagatgttactaataatgtccactacgagaactatggaatcagaaaactggcagctgtgacttatcatggagttgataacaagaagaataaagggcagctcactaagagccctctggcacaaatggaagaagaaagaagggagcaagtagctaaaattaagaagatggagatggagatggagcaggtgtttgagatgaaggtcaaagaaaaagttcaaaaactgaaggactctgaagctgaggccttcaggaagtgtcgagtcygggacgcccagcgcgggcccgagcagggggaagggaagcgcagctcggtccgcgtgggtggaggggacgtgaagccgccc

SEQ ID NO: 3024 - DNA, 988 bp, Homo sapiens
cttggcctcccaaagtgctgggattacaggtgaatctggactgggaaagtygacattaatcaactcattattcctcacagatttgtattctccagagtatccaggtccttctcagagaattaaaaagactgtacaggtggaacaatccaaagttttaatcaaagaaggtggtattcagttgctgcttacaatagttgataccccaggatttggagatgcagtggataatagtaattgctggcagcctgttatcaattayattgatagtaaatttgaggactacctaaatgcagaatcgcaagtgaacagatgtcagatgcctggtaacagggtgcactgttgtttatacttcattgctccttcaggacatggacttaaaccattggatattgagtttacaaagcatttgcatgaaaaagtgaatatcatcccacttattgccaaagcagacacactcatgccagaggaatgccaacagtttaaaaaacagataaagaaatccaagaacataaagttaaaatatatgaatttccagaaacagatgatgaagaagaaaaaaaacttgttaaaaagataaaggaccatttacctcttgctgtggtgggtagtaatactatcattgaagttaatggcaaaagggtcataggaaggcagtatccttggagtgttgctgaagttgaaaatggtgaacattgtgattttacagttctaagaaatatgttgataagaacacacgcaggacttgaaagatgttactaataatgtccactacgagaactatggaatcagaaaactggcagctgtgacttatcatggagttgataacaagaagaataaagggcagctcactaagagccctctggcacaaatggaagaagaaagaagggagcaagtagctaaaattaagaagatggagatggagatggagcaggtgtttgagatgaaggtcaaagaaaaagttcaaaaactgaaggactctgaagctgag

SEQ ID NO: 3025 - DNA, 491 bp, Homo sapiens
gttgaatatttaaggttgrgtaaagtgggtgagtttaacagatattttcccttatttcttttaggtgaatctggactgggaaagtygacattaatcaactcattattcctcacagatttgtattctccagagtatccaggtccttctcagagaattaaaaagactgtacaggtggaacaatccaaagttttaatcaaagaaggtggtattcagttgctgcttacaatagttgataccccaggatttggagatgcagtggataatagtaattgctggcagcctgttatcaattayattgatagtaaatttgaggactacctaaatgcagaatcgcaagtgaacagatgtcagatgcctggtaacagggtgcactgttgtttatacttcattgctccttcaggacatggaccgttacataactgaagactcccaccttcaggcaggattgggtagtacatgtttgtaactacctggcattgccttttgttgag

SEQ ID NO: 3026 - DNA, 481 bp, Homo sapiens
atgcatgcacaaagcgagattatccaagaaataccagagaatggcaactctgtagttggaaaccgaacagaaacgctacaggttgggcagtatagggttagactagtgcctaaaaaatccgtggacgtggtgaaccaggttatcaagtacaagcctgcagttgcctggcagactggaaagcctctctccatagaggagatagaggtggcacccccaaaggctaatgaagttcgaatcacaatcattgccactgtggtttgccacaccgacacctataccctgagtggagctgatcctaagggttgttttccagtgatcttggracatgaagttgcttggaattgtggaaagcgttggcgaggaagttactaagctgaaggtgagtgacactgtcattccactttacatcccacagtgtggagaatgcaaatttggtctaaatcctaaaactaacctttgscagaagataagagtcacgaag

SEQ ID NO: 3027 - DNA, 10065 bp, Homo sapiens
ctcggcccaacaaaatggcggcggcagcggtgtcgctttgtttccgcggctcctgcggcggtggcagtggtagcggcctttgagctgtggggaggttccagcagcagctacagtgacgactaagactccagtgcatttctatcgtaaccgggcgcgggggagcgcagatcggcgcccagcaatcacagaagccgacaaggcrttcaagcgaaaacatgaccgctgagcccatgagtgaaagcaagttgaatacattggtgcagaagcttcatgacttccttgcacactcatcagaagaatctgaagaaacaagttctcctccacgacttgcaatgaatcaaaacacagataaaatcagtggttctggaagtaactctgatatgatggaaaacagcaaggaagagggaactagctcttcagaaaaatccaagtcttcaggatcgtcacgatcaaagaggaaaccttcaattgtaacaaagtatgtagaatcagatgatgaaaaacctttggatgatgaaactgtaaatgaagatgcgtctaatgaaaattcagaaaatgatattactatgcagagcttgccaaaaggtacagtgattgtacagccagagccagtgctgaatgaagacaaagatgattttaaagggcctgaatttagaagcagaagtaaaatgaaaactgaaaatctcaaaaaacgcggagaagatgggcttcatgggattgtgagctgcactgcttgtggacaacaggtcartcattttcaaaaagattccatttatagacacccttcattgcaagttcttatttgtaagaattgctttaagtattacatgagtgatgatattagccgtgactcagatggaatggatgaacaatgtaggtggtgtgcggaaggtggaaacttgatttgttgtgacttttgccataatgctttctgcaagaaatgcattctacgcaaccttggtcgaaaggagttgtccacaataatggatgaaaacaaccaatggtattgctacatttgtcacccagagcctttgttggacttggtcactgcatgtaacagcgtatttgagaatttagaacagttgttgcagcaaaataagaagaagataaaagttgacagtgaaaagagtaataaagtatatgaacatacatccagattttctccaaagaagactagttcaaattgtaatggagaagaaaagaaattagatgattcctgttctggctctgtaacctactcttattccgcactaattgtgcccaaagagatgattaagaaggcaaaaaaactgattgagaccacagccaacatgaactccagttatgttaaatttttaaagcaggcaacagataattcagaaatcagttctgctacaaaattacgtcagcttaaggcttttaagtctgtgttggctgatattaagaaggctcatcttgcattggaagaagacttaaattccgagtttcgagcgatggatgctgtaaacaaagagaaaaataccaaagagcataaagtcatagatgctaagtttgaaacaaaagcacgaaaaggagaaaaaccttgtgctttggaaaagaaggatatttcaaagtcagaagctaaactttcaagaaaacaggtagatagtgagcacatgcatcagaatgttccaacagaggaacaaagaacaaataaaagyaccggtggtgaacataagaaatctgatagaaaagaagaacctcaatatgaacctgccaacacttctgaagatttagacatggatattgtgtctgttccttcctcagttccagaagacatttttgagaatcttgagactgctatggaagttcagagttcagttgatcatcaaggggatggcagcagtggaactgaacaagaagtggagagttcatctgtaaaattaaatatttcttcaaaagacaacagaggaggtattaaatcaaaaactacagctaaagtaacaaaagaattatatgttaaactcactcctgtttcccttyctaattccccaattaaaggtgctgattgtcaggaagttccacaagataaagatggctataaaagttgtggtctgaaccccaagttagagaaatgtggacttggacaggaaaacagtgataatgagcatttggttgaaaatgaagtttcattacttttagaggaatctgatcttcgragatccccacgtgtaaagactacacccttgaggcgaccgacagaaactaaccctgtaacatctaattcagatgaagaatgtaatgaaacagttaaggagaaacaaaaactatcagttccagtgagaaaaaaggataagcgtaattcttctgacagtgctatagataatcctaagcctaataaattgccaaaatctaagcaatcagagactgtggatcaaaattcagattctgatgaaatgctagcaatcctcaaagrggtgagcaggatgagtcacagttcttcttcagatactgatattaatgaaattcatacaaaccataagactttgtatgatttaaagactcaggcggggaaagatgataaaggaaaaaggaaacgaaaaagttctacatctggctcagattttgatactaaaaagggcaaatcagctaagagctctataatttctaaaaagaaacgacaaacccagtctgagtcttctaattatgactcagaattagaaaaagagataaagagcatgagtaaaattggtgctgccagaaccaccaaaaaaagaattccaaatacaaaagattttgactcttctgaagatgagaaacacagcaaaaaaggaatggataatcaagggcacaaaaatttgaagacctcacaagaaggatcatctgatgatgctgaaagaaaacaagagagagagactttctcttcagcagaaggcacagttgataaagacacgaccatcatggaattaagagatcgacttcctaagaagcagcaagcaagtgcttccactgatggtgtcgataagctttctgggaaagagsagagttttacttctttggaagttagaaaagttgctgaaactaaagaaaagagcwagcatctcaaaaccaaaacatgtaaaaaagtacaggatggcttatctgatattgcagagaaattcctaaagaaagaccagagcgatgaaacttctgaagatgataaaaagcagagcaaaaagggaactgaagaaaaaaagaaaccttcagactttaagaaaaaagtaattaaaatggaacaacagtatgaatcttcatctgatggcactgaaaagttacctgagcgagaagaaatttgtcattttcctaagggcataaaacaaattaagaatggaacaactgatggagaaaagaaaagtaaaaaaataagagataaaacttctaaaaagaaggatgaattatctgattatgctgagaagtcaacagggaaaggagatagttgtgactcttcagaggataaaaagagtaagaatggagcatatggtagagagaagaaaaggtgcaagttgcttggaaagagttcaaggaagagacaagattgytcatcatctgatactgagaaatattccatgaaagaagatggttgtaactcttctgataagagactraaaagaatagaattgagggaaagaagaaatttaagttcaaagagaaatactaaggaaatacaaagtggctcatcatcatctgatgctgaggaaagttctgaagataataaaaagaagaagcaaagaacttcatctaaaaagaaggcagtcattgtcaaggagaaaaagagaaactccctaagaacaagcactaaaaggaagcaagctgacattacatcctcatcttcttctgatatagaagatgatgatcagaattctataggtgagggaagcagcgatgaacagaaaattaagcctgtsactgaaaatttagtgctgtcttcacatactggattttgccaatcttcaggagatgaagccttatctaaatcagtgcctgtcacagtggatgatgatgatgacgacaatgatcctgagaatagaattgccaagaagatgcttttagaagaaattaaagccaatctttcctctgatgaggatggatcttcagatgatgagccagaagaagggaaaaaaagaactggaaaacaaaatgaagaaaacccaggagatgaggaagcaaaaaatcaagtcaattctgaatcagattcagattctgaagaatctaagaagccaagatacagacataggcttttgcggcacaaattgactgtgagtgacggagaatctggagaagaaaaaaagacaaagcctaaagagcataaagaagtcaaaggcagaaacagaagaaaggtgagcagtgaagattcagaagattctgattttcaggaatcaggagttagtgaagaagttagtgaatccgaagatgaacagcggcccagaacaaggtctgcaaagaaagcagagttggaagaaaatcagcggagctataaacagaaaaagaaaaggcgacgtattaaggttcaagaagattcatccagtgaaaacaagagtaattctgaggaagaagaggaggaaaaagaagaggaggaggaagaggaggaggaggaggaagaggaggaggaagatgaaaatgatgattccaagtctcctggaaaaggcagaaagaaaattcggaagattcttaaagatgataaactgagaacagaaacacaaaatgctcttaaggaagaggaagagagacgaaaacgtattgctgagagggagcgtgagcgagaaaaattgagagaggtgatagaaattgaagatgcttcacccaccaagtgtccaataacaaccaagttggktttagatgaagatgaagaaaccaaagaacctttagtgcagkttcayagaaatatggttatcaaattgaaaccccatcaagtagatggtgttcagtttatgtgggattgctgctgtgagtctgtgaaaaaaacaaagaaatctccaggttcaggatgcattcttgcccactgtatgggccttggtaagactttacaggtggtaagttttcttcatacagttcttttgtgtgacaaactggatttcagcayggcgttagtggtttgtcctcttaatactgctttgaattggatgaatgaatttgagaagtggcaagagggattaaaagatgatgagaagcttgaggtttctgaattagcaactgtgaaacgtcctcaggagagaagctacatgctgcagaggtggcaagaagatggtggtgttatgatcataggctatgagatgtatagaaatcttgctcaaggaaggaatgtgaagagtcggaaacttaaagaaatatttaacaaagctttggttgatccaggccctgattttgttgtttgtgatgaaggccatattctaaaaaatgaagcatctgctgtttctaaagctatgaattctatacgatcaaggaggaggattattttaacaggaacaccacttcaaaataacctaattgagtatcattgtatggttaattttatcaaggaaaatttacttggatccattaaggagttcaggaatagatttataaatccaattcaaaatggtcagtgtgcagattctaccatggtagatgtcagagtgatgaaaaaacgtgctcacattctctatgagatgttagctggatgtgttcagaggaaagattatacagcattaacaaaattcttgcctccaaaacacgaatatgtgttagctgtgagaatgacttctattcagtgcaagctctatcagtactacttagatcacttaacaggtgtgggcaataatagtgaaggtggaagaggaaaggcaggtgcaaagcttttccaagattttcagatgttaagtagaatatggactcatccttggtgtttgcagctagactacattagcaaagaaaataagggttattttgatgaagacagtatggatgaatttatagcctcagattctgatgaaacctccatgagtttaagctccgatgattatacaaaaaagaagaaaaaagggaaaaaggggaaaaaagatagtagctcaagtggaagtggcagtgacaatgatgttgaagtgattaaggtctggaattcaagatctcggggaggtggtgaaggaaatgtggatgaaacaggaaacaatccttctgtttctttaaaactggaagaaagtaaagctacttcttcttctaatccaagcagcccagctccagactggtacaaagattttgttacagatgctgatgctgaggttttagagcattctgggaaaatggtacttctctttgaaattcttcgaatggcagaggaaattggggataaagtccttgttttcagccagtccctcatatctctggacttgattgaagattttcttgaattagctagtagggagaagacagaagataaagataaaccccttatttataaaggtgaggggaagtggcttcgaaacattgactattaccgtttagatggttccactactgcacagtcaaggaagaagtgggctgaagaatttaatgatgaaactaatgtgagaggacgattatttatcatttctactaaagcaggatctctaggaattaatctggtagctgctaatcgagtaattatattcgacgcttcttggaatccatcttatgacatccagagtatattcagagtttatcgctttggacaaactaagcctgtttatgtatataggttcttagctcagggaaccatggaagataagatttatgatcggcaagtaactaagcagtcactgtcttttcgagttgttgatcagcagcaggtggagcgtcattttactatgaatgagcttactgaactttatacttttgagccagacttattagatgaccctaattcagaaaagaagaagaagagggatactcccatgctgccaaaggataccatacttgcagagctccttcagatacataaagaacacattgtaggataccatgaacatgattctcttttggaccacaaagaagaagaagagttgactgaagaagaaagaaaagcagcttgggctgagtatgaagcagagaagaagggactgaccatgcgtttcaacataccaactgggaccaatttaccccctgtcagtttcaactctcaaactccttatattcctttcaatttgggagccctgtcagcaatgagtaatcaacagctggaggacctcattaatcaaggaagagaaaaagttgtagaagcaacaaacagtgtgacagcagtgaggattcaacctcttgaggatataatttcagctgtatggaaggagaayatgaatctctcagaggcccaagtacaggcgttagcattaagtagacaagccagccaggagcttgatgttaaacgaagagaagcaatctacaatgatgtattgacaaaacaacagatgctgtgttcagcgaatacttatgaacagaaggctccagcagcagtacaatcagcagcaacagcaacaaatgacttatcaacaagcaacactgggtcacctcatgatgccaaagcccccaaatttgatcatgaatccttctaactaccagcagattgatatgagaggaatgtatcagccagtggctggtggtatgcagccaccaccattacagcgtgcaccacccccaatgagaagcaaaaatccaggaccttcccaagggaaatcaatgtgattttgcactaaaagcttaatggattgttaaaatcatagaaagatcttttatttytttaggaatcaatgacttaacagaactcaactgtataaatagtttggtccccttaaatgccaatcttccatattagttttactttttttttttttaaatagggcataccatttcttcctgacatttgtcagtgatgttgcctagaatcttcttacacaygctgagtacagaagatatttcaaattgttttcagtgaaaacaagtccttccataatagtaacaactccacagatttcctctctaaatttttatgcctgcttttagcaaccataaaattgtcataaaattaataaatttaggaaagaataaagatttatatattcattctttacatataaaaacacacagctgagttcttagagttgattcctcaagttatgaaatacttttgtacttaatccatttcttgattaaagtgattgaaatggttttaatgttcttttgactgaagtctgaaactgggctcctgctttattgtctctgtgactgaaagttagaaactgagggttatctttgacacagaattgtgtgcaatattcttaaatactactgctctaaaagttggagaagtcttgcagttatcttagcattgtataaacagccttaagtatagcctaagaagagaattcctttttcttctttagtccttctgccattttttattttcagttatatgtgctgaaataattactggtaaaatttcagggttgtggattatcttccacacatgaattttctctctcctggcacgaatataaagcacatctcttaactgcatggtgccagtgctaatgcttcatcctgttgctggcagtgggatgtggacttagaaaatcaagttctagcattttagtaggttaacactgaagttgtggttgttaggttcacaccctgttttataaacaacatcaaaatggcagaaccattgctgactttaggttcacatgaggaatgtacttttaacaattcccagtactatcagtattgtgaaataattcctctgaaagataagaatcactggcttctatgcgcttcttttctctcatcatcatgttcttttaccccagtttccttacatttttttaaattgtttcagagtttgttttttttttagtttagattgtgaggcaattattaaatcaaaattaattcatccaatacccctttactagaagttttactagaaaatgtattacattttattttttcttaatccagttctgcaaaaatgacctataaatttattcatgtacaattttggttacttgaattgttaaagaaaacattgtttttgactatgggagtcaactcaacatggcagaaccatttttgagatgatgatacaacaggtagtgaaacagcttaagaattccaaaaaaaaaaaaaaaaaaaaaaaaaagaaaactgggtttgggctttgctttaggtatcactggattagaatgagtttaacattagctaaaactgctttgagttgtttggatgattaagagattgccatttttatcttggaagaactagtggtaaaacatccaagagcactaggattgtgatacagaatttgtgaggtttggtggatccacgcccctctcccccactttcccatgatgaaatatcactaataaatcctgtatatttagatattatgctagccatgtaatcagatttatttaattgggtggggcaggtgtgtatttactttagaaaaaatgaaaaagacaagatttatgagaaatatttgaaggcagtacactctggccaactgttaccagttggtatttctacaagttcagaatattttaaacctgatttactagacctgggaattttcaacatggtctaattatttactcaaagacatagatgtgaaaattttaggcaaccttctaaatctttttcaccatggatgaaactataacttaaagaataatacttagaagggttaattggaaatcagagtttgaaataaaacttggaccactttgtatacactcttctcacttgacattttagctatataatatgtactttgagtataacatcaagctttaacaaatatttaaagacaaaaaaatcacgtcagtaaaatactaaaaggctcatttttatatttgttttagatgttttaaatagttgcaatggattaaaaatgatgatttaaaatgttgcttgtaatacagttttgcctgctaaattctccacattttgtaacctgttttattgtcccagttgtatagtaatgtttcagtccatcatccagctttggctgctgaaatcatacagctgtgaagacttgcctttgtttctgttagactgcttttcagt

SEQ ID NO: 3028 - DNA, 10073 bp, Homo sapiens
ctcggcccaacaaaatggcggcggcagcggtgtcgctttgtttccgcggctcctgcggcggtggcagtggtagcggcctttgagctgtggggaggttccagcagcagctacagtgacgactaagactccagtgcatttctatcgtaaccgggcgcgggggagcgcagatcggcgcccagcaatcacagaagccgacaaggcrttcaagcgaaaacatgaccgctgagcccatgagtgaaagcaagttgaatacattggtgcagaagcttcatgacttccttgcacactcatcagaagaatctgaagaaacaagttctcctccacgacttgcaatgaatcaaaacacagataaaatcagtggttctggaagtaactctgatatgatggaaaacagcaaggaagagggaactagctcttcagaaaaatccaagtcttcaggatcgtcacgatcaaagaggaaaccttcaattgtaacaaagtatgtagaatcagatgatgaaaaacctttggatgatgaaactgtaaatgaagatgcgtctaatgaaaattcagaaaatgatattactatgcagagcttgccaaaaggtacagtgattgtacagccagagccagtgctgaatgaagacaaagatgattttaaagggcctgaatttagaagcagaagtaaaatgaaaactgaaaatctcaaaaaacgcggagaagatgggcttcatgggattgtgagctgcactgcttgtggacaacaggtcartcattttcaaaaagattccatttatagacacccttcattgcaagttcttatttgtaagaattgctttaagtattacatgagtgatgatattagccgtgactcagatggaatggatgaacaatgtaggtggtgtgcggaaggtggaaacttgatttgttgtgacttttgccataatgctttctgcaagaaatgcattctacgcaaccttggtcgaaaggagttgtccacaataatggatgaaaacaaccaatggtattgctacatttgtcacccagagcctttgttggacttggtcactgcatgtaacagcgtatttgagaatttagaacagttgttgcagcaaaataagaagaagataaaagttgacagtgaaaagagtaataaagtatatgaacatacatccagattttctccaaagaagactagttcaaattgtaatggagaagaaaagaaattagatgattcctgttctggctctgtaacctactcttattccgcactaattgtgcccaaagagatgattaagaaggcaaaaaaactgattgagaccacagccaacatgaactccagttatgttaaatttttaaagcaggcaacagataattcagaaatcagttctgctacaaaattacgtcagcttaaggcttttaagtctgtgttggctgatattaagaaggctcatcttgcattggaagaagacttaaattccgagtttcgagcgatggatgctgtaaacaaagagaaaaataccaaagagcataaagtcatagatgctaagtttgaaacaaaagcacgaaaaggagaaaaaccttgtgctttggaaaagaaggatatttcaaagtcagaagctaaactttcaagaaaacaggtagatagtgagcacatgcatcagaatgttccaacagaggaacaaagaacaaataaaagyaccggtggtgaacataagaaatctgatagaaaagaagaacctcaatatgaacctgccaacacttctgaagatttagacatggatattgtgtctgttccttcctcagttccagaagacatttttgagaatcttgagactgctatggaagttcagagttcagttgatcatcaaggggatggcagcagtggaactgaacaagaagtggagagttcatctgtaaaattaaatatttcttcaaaagacaacagaggaggtattaaatcaaaaactacagctaaagtaacaaaagaattatatgttaaactcactcctgtttcccttyctaattccccaattaaaggtgctgattgtcaggaagttccacaagataaagatggctataaaagttgtggtctgaaccccaagttagagaaatgtggacttggacaggaaaacagtgataatgagcatttggttgaaaatgaagtttcattacttttagaggaatctgatcttcgragatccccacgtgtaaagactacacccttgaggcgaccgacagaaactaaccctgtaacatctaattcagatgaagaatgtaatgaaacagttaaggagaaacaaaaactatcagttccagtgagaaaaaaggataagcgtaattcttctgacagtgctatagataatcctaagcctaataaattgccaaaatctaagcaatcagagactgtggatcaaaattcagattctgatgaaatgctagcaatcctcaaagrggtgagcaggatgagtcacagttcttcttcagatactgatattaatgaaattcatacaaaccataagactttgtatgatttaaagactcaggcggggaaagatgataaaggaaaaaggaaacgaaaaagttctacatctggctcagattttgatactaaaaagggcaaatcagctaagagctctataatttctaaaaagaaacgacaaacccagtctgagtcttctaattatgactcagaattagaaaaagagataaagagcatgagtaaaattggtgctgccagaaccaccaaaaaaagaattccaaatacaaaagattttgactcttctgaagatgagaaacacagcaaaaaaggaatggataatcaagggcacaaaaatttgaagacctcacaagaaggatcatctgatgatgctgaaagaaaacaagagagagagactttctcttcagcagaaggcacagttgataaagacacgaccatcatggaattaagagatcgacttcctaagaagcagcaagcaagtgcttccactgatggtgtcgataagctttctgggaaagagsagagttttacttctttggaagttagaaaagttgctgaaactaaagaaaagagcwagcatctcaaaaccaaaacatgtaaaaaagtacaggatggcttatctgatattgcagagaaattcctaaagaaagaccagagcgatgaaacttctgaagatgataaaaagcagagcaaaaagggaactgaagaaaaaaagaaaccttcagactttaagaaaaaagtaattaaaatggaacaacagtatgaatcttcatctgatggcactgaaaagttacctgagcgagaagaaatttgtcattttcctaagggcataaaacaaattaagaatggaacaactgatggagaaaagaaaagtaaaaaaataagagataaaacttctaaaaagaaggatgaattatctgattatgctgagaagtcaacagggaaaggagatagttgtgactcttcagaggataaaaagagtaagaatggagcatatggtagagagaagaaaaggtgcaagttgcttggaaagagttcaaggaagagacaagattgytcatcatctgatactgagaaatattccatgaaagaagatggttgtaactcttctgataagagactraaaagaatagaattgagggaaagaagaaatttaagttcaaagagaaatactaaggaaatacaaagtggctcatcatcatctgatgctgaggaaagttctgaagataataaaaagaagaagcaaagaacttcatctaaaaagaaggcagtcattgtcaaggagaaaaagagaaactccctaagaacaagcactaaaaggaagcaagctgacattacatcctcatcttcttctgatatagaagatgatgatcagaattctataggtgagggaagcagcgatgaacagaaaattaagcctgtsactgaaaatttagtgctgtcttcacatactggattttgccaatcttcaggagatgaagccttatctaaatcagtgcctgtcacagtggatgatgatgatgacgacaatgatcctgagaatagaattgccaagaagatgcttttagaagaaattaaagccaatctttcctctgatgaggatggatcttcagatgatgagccagaagaagggaaaaaaagaactggaaaacaaaatgaagaaaacccaggagatgaggaagcaaaaaatcaagtcaattctgaatcagattcagattctgaagaatctaagaagccaagatacagacataggcttttgcggcacaaattgactgtgagtgacggagaatctggagaagaaaaaaagacaaagcctaaagagcataaagaagtcaaaggcagaaacagaagaaaggtgagcagtgaagattcagaagattctgattttcaggaatcaggagttagtgaagaagttagtgaatccgaagatgaacagcggcccagaacaaggtctgcaaagaaagcagagttggaagaaaatcagcggagctataaacagaaaaagaaaaggcgacgtattaaggttcaagaagattcatccagtgaaaacaagagtaattctgaggaagaagaggaggaaaaagaagaggaggaggaagaggaggaggaggaggaagaggaggaggaagatgaaaatgatgattccaagtctcctggaaaaggcagaaagaaaattcggaagattcttaaagatgataaactgagaacagaaacacaaaatgctcttaaggaagaggaagagagacgaaaacgtattgctgagagggagcgtgagcgagaaaaattgagagaggtgatagaaattgaagatgcttcacccaccaagtgtccaataacaaccaagttggktttagatgaagatgaagaaaccaaagaacctttagtgcagkttcayagaaatatggttatcaaattgaaaccccatcaagtagatggtgttcagtttatgtgggattgctgctgtgagtctgtgaaaaaaacaaagaaatctccaggttcaggatgcattcttgcccactgtatgggccttggtaagactttacaggtggtaagttttcttcatacagttcttttgtgtgacaaactggatttcagcayggcgttagtggtttgtcctcttaatactgctttgaattggatgaatgaatttgagaagtggcaagagggattaaaagatgatgagaagcttgaggtttctgaattagcaactgtgaaacgtcctcaggagagaagctacatgctgcagaggtggcaagaagatggtggtgttatgatcataggctatgagatgtatagaaatcttgctcaaggaaggaatgtgaagagtcggaaacttaaagaaatatttaacaaagctttggttgatccaggccctgattttgttgtttgtgatgaaggccatattctaaaaaatgaagcatctgctgtttctaaagctatgaattctatacgatcaaggaggaggattattttaacaggaacaccacttcaaaataacctaattgagtatcattgtatggttaattttatcaaggaaaatttacttggatccattaaggagttcaggaatagatttataaatccaattcaaaatggtcagtgtgcagattctaccatggtagatgtcagagtgatgaaaaaacgtgctcacattctctatgagatgttagctggatgtgttcagaggaaagattatacagcattaacaaaattcttgcctccaaaacacgaatatgtgttagctgtgagaatgacttctattcagtgcaagctctatcagtactacttagatcacttaacaggtgtgggcaataatagtgaaggtggaagaggaaaggcaggtgcaaagcttttccaagattttcagatgttaagtagaatatggactcatccttggtgtttgcagctagactacattagcaaagaaaataagggttattttgatgaagacagtatggatgaatttatagcctcagattctgatgaaacctccatgagtttaagctccgatgattatacaaaaaagaagaaaaaagggaaaaaggggaaaaaagatagtagctcaagtggaagtggcagtgacaatgatgttgaagtgattaaggtctggaattcaagatctcggggaggtggtgaaggaaatgtggatgaaacaggaaacaatccttctgtttctttaaaactggaagaaagtaaagctacttcttcttctaatccaagcagcccagctccagactggtacaaagattttgttacagatgctgatgctgaggttttagagcattctgggaaaatggtacttctctttgaaattcttcgaatggcagaggaaattggggataaagtccttgttttcagccagtccctcatatctctggacttgattgaagattttcttgaattagctagtagggagaagacagaagataaagataaaccccttatttataaaggtgaggggaagtggcttcgaaacattgactattaccgtttagatggttccactactgcacagtcaaggaagaagtgggctgaagaatttaatgatgaaactaatgtgagaggacgattatttatcatttctactaaagcaggatctctaggaattaatctggtagctgctaatcgagtaattatattcgacgcttcttggaatccatcttatgacatccagagtatattcagagtttatcgctttggacaaactaagcctgtttatgtatataggttcttagctcagggaaccatggaagataagatttatgatcggcaagtaactaagcagtcactgtcttttcgagttgttgatcagcagcaggtggagcgtcattttactatgaatgagcttactgaactttatacttttgagccagacttattagatgaccctaattcagaaaagaagaagaagagggatactcccatgctgccaaaggataccatacttgcagagctccttcagatacataaagaacacattgtaggataccatgaacatgattctcttttggaccacaaagaagaagaagagttgactgaagaagaaagaaaagcagcttgggctgagtatgaagcagagaagaagggactgaccatgcgtttcaacataccaactgggaccaatttaccccctgtcagtttcaactctcaaactccttatattcctttcaatttgggagccctgtcagcaatgagtaatcaacagctggaggacctcattaatcaaggaagagaaaaagttgtagaagcaacaaacagtgtgacagcagtgaggattcaacctcttgaggatataatttcagctgtatggaaggagaayatgaatctctcagaggcccaagtacaggcgttagcattaagtagacaagccagccaggagcttgatgttaaacgaagagaagcaatctacaatgatgtattgacaaaacaacagatgttaatcagctgtgttcagcgaatacttatgaacagaaggctccagcagcagtacaatcagcagcaacagcaacaaatgacttatcaacaagcaacactgggtcacctcatgatgccaaagcccccaaatttgatcatgaatccttctaactaccagcagattgatatgagaggaatgtatcagccagtggctggtggtatgcagccaccaccattacagcgtgcaccacccccaatgagaagcaaaaatccaggaccttcccaagggaaatcaatgtgattttgcactaaaagcttaatggattgttaaaatcatagaaagatcttttatttytttaggaatcaatgacttaacagaactcaactgtataaatagtttggtccccttaaatgccaatcttccatattagttttactttttttttttttaaatagggcataccatttcttcctgacatttgtcagtgatgttgcctagaatcttcttacacaygctgagtacagaagatatttcaaattgttttcagtgaaaacaagtccttccataatagtaacaactccacagatttcctctctaaatttttatgcctgcttttagcaaccataaaattgtcataaaattaataaatttaggaaagaataaagatttatatattcattctttacatataaaaacacacagctgagttcttagagttgattcctcaagttatgaaatacttttgtacttaatccatttcttgattaaagtgattgaaatggttttaatgttcttttgactgaagtctgaaactgggctcctgctttattgtctctgtgactgaaagttagaaactgagggttatctttgacacagaattgtgtgcaatattcttaaatactactgctctaaaagttggagaagtcttgcagttatcttagcattgtataaacagccttaagtatagcctaagaagagaattcctttttcttctttagtccttctgccattttttattttcagttatatgtgctgaaataattactggtaaaatttcagggttgtggattatcttccacacatgaattttctctctcctggcacgaatataaagcacatctcttaactgcatggtgccagtgctaatgcttcatcctgttgctggcagtgggatgtggacttagaaaatcaagttctagcattttagtaggttaacactgaagttgtggttgttaggttcacaccctgttttataaacaacatcaaaatggcagaaccattgctgactttaggttcacatgaggaatgtacttttaacaattcccagtactatcagtattgtgaaataattcctctgaaagataagaatcactggcttctatgcgcttcttttctctcatcatcatgttcttttaccccagtttccttacatttttttaaattgtttcagagtttgttttttttttagtttagattgtgaggcaattattaaatcaaaattaattcatccaatacccctttactagaagttttactagaaaatgtattacattttattttttcttaatccagttctgcaaaaatgacctataaatttattcatgtacaattttggttacttgaattgttaaagaaaacattgtttttgactatgggagtcaactcaacatggcagaaccatttttgagatgatgatacaacaggtagtgaaacagcttaagaattccaaaaaaaaaaaaaaaaaaaaaaaaaagaaaactgggtttgggctttgctttaggtatcactggattagaatgagtttaacattagctaaaactgctttgagttgtttggatgattaagagattgccatttttatcttggaagaactagtggtaaaacatccaagagcactaggattgtgatacagaatttgtgaggtttggtggatccacgcccctctcccccactttcccatgatgaaatatcactaataaatcctgtatatttagatattatgctagccatgtaatcagatttatttaattgggtggggcaggtgtgtatttactttagaaaaaatgaaaaagacaagatttatgagaaatatttgaaggcagtacactctggccaactgttaccagttggtatttctacaagttcagaatattttaaacctgatttactagacctgggaattttcaacatggtctaattatttactcaaagacatagatgtgaaaattttaggcaaccttctaaatctttttcaccatggatgaaactataacttaaagaataatacttagaagggttaattggaaatcagagtttgaaataaaacttggaccactttgtatacactcttctcacttgacattttagctatataatatgtactttgagtataacatcaagctttaacaaatatttaaagacaaaaaaatcacgtcagtaaaatactaaaaggctcatttttatatttgttttagatgttttaaatagttgcaatggattaaaaatgatgatttaaaatgttgcttgtaatacagttttgcctgctaaattctccacattttgtaacctgttttattgtcccagttgtatagtaatgtttcagtccatcatccagctttggctgctgaaatcatacagctgtgaagacttgcctttgtttctgttagactgcttttcagt

SEQ ID NO: 3029 - DNA, 9959 bp, Homo sapiens
ctcggcccaacaaaatggcggcggcagcggtgtcgctttgtttccgcggctcctgcggcggtggcagtggtagcggcctttgagctgtggggaggttccagcagcagctacagtgacgactaagactccagtgcatttctatcgtaaccgggcgcgggggagcgcagatcggcgcccagcaatcacagaagccgacaaggcrttcaagcgaaaacatgaccgctgagcccatgagtgaaagcaagttgaatacattggtgcagaagcttcatgacttccttgcacactcatcagaagaatctgaagaaacaagttctcctccacgacttgcaatgaatcaaaacacagataaaatcagtggttctggaagtaactctgatatgatggaaaacagcaaggaagagggaactagctcttcagaaaaatccaagtcttcaggatcgtcacgatcaaagaggaaaccttcaattgtaacaaagtatgtagaatcagatgatgaaaaacctttggatgatgaaactgtaaatgaagatgcgtctaatgaaaattcagaaaatgatattactatgcagagcttgccaaaagaagatgggcttcatgggattgtgagctgcactgcttgtggacaacaggtcartcattttcaaaaagattccatttatagacacccttcattgcaagttcttatttgtaagaattgctttaagtattacatgagtgatgatattagccgtgactcagatggaatggatgaacaatgtaggtggtgtgcggaaggtggaaacttgatttgttgtgacttttgccataatgctttctgcaagaaatgcattctacgcaaccttggtcgaaaggagttgtccacaataatggatgaaaacaaccaatggtattgctacatttgtcacccagagcctttgttggacttggtcactgcatgtaacagcgtatttgagaatttagaacagttgttgcagcaaaataagaagaagataaaagttgacagtgaaaagagtaataaagtatatgaacatacatccagattttctccaaagaagactagttcaaattgtaatggagaagaaaagaaattagatgattcctgttctggctctgtaacctactcttattccgcactaattgtgcccaaagagatgattaagaaggcaaaaaaactgattgagaccacagccaacatgaactccagttatgttaaatttttaaagcaggcaacagataattcagaaatcagttctgctacaaaattacgtcagcttaaggcttttaagtctgtgttggctgatattaagaaggctcatcttgcattggaagaagacttaaattccgagtttcgagcgatggatgctgtaaacaaagagaaaaataccaaagagcataaagtcatagatgctaagtttgaaacaaaagcacgaaaaggagaaaaaccttgtgctttggaaaagaaggatatttcaaagtcagaagctaaactttcaagaaaacaggtagatagtgagcacatgcatcagaatgttccaacagaggaacaaagaacaaataaaagyaccggtggtgaacataagaaatctgatagaaaagaagaacctcaatatgaacctgccaacacttctgaagatttagacatggatattgtgtctgttccttcctcagttccagaagacatttttgagaatcttgagactgctatggaagttcagagttcagttgatcatcaaggggatggcagcagtggaactgaacaagaagtggagagttcatctgtaaaattaaatatttcttcaaaagacaacagaggaggtattaaatcaaaaactacagctaaagtaacaaaagaattatatgttaaactcactcctgtttcccttyctaattccccaattaaaggtgctgattgtcaggaagttccacaagataaagatggctataaaagttgtggtctgaaccccaagttagagaaatgtggacttggacaggaaaacagtgataatgagcatttggttgaaaatgaagtttcattacttttagaggaatctgatcttcgragatccccacgtgtaaagactacacccttgaggcgaccgacagaaactaaccctgtaacatctaattcagatgaagaatgtaatgaaacagttaaggagaaacaaaaactatcagttccagtgagaaaaaaggataagcgtaattcttctgacagtgctatagataatcctaagcctaataaattgccaaaatctaagcaatcagagactgtggatcaaaattcagattctgatgaaatgctagcaatcctcaaagrggtgagcaggatgagtcacagttcttcttcagatactgatattaatgaaattcatacaaaccataagactttgtatgatttaaagactcaggcggggaaagatgataaaggaaaaaggaaacgaaaaagttctacatctggctcagattttgatactaaaaagggcaaatcagctaagagctctataatttctaaaaagaaacgacaaacccagtctgagtcttctaattatgactcagaattagaaaaagagataaagagcatgagtaaaattggtgctgccagaaccaccaaaaaaagaattccaaatacaaaagattttgactcttctgaagatgagaaacacagcaaaaaaggaatggataatcaagggcacaaaaatttgaagacctcacaagaaggatcatctgatgatgctgaaagaaaacaagagagagagactttctcttcagcagaaggcacagttgataaagacacgaccatcatggaattaagagatcgacttcctaagaagcagcaagcaagtgcttccactgatggtgtcgataagctttctgggaaagagsagagttttacttctttggaagttagaaaagttgctgaaactaaagaaaagagcwagcatctcaaaaccaaaacatgtaaaaaagtacaggatggcttatctgatattgcagagaaattcctaaagaaagaccagagcgatgaaacttctgaagatgataaaaagcagagcaaaaagggaactgaagaaaaaaagaaaccttcagactttaagaaaaaagtaattaaaatggaacaacagtatgaatcttcatctgatggcactgaaaagttacctgagcgagaagaaatttgtcattttcctaagggcataaaacaaattaagaatggaacaactgatggagaaaagaaaagtaaaaaaataagagataaaacttctaaaaagaaggatgaattatctgattatgctgagaagtcaacagggaaaggagatagttgtgactcttcagaggataaaaagagtaagaatggagcatatggtagagagaagaaaaggtgcaagttgcttggaaagagttcaaggaagagacaagattgytcatcatctgatactgagaaatattccatgaaagaagatggttgtaactcttctgataagagactraaaagaatagaattgagggaaagaagaaatttaagttcaaagagaaatactaaggaaatacaaagtggctcatcatcatctgatgctgaggaaagttctgaagataataaaaagaagaagcaaagaacttcatctaaaaagaaggcagtcattgtcaaggagaaaaagagaaactccctaagaacaagcactaaaaggaagcaagctgacattacatcctcatcttcttctgatatagaagatgatgatcagaattctataggtgagggaagcagcgatgaacagaaaattaagcctgtsactgaaaatttagtgctgtcttcacatactggattttgccaatcttcaggagatgaagccttatctaaatcagtgcctgtcacagtggatgatgatgatgacgacaatgatcctgagaatagaattgccaagaagatgcttttagaagaaattaaagccaatctttcctctgatgaggatggatcttcagatgatgagccagaagaagggaaaaaaagaactggaaaacaaaatgaagaaaacccaggagatgaggaagcaaaaaatcaagtcaattctgaatcagattcagattctgaagaatctaagaagccaagatacagacataggcttttgcggcacaaattgactgtgagtgacggagaatctggagaagaaaaaaagacaaagcctaaagagcataaagaagtcaaaggcagaaacagaagaaaggtgagcagtgaagattcagaagattctgattttcaggaatcaggagttagtgaagaagttagtgaatccgaagatgaacagcggcccagaacaaggtctgcaaagaaagcagagttggaagaaaatcagcggagctataaacagaaaaagaaaaggcgacgtattaaggttcaagaagattcatccagtgaaaacaagagtaattctgaggaagaagaggaggaaaaagaagaggaggaggaagaggaggaggaggaggaagaggaggaggaagatgaaaatgatgattccaagtctcctggaaaaggcagaaagaaaattcggaagattcttaaagatgataaactgagaacagaaacacaaaatgctcttaaggaagaggaagagagacgaaaacgtattgctgagagggagcgtgagcgagaaaaattgagagaggtgatagaaattgaagatgcttcacccaccaagtgtccaataacaaccaagttggktttagatgaagatgaagaaaccaaagaacctttagtgcagkttcayagaaatatggttatcaaattgaaaccccatcaagtagatggtgttcagtttatgtgggattgctgctgtgagtctgtgaaaaaaacaaagaaatctccaggttcaggatgcattcttgcccactgtatgggccttggtaagactttacaggtggtaagttttcttcatacagttcttttgtgtgacaaactggatttcagcayggcgttagtggtttgtcctcttaatactgctttgaattggatgaatgaatttgagaagtggcaagagggattaaaagatgatgagaagcttgaggtttctgaattagcaactgtgaaacgtcctcaggagagaagctacatgctgcagaggtggcaagaagatggtggtgttatgatcataggctatgagatgtatagaaatcttgctcaaggaaggaatgtgaagagtcggaaacttaaagaaatatttaacaaagctttggttgatccaggccctgattttgttgtttgtgatgaaggccatattctaaaaaatgaagcatctgctgtttctaaagctatgaattctatacgatcaaggaggaggattattttaacaggaacaccacttcaaaataacctaattgagtatcattgtatggttaattttatcaaggaaaatttacttggatccattaaggagttcaggaatagatttataaatccaattcaaaatggtcagtgtgcagattctaccatggtagatgtcagagtgatgaaaaaacgtgctcacattctctatgagatgttagctggatgtgttcagaggaaagattatacagcattaacaaaattcttgcctccaaaacacgaatatgtgttagctgtgagaatgacttctattcagtgcaagctctatcagtactacttagatcacttaacaggtgtgggcaataatagtgaaggtggaagaggaaaggcaggtgcaaagcttttccaagattttcagatgttaagtagaatatggactcatccttggtgtttgcagctagactacattagcaaagaaaataagggttattttgatgaagacagtatggatgaatttatagcctcagattctgatgaaacctccatgagtttaagctccgatgattatacaaaaaagaagaaaaaagggaaaaaggggaaaaaagatagtagctcaagtggaagtggcagtgacaatgatgttgaagtgattaaggtctggaattcaagatctcggggaggtggtgaaggaaatgtggatgaaacaggaaacaatccttctgtttctttaaaactggaagaaagtaaagctacttcttcttctaatccaagcagcccagctccagactggtacaaagattttgttacagatgctgatgctgaggttttagagcattctgggaaaatggtacttctctttgaaattcttcgaatggcagaggaaattggggataaagtccttgttttcagccagtccctcatatctctggacttgattgaagattttcttgaattagctagtagggagaagacagaagataaagataaaccccttatttataaaggtgaggggaagtggcttcgaaacattgactattaccgtttagatggttccactactgcacagtcaaggaagaagtgggctgaagaatttaatgatgaaactaatgtgagaggacgattatttatcatttctactaaagcaggatctctaggaattaatctggtagctgctaatcgagtaattatattcgacgcttcttggaatccatcttatgacatccagagtatattcagagtttatcgctttggacaaactaagcctgtttatgtatataggttcttagctcagggaaccatggaagataagatttatgatcggcaagtaactaagcagtcactgtcttttcgagttgttgatcagcagcaggtggagcgtcattttactatgaatgagcttactgaactttatacttttgagccagacttattagatgaccctaattcagaaaagaagaagaagagggatactcccatgctgccaaaggataccatacttgcagagctccttcagatacataaagaacacattgtaggataccatgaacatgattctcttttggaccacaaagaagaagaagagttgactgaagaagaaagaaaagcagcttgggctgagtatgaagcagagaagaagggactgaccatgcgtttcaacataccaactgggaccaatttaccccctgtcagtttcaactctcaaactccttatattcctttcaatttgggagccctgtcagcaatgagtaatcaacagctggaggacctcattaatcaaggaagagaaaaagttgtagaagcaacaaacagtgtgacagcagtgaggattcaacctcttgaggatataatttcagctgtatggaaggagaayatgaatctctcagaggcccaagtacaggcgttagcattaagtagacaagccagccaggagcttgatgttaaacgaagagaagcaatctacaatgatgtattgacaaaacaacagatgttaatcagctgtgttcagcgaatacttatgaacagaaggctccagcagcagtacaatcagcagcaacagcaacaaatgacttatcaacaagcaacactgggtcacctcatgatgccaaagcccccaaatttgatcatgaatccttctaactaccagcagattgatatgagaggaatgtatcagccagtggctggtggtatgcagccaccaccattacagcgtgcaccacccccaatgagaagcaaaaatccaggaccttcccaagggaaatcaatgtgattttgcactaaaagcttaatggattgttaaaatcatagaaagatcttttatttytttaggaatcaatgacttaacagaactcaactgtataaatagtttggtccccttaaatgccaatcttccatattagttttactttttttttttttaaatagggcataccatttcttcctgacatttgtcagtgatgttgcctagaatcttcttacacaygctgagtacagaagatatttcaaattgttttcagtgaaaacaagtccttccataatagtaacaactccacagatttcctctctaaatttttatgcctgcttttagcaaccataaaattgtcataaaattaataaatttaggaaagaataaagatttatatattcattctttacatataaaaacacacagctgagttcttagagttgattcctcaagttatgaaatacttttgtacttaatccatttcttgattaaagtgattgaaatggttttaatgttcttttgactgaagtctgaaactgggctcctgctttattgtctctgtgactgaaagttagaaactgagggttatctttgacacagaattgtgtgcaatattcttaaatactactgctctaaaagttggagaagtcttgcagttatcttagcattgtataaacagccttaagtatagcctaagaagagaattcctttttcttctttagtccttctgccattttttattttcagttatatgtgctgaaataattactggtaaaatttcagggttgtggattatcttccacacatgaattttctctctcctggcacgaatataaagcacatctcttaactgcatggtgccagtgctaatgcttcatcctgttgctggcagtgggatgtggacttagaaaatcaagttctagcattttagtaggttaacactgaagttgtggttgttaggttcacaccctgttttataaacaacatcaaaatggcagaaccattgctgactttaggttcacatgaggaatgtacttttaacaattcccagtactatcagtattgtgaaataattcctctgaaagataagaatcactggcttctatgcgcttcttttctctcatcatcatgttcttttaccccagtttccttacatttttttaaattgtttcagagtttgttttttttttagtttagattgtgaggcaattattaaatcaaaattaattcatccaatacccctttactagaagttttactagaaaatgtattacattttattttttcttaatccagttctgcaaaaatgacctataaatttattcatgtacaattttggttacttgaattgttaaagaaaacattgtttttgactatgggagtcaactcaacatggcagaaccatttttgagatgatgatacaacaggtagtgaaacagcttaagaattccaaaaaaaaaaaaaaaaaaaaaaaaaagaaaactgggtttgggctttgctttaggtatcactggattagaatgagtttaacattagctaaaactgctttgagttgtttggatgattaagagattgccatttttatcttggaagaactagtggtaaaacatccaagagcactaggattgtgatacagaatttgtgaggtttggtggatccacgcccctctcccccactttcccatgatgaaatatcactaataaatcctgtatatttagatattatgctagccatgtaatcagatttatttaattgggtggggcaggtgtgtatttactttagaaaaaatgaaaaagacaagatttatgagaaatatttgaaggcagtacactctggccaactgttaccagttggtatttctacaagttcagaatattttaaacctgatttactagacctgggaattttcaacatggtctaattatttactcaaagacatagatgtgaaaattttaggcaaccttctaaatctttttcaccatggatgaaactataacttaaagaataatacttagaagggttaattggaaatcagagtttgaaataaaacttggaccactttgtatacactcttctcacttgacattttagctatataatatgtactttgagtataacatcaagctttaacaaatatttaaagacaaaaaaatcacgtcagtaaaatactaaaaggctcatttttatatttgttttagatgttttaaatagttgcaatggattaaaaatgatgatttaaaatgttgcttgtaatacagttttgcctgctaaattctccacattttgtaacctgttttattgtcccagttgtatagtaatgtttcagtccatcatccagctttggctgctgaaatcatacagctgtgaagacttgcctttgtttctgttagactgcttttcagt

SEQ ID NO: 3030 - DNA, 9916 bp, Homo sapiens
ctcggcccaacaaaatggcggcggcagcggtgtcgctttgtttccgcggctcctgcggcggtggcagtggtagcggcctttgagctgtggggaggttccagcagcagctacagtgacgactaagactccagtgcatttctatcgtaaccgggcgcgggggagcgcagatcggcgcccagcaatcacagaagccgacaaggcrttcaagcgaaaacatgaccgctgagcccatgagtgaaagcaagttgaatacattggtgcagaagcttcatgacttccttgcacactcatcagaagaatctgaagaaacaagttctcctccacgacttgcaatgaatcaaaacacagataaaatcagtggttctggaagtaactctgatatgatggaaaacagcaaggaagagggaactagctcttcagaaaaatccaagtcttcaggatcgtcacgatcaaagaggaaaccttcaattgtaacaaagtatgtagaatcagatgatgaaaaacctttggatgatgaaactgtaaatgaagatgcgtctaatgaaaattcagaaaatgatattactatgcagagcttgccaaaaggtacagtgattgtacagccagagccagtgctgaatgaagacaaagatgattttaaagggcctgaatttagaagcagaagtaaaatgaaaactgaaaatctcaaaaaacgcggagaagatgggcttcatgggattgtgagctgcactgcttgtggacaacaggtcartcattttcaaaaagattccatttatagacacccttcattgcaagttcttatttgtaagaattgctttaagtattacatgagtgatgatattagccgtgactcagatggaatggatgaacaatgtaggtggtgtgcggaaggtggaaacttgatttgttgtgacttttgccataatgctttctgcaagaaatgcattctacgcaaccttggtcgaaaggagttgtccacaataatggatgaaaacaaccaatggtattgctacatttgtcacccagagcctttgttggacttggtcactgcatgtaacagcgtatttgagaatttagaacagttgttgcagcaaaataagaagaagataaaagttgacagtgaaaagagtaataaagtatatgaacatacatccagattttctccaaagaagactagttcaaattgtaatggagaagaaaagaaattagatgattcctgttctggctctgtaacctactcttattccgcactaattgtgcccaaagagatgattaagaaggcaaaaaaactgattgagaccacagccaacatgaactccagttatgttaaatttttaaagcaggcaacagataattcagaaatcagttctgctacaaaattacgtcagcttaaggcttttaagtctgtgttggctgatattaagaaggctcatcttgcattggaagaagacttaaattccgagtttcgagcgatggatgctgtaaacaaagagaaaaataccaaagagcataaagtcatagatgctaagtttgaaacaaaagcacgaaaaggagaaaaaccttgtgctttggaaaagaaggatatttcaaagtcagaagctaaactttcaagaaaacaggtagatagtgagcacatgcatcagaatgttccaacagaggaacaaagaacaaataaaagyaccggtggtgaacataagaaatctgatagaaaagaagaacctcaatatgaacctgccaacacttctgaagatttagacatggatattgtgtctgttccttcctcagttccagaagacatttttgagaatcttgagactgctatggaagttcagagttcagttgatcatcaaggggatggcagcagtggaactgaacaagaagtggagagttcatctgtaaaattaaatatttcttcaaaagacaacagaggaggtattaaatcaaaaactacagctaaagtaacaaaagaattatatgttaaactcactcctgtttcccttyctaattccccaattaaaggtgctgattgtcaggaagttccacaagataaagatggctataaaagttgtggtctgaaccccaagttagagaaatgtggacttggacaggaaaacagtgataatgagcatttggttgaaaatgaagtttcattacttttagaggaatctgatcttcgragatccccacgtgtaaagactacacccttgaggcgaccgacagaaactaaccctgtaacatctaattcagatgaagaatgtaatgaaacagttaaggagaaacaaaaactatcagttccagtgagaaaaaaggataagcgtaattcttctgacagtgctatagataatcctaagcctaataaattgccaaaatctaagcaatcagagactgtggatcaaaattcagattctgatgaaatgctagcaatcctcaaagrggtgagcaggatgagtcacagttcttcttcagatactgatattaatgaaattcatacaaaccataagactttgtatgatttaaagactcaggcggggaaagatgataaaggaaaaaggaaacgaaaaagttctacatctggctcagattttgatactaaaaagggcaaatcagctaagagctctataatttctaaaaagaaacgacaaacccagtctgagtcttctaattatgactcagaattagaaaaagagataaagagcatgagtaaaattggtgctgccagaaccaccaaaaaaagaattccaaatacaaaagattttgactcttctgaagatgagaaacacagcaaaaaaggaatggataatcaagggcacaaaaatttgaagacctcacaagaaggatcatctgatgatgctgaaagaaaacaagagagagagactttctcttcagcagaaggcacagttgataaagacacgaccatcatggaattaagagatcgacttcctaagaagcagcaagcaagtgcttccactgatggtgtcgataagctttctgggaaagagsagagttttacttctttggaagttagaaaagttgctgaaactaaagaaaagagcwagcatctcaaaaccaaaacatgtaaaaaagtacaggatggcttatctgatattgcagagaaattcctaaagaaagaccagagcgatgaaacttctgaagatgataaaaagcagagcaaaaagggaactgaagaaaaaaagaaaccttcagactttaagaaaaaagtaattaaaatggaacaacagtatgaatcttcatctgatggcactgaaaagttacctgagcgagaagaaatttgtcattttcctaagggcataaaacaaattaagaatggaacaactgatggagaaaagaaaagtaaaaaaataagagataaaacttctaaaaagaaggatgaattatctgattatgctgagaagtcaacagggaaaggagatagttgtgactcttcagaggataaaaagagtaagaatggagcatatggtagagagaagaaaaggtgcaagttgcttggaaagagttcaaggaagagacaagattgytcatcatctgatactgagaaatattccatgaaagaagatggttgtaactcttctgataagagactraaaagaatagaattgagggaaagaagaaatttaagttcaaagagaaatactaaggaaatacaaagtggctcatcatcatctgatgctgaggaaagttctgaagataataaaaagaagaagcaaagaacttcatctaaaaagaaggcagtcattgtcaaggagaaaaagagaaactccctaagaacaagcactaaaaggaagcaagctgacattacatcctcatcttcttctgatatagaagatgatgatcagaattctataggtgagggaagcagcgatgaacagaaaattaagcctgtsactgaaaatttagtgctgtcttcacatactggattttgccaatcttcaggagatgaagccttatctaaatcagtgcctgtcacagtggatgatgatgatgacgacaatgatcctgagaatagaattgccaagaagatgcttttagaagaaattaaagccaatctttcctctgatgaggatggatcttcagatgatgagccagaagaagggaaaaaaagaactggaaaacaaaatgaagaaaacccaggagatgaggaagcaaaaaatcaagtcaattctgaatcagattcagattctgaagaatctaagaagccaagatacagacataggcttttgcggcacaaattgactgtgagtgacggagaatctggagaagaaaaaaagacaaagcctaaagagcataaagaagtcaaaggcagaaacagaagaaaggtgagcagtgaagattcagaagattctgattttcaggaatcaggagttagtgaagaagttagtgaatccgaagatgaacagcggcccagaacaaggtctgcaaagaaagcagagttggaagaaaatcagcggagctataaacagaaaaagaaaaggcgacgtattaaggttcaagaagattcatccagtgaaaacaagagtaattctgaggaagaagaggaggaaaaagaagaggaggaggaagaggaggaggaggaggaagaggaggaggaagatgaaaatgatgattccaagtctcctggaaaaggcagaaagaaaattcggaagattcttaaagatgataaactgagaacagaaacacaaaatgctcttaaggaagaggaagagagacgaaaacgtattgctgagagggagcgtgagcgagaaaaattgagagaggtgatagaaattgaagatgcttcacccaccaagtgtccaataacaaccaagttggktttagatgaagatgaagaaaccaaagaacctttagtgcagkttcayagaaatatggttatcaaattgaaaccccatcaagtagatggtgttcagtttatgtgggattgctgctgtgagtctgtgaaaaaaacaaagaaatctccaggttcaggatgcattcttgcccactgtatgggccttggtaagactttacaggtggtaagttttcttcatacagttcttttgtgtgacaaactggatttcagcayggcgttagtggtttgtcctcttaatactgctttgaattggatgaatgaatttgagaagtggcaagagggattaaaagatgatgagaagcttgaggtttctgaattagcaactgtgaaacgtcctcaggagagaagctacatgctgcagaggtggcaagaagatggtggtgttatgatcataggctatgagatgtatagaaatcttgctcaaggaaggaatgtgaagagtcggaaacttaaagaaatatttaacaaagctttggttgatccaggccctgattttgttgtttgtgatgaaggccatattctaaaaaatgaagcatctgctgtttctaaagctatgaattctatacgatcaaggaggaggattattttaacaggaacaccacttcaaaataacctaattgagtatcattgtatggttaattttatcaaggaaaatttacttggatccattaaggagttcaggaatagatttataaatccaattcaaaatggtcagtgtgcagattctaccatggtagatgtcagagtgatgaaaaaacgtgctcacattctctatgagatgttagctggatgtgttcaggtgcaaagcttttccaagattttcagatgttaagtagaatatggactcatccttggtgtttgcagctagactacattagcaaagaaaataagggttattttgatgaagacagtatggatgaatttatagcctcagattctgatgaaacctccatgagtttaagctccgatgattatacaaaaaagaagaaaaaagggaaaaaggggaaaaaagatagtagctcaagtggaagtggcagtgacaatgatgttgaagtgattaaggtctggaattcaagatctcggggaggtggtgaaggaaatgtggatgaaacaggaaacaatccttctgtttctttaaaactggaagaaagtaaagctacttcttcttctaatccaagcagcccagctccagactggtacaaagattttgttacagatgctgatgctgaggttttagagcattctgggaaaatggtacttctctttgaaattcttcgaatggcagaggaaattggggataaagtccttgttttcagccagtccctcatatctctggacttgattgaagattttcttgaattagctagtagggagaagacagaagataaagataaaccccttatttataaaggtgaggggaagtggcttcgaaacattgactattaccgtttagatggttccactactgcacagtcaaggaagaagtgggctgaagaatttaatgatgaaactaatgtgagaggacgattatttatcatttctactaaagcaggatctctaggaattaatctggtagctgctaatcgagtaattatattcgacgcttcttggaatccatcttatgacatccagagtatattcagagtttatcgctttggacaaactaagcctgtttatgtatataggttcttagctcagggaaccatggaagataagatttatgatcggcaagtaactaagcagtcactgtcttttcgagttgttgatcagcagcaggtggagcgtcattttactatgaatgagcttactgaactttatacttttgagccagacttattagatgaccctaattcagaaaagaagaagaagagggatactcccatgctgccaaaggataccatacttgcagagctccttcagatacataaagaacacattgtaggataccatgaacatgattctcttttggaccacaaagaagaagaagagttgactgaagaagaaagaaaagcagcttgggctgagtatgaagcagagaagaagggactgaccatgcgtttcaacataccaactgggaccaatttaccccctgtcagtttcaactctcaaactccttatattcctttcaatttgggagccctgtcagcaatgagtaatcaacagctggaggacctcattaatcaaggaagagaaaaagttgtagaagcaacaaacagtgtgacagcagtgaggattcaacctcttgaggatataatttcagctgtatggaaggagaayatgaatctctcagaggcccaagtacaggcgttagcattaagtagacaagccagccaggagcttgatgttaaacgaagagaagcaatctacaatgatgtattgacaaaacaacagatgttaatcagctgtgttcagcgaatacttatgaacagaaggctccagcagcagtacaatcagcagcaacagcaacaaatgacttatcaacaagcaacactgggtcacctcatgatgccaaagcccccaaatttgatcatgaatccttctaactaccagcagattgatatgagaggaatgtatcagccagtggctggtggtatgcagccaccaccattacagcgtgcaccacccccaatgagaagcaaaaatccaggaccttcccaagggaaatcaatgtgattttgcactaaaagcttaatggattgttaaaatcatagaaagatcttttatttytttaggaatcaatgacttaacagaactcaactgtataaatagtttggtccccttaaatgccaatcttccatattagttttactttttttttttttaaatagggcataccatttcttcctgacatttgtcagtgatgttgcctagaatcttcttacacaygctgagtacagaagatatttcaaattgttttcagtgaaaacaagtccttccataatagtaacaactccacagatttcctctctaaatttttatgcctgcttttagcaaccataaaattgtcataaaattaataaatttaggaaagaataaagatttatatattcattctttacatataaaaacacacagctgagttcttagagttgattcctcaagttatgaaatacttttgtacttaatccatttcttgattaaagtgattgaaatggttttaatgttcttttgactgaagtctgaaactgggctcctgctttattgtctctgtgactgaaagttagaaactgagggttatctttgacacagaattgtgtgcaatattcttaaatactactgctctaaaagttggagaagtcttgcagttatcttagcattgtataaacagccttaagtatagcctaagaagagaattcctttttcttctttagtccttctgccattttttattttcagttatatgtgctgaaataattactggtaaaatttcagggttgtggattatcttccacacatgaattttctctctcctggcacgaatataaagcacatctcttaactgcatggtgccagtgctaatgcttcatcctgttgctggcagtgggatgtggacttagaaaatcaagttctagcattttagtaggttaacactgaagttgtggttgttaggttcacaccctgttttataaacaacatcaaaatggcagaaccattgctgactttaggttcacatgaggaatgtacttttaacaattcccagtactatcagtattgtgaaataattcctctgaaagataagaatcactggcttctatgcgcttcttttctctcatcatcatgttcttttaccccagtttccttacatttttttaaattgtttcagagtttgttttttttttagtttagattgtgaggcaattattaaatcaaaattaattcatccaatacccctttactagaagttttactagaaaatgtattacattttattttttcttaatccagttctgcaaaaatgacctataaatttattcatgtacaattttggttacttgaattgttaaagaaaacattgtttttgactatgggagtcaactcaacatggcagaaccatttttgagatgatgatacaacaggtagtgaaacagcttaagaattccaaaaaaaaaaaaaaaaaaaaaaaaaagaaaactgggtttgggctttgctttaggtatcactggattagaatgagtttaacattagctaaaactgctttgagttgtttggatgattaagagattgccatttttatcttggaagaactagtggtaaaacatccaagagcactaggattgtgatacagaatttgtgaggtttggtggatccacgcccctctcccccactttcccatgatgaaatatcactaataaatcctgtatatttagatattatgctagccatgtaatcagatttatttaattgggtggggcaggtgtgtatttactttagaaaaaatgaaaaagacaagatttatgagaaatatttgaaggcagtacactctggccaactgttaccagttggtatttctacaagttcagaatattttaaacctgatttactagacctgggaattttcaacatggtctaattatttactcaaagacatagatgtgaaaattttaggcaaccttctaaatctttttcaccatggatgaaactataacttaaagaataatacttagaagggttaattggaaatcagagtttgaaataaaacttggaccactttgtatacactcttctcacttgacattttagctatataatatgtactttgagtataacatcaagctttaacaaatatttaaagacaaaaaaatcacgtcagtaaaatactaaaaggctcatttttatatttgttttagatgttttaaatagttgcaatggattaaaaatgatgatttaaaatgttgcttgtaatacagttttgcctgctaaattctccacattttgtaacctgttttattgtcccagttgtatagtaatgtttcagtccatcatccagctttggctgctgaaatcatacagctgtgaagacttgcctttgtttctgttagactgcttttcagt

SEQ ID NO: 3031 - DNA, 10934 bp, Homo sapiens
tgaaagcaagttgaatacattggtgcagaagcttcatgacttccttgcacactcatcagaagaatctgaagaaacaagttctcctccacgacttgcaatgaatcaaaacacagataaaatcagtggttctggaagtaactctgatatgatggaaaacagcaaggaagagggaactagctcttcagaaaaatccaagtcttcaggatcgtcacgatcaaagaggaaaccttcaattgtaacaaagtatgtagaatcagatgatgaaaaacctttggatgatgaaactgtaaatgaagatgcgtctaatgaaaattcagaaaatgatattactatgcagagcttgccaaaaggtacagtgattgtacagccagagccagtgctgaatgaagacaaagatgattttaaagggcctgaatttagaagcagaagtaaaatgaaaactgaaaatctcaaaaaacgcggagaagatgggcttcatgggattgtgagctgcactgcttgtggacaacaggtcartcattttcaaaaagattccatttatagacacccttcattgcaagttcttatttgtaagaattgctttaagtattacatgagtgatgatattagccgtgactcagatggaatggatgaacaatgtaggtggtgtgcggaaggtggaaacttgatttgttgtgacttttgccataatgctttctgcaagaaatgcattctacgcaaccttggtcgaaaggagttgtccacaataatggatgaaaacaaccaatggtattgctacatttgtcacccagagcctttgttggacttggtcactgcatgtaacagcgtatttgagaatttagaacagttgttgcagcaaaataagaagaagataaaagttgacagtgaaaagagtaataaagtatatgaacatacatccagattttctccaaagaagactagttcaaattgtaatggagaagaaaagaaattagatgattcctgttctggctctgtaacctactcttattccgcactaattgtgcccaaagagatgattaagaaggcaaaaaaactgattgagaccacagccaacatgaactccagttatgttaaatttttaaagcaggcaacagataattcagaaatcagttctgctacaaaattacgtcagcttaaggcttttaagtctgtgttggctgatattaagaaggctcatcttgcattggaagaagacttaaattccgagtttcgagcgatggatgctgtaaacaaagagaaaaataccaaagagcataaagtcatagatgctaagtttgaaacaaaagcacgaaaaggagaaaaaccttgtgctttggaaaagaaggatatttcaaagtcagaagctaaactttcaagaaaacaggtagatagtgagcacatgcatcagaatgttccaacagaggaacaaagaacaaataaaagyaccggtggtgaacataagaaatctgatagaaaagaagaacctcaatatgaacctgccaacacttctgaagatttagacatggatattgtgtctgttccttcctcagttccagaagacatttttgagaatcttgagactgctatggaagttcagagttcagttgatcatcaaggggatggcagcagtggaactgaacaagaagtggagagttcatctgtaaaattaaatatttcttcaaaagacaacagaggaggtattaaatcaaaaactacagctaaagtaacaaaagaattatatgttaaactcactcctgtttcccttyctaattccccaattaaaggtgctgattgtcaggaagttccacaagataaagatggctataaaagttgtggtctgaaccccaagttagagaaatgtggacttggacaggaaaacagtgataatgagcatttggttgaaaatgaagtttcattacttttagaggaatctgatcttcgragatccccacgtgtaaagactacacccttgaggcgaccgacagaaactaaccctgtaacatctaattcagatgaagaatgtaatgaaacagttaaggagaaacaaaaactatcagttccagtgagaaaaaaggataagcgtaattcttctgacagtgctatagataatcctaagcctaataaattgccaaaatctaagcaatcagagactgtggatcaaaattcagattctgatgaaatgctagcaatcctcaaagrggtgagcaggatgagtcacagttcttcttcagatactgatattaatgaaattcatacaaaccataagactttgtatgatttaaagactcaggcggggaaagatgataaaggaaaaaggaaacgaaaaagttctacatctggctcagattttgatactaaaaagggcaaatcagctaagagctctataatttctaaaaagaaacgacaaacccagtctgagtcttctaattatgactcagaattagaaaaagagataaagagcatgagtaaaattggtgctgccagaaccaccaaaaaaagaattccaaatacaaaagattttgactcttctgaagatgagaaacacagcaaaaaaggaatggataatcaagggcacaaaaatttgaagacctcacaagaaggatcatctgatgatgctgaaagaaaacaagagagagagactttctcttcagcagaaggcacagttgataaagacacgaccatcatggaattaagagatcgacttcctaagaagcagcaagcaagtgcttccactgatggtgtcgataagctttctgggaaagagsagagttttacttctttggaagttagaaaagttgctgaaactaaagaaaagagcwagcatctcaaaaccaaaacatgtaaaaaagtacaggatggcttatctgatattgcagagaaattcctaaagaaagaccagagcgatgaaacttctgaagatgataaaaagcagagcaaaaagggaactgaagaaaaaaagaaaccttcagactttaagaaaaaagtaattaaaatggaacaacagtatgaatcttcatctgatggcactgaaaagttacctgagcgagaagaaatttgtcattttcctaagggcataaaacaaattaagaatggaacaactgatggagaaaagaaaagtaaaaaaataagagataaaacttctaaaaagaaggatgaattatctgattatgctgagaagtcaacagggaaaggagatagttgtgactcttcagaggataaaaagagtaagaatggagcatatggtagagagaagaaaaggtgcaagttgcttggaaagagttcaaggaagagacaagattgytcatcatctgatactgagaaatattccatgaaagaagatggttgtaactcttctgataagagactraaaagaatagaattgagggaaagaagaaatttaagttcaaagagaaatactaaggaaatacaaagtggctcatcatcatctgatgctgaggaaagttctgaagataataaaaagaagaagcaaagaacttcatctaaaaagaaggcagtcattgtcaaggagaaaaagagaaactccctaagaacaagcactaaaaggaagcaagctgacattacatcctcatcttcttctgatatagaagatgatgatcagaattctataggtgagggaagcagcgatgaacagaaaattaagcctgtsactgaaaatttagtgctgtcttcacatactggattttgccaatcttcaggagatgaagccttatctaaatcagtgcctgtcacagtggatgatgatgatgacgacaatgatcctgagaatagaattgccaagaagatgcttttagaagaaattaaagccaatctttcctctgatgaggatggatcttcagatgatgagccagaagaagggaaaaaaagaactggaaaacaaaatgaagaaaacccaggagatgaggaagcaaaaaatcaagtcaattctgaatcagattcagattctgaagaatctaagaagccaagatacagacataggcttttgcggcacaaattgactgtgagtgacggagaatctggagaagaaaaaaagacaaagcctaaagagcataaagaagtcaaaggcagaaacagaagaaaggtgagcagtgaagattcagaagattctgattttcaggaatcaggagttagtgaagaagttagtgaatccgaagatgaacagcggcccagaacaaggtctgcaaagaaagcagagttggaagaaaatcagcggagctataaacagaaaaagaaaaggcgacgtattaaggttcaagaagattcatccagtgaaaacaagagtaattctgaggaagaagaggaggaaaaagaagaggaggaggaagaggaggaggaggaggaagaggaggaggaagatgaaaatgatgattccaagtctcctggaaaaggcagaaagaaaattcggaagattcttaaagatgataaactgagaacagaaacacaaaatgctcttaaggaagaggaagagagacgaaaacgtattgctgagagggagcgtgagcgagaaaaattgagagaggtgatagaaattgaagatgcttcacccaccaagtgtccaataacaaccaagttggktttagatgaagatgaagaaaccaaagaacctttagtgcagkttcayagaaatatggttatcaaattgaaaccccatcaagtagatggtgttcagtttatgtgggattgctgctgtgagtctgtgaaaaaaacaaagaaatctccaggttcaggatgcattcttgcccactgtatgggccttggtaagactttacaggtggtaagttttcttcatacagttcttttgtgtgacaaactggatttcagcayggcgttagtggtttgtcctcttaatactgctttgaattggatgaatgaatttgagaagtggcaagagggattaaaagatgatgagaagcttgaggtttctgaattagcaactgtgaaacgtcctcaggagagaagctacatgctgcagaggtggcaagaagatggtggtgttatgatcataggctatgagatgtatagaaatcttgctcaaggaaggaatgtgaagagtcggaaacttaaagaaatatttaacaaagctttggttgatccaggccctgattttgttgtttgtgatgaaggccatattctaaaaaatgaagcatctgctgtttctaaagctatgaattctatacgatcaaggaggaggattattttaacaggaacaccacttcaaaataacctaattgagtatcattgtatggttaattttatcaaggaaaatttacttggatccattaaggagttcaggaatagatttataaatccaattcaaaatggtcagtgtgcagattctaccatggtagatgtcagagtgatgaaaaaacgtgctcacattctctatgagatgttagctggatgtgttcagaggaaagattatacagcattaacaaaattcttgcctccaaaacacgaatatgtgttagctgtgagaatgacttctattcagtgcaagctctatcagtactacttagatcacttaacaggtgtgggcaataatagtgaaggtggaagaggaaaggcaggtgcaaagcttttccaagattttcagatgttaagtagaatatggactcatccttggtgtttgcagctagactacattagcaaagaaaataagggttattttgatgaagacagtatggatgaatttatagcctcagattctgatgaaacctccatgagtttaagctccgatgattatacaaaaaagaagaaaaaagggaaaaaggggaaaaaagatagtagctcaagtggaagtggcagtgacaatgatgttgaagtgattaaggtctggaattcaagatctcggggaggtggtgaaggaaatgtggatgaaacaggaaacaatccttctgtttctttaaaactggaagaaagtaaagctacttcttcttctaatccaagcagcccagctccagactggtacaaagattttgttacagatgctgatgctgaggttttagagcattctgggaaaatggtacttctctttgaaattcttcgaatggcagaggaaattggggataaagtccttgttttcagccagtccctcatatctctggacttgattgaagattttcttgaattagctagtagggagaagacagaagataaagataaaccccttatttataaaggtgaggggaagtggcttcgaaacattgactattaccgtttagatggttccactactgcacagtcaaggaagaagtgggctgaagaatttaatgatgaaactaatgtgagaggacgattatttatcatttctactaaagcaggatctctaggaattaatctggtagctgctaatcgagtaattatattcgacgcttcttggaatccatcttatgacatccagagtatattcagagtttatcgctttggacaaactaagcctgtttatgtatataggttcttagctcagggaaccatggaagataagatttatgatcggcaagtaactaagcagtcactgtcttttcgagttgttgatcagcagcaggtggagcgtcattttactatgaatgagcttactgaactttatacttttgagccagacttattagatgaccctaattcagaaaagaagaagaagagggatactcccatgctgccaaaggataccatacttgcagagctccttcagatacataaagaacacattgtaggataccatgaacatgattctcttttggaccacaaagaagaagaagagttgactgaagaagaaagaaaagcagcttgggctgagtatgaagcagagaagaagggactgaccatgcgtttcaacataccaactgggaccaatttaccccctgtcagtttcaactctcaaactccttatattcctttcaatttgggagccctgtcagcaatgagtaatcaacagctggaggacctcattaatcaaggaagagaaaaagttgtagaagcaacaaacagtgtgacagcagtgaggattcaacctcttgaggatataatttcagctgtatggaaggagaayatgaatctctcagaggcccaagtacaggcgttagcattaagtagacaagccagccaggagcttgatgttaaacgaagagaagcaatctacaatgatgtattgacaaaacaacagatgttaatcagctgtgttcagcgaatacttatgaacagaaggctccagcagcagtacaatcagcagcaacagcaacaaatgacttatcaacaagcaacactgggtcacctcatgatgccaaagcccccaaatttgatcatgaatccttctaactaccagcagattgatatgagaggaatgtatcagccagtggctggtggtatgcagccaccaccattacagcgtgcaccacccccaatgagaagcaaaaatccaggaccttcccaagggaaatcaatgtgattttgcactaaaagcttaatggattgttaaaatcatagaaagatcttttatttytttaggaatcaatgacttaacagaactcaactgtataaatagtttggtccccttaaatgccaatcttccatattagttttactttttttttttttaaatagggcataccatttcttcctgacatttgtcagtgatgttgcctagaatcttcttacacaygctgagtacagaagatatttcaaattgttttcagtgaaaacaagtccttccataatagtaacaactccacagatttcctctctaaatttttatgcctgcttttagcaaccataaaattgtcataaaattaataaatttaggaaagaataaagatttatatattcattctttacatataaaaacacacagctgagttcttagagttgattcctcaagttatgaaatacttttgtacttaatccatttcttgattaaagtgattgaaatggttttaatgttcttttgactgaagtctgaaactgggctcctgctttattgtctctgtgactgaaagttagaaactgagggttatctttgacacagaattgtgtgcaatattcttaaatactactgctctaaaagttggagaagtcttgcagttatcttagcattgtataaacagccttaagtatagcctaagaagagaattcctttttcttctttagtccttctgccattttttattttcagttatatgtgctgaaataattactggtaaaatttcagggttgtggattatcttccacacatgaattttctctctcctggcacgaatataaagcacatctcttaactgcatggtgccagtgctaatgcttcatcctgttgctggcagtgggatgtggacttagaaaatcaagttctagcattttagtaggttaacactgaagttgtggttgttaggttcacaccctgttttataaacaacatcaaaatggcagaaccattgctgactttaggttcacatgaggaatgtacttttaacaattcccagtactatcagtattgtgaaataattcctctgaaagataagaatcactggcttctatgcgcttcttttctctcatcatcatgttcttttaccccagtttccttacatttttttaaattgtttcagagtttgttttttttttagtttagattgtgaggcaattattaaatcaaaattaattcatccaatacccctttactagaagttttactagaaaatgtattacattttattttttcttaatccagttctgcaaaaatgacctataaatttattcatgtacaattttggttacttgaattgttaaagaaaacattgtttttgactatgggagtcaactcaacatggcagaaccatttttgagatgatgatacaacaggtagtgaaacagcttaagaattccaaaaaaaaaaaaaaaaaaaaaaaaaagaaaactgggtttgggctttgctttaggtatcactggattagaatgagtttaacattagctaaaactgctttgagttgtttggatgattaagagattgccatttttatcttggaagaactagtggtaaaacatccaagagcactaggattgtgatacagaatttgtgaggtttggtggatccacgcccctctcccccactttcccatgatgaaatatcactaataaatcctgtatatttagatattatgctagccatgtaatcagatttatttaattgggtggggcaggtgtgtatttactttagaaaaaatgaaaaagacaagatttatgagaaatatttgaaggcagtacactctggccaactgttaccagttggtatttctacaagttcagaatattttaaacctgatttactagacctgggaattttcaacatggtctaattatttactcaaagacatagatgtgaaaattttaggcaaccttctaaatctttttcaccatggatgaaactataacttaaagaataatacttagaagggttaattggaaatcagagtttgaaataaaacttggaccactttgtatacactcttctcacttgacattttagctatataatatgtactttgagtataacatcaagctttaacaaatatttaaagacaaaaaaatcacgtcagtaaaatactaaaaggctcatttttatatttgttttagatgttttaaatagttgcaatggattaaaaatgatgatttaaaatgttgcttgtaatacagttttgcctgctaaattctccacattttgtaacctgttttatttctttgggtgtaaagcgtttttgcttagtattgtgatattgtatatgttttgtcccagttgtatagtaatgtttcagtccatcatccagctttggctgctgaaatcatacagctgtgaagacttgcctttgtttctgttagactgcttttcagttctgtattgagtatcttaagtactgtagaaaagatgtcacttcttcctttaaggctgttttgtaatatatataaggactggaattgtgtttttaaagaaaagcattcaagtatgacaatatactatctgtgttttcaccattcaaagtgctgtttagtagttgaaacttaaactatttaatgtcatttaataaagtgaccaaaatgtgttgtgctctttattgtattttcacagctttgaaaatctgtgcacatactgtttcatagaaaatgtatagcttttgttgtcctatataatggtggttcttttgcacatttagttatttaatattgagaggtcacgaagtttggttattgaatctgttatatactaaattctgtaaagggagatctctcatctcaaaaagaatttacataccaggaagtccatgtgtgtttgtgttagttttggatgtctttgtgtaatccagccccatttcctgtttcccaacagctgtaacactcattttaagtcaagcagggctaccaacccacacttgatagaaaagctgcttaccattcagaagcttccttattacctggcctccaaatgagctgaatattttgtagccttcccttagctatgttcattttccctccattatcataaaatcagatcgatatttatgtgccccaaacaaaactttaagagcagttacattctgtcccagtagcccttgtttcctttgagagtagcatgttgtgaggctatagagacttattctaccagtaaaacaggtcaatccttttacatgtttattatactaaaaattatgttcagggtatttactactttatttcaccagactcagtctcaagtgacttggctatctccaaatcagatctacccttagagaataaacatttttctaccgttattttttttcaagtctataatctgagccagtcccaaaggagtgatcaagtttcagaaatgctttcatcttcacaacattttatatatactattatatggggtgaataaagttttaaatccgaaatatata

SEQ ID NO: 3032 - DNA, 11169 bp, Homo sapiens
ctcggcccaacaaaatggcggcggcagcggtgtcgctttgtttccgcggctcctgcggcggtggcagtggtagcggcctttgagctgtggggaggttccagcagcagctacagtgacgactaagactccagtgcatttctatcgtaaccgggcgcgggggagcgcagatcggcgcccagcaatcacagaagccgacaaggcrttcaagcgaaaacatgaccgctgagcccatgagtgaaagcaagttgaatacattggtgcagaagcttcatgacttccttgcacactcatcagaagaatctgaagaaacaagttctcctccacgacttgcaatgaatcaaaacacagataaaatcagtggttctggaagtaactctgatatgatggaaaacagcaaggaagagggaactagctcttcagaaaaatccaagtcttcaggatcgtcacgatcaaagaggaaaccttcaattgtaacaaagtatgtagaatcagatgatgaaaaacctttggatgatgaaactgtaaatgaagatgcgtctaatgaaaattcagaaaatgatattactatgcagagcttgccaaaaggtacagtgattgtacagccagagccagtgctgaatgaagacaaagatgattttaaagggcctgaatttagaagcagaagtaaaatgaaaactgaaaatctcaaaaaacgcggagaagatgggcttcatgggattgtgagctgcactgcttgtggacaacaggtcartcattttcaaaaagattccatttatagacacccttcattgcaagttcttatttgtaagaattgctttaagtattacatgagtgatgatattagccgtgactcagatggaatggatgaacaatgtaggtggtgtgcggaaggtggaaacttgatttgttgtgacttttgccataatgctttctgcaagaaatgcattctacgcaaccttggtcgaaaggagttgtccacaataatggatgaaaacaaccaatggtattgctacatttgtcacccagagcctttgttggacttggtcactgcatgtaacagcgtatttgagaatttagaacagttgttgcagcaaaataagaagaagataaaagttgacagtgaaaagagtaataaagtatatgaacatacatccagattttctccaaagaagactagttcaaattgtaatggagaagaaaagaaattagatgattcctgttctggctctgtaacctactcttattccgcactaattgtgcccaaagagatgattaagaaggcaaaaaaactgattgagaccacagccaacatgaactccagttatgttaaatttttaaagcaggcaacagataattcagaaatcagttctgctacaaaattacgtcagcttaaggcttttaagtctgtgttggctgatattaagaaggctcatcttgcattggaagaagacttaaattccgagtttcgagcgatggatgctgtaaacaaagagaaaaataccaaagagcataaagtcatagatgctaagtttgaaacaaaagcacgaaaaggagaaaaaccttgtgctttggaaaagaaggatatttcaaagtcagaagctaaactttcaagaaaacaggtagatagtgagcacatgcatcagaatgttccaacagaggaacaaagaacaaataaaagyaccggtggtgaacataagaaatctgatagaaaagaagaacctcaatatgaacctgccaacacttctgaagatttagacatggatattgtgtctgttccttcctcagttccagaagacatttttgagaatcttgagactgctatggaagttcagagttcagttgatcatcaaggggatggcagcagtggaactgaacaagaagtggagagttcatctgtaaaattaaatatttcttcaaaagacaacagaggaggtattaaatcaaaaactacagctaaagtaacaaaagaattatatgttaaactcactcctgtttcccttyctaattccccaattaaaggtgctgattgtcaggaagttccacaagataaagatggctataaaagttgtggtctgaaccccaagttagagaaatgtggacttggacaggaaaacagtgataatgagcatttggttgaaaatgaagtttcattacttttagaggaatctgatcttcgragatccccacgtgtaaagactacacccttgaggcgaccgacagaaactaaccctgtaacatctaattcagatgaagaatgtaatgaaacagttaaggagaaacaaaaactatcagttccagtgagaaaaaaggataagcgtaattcttctgacagtgctatagataatcctaagcctaataaattgccaaaatctaagcaatcagagactgtggatcaaaattcagattctgatgaaatgctagcaatcctcaaagrggtgagcaggatgagtcacagttcttcttcagatactgatattaatgaaattcatacaaaccataagactttgtatgatttaaagactcaggcggggaaagatgataaaggaaaaaggaaacgaaaaagttctacatctggctcagattttgatactaaaaagggcaaatcagctaagagctctataatttctaaaaagaaacgacaaacccagtctgagtcttctaattatgactcagaattagaaaaagagataaagagcatgagtaaaattggtgctgccagaaccaccaaaaaaagaattccaaatacaaaagattttgactcttctgaagatgagaaacacagcaaaaaaggaatggataatcaagggcacaaaaatttgaagacctcacaagaaggatcatctgatgatgctgaaagaaaacaagagagagagactttctcttcagcagaaggcacagttgataaagacacgaccatcatggaattaagagatcgacttcctaagaagcagcaagcaagtgcttccactgatggtgtcgataagctttctgggaaagagsagagttttacttctttggaagttagaaaagttgctgaaactaaagaaaagagcwagcatctcaaaaccaaaacatgtaaaaaagtacaggatggcttatctgatattgcagagaaattcctaaagaaagaccagagcgatgaaacttctgaagatgataaaaagcagagcaaaaagggaactgaagaaaaaaagaaaccttcagactttaagaaaaaagtaattaaaatggaacaacagtatgaatcttcatctgatggcactgaaaagttacctgagcgagaagaaatttgtcattttcctaagggcataaaacaaattaagaatggaacaactgatggagaaaagaaaagtaaaaaaataagagataaaacttctaaaaagaaggatgaattatctgattatgctgagaagtcaacagggaaaggagatagttgtgactcttcagaggataaaaagagtaagaatggagcatatggtagagagaagaaaaggtgcaagttgcttggaaagagttcaaggaagagacaagattgytcatcatctgatactgagaaatattccatgaaagaagatggttgtaactcttctgataagagactraaaagaatagaattgagggaaagaagaaatttaagttcaaagagaaatactaaggaaatacaaagtggctcatcatcatctgatgctgaggaaagttctgaagataataaaaagaagaagcaaagaacttcatctaaaaagaaggcagtcattgtcaaggagaaaaagagaaactccctaagaacaagcactaaaaggaagcaagctgacattacatcctcatcttcttctgatatagaagatgatgatcagaattctataggtgagggaagcagcgatgaacagaaaattaagcctgtsactgaaaatttagtgctgtcttcacatactggattttgccaatcttcaggagatgaagccttatctaaatcagtgcctgtcacagtggatgatgatgatgacgacaatgatcctgagaatagaattgccaagaagatgcttttagaagaaattaaagccaatctttcctctgatgaggatggatcttcagatgatgagccagaagaagggaaaaaaagaactggaaaacaaaatgaagaaaacccaggagatgaggaagcaaaaaatcaagtcaattctgaatcagattcagattctgaagaatctaagaagccaagatacagacataggcttttgcggcacaaattgactgtgagtgacggagaatctggagaagaaaaaaagacaaagcctaaagagcataaagaagtcaaaggcagaaacagaagaaaggtgagcagtgaagattcagaagattctgattttcaggaatcaggagttagtgaagaagttagtgaatccgaagatgaacagcggcccagaacaaggtctgcaaagaaagcagagttggaagaaaatcagcggagctataaacagaaaaagaaaaggcgacgtattaaggttcaagaagattcatccagtgaaaacaagagtaattctgaggaagaagaggaggaaaaagaagaggaggaggaagaggaggaggaggaggaagaggaggaggaagatgaaaatgatgattccaagtctcctggaaaaggcagaaagaaaattcggaagattcttaaagatgataaactgagaacagaaacacaaaatgctcttaaggaagaggaagagagacgaaaacgtattgctgagagggagcgtgagcgagaaaaattgagagaggtgatagaaattgaagatgcttcacccaccaagtgtccaataacaaccaagttggktttagatgaagatgaagaaaccaaagaacctttagtgcagkttcayagaaatatggttatcaaattgaaaccccatcaagtagatggtgttcagtttatgtgggattgctgctgtgagtctgtgaaaaaaacaaagaaatctccaggttcaggatgcattcttgcccactgtatgggccttggtaagactttacaggtggtaagttttcttcatacagttcttttgtgtgacaaactggatttcagcayggcgttagtggtttgtcctcttaatactgctttgaattggatgaatgaatttgagaagtggcaagagggattaaaagatgatgagaagcttgaggtttctgaattagcaactgtgaaacgtcctcaggagagaagctacatgctgcagaggtggcaagaagatggtggtgttatgatcataggctatgagatgtatagaaatcttgctcaaggaaggaatgtgaagagtcggaaacttaaagaaatatttaacaaagctttggttgatccaggccctgattttgttgtttgtgatgaaggccatattctaaaaaatgaagcatctgctgtttctaaagctatgaattctatacgatcaaggaggaggattattttaacaggaacaccacttcaaaataacctaattgagtatcattgtatggttaattttatcaaggaaaatttacttggatccattaaggagttcaggaatagatttataaatccaattcaaaatggtcagtgtgcagattctaccatggtagatgtcagagtgatgaaaaaacgtgctcacattctctatgagatgttagctggatgtgttcagaggaaagattatacagcattaacaaaattcttgcctccaaaacacgaatatgtgttagctgtgagaatgacttctattcagtgcaagctctatcagtactacttagatcacttaacaggtgtgggcaataatagtgaaggtggaagaggaaaggcaggtgcaaagcttttccaagattttcagatgttaagtagaatatggactcatccttggtgtttgcagctagactacattagcaaagaaaataagggttattttgatgaagacagtatggatgaatttatagcctcagattctgatgaaacctccatgagtttaagctccgatgattatacaaaaaagaagaaaaaagggaaaaaggggaaaaaagatagtagctcaagtggaagtggcagtgacaatgatgttgaagtgattaaggtctggaattcaagatctcggggaggtggtgaaggaaatgtggatgaaacaggaaacaatccttctgtttctttaaaactggaagaaagtaaagctacttcttcttctaatccaagcagcccagctccagactggtacaaagattttgttacagatgctgatgctgaggttttagagcattctgggaaaatggtacttctctttgaaattcttcgaatggcagaggaaattggggataaagtccttgttttcagccagtccctcatatctctggacttgattgaagattttcttgaattagctagtagggagaagacagaagataaagataaaccccttatttataaaggtgaggggaagtggcttcgaaacattgactattaccgtttagatggttccactactgcacagtcaaggaagaagtgggctgaagaatttaatgatgaaactaatgtgagaggacgattatttatcatttctactaaagcaggatctctaggaattaatctggtagctgctaatcgagtaattatattcgacgcttcttggaatccatcttatgacatccagagtatattcagagtttatcgctttggacaaactaagcctgtttatgtatataggttcttagctcagggaaccatggaagataagatttatgatcggcaagtaactaagcagtcactgtcttttcgagttgttgatcagcagcaggtggagcgtcattttactatgaatgagcttactgaactttatacttttgagccagacttattagatgaccctaattcagaaaagaagaagaagagggatactcccatgctgccaaaggataccatacttgcagagctccttcagatacataaagaacacattgtaggataccatgaacatgattctcttttggaccacaaagaagaagaagagttgactgaagaagaaagaaaagcagcttgggctgagtatgaagcagagaagaagggactgaccatgcgtttcaacataccaactgggaccaatttaccccctgtcagtttcaactctcaaactccttatattcctttcaatttgggagccctgtcagcaatgagtaatcaacagctggaggacctcattaatcaaggaagagaaaaagttgtagaagcaacaaacagtgtgacagcagtgaggattcaacctcttgaggatataatttcagctgtatggaaggagaayatgaatctctcagaggcccaagtacaggcgttagcattaagtagacaagccagccaggagcttgatgttaaacgaagagaagcaatctacaatgatgtattgacaaaacaacagatgttaatcagctgtgttcagcgaatacttatgaacagaaggctccagcagcagtacaatcagcagcaacagcaacaaatgacttatcaacaagcaacactgggtcacctcatgatgccaaagcccccaaatttgatcatgaatccttctaactaccagcagattgatatgagaggaatgtatcagccagtggctggtggtatgcagccaccaccattacagcgtgcaccacccccaatgagaagcaaaaatccaggaccttcccaagggaaatcaatgtgattttgcactaaaagcttaatggattgttaaaatcatagaaagatcttttatttytttaggaatcaatgacttaacagaactcaactgtataaatagtttggtccccttaaatgccaatcttccatattagttttactttttttttttttaaatagggcataccatttcttcctgacatttgtcagtgatgttgcctagaatcttcttacacaygctgagtacagaagatatttcaaattgttttcagtgaaaacaagtccttccataatagtaacaactccacagatttcctctctaaatttttatgcctgcttttagcaaccataaaattgtcataaaattaataaatttaggaaagaataaagatttatatattcattctttacatataaaaacacacagctgagttcttagagttgattcctcaagttatgaaatacttttgtacttaatccatttcttgattaaagtgattgaaatggttttaatgttcttttgactgaagtctgaaactgggctcctgctttattgtctctgtgactgaaagttagaaactgagggttatctttgacacagaattgtgtgcaatattcttaaatactactgctctaaaagttggagaagtcttgcagttatcttagcattgtataaacagccttaagtatagcctaagaagagaattcctttttcttctttagtccttctgccattttttattttcagttatatgtgctgaaataattactggtaaaatttcagggttgtggattatcttccacacatgaattttctctctcctggcacgaatataaagcacatctcttaactgcatggtgccagtgctaatgcttcatcctgttgctggcagtgggatgtggacttagaaaatcaagttctagcattttagtaggttaacactgaagttgtggttgttaggttcacaccctgttttataaacaacatcaaaatggcagaaccattgctgactttaggttcacatgaggaatgtacttttaacaattcccagtactatcagtattgtgaaataattcctctgaaagataagaatcactggcttctatgcgcttcttttctctcatcatcatgttcttttaccccagtttccttacatttttttaaattgtttcagagtttgttttttttttagtttagattgtgaggcaattattaaatcaaaattaattcatccaatacccctttactagaagttttactagaaaatgtattacattttattttttcttaatccagttctgcaaaaatgacctataaatttattcatgtacaattttggttacttgaattgttaaagaaaacattgtttttgactatgggagtcaactcaacatggcagaaccatttttgagatgatgatacaacaggtagtgaaacagcttaagaattccaaaaaaaaaaaaaaaaaaaaaaaaaagaaaactgggtttgggctttgctttaggtatcactggattagaatgagtttaacattagctaaaactgctttgagttgtttggatgattaagagattgccatttttatcttggaagaactagtggtaaaacatccaagagcactaggattgtgatacagaatttgtgaggtttggtggatccacgcccctctcccccactttcccatgatgaaatatcactaataaatcctgtatatttagatattatgctagccatgtaatcagatttatttaattgggtggggcaggtgtgtatttactttagaaaaaatgaaaaagacaagatttatgagaaatatttgaaggcagtacactctggccaactgttaccagttggtatttctacaagttcagaatattttaaacctgatttactagacctgggaattttcaacatggtctaattatttactcaaagacatagatgtgaaaattttaggcaaccttctaaatctttttcaccatggatgaaactataacttaaagaataatacttagaagggttaattggaaatcagagtttgaaataaaacttggaccactttgtatacactcttctcacttgacattttagctatataatatgtactttgagtataacatcaagctttaacaaatatttaaagacaaaaaaatcacgtcagtaaaatactaaaaggctcatttttatatttgttttagatgttttaaatagttgcaatggattaaaaatgatgatttaaaatgttgcttgtaatacagttttgcctgctaaattctccacattttgtaacctgttttatttctttgggtgtaaagcgtttttgcttagtattgtgatattgtatatgttttgtcccagttgtatagtaatgtttcagtccatcatccagctttggctgctgaaatcatacagctgtgaagacttgcctttgtttctgttagactgcttttcagttctgtattgagtatcttaagtactgtagaaaagatgtcacttcttcctttaaggctgttttgtaatatatataaggactggaattgtgtttttaaagaaaagcattcaagtatgacaatatactatctgtgttttcaccattcaaagtgctgtttagtagttgaaacttaaactatttaatgtcatttaataaagtgaccaaaatgtgttgtgctctttattgtattttcacagctttgaaaatctgtgcacatactgtttcatagaaaatgtatagcttttgttgtcctatataatggtggttcttttgcacatttagttatttaatattgagaggtcacgaagtttggttattgaatctgttatatactaaattctgtaaagggagatctctcatctcaaaaagaatttacataccaggaagtccatgtgtgtttgtgttagttttggatgtctttgtgtaatccagccccatttcctgtttcccaacagctgtaacactcattttaagtcaagcagggctaccaacccacacttgatagaaaagctgcttaccattcagaagcttccttattacctggcctccaaatgagctgaatattttgtagccttcccttagctatgttcattttccctccattatcataaaatcagatcgatatttatgtgccccaaacaaaactttaagagcagttacattctgtcccagtagcccttgtttcctttgagagtagcatgttgtgaggctatagagacttattctaccagtaaaacaggtcaatccttttacatgtttattatactaaaaattatgttcagggtatttactactttatttcaccagactcagtctcaagtgacttggctatctccaaatcagatctacccttagagaataaacatttttctaccgttattttttttcaagtctataatctgagccagtcccaaaggagtgatcaagtttcagaaatgctttcatcttcacaacattttatatatactattatatggggtgaataaagttttaaatccgaaatatata

SEQ ID NO: 3033 - DNA, 781 bp, Homo sapiens
ttaatttttttaaggaagaagtattttattattttgctgcaaagctgttgcttcactgtataaaaatagcaccagcaaatgcagtgtattgcaaaattaagatggtggtgttcctcatctgacactgtacaagcaacaaaaacctcttaacttccagttatttccagtggaaagatcattaagtatttcatcccaaatccagtatggatayatgcaagttacaatattacataaggcttaagaataacaacgttatctttgaattatgtaatttttataaactagtttttaccatggataatttcatgaattctgaacactatagcctagtctaaaaatcataggatwttgtgaaaaagatgcgttattatatttatctataatcattagaaagttaaagggcattttctttcattagcaatgttaacagtagtttccccccgccgccccccatcggtaatgctaaaagttgctattctaagtcttctgtccaccattaatttaagacaactctgctgggttgcgttatttcatactagtttatttaggagttccattttcactcctcaatagattttatgtatttctcataggcttcttcactcataagttcatctagttctgaagggttactttggaaagtgtgaaagctgctagtgaactctattctcytttatcagaagtaaccgaaattaatgaagctcttgcagaaaatccaagacttgtaaacaaatcttgttatgaagatggttggctgatcaagatgacactgagtaatcca

SEQ ID NO: 3034 - DNA, 3363 bp, Homo sapiens
atgaggaaaggcaaggggccgatttgcctgttctcacgccccaccctcagacctagccggagcaaagtttcacttatagaagggagaggagcgaacatggcagcgcgttggcggttttggtgtgtctctgtgaccatggtggtggcgctgctcatcgtttgcgacgttccctcagcctctgcccaaagaaagaaggagatggtgttatctgaaaaggttagtcagctgatggaatggactaacaaaagacctgtaataagaatgaatggagacaagttccgtcgccttgtgaaagccccaccgagaaattactccgttatcgtcatgttcactgctctccaactgcatagacagtgtgtcgtttgcaagcaagctgatgaagaattccagatcctggcaaactcctggcgatactccagtgcattcaccaacaggatattttttgccatggtggattttgatgaaggctctgatgtatttcagatgctaaacatgaattcagctccaactttcatcaactttcctgcaaaagggaaacccaaacggggtgatacatatgagttacaggtgcggggtttttcagctgagcagattgcccggtggatcgccgacagaactgatgtcaatattagagtgattagacccccaaattatgctggtccccttatgttgggattgcttttggctgttattggtggacttgtgtatcttcgaagaagtaatatggaatttctctttaataaaacwggatgggcttttgcagctttgtgttttgtgcttgctatgacatctggtcaaatgtggaaccatataagaggaccaccatatgcccataagaatccccacacgggacatgtgaattatatccatggaagcagtcaagcccagtttgtagctgaaacacacattgttcttctgtttaatggtggagttaccttaggaatggtgcttttatgtgaagctgctacctctgacatggatattggaaagcgaaagataatgtgtgtggctggtattggacttgttgtattattcttcagttggatgctctctatttttagatctaaatatcatggctacccatacagctttctgatgagttaaaaaggtcccagagatatatagacactggagtactggaaattgaaaaacgaaaatcgtgtgtgtttgaaaagaagaatgcaacttgtatattttgtattacctctttttttcaagtgatttaaatagttaatcatttaaccaaagaagatgtgtagtgccttaacaagcaatcctctgtcaaaatctgaggtatttgaaaataattatcctcttaaccttctcttcccagtgaactttatggaacatttaatttagtacaattaagtatattataaaaattgtaaaactactactttgttttagttagaacaaagctcaaaactactttagttaacttggtcatctgattttatattgccttatccaaagatggggaaagtaagtcctgaccaggtgttcccacatatgcctgttacagataactacattaggaattcattcttagcttcttcatctttgtgtggatgtgtatactttacgcatctttccttttgagtagagaaattatgtgtgtcatgtggtcttctgaaaatggaacaccattcttcagagcacacgtctagccctcagcaagacagttgtttctcctcctccttgcatatttcctactgaaatacagtgctgtctatgattgtttttgttttgttgtttttttgagacgatcacgctactgcgctccagcctgagtgatagagtgagactctgtctcaaaaaaaagtatctctaaatacaggattataatttctgcttgagtatggtgttaactaccttgtatttagaaagatttcagattcattccatctccttagttttcttttaaggtgacccatctgtgataaaaatatagcttagtgctaaaatcagtgtaacttatacatggcctaaaatgtttctacaaattagagtttgtcacttattccatttgtacctaagagaaaaataggctcagttagaaaaggactccctggccaggcgcagtgacttacgcctgtaatctcagcactttgggaggccaaggcaggcagatcacgaggtcaggagttcgagaccatcctggccaacatggtgaaaccccgtctctactaaaaatataaaaattagctgggtgtggtggcaggagcctgtaatcccagctacacaggaggctgaggcacgagaatcacttgaactcaggagatggaggtttcagtgagccaagatcacaccactgcactccagcctggcaacagagcgagactccatctcaaaaaaaaaaaaaaaagtaagaaagaaaaggactcccttagaatgggaaactgttctatgttttgctgttattttagtctttattctcttcctttaggtggagaaacaaagtaccaatttgaagggattttttttattttgtcttttggtttctgtcagtagaaataaccatatgtgctaaccaaatttctgtgaagaatgttttcatggttatcattatatctaactataacctcccccatagttatgaagagtaacctgaaatgccactattgtggaaataggataattgtaattgtgaaaaaataattttaaggaaatcttacaagtattacattaaaaagatactatgactgccacctgccatttaccttctaataaccctgccatgtggtttgcagaaagagatggatatagtagcctcagaagaaatattttatgtgggttttttgtttttcgttactagatttcatggatgaggggatatggttgaccttttactttttaatggagcagccagtttttgttaattactcacttgtaaattgtgagattctgaattccttacctgctattcttgtacttgtctcaggccaaatctatgctgtggttcttatgagacttgtatgaagatgccctgatttgtacagattgaccacgggaatactactgccatgtaatctgtatagttccagataatttgtcatgaacattgacagaatgacaattttttgtatttgctttttctccctttaagagcacattcttctgtaaggagaaaggcagcattctggctaaaatgtgtagaaggtaatttactacacttataaaatagtgtgacttttgtgaaaattttgaattagctttcatatgaagtgccttaagtagactcttcatttacttytctggtaatggtttaaatatcatttgttatgcatttttaagatacagttcagaatgacacattgtagtggcaaagataaccaaatgtctggctgtttgctttttgaccat

SEQ ID NO: 3035 - DNA, 3388 bp, Homo sapiens
atgaggaaaggcaaggggccgatttgcctgttctcacgccccaccctcagacctagccggagcaaagtttcacttatagaagggagaggagcgaacatggcagcgcgttggcggttttggtgtgtctctgtgaccatggtggtggcgctgctcatcgtttgcgacgttccctcagcctctgcccaaagaaagaaggagatggtgttatctgaaaaggttagtcagctgatggaatggactaacaaaagacctgtaataagaatgaatggagacaagttccgtcgccttgtgaaagccccaccgagaaattactccgttatcgtcatgttcactgctctccaactgcatagacagtgtgtcgtttgcaagcaagctgatgaagaattccagatcctggcaaactcctggcgatactccagtgcattcaccaacaggatattttttgccatggtggattttgatgaaggctctgatgtatttcagatgctaaacatgaattcagctccaactttcatcaactttcctgcaaaagggaaacccaaacggggtgatacatatgagttacaggtgcggggtttttcagctgagcagattgcccggtggatcgccgacagaactgatgtcaatattagagtgattagacccccaaattatgctggtccccttatgttgggattgcttttggctgttattggtggacttgtgtatcttcgaagaagtaatatggaatttctctttaataaaacwggatgggcttttgcagctttgtgttttgtgcttgctatgacatctggtcaaatgtggaaccatataagaggaccaccatatgcccataagaatccccacacgggacatgtgaattatatccatggaagcagtcaagcccagtttgtagctgaaacacacattgttcttctgtttaatggtggagttaccttaggaatggtgcttttatgtgaagctgctacctctgacatggatattggaaagcgaaagataatgtgtgtggctggtattggacttgttgtattattcttcagttggatgctctctatttttagatctaaatatcatggctacccatacagctttctgatgagttaaaaaggtcccagagatatatagacactggagtactggaaattgaaaaacgaaaatcgtgtgtgtttgaaaagaagaatgcaacttgtatattttgtattacctctttttttcaagtgatttaaatagttaatcatttaaccaaagaagatgtgtagtgccttaacaagcaatcctctgtcaaaatctgaggtatttgaaaataattatcctcttaaccttctcttcccagtgaactttatggaacatttaatttagtacaattaagtatattataaaaattgtaaaactactactttgttttagttagaacaaagctcaaaactactttagttaacttggtcatctgattttatattgccttatccaaagatggggaaagtaagtcctgaccaggtgttcccacatatgcctgttacagataactacattaggaattcattcttagcttcttcatctttgtgtggatgtgtatactttacgcatctttccttttgagtagagaaattatgtgtgtcatgtggtcttctgaaaatggaacaccattcttcagagcacacgtctagccctcagcaagacagttgtttctcctcctccttgcatatcacgctactgcgctccagcctgagtgatagagtgagactctgtctcaaaaaaaagtatctctaaatacaggattataatttctgcttgagtatggtgttaactaccttgtatttagaaagatttcagattcattccatctccttagttttcttttaaggtgacccatctgtgataaaaatatagcttagtgctaaaatcagtgtaacttatacatggcctaaaatgtttctacaaattagagtttgtcacttattccatttgtacctaagagaaaaataggctcagttagaaaaggactccctggccaggcgcagtgacttacgcctgtaatctcagcactttgggaggccaaggcaggcagatcacgaggtcaggagttcgagaccatcctggccaacatggtgaaaccccgtctctactaaaaatataaaaattagctgggtgtggtggcaggagcctgtaatcccagctacacaggaggctgaggcacgagaatcacttgaactcaggagatggaggtttcagtgagccaagatcacaccactgcactccagcctggcaacagagcgagactccatctcaaaaaaaaaaaaaaaagtaagaaagaaaaggactcccttagaatgggaaagaaaaatcataaaatattgagctgatgcctgtatatagaaattaagcgtttctcgaaagctgttctatgttttgctgttattttagtctttattctcttcctttaggtggagaaacaaagtaccaatttgaagggattttttttattttgtcttttggtttctgtcagtagaaataaccatatgtgctaaccaaatttctgtgaagaatgttttcatggttatcattatatctaactataacctcccccatagttatgaagagtaacctgaaatgccactattgtggaaataggataattgtaattgtgaaaaaataattttaaggaaatcttacaagtattacattaaaaagatactatgactgccacctgccatttaccttctaataaccctgccatgtggtttgcagaaagagatggatatagtagcctcagaagaaatattttatgtgggttttttgtttttcgttactagatttcatggatgaggggatatggttgaccttttactttttaatggagcagccagtttttgttaattactcacttgtaaattgtgagattctgaattccttacctgctattcttgtacttgtctcaggccaaatctatgctgtggttcttatgagacttgtatgaagatgccctgatttgtacagattgaccacgggaatactactgccatgtaatctgtatagttccagataatttgtcatgaacattgacagaatgacaattttttgtatttgctttttctccctttaagagcacattcttctgtaaggagaaaggcagcattctggctaaaatgtgtagaaggtaatttactacacttataaaatagtgtgacttttgtgaaaattttgaattagctttcatatgaagtgccttaagtagactcttcatttacttytctggtaatggtttaaatatcatttgttatgcatttttaagatacagttcagaatgacacattgtagtggcaaagataaccaaatgtctggctgtttgctttttgaccatatcaataaacttttacaatctaaattc

SEQ ID NO: 3036 - DNA, 1844 bp, Homo sapiens
ttcgccgctgctgtagttccccggctggatgcggtgactggtgccagtgctcaggcgcccgctgcccttgacctcccgccccgcgagccctaactcagcgcaggaggaccggctgccgccgccgccgctctgatgctggtgtctggtagaagaagattactcacagctctgctgcaggctcagaagtggccctttcaaccctccagagacatgagactagtgcagttccgggcaccccacctggtggggcctcacttgggcctggagacagggaatggtggaggggttatcaacctcaatgcctttgaccccacactcccaaagacgatgacgcagttcctagagcagggagaggccaccctctcagtggcaagaagagccttggctgcccagttgccagtcctaccayggtcggaggtaaccttcctggctccagtcacaygrccagataaggtggtgtgtgtgggcatgaattatgtggaccactgcaaagaacagaacgtgcccgtgcccaaggagcccatcatcttcagcaagtttgccagctccatcgtggggccctatgatgaggtggtcctcccaccacagagccaggaggtagattgggaagtggagctggccgtggtcattggaaagaaaggcaagcacatcaaggccacagatgccatggcccacgtggccggcttcactgtggctcatgacgtgagtgctcgtgactggcwaayragacgyaatgggaaacartggctgctgggaaaaaccttcgacaccttctgccctctgggccctgccttggtgaccaaggacagtgtagcagatccacacaacttaaagatctgctgccgagtgaatggggaagtsgtccagagcrgcaacaccaaccagatggtattcaagacagaggacctgatagcctgggtctcccagtttgttaccttttacccaggggatgtcatcctaactgggacccccccaggtgtcggtgtattcaggaaacctcctgtctttctcaagaagggggatgaagtccagtgtgagattgaagaactaggtgtcatcatcaacaaggtggtgtgatggctcctgcacaggcccgacataggatgagggcatctgctcccactcagcctagcccagggaaaggcccagtgrcaggtgtggrcaggtgccagccctgcaagccgcctcttctcggtagaagggagaaggacagagctctcttcaataaatgcgtcgggtcaaagcagcagcttggcttgtgctgtttgtcttcttttgggctttgtttcatggaacaagttggggcattttgtgggactggggaagaagagagcaaatacacacacatacrccaaaaagatgctgctgggctggggaaaagacaactcgtctcgtccccttgtttatcacatcaaagragggaaaaagcaagagatggcaagggacaatcaagcctcaatgattatatttatagagcagctaagggtttgcagcctcctctccatcttctggctctaggacacagctgtgttctggggctgagaagtctcagcacaggctcctcctcacagttctagctacaaatgaactgccggatgaactgttctagtttttcctgattgtccwggctggcaaaagtaggggayaggtggagcctggggcctgcagggctcggcgtctgctgcagaacctgggccatggaagatgcgccatgagtgcgctcaccacagggactgtgtctgcatggcycaggggccaggcctgtcccccagaaacctgccttgagacctctggccccttagacctcagtgtttgcatgcaaatgctgccgcaaagcagcccca

SEQ ID NO: 3037 - DNA, 1967 bp, Homo sapiens
ttcgccgctgctgtagttccccggctggatgcggtgactggtgccagtgctcaggcgcccgctgcccttgacctcccgccccgcgagccctaactcagcgcaggaggaccggctgccgccgcccagagccaagcacagtgggaactttcagaaagcactggttgaaggaacgctggaatccctgggacttactgcgtagcatgtagtagttgctcctctacaaaagtttcaccttatgaagtatagcaggctctgatgctggtgtctggtagaagaagattactcacagctctgctgcaggctcagaagtggccctttcaaccctccagagacatgagactagtgcagttccgggcaccccacctggtggggcctcacttgggcctggagacagggaatggtggaggggttatcaacctcaatgcctttgaccccacactcccaaagacgatgacgcagttcctagagcagggagaggccaccctctcagtggcaagaagagccttggctgcccagttgccagtcctaccayggtcggaggtaaccttcctggctccagtcacaygrccagataaggtggtgtgtgtgggcatgaattatgtggaccactgcaaagaacagaacgtgcccgtgcccaaggagcccatcatcttcagcaagtttgccagctccatcgtggggccctatgatgaggtggtcctcccaccacagagccaggaggtagattgggaagtggagctggccgtggtcattggaaagaaaggcaagcacatcaaggccacagatgccatggcccacgtggccggcttcactgtggctcatgacgtgagtgctcgtgactggcwaayragacgyaatgggaaacartggctgctgggaaaaaccttcgacaccttctgccctctgggccctgccttggtgaccaaggacagtgtagcagatccacacaacttaaagatctgctgccgagtgaatggggaagtsgtccagagcrgcaacaccaaccagatggtattcaagacagaggacctgatagcctgggtctcccagtttgttaccttttacccaggggatgtcatcctaactgggacccccccaggtgtcggtgtattcaggaaacctcctgtctttctcaagaagggggatgaagtccagtgtgagattgaagaactaggtgtcatcatcaacaaggtggtgtgatggctcctgcacaggcccgacataggatgagggcatctgctcccactcagcctagcccagggaaaggcccagtgrcaggtgtggrcaggtgccagccctgcaagccgcctcttctcggtagaagggagaaggacagagctctcttcaataaatgcgtcgggtcaaagcagcagcttggcttgtgctgtttgtcttcttttgggctttgtttcatggaacaagttggggcattttgtgggactggggaagaagagagcaaatacacacacatacrccaaaaagatgctgctgggctggggaaaagacaactcgtctcgtccccttgtttatcacatcaaagragggaaaaagcaagagatggcaagggacaatcaagcctcaatgattatatttatagagcagctaagggtttgcagcctcctctccatcttctggctctaggacacagctgtgttctggggctgagaagtctcagcacaggctcctcctcacagttctagctacaaatgaactgccggatgaactgttctagtttttcctgattgtccwggctggcaaaagtaggggayaggtggagcctggggcctgcagggctcggcgtctgctgcagaacctgggccatggaagatgcgccatgagtgcgctcaccacagggactgtgtctgcatggcycaggggccaggcctgtcccccagaaacctgccttgagacctctggccccttagacctcagtgtttgcatgcaaatgctgccgcaaagcagcccca

SEQ ID NO: 3038 - DNA, 1841 bp, Homo sapiens
ttcgccgctgctgtagttccccggctggatgcggtgactggtgccagtgctcaggcgcccgctgcccttgacctcccgccccgcgagccctaactcagcgcaggaggaccggctgccgccgccgctctgatgctggtgtctggtagaagaagattactcacagctctgctgcaggctcagaagtggccctttcaaccctccagagacatgagactagtgcagttccgggcaccccacctggtggggcctcacttgggcctggagacagggaatggtggaggggttatcaacctcaatgcctttgaccccacactcccaaagacgatgacgcagttcctagagcagggagaggccaccctctcagtggcaagaagagccttggctgcccagttgccagtcctaccayggtcggaggtaaccttcctggctccagtcacaygrccagataaggtggtgtgtgtgggcatgaattatgtggaccactgcaaagaacagaacgtgcccgtgcccaaggagcccatcatcttcagcaagtttgccagctccatcgtggggccctatgatgaggtggtcctcccaccacagagccaggaggtagattgggaagtggagctggccgtggtcattggaaagaaaggcaagcacatcaaggccacagatgccatggcccacgtggccggcttcactgtggctcatgacgtgagtgctcgtgactggcwaayragacgyaatgggaaacartggctgctgggaaaaaccttcgacaccttctgccctctgggccctgccttggtgaccaaggacagtgtagcagatccacacaacttaaagatctgctgccgagtgaatggggaagtsgtccagagcrgcaacaccaaccagatggtattcaagacagaggacctgatagcctgggtctcccagtttgttaccttttacccaggggatgtcatcctaactgggacccccccaggtgtcggtgtattcaggaaacctcctgtctttctcaagaagggggatgaagtccagtgtgagattgaagaactaggtgtcatcatcaacaaggtggtgtgatggctcctgcacaggcccgacataggatgagggcatctgctcccactcagcctagcccagggaaaggcccagtgrcaggtgtggrcaggtgccagccctgcaagccgcctcttctcggtagaagggagaaggacagagctctcttcaataaatgcgtcgggtcaaagcagcagcttggcttgtgctgtttgtcttcttttgggctttgtttcatggaacaagttggggcattttgtgggactggggaagaagagagcaaatacacacacatacrccaaaaagatgctgctgggctggggaaaagacaactcgtctcgtccccttgtttatcacatcaaagragggaaaaagcaagagatggcaagggacaatcaagcctcaatgattatatttatagagcagctaagggtttgcagcctcctctccatcttctggctctaggacacagctgtgttctggggctgagaagtctcagcacaggctcctcctcacagttctagctacaaatgaactgccggatgaactgttctagtttttcctgattgtccwggctggcaaaagtaggggayaggtggagcctggggcctgcagggctcggcgtctgctgcagaacctgggccatggaagatgcgccatgagtgcgctcaccacagggactgtgtctgcatggcycaggggccaggcctgtcccccagaaacctgccttgagacctctggccccttagacctcagtgtttgcatgcaaatgctgccgcaaagcagcccca

SEQ ID NO: 3039 - DNA, 1967 bp, Homo sapiens
ttcgccgctgctgtagttccccggctggatgcggtgactggtgccagtgctcaggcgcccgctgcccttgacctcccgccccgcgagccctaactcagcgcaggaggaccggctgccgccgccgccagccaagcacagtgggaactttcagaaagcactggttgaaggaacgctggaatccctgggacttactgcgtagcatgtagtagttgctcctctacaaaagtttcaccttatgaagtatagcaggctctgatgctggtgtctggtagaagaagattactcacagctctgctgcaggctcagaagtggccctttcaaccctccagagacatgagactagtgcagttccgggcaccccacctggtggggcctcacttgggcctggagacagggaatggtggaggggttatcaacctcaatgcctttgaccccacactcccaaagacgatgacgcagttcctagagcagggagaggccaccctctcagtggcaagaagagccttggctgcccagttgccagtcctaccayggtcggaggtaaccttcctggctccagtcacaygrccagataaggtggtgtgtgtgggcatgaattatgtggaccactgcaaagaacagaacgtgcccgtgcccaaggagcccatcatcttcagcaagtttgccagctccatcgtggggccctatgatgaggtggtcctcccaccacagagccaggaggtagattgggaagtggagctggccgtggtcattggaaagaaaggcaagcacatcaaggccacagatgccatggcccacgtggccggcttcactgtggctcatgacgtgagtgctcgtgactggcwaayragacgyaatgggaaacartggctgctgggaaaaaccttcgacaccttctgccctctgggccctgccttggtgaccaaggacagtgtagcagatccacacaacttaaagatctgctgccgagtgaatggggaagtsgtccagagcrgcaacaccaaccagatggtattcaagacagaggacctgatagcctgggtctcccagtttgttaccttttacccaggggatgtcatcctaactgggacccccccaggtgtcggtgtattcaggaaacctcctgtctttctcaagaagggggatgaagtccagtgtgagattgaagaactaggtgtcatcatcaacaaggtggtgtgatggctcctgcacaggcccgacataggatgagggcatctgctcccactcagcctagcccagggaaaggcccagtgrcaggtgtggrcaggtgccagccctgcaagccgcctcttctcggtagaagggagaaggacagagctctcttcaataaatgcgtcgggtcaaagcagcagcttggcttgtgctgtttgtcttcttttgggctttgtttcatggaacaagttggggcattttgtgggactggggaagaagagagcaaatacacacacatacrccaaaaagatgctgctgggctggggaaaagacaactcgtctcgtccccttgtttatcacatcaaagragggaaaaagcaagagatggcaagggacaatcaagcctcaatgattatatttatagagcagctaagggtttgcagcctcctctccatcttctggctctaggacacagctgtgttctggggctgagaagtctcagcacaggctcctcctcacagttctagctacaaatgaactgccggatgaactgttctagtttttcctgattgtccwggctggcaaaagtaggggayaggtggagcctggggcctgcagggctcggcgtctgctgcagaacctgggccatggaagatgcgccatgagtgcgctcaccacagggactgtgtctgcatggcycaggggccaggcctgtcccccagaaacctgccttgagacctctggccccttagacctcagtgtttgcatgcaaatgctgccgcaaagcagcccca

SEQ ID NO: 3040 - DNA, 3802 bp, Homo sapiens
tagattctggctgttgcgtgttagcgcgcgtcccggagtgcgcatgcgcaacggcgggggttgttccggcagcctttcactgaggccacccgccagtttcaaattcagtggcgtttgccctgattcccggggcctggctttcagcgtagcaattctgccggcgaagaaggtgagcgcagtgctgtgtggcagcagaggtccttaggacgaggagcagcgggacgaggaagggcagactggtgaaatcgcaaactgggcgtctgttccggcgccggacccctgtttgcaaaggtccatggctaatgaaacacagaaggttggtgccatccattttccttttcccttcacaccctattccatccaggaagacttcatggcagagctgtaccgggttttggaggctggcaagattgggatatttgagagtccaactggcactgggaagtccttaagtcttatttgtggggccctctcctggctccgtgactttgaacagaagaagcgtgaagaagaggcacgactccttgaaactggaactggccccttacatgatgagaaagatgaatccctgtgtctgtcttcctcctgcgaaggggctgcaggcaccccgaggcctgctggagaaccggcctgggttactcagtttgtgcagaagaaagaagagagggacctggtgaaccgactraaggyggagcaggccaggaggaagcagcgagaagaacgcctgcagcagctgcagcacagggtgcagctcaagtatgcagccaagcgcctgaggcaggaagaagaagaaasagagaatctcctccgcctcagcagggagatgctagagacaggcccggaggctgagcggctggagcagctggagtctggggaggaggagctggtcctcgccgaatacgagagtgatgaggagaaaaaggtggcgagcggagtggatgaggatgaggatgacctggaggaagaacacataactaagatttattactgtagtcggacacactcccagctggcccagtttgtgcatgaggtgaagaagagcccctttggcaaggatgttcggctggtctccctcggctcccrgcagagaagaagaaaggagctgaggaggagaagccaaagaggaggmggcaggaraagcaggcagcctgccccttctacaaccacgagcagatgggccttctccgggatgaggccctggcagaggtgaaggacatggagcagctgctggcccttgggaaggaggccmgggcctgtccctattacrggagccgccttgccatccctgcagccmagctggtggtgctgycctatcaratgctgctgcatgcgrccactcggcaggcygcvggcatccggctgcaggaccaggtggtgatcatcgacgaggcgcacaacctgatcgacaccaycacgrgcatgcacagmgtggaggtcagcggctcccagctctgccaggcccattcccagctgctgcagtacatggagcgatacgggaagcgtttgaaggccragaacctgatgtacctgaagcagatcctgtatttgctggagaaattcgtggctgtgctaggggggaacattaagcaaaatcccaatacacagagtctgtcacagacagggacggagctgaagacyatcaacgactttctcttccagagccagatcgacaacatcaacctgttcaaggtgcagcgatactgtgagaagagcatgatcagcagaaagctctttggcttcactgaacggtacggagcagtgttctcatcccgggagcagcccaaactggctgggtttcagcaattcctgcagagcctgcagcccaggacgactgaagcwcttgcagcccctgcagacgagagtcaggccagcgtcccgcaaccagcttccccrctratkcacatcsaaggcttcctggcagctctcactacggccaaccaggacggcagggtcatcctgagccgccaaggcagcctcagtsagagcaccctgaagtttttgctcctgaatccagctgtgcactttscccaagtggtgaaggaatgccgggcagtggtcattgcsgggggkaccatgcagccggtgtctgacttccggcagcagctgctggcctgtgctggggtggaagctgagcgcgtggtggagttttcctgtggtcacgtgatccctccagacaacatctgcccctygtcatctgcagcgggatctccaaccagccgctggaattcacsttccagaaaagagacctgcctcagatgatggacgaggtgggtcgcatyctctgtaacctgtgcggtgtggttyctggaggggtggtctgtttcttcccctcctacgagtacctgcgccaggtccatgcccactgggagaagggtggcctgctgggccgtctggctgccaggaagaagatattccaggaacctaagagcgcacaccaggtggagcaggtgctgctggcgtattccaggtgcatccaggcctgtggccaggagagaggccaggtgacagaggccctgctcctytctgtggttggaggaaagatgagtgaagggatcaacttctctgacaacctaggccggtgtgtggtgatggtgggcatgcccttccccaacatcaggtctgcagagctgcaggagaagatggcctacttggatcaaaccctcgcagggccatcaggcaccagaaggattttgccagcatagtgctcctggaccagcgataygcccggccccctgtcctggccaagctgccggcctggatccgagccmgcgtggaggtcaaagctacctttggccccgccattgctgctgtgcagaagtttcaccgggagaagtcggcctcttcctgatgggcaaccacaccaccgcccggcgccgtgcccttcctttgtcctgccctctggagacagtgtttgtcgtgggcgtggtctgcagggatcctgttacaaaggtgaaacccaggaggagagtgtggagtccagagcgctgccrggacccaggcacaggygttagctcccgtaggagaaaatgsgggaatcctgaatgaacagtgggtcctggctgtccttggggcgttccagggcagctcccctcctggaatagaatctttctttccatcctgcatggctgagagccaggcytcctkcttggwgtccrcaggaggctgtggcagcwgtggcatccactgtggcatctccgtcctgcccaccttaagaggygagatggagcaggyccatctgcctctgccctttctagccaaggttatagctgccctggactgctcactctctggtctcaatttaaaatgatcccrtggccacagggctcctgcccaggggcttgtyaccttcccctcctccttcctgagtcactccttcagtagaaggccctgctctctatcctgccccayagccctgcctggatttgtatccttggcttcgtgccagttcctccaagtctatggcacctccctccctctcaaccacttgagcaaactccaagacaccttctaccccgacaccagcaattatgccaagggccattaggctctcaacatgactatagagaccccgtatcatcatggagacctttgttcctgtgggaaaatawccctcccacctgcarcagctgcccctgctgactgcgcctgtcttctccctctgaccccagagaaaggggcygtggtcagctgggatcttctgccaccatcagggacaaaccgggggcaggaggaaagtcactgatgcccagctgtttgcatcctgcacagctacaggtccttaattaaaagtgtrctgttggtt

SEQ ID NO: 3041 - DNA, 2217 bp, Homo sapiens
tagattctggctgttgcgtgttagcgcgcgtcccggagtgcgcatgcgcaacggcgggggttgttccggcagcctttcactgaggccacccgccagtttcaaattcagtggcgtttgccctgattcccggggcctggctttcagcgtagcaattctgccggcgaagaaggtgagcgcagtgctgtgtggcagcagaggtccttaggacgaggagcagcgggacgaggaagggcagactggtgaaatcgcaaactgggcgtctgttccggcgccggacccctgtttgcaaaggtccatggctaatgaaacacagaaggttggtgccatccattttccttttcccttcacaccctattccatccaggaagacttcatggcagagctgtaccgggttttggaggctggcaagattgggatatttgagagtccaactggcactgggaagtccttaagtcttatttgtggggccctctcctggctccgtgactttgaacagaagaagcgtgaagaagaggcacgactccttgaaactggaactggccccttacatgatgagaaagatgaatccctgtgtctgtcttcctcctgcgaaggggctgcaggcaccccgaggcctgctggagaaccggcctgggttactcagtttgtgcagaagaaagaagagagggacctggtgaaccgactraaggyggagcaggccaggaggaagcagcgagaagaacgcctgcagcagctgcagcacagggtgcagctcaagtatgcagccaagcgcctgaggcaggaagaagaagaaasagagaatctcctccgcctcagcagggagatgctagagacaggcccggaggctgagcggctggagcagctggagtctggggaggaggagctggtcctcgccgaatacgagagtgatgaggagaaaaaggtggcgagcggggcgccttctgacgccacctccagccgccatccaccagacgccagcttccccgctgccctgaacttcctccagcgcaccaggccttcctctgtcctgtctgaggatttgctcatgcaacgtgctgtggccaaacaccctgccctcctcccttcgcagatgtcttcctctcctttaaggcctggctcagagtggatgaggatgaggatgacctggaggaagaacacataactaagatttattactgtagtcggacacactcccagctggcccagtttgtgcatgaggtgaagaagagcccctttggcaaggatgttcggctggtctccctcggctcccrgcaggtaaacagtagccagtatttccaccaggggccatcctgctcctttcsccacaactttgtcctgctcgtccaggcctgggagacgctgggtctgtgacaggctgaaccrtgtgaggagcagccccctccctgrcctggccggcccakcactggaaggcaaaggagaggtggcgggggcaggtccacgtgtgttggtaggatgtcatttagctggcaccatctctttgccyctttctttctcctttgytgcagaacctttgtgtaaatgaagacrtgagaagcctaggttctgtgcagcttatcaacraccgctgcgtggacatgcagagaagcaggcacggtagccaccrggaccrtggtgtagccgcaggtggtctggagagagtgaggcaggggtggcagtgactgaagaccattmagtgtctttcatagaaagaatggcagaggagaccccagttcctycctgagtcccctctccttgggaaaaagtgttcctactctctgggtgagcgtctggtccgaatcgttggcttggagatgattttacgggctctttctggagaacaraagtaaaacsttacagtgttccgatgagacacagtaggcagtacttgggagggtcttatagacccyaccctryggaagtgggtctcaacattacacaaccccctctygggcccgtggacagttgctgtcytctctgttttctctctttgtgcctgtgccmccctcagagaagaagaaaggagctgaggaggagaagccaaagaggaggmggcaggaraagcaggcagcctgccccttctacaaccacgagcagatgggccttctccgggatgaggccctggcagaggtgaaggacatggagcagctgctggcccttgggaaggaggccmgggcctgtccctattacrggagccgccttgccatccctgcagccmag

SEQ ID NO: 3042 - DNA, 3969 bp, Homo sapiens
tagattctggctgttgcgtgttagcgcgcgtcccggagtgcgcatgcgcaacggcgggggttgttccggcagcctttcactgaggccacccgccagtttcaaattcagtggcgtttgccctgattcccggggcctggctttcagcgtagcaattctgccggcgaagaaggtgagcgcagtgctgtgtggcagcagaggtccttaggacgaggagcagcgggacgaggaagggcagactggtgaaatcgcaaactgggcgtctgttccggcgccggacccctgtttgcaaaggtccatggctaatgaaacacagaaggttggtgccatccattttccttttcccttcacaccctattccatccaggaagacttcatggcagagctgtaccgggttttggaggctggcaagattgggatatttgagagtccaactggcactgggaagtccttaagtcttatttgtggggccctctcctggctccgtgactttgaacagaagaagcgtgaagaagaggcacgactccttgaaactggaactggccccttacatgatgagaaagatgaatccctgtgtctgtcttcctcctgcgaaggggctgcaggcaccccgaggcctgctggagaaccggcctgggttactcagtttgtgcagaagaaagaagagagggacctggtgaaccgactraaggyggagcaggccaggaggaagcagcgagaagaacgcctgcagcagctgcagcacagggtgcagctcaagtatgcagccaagcgcctgaggcaggaagaagaagaaasagagaatctcctccgcctcagcagggagatgctagagacaggcccggaggctgagcggctggagcagctggagtctggggaggaggagctggtcctcgccgaatacgagagtgatgaggagaaaaaggtggcgagcggagtggatgaggatgaggatgacctggaggaagaacacataactaagatttattactgtagtcggacacactcccagctggcccagtttgtgcatgaggtgaagaagagcccctttggcaaggatgttcggctggtctccctcggctcccrgcagaacctttgtgtaaatgaagacrtgagaagcctaggttctgtgcagcttatcaacraccgctgcgtggacatgcagagaagcaggcacgagaagaagaaaggagctgaggaggagaagccaaagaggaggmggcaggaraagcaggcagcctgccccttctacaaccacgagcagatgggccttctccgggatgaggccctggcagaggtgaaggacatggagcagctgctggcccttgggaaggaggccmgggcctgtccctattacrggagccgccttgccatccctgcagccmagctggtggtgctgycctatcaratgctgctgcatgcgrccactcggcaggcygcvggcatccggctgcaggaccaggtggtgatcatcgacgaggcgcacaacctgatcgacaccaycacgrgcatgcacagmgtggaggtcagcggctcccagctctgccaggcccattcccagctgctgcagtacatggagcgatacgggaagcgtttgaaggccragaacctgatgtacctgaagcagatcctgtatttgctggagaaattcgtggctgtgctaggggggaacattaagcaaaatcccaatacacagagtctgtcacagacagggacggagctgaagacyatcaacgactttctcttccagagccagatcgacaacatcaacctgttcaaggtgcagcgatactgtgagaagagcatgatcagcagaaagctctttggcttcactgaacggtacggagcagtgttctcatcccgggagcagcccaaactggctgggtttcagcaattcctgcagagcctgcagcccaggacgactgaagcwcttgcagcccctgcagacgagagtcaggccagcgtcccgcaaccagcttccccrctratkcacatcsaaggcttcctggcagctctcactacggccaaccaggacggcagggtcatcctgagccgccaaggcagcctcagtsagagcaccctgaagtttttgctcctgaatccagctgtgcactttscccaagtggtgaaggaatgccgggcagtggtcattgcsgggggkaccatgcagccggtgtctgacttccggcagcagctgctggcctgtgctggggtggaagctgagcgcgtggtggagttttcctgtggtcacgtgatccctccagacaacatctgcccctygtcatctgcagcgggatctccaaccagccgctggaattcacsttccagaaaagagacctgcctcagatgatggacgaggtgggtcgcatyctctgtaacctgtgcggtgtggttyctggaggggtggtctgtttcttcccctcctacgagtacctgcgccaggtccatgcccactgggagaagggtggcctgctgggccgtctggctgccaggaagaagatattccaggaacctaagagcgcacaccaggtggagcaggtgctgctggcgtattccaggtgcatccaggcctgtggccaggagagaggccaggtgacagaggccctgctcctytctgtggttggaggaaagatgagtgaagggatcaacttctctgacaacctaggccggtgtgtggtgatggtgggcatgcccttccccaacatcaggtctgcagagctgcaggagaagatggcctacttggatcaaaccctccccagagcccccggccaggcacmcccagggaaggctctggtggasaacctgtgcatgaaggccgtcaaccagtccataggcagggccatcaggcaccagaaggattttgccagcatagtgctcctggaccagcgataygcccggccccctgtcctggccaagctgccggcctggatccgagccmgcgtggaggtcaaagctacctttggccccgccattgctgctgtgcagaagtttcaccgggagaagtcggcctcttcctgatgggcaaccacaccaccgcccggcgccgtgcccttcctttgtcctgccctctggagacagtgtttgtcgtgggcgtggtctgcagggatcctgttacaaaggtgaaacccaggaggagagtgtggagtccagagcgctgccrggacccaggcacaggygttagctcccgtaggagaaaatgsgggaatcctgaatgaacagtgggtcctggctgtccttggggcgttccagggcagctcccctcctggaatagaatctttctttccatcctgcatggctgagagccaggcytcctkcttggwgtccrcaggaggctgtggcagcwgtggcatccactgtggcatctccgtcctgcccaccttaagaggygagatggagcaggyccatctgcctctgccctttctagccaaggttatagctgccctggactgctcactctctggtctcaatttaaaatgatcccrtggccacagggctcctgcccaggggcttgtyaccttcccctcctccttcctgagtcactccttcagtagaaggccctgctctctatcctgccccayagccctgcctggatttgtatccttggcttcgtgccagttcctccaagtctatggcacctccctccctctcaaccacttgagcaaactccaagacaccttctaccccgacaccagcaattatgccaagggccattaggctctcaacatgactatagagaccccgtatcatcatggagacctttgttcctgtgggaaaatawccctcccacctgcarcagctgcccctgctgactgcgcctgtcttctccctctgaccccagagaaaggggcygtggtcagctgggatcttctgccaccatcagggacaaaccgggggcaggaggaaagtcactgatgcccagctgtttgcatcctgcacagctacaggtccttaattaaaagtgtrctgttggtt

SEQ ID NO: 3043 - DNA, 3928 bp, Homo sapiens
tagattctggctgttgcgtgttagcgcgcgtcccggagtgcgcatgcgcaacggcgggggttgttccggcagcctttcactgaggccacccgccagtttcaaattcagtggcgtttgccctgattcccggggcctggctttcagcgtagcaattctgccggcgaagaaggtgagcgcagtgctgtgtggcagcagaggtccttaggacgaggagcagcgggacgaggaagggcagactggtgaaatcgcaaactgggcgtctgttccggcgccggacccctgtttgcaaaggtccatggctaatgaaacacagaaggttggtgccatccattttccttttcccttcacaccctattccatccaggaagacttcatggcagagctgtaccgggttttggaggctggcaagattgggatatttgagagtccaactggcactgggaagtccttaagtcttatttgtggggccctctcctggctccgtgactttgaacagaagaagcgtgaagaagaggcacgactccttgaaactggaactggccccttacatgatgagaaagatgaatccctgtgtctgtcttcctcctgcgaaggggctgcaggcaccccgaggcctgctggagaaccggcctgggttactcagtttgtgcagaagaaagaagagagggacctggtgaaccgactraaggyggagcaggccaggaggaagcagcgagaagaacgcctgcagcagctgcagcacagggtgcagctcaagtatgcagccaagcgcctgaggcaggaagaagaagaaasagagaatctcctccgcctcagcagggagatgctagagacaggcccggaggctgagcggctggagcagctggagtctggggaggaggagctggtcctcgccgaatacgagagtgatgaggagaaaaaggtggcgagcggagtggatgaggatgaggatgacctggaggaagaacacataactaagatttattactgtagtcggacacactcccagctggcccagtttgtgcatgaggtgaagaagagcccctttggcaaggatgttcggctggtctccctcggctcccrgcagaacctttgtgtaaatgaagacrtgagaagcctaggttctgtgcagcttatcaacraccgctgcgtggacatgcagagaagcaggcacgcctgccccttctacaaccacgagcagatgggccttctccgggatgaggccctggcagaggtgaaggacatggagcagctgctggcccttgggaaggaggccmgggcctgtccctattacrggagccgccttgccatccctgcagccmagctggtggtgctgycctatcaratgctgctgcatgcgrccactcggcaggcygcvggcatccggctgcaggaccaggtggtgatcatcgacgaggcgcacaacctgatcgacaccaycacgrgcatgcacagmgtggaggtcagcggctcccagctctgccaggcccattcccagctgctgcagtacatggagcgatacgggaagcgtttgaaggccragaacctgatgtacctgaagcagatcctgtatttgctggagaaattcgtggctgtgctaggggggaacattaagcaaaatcccaatacacagagtctgtcacagacagggacggagctgaagacyatcaacgactttctcttccagagccagatcgacaacatcaacctgttcaaggtgcagcgatactgtgagaagagcatgatcagcagaaagctctttggcttcactgaacggtacggagcagtgttctcatcccgggagcagcccaaactggctgggtttcagcaattcctgcagagcctgcagcccaggacgactgaagcwcttgcagcccctgcagacgagagtcaggccagcgtcccgcaaccagcttccccrctratkcacatcsaaggcttcctggcagctctcactacggccaaccaggacggcagggtcatcctgagccgccaaggcagcctcagtsagagcaccctgaagtttttgctcctgaatccagctgtgcactttscccaagtggtgaaggaatgccgggcagtggtcattgcsgggggkaccatgcagccggtaaggacacctttcccagcccctcgtgccccaggtgttgggatgagatggggrcttgggagagatgcrttatcagtcctgttctctcctggggccscaagccagaaaggacaacatctgcccctygtcatctgcagcgggatctccaaccagccgctggaattcacsttccagaaaagagacctgcctcagatgatggacgaggtgggtcgcatyctctgtaacctgtgcggtgtggttyctggaggggtggtctgtttcttcccctcctacgagtacctgcgccaggtccatgcccactgggagaagggtggcctgctgggccgtctggctgccaggaagaagatattccaggaacctaagagcgcacaccaggtggagcaggtgctgctggcgtattccaggtgcatccaggcctgtggccaggagagaggccaggtgacagaggccctgctcctytctgtggttggaggaaagatgagtgaagggatcaacttctctgacaacctaggccggtgtgtggtgatggtgggcatgcccttccccaacatcaggtctgcagagctgcaggagaagatggcctacttggatcaaaccctccccagagcccccggccaggcacmcccagggaaggctctggtggasaacctgtgcatgaaggccgtcaaccagtccataggcagggccatcaggcaccagaaggattttgccagcatagtgctcctggaccagcgataygcccggccccctgtcctggccaagctgccggcctggatccgagccmgcgtggaggtcaaagctacctttggccccgccattgctgctgtgcagaagtttcaccgggagaagtcggcctcttcctgatgggcaaccacaccaccgcccggcgccgtgcccttcctttgtcctgccctctggagacagtgtttgtcgtgggcgtggtctgcagggatcctgttacaaaggtgaaacccaggaggagagtgtggagtccagagcgctgccrggacccaggcacaggygttagctcccgtaggagaaaatgsgggaatcctgaatgaacagtgggtcctggctgtccttggggcgttccagggcagctcccctcctggaatagaatctttctttccatcctgcatggctgagagccaggcytcctkcttggwgtccrcaggaggctgtggcagcwgtggcatccactgtggcatctccgtcctgcccaccttaagaggygagatggagcaggyccatctgcctctgccctttctagccaaggttatagctgccctggactgctcactctctggtctcaatttaaaatgatcccrtggccacagggctcctgcccaggggcttgtyaccttcccctcctccttcctgagtcactccttcagtagaaggccctgctctctatcctgccccayagccctgcctggatttgtatccttggcttcgtgccagttcctccaagtctatggcacctccctccctctcaaccacttgagcaaactccaagacaccttctaccccgacaccagcaattatgccaagggccattaggctctcaacatgactatagagaccccgtatcatcatggagacctttgttcctgtgggaaaatawccctcccacctgcarcagctgcccctgctgactgcgcctgtcttctccctctgaccccagagaaaggggcygtggtcagctgggatcttctgccaccatcagggacaaaccgggggcaggaggaaagtcactgatgcccagctgtttgcatcctgcacagctacaggtccttaattaaaagtgtrctgttggtt

SEQ ID NO: 3044 - DNA, 4165 bp, Homo sapiens
tagattctggctgttgcgtgttagcgcgcgtcccggagtgcgcatgcgcaacggcgggggttgttccggcagcctttcactgaggccacccgccagtttcaaattcagtggcgtttgccctgattcccggggcctggctttcagcgtagcaattctgccggcgaagaaggtgagcgcagtgctgtgtggcagcagaggtccttaggacgaggagcagcgggacgaggaagggcagactggtgaaatcgcaaactgggcgtctgttccggcgccggacccctgtttgcaaaggtccatggctaatgaaacacagaaggttggtgccatccattttccttttcccttcacaccctattccatccaggaagacttcatggcagagctgtaccgggttttggaggctggcaagattgggatatttgagagtccaactggcactgggaagtccttaagtcttatttgtggggccctctcctggctccgtgactttgaacagaagaagcgtgaagaagaggcacgactccttgaaactggaactggccccttacatgatgagaaagatgaatccctgtgtctgtcttcctcctgcgaaggggctgcaggcaccccgaggcctgctggagaaccggcctgggttactcagtttgtgcagaagaaagaagagagggacctggtgaaccgactraaggyggagcaggccaggaggaagcagcgagaagaacgcctgcagcagctgcagcacagggtgcagctcaagtatgcagccaagcgcctgaggcaggaagaagaagaaasagagaatctcctccgcctcagcagggagatgctagagacaggcccggaggctgagcggctggagcagctggagtctggggaggaggagctggtcctcgccgaatacgagagtgatgaggagaaaaaggtggcgagcggggcgccttctgacgccacctccagccgccatccaccagacgccagcttccccgctgccctgaacttcctccagcgcaccaggccttcctctgtcctgtctgaggatttgctcatgcaacgtgctgtggccaaacaccctgccctcctcccttcgcagatgtcttcctctcctttaaggcctggctcagagtggatgaggatgaggatgacctggaggaagaacacataactaagatttattactgtagtcggacacactcccagctggcccagtttgtgcatgaggtgaagaagagcccctttggcaaggatgttcggctggtctccctcggctcccrgcagaacctttgtgtaaatgaagacrtgagaagcctaggttctgtgcagcttatcaacraccgctgcgtggacatgcagagaagcaggcacgaagaagaaaggagctgaggaggagaagccaaagaggaggmggcaggaraagcaggcagcctgccccttctacaaccacgagcagatgggccttctccgggatgaggccctggcagaggtgaaggacatggagcagctgctggcccttgggaaggaggccmgggcctgtccctattacrggagccgccttgccatccctgcagccmagctggtggtgctgycctatcaratgctgctgcatgcgrccactcggcaggcygcvggcatccggctgcaggaccaggtggtgatcatcgacgaggcgcacaacctgatcgacaccaycacgrgcatgcacagmgtggaggtcagcggctcccagctctgccaggcccattcccagctgctgcagtacatggagcgatacgggaagcgtttgaaggccragaacctgatgtacctgaagcagatcctgtatttgctggagaaattcgtggctgtgctaggggggaacattaagcaaaatcccaatacacagagtctgtcacagacagggacggagctgaagacyatcaacgactttctcttccagagccagatcgacaacatcaacctgttcaaggtgcagcgatactgtgagaagagcatgatcagcagaaagctctttggcttcactgaacggtacggagcagtgttctcatcccgggagcagcccaaactggctgggtttcagcaattcctgcagagcctgcagcccaggacgactgaagcwcttgcagcccctgcagacgagagtcaggccagcgtcccgcaaccagcttccccrctratkcacatcsaaggcttcctggcagctctcactacggccaaccaggacggcagggtcatcctgagccgccaaggcagcctcagtsagagcaccctgaagtttttgctcctgaatccagctgtgcactttscccaagtggtgaaggaatgccgggcagtggtcattgcsgggggkaccatgcagccggtgtctgacttccggcagcagctgctggcctgtgctggggtggaagctgagcgcgtggtggagttttcctgtggtcacgtgatccctccagacaacatctgcccctygtcatctgcagcgggatctccaaccagccgctggaattcacsttccagaaaagagacctgcctcagatgatggacgaggtgggtcgcatyctctgtaacctgtgcggtgtggttyctggaggggtggtctgtttcttcccctcctacgagtacctgcgccaggtccatgcccactgggagaagggtggcctgctgggccgtctggctgccaggaagaagatattccaggaacctaagagcgcacaccaggtggagcaggtgctgctggcgtattccaggtgcatccaggcctgtggccaggagagaggccaggtgacagaggccctgctcctytctgtggttggaggaaagatgagtgaagggatcaacttctctgacaacctaggccggtgtgtggtgatggtgggcatgcccttccccaacatcaggtctgcagagctgcaggagaagatggcctacttggatcaaaccctcgtgagtgaccccatgggtgggagtggcatcacccccagggaaggctctggtggasaacctgtgcatgaaggccgtcaaccagtccataggcagggccatcaggcaccagaaggattttgccagcatagtgctcctggaccagcgataygcccggccccctgtcctggccaagctgccggcctggatccgagccmgcgtggaggtcaaagctacctttggccccgccattgctgctgtgcagaagtttcaccgggagaagtcggcctcttcctgatgggcaaccacaccaccgcccggcgccgtgcccttcctttgtcctgccctctggagacagtgtttgtcgtgggcgtggtctgcagggatcctgttacaaaggtgaaacccaggaggagagtgtggagtccagagcgctgccrggacccaggcacaggygttagctcccgtaggagaaaatgsgggaatcctgaatgaacagtgggtcctggctgtccttggggcgttccagggcagctcccctcctggaatagaatctttctttccatcctgcatggctgagagccaggcytcctkcttggwgtccrcaggaggctgtggcagcwgtggcatccactgtggcatctccgtcctgcccaccttaagaggygagatggagcaggyccatctgcctctgccctttctagccaaggttatagctgccctggactgctcactctctggtctcaatttaaaatgatcccrtggccacagggctcctgcccaggggcttgtyaccttcccctcctccttcctgagtcactccttcagtagaaggccctgctctctatcctgccccayagccctgcctggatttgtatccttggcttcgtgccagttcctccaagtctatggcacctccctccctctcaaccacttgagcaaactccaagacaccttctaccccgacaccagcaattatgccaagggccattaggctctcaacatgactatagagaccccgtatcatcatggagacctttgttcctgtgggaaaatawccctcccacctgcarcagctgcccctgctgactgcgcctgtcttctccctctgaccccagagaaaggggcygtggtcagctgggatcttctgccaccatcagggacaaaccgggggcaggaggaaagtcactgatgcccagctgtttgcatcctgcacagctacaggtccttaattaaaagtgtrctgttggtt

SEQ ID NO: 3045 - DNA, 2481 bp, Homo sapiens
sggcattaacagcagccgcgtgtctgggtcttagatttggcctagctgtgttgagcttttcatggattatgttacgtagataagacactgcaacagtgagtgagcgcttgtaacccacctgtctcttacagaaactgagccccagcgatactaactttagcaaggatacagctgggatcctaaacttggcgatcagagcccagagccgataaagttagctgcgtgagtctagcttcccccrgggcgggaatcgaggcggagcagggtacagtacggaggccagggatgagtgcagttgaccagattgttgacggaagtccatggctaatgaaacacagaaggttggtgccatccattttccttttcccttcacaccctattccatccaggaagacttcatggcagagctgtaccgggttttggaggctggcaagattgggatatttgagagtccaactggcactgggaagtccttaagtcttatttgtggggccctctcctggctccgtgactttgaacagaagaagcgtgaagaagaggcacgactccttgaaactggaactggccccttacatgatgagaaagatgaatccctgtgtctgtcttcctcctgcgaaggggctgcaggcaccccgaggcctgctggagaaccggcctgggttactcagtttgtgcagaagaaagaagagagggacctggtgaaccgactraaggyggagcaggccaggaggaagcagcgagaagaacgcctgcagcagctgcagcacagggtgcagctcaagtatgcagccaagcgcctgaggcaggaagaagaagaaasagagaatctcctccgcctcagcagggagatgctagagacaggcccggaggctgagcggctggagcagctggagtctggggaggaggagctggtcctcgccgaatacgagagtgatgaggagaaaaaggtggcgagcggagtggatgaggatgaggatgacctggaggaagaacacataactaagatttattactgtagtcggacacactcccagctggcccagtttgtgcatgaggtgaagaagagcccctttggcaaggatgttcggctggtctccctcggctcccrgcagaacctttgtgtaaatgaagacrtgagaagcctaggttctgtgcagcttatcaacraccgctgcgtggacatgcagagaagcaggcacggtagccaccrggaccrtggtgtagccgcaggtggtctggagagagtgaggcaggggtggcagtgactgaagaccattmagtgtctttcatagaaagaatggcagaggagaccccagttcctycctgagtcccctctccttgggaaaaagtgttcctactctctgggtgagcgtctggtccgaatcgttggcttggagatgattttacgggctctttctggagaacaraagtaaaacsttacagtgttccgatgagacacagtaggcagtacttgggagggtcttatagacccyaccctryggaagtgggtctcaacattacacaaccccctctygggcccgtggacagttgctgtcytctctgttttctctctttgtgcctgtgccmccctcagagaagaagaaaggagctgaggaggagaagccaaagaggaggmggcaggaraagcaggcagcctgccccttctacaaccacgagcagatgggccttctccgggatgaggccctggcagaggtgaaggacatggagcagctgctggcccttgggaaggaggccmgggcctgtccctattacrggagccgccttgccatccctgcagccmagctggtggtgctgycctatcaratgctgctgcatgcgrccactcggcaggcygcvggcatccggctgcaggaccaggtggtgatcatcgacgaggcgcacaacctgatcgacaccaycacgrgcatgcacagmgtggaggtcagcggctcccagctctgccaggcccattcccagctgctgcagtacatggagcgatacgggaagcgtttgaaggccragaacctgatgtacctgaagcagatcctgtatttgctggagaaattcgtggctgtgctagggggtgagagcctcgccccccggctaacccccggcctgcaaaacccgccgggctgctttttccttggatgcccatcaggacgcctcagttctctgtgtttttaagaagggtcggccaggtgtggtggctcacgcctgtaatcccagcccttgggaggccgaggcaggtggttcacctgaggtcaggagttttgagaccagcctggtcaacatgatgaaatcccatctctactaaaaatacaaaaaaattagctgggagtgttgccgtggcctgtagtcccagctgctccagaagctgagacaagagaattgcttgctcaaacccgggaggcggaggttgcagtgagccgagattgtgccactgcagtccagtctgggcgacagagtgagagtcagtctcaa

SEQ ID NO: 3046 - DNA, 3819 bp, Homo sapiens
tagattctggctgttgcgtgttagcgcgcgtcccggagtgcgcatgcgcaacggcgggggttgttccggcagcctttcactgaggccacccgccagtttcaaattcagtggcgtttgccctgattcccggggcctggctttcagcgtagcaattctgccggcgaagaaggtgagcgcagtgctgtgtggcagcagaggtccttaggacgaggagcagcgggacgaggaagggcagactggtgaaatcgcaaactgggcgtctgttccggcgccggacccctgtttgcaaaggtccatggctaatgaaacacagaaggttggtgccatccattttccttttcccttcacaccctattccatccaggaagacttcatggcagagctgtaccgggttttggaggctggcaagattgggatatttgagagtccaactggcactgggaagtccttaagtcttatttgtggggccctctcctggctccgtgactttgaacagaagaagcgtgaagaagaggcacgactccttgaaactggaactggccccttacatgatgagaaagatgaatccctgtgtctgtcttcctcctgcgaaggggctgcaggcaccccgaggcctgctggagaaccggcctgggttactcagtttgtgcagaagaaagaagagagggacctggtgaaccgactraaggyggagcaggccaggaggaagcagcgagaagaacgcctgcagcagctgcagcacagggtgcagctcaagtatgcagccaagcgcctgaggcaggaagaagaagaaasagagaatctcctccgcctcagcagggagatgctagagacaggcccggaggctgagcggctggagcagctggagtctggggaggaggagctggtcctcgccgaatacgagagtgatgaggagaaaaaggtggcgagcggagtggatgaggatgaggatgacctggaggaagaacacataactaagatttattactgtagtcggacacactcccagctggcccagtttgtgcatgaggtgaagaagagcccctttggcaaggatgttcggctggtctccctcggctcccrgcagaacctttgtgtaaatgaagacrtgagaagcctaggttctgtgcagcttatcaacraccgctgcgtggacatgcagagaagcaggcacgagaagaagaaaggagctgaggaggagaagccaaagaggaggmggcaggaraagcaggcagcctgccccttctacaaccacgagcagatgggccttctccgggatgaggccctggcagaggtgaaggacatggagcagctgctggcccttgggaaggaggccmgggcctgtccctattacrggagccgccttgccatccctgcagccmagctggtggtgctgycctatcaratgctgctgcatgcgrccactcggcaggcygcvggcatccggctgcaggaccaggtggtgatcatcgacgaggcgcacaacctgatcgacaccaycacgrgcatgcacagmgtggaggtcagcggctcccagctctgccaggcccattcccagctgctgcagtacatggagcgatacgggaagcgtttgaaggccragaacctgatgtacctgaagcagatcctgtatttgctggagaaattcgtggctgtgctaggggggaacattaagcaaaatcccaatacacagagtctgtcacagacagggacggagctgaagacyatcaacgactttctcttccagagccagatcgacaacatcaacctgttcaaggtgcagcgatactgtgagaagagcatgatcagcagaaagctctttggcttcactgaacggtacggagcagtgttctcatcccgggagcagcccaaactggctgggtttcagcaattcctgcagagcctgcagcccaggacgactgaagcwcttgcagcccctgcagacgagagtcaggccagcgtcccgcaaccagcttccccrctratkcacatcsaaggcttcctggcagctctcactacggccaaccaggacggcagggtcatcctgagccgccaaggcagcctcagtsagagcaccctgaagtttttgctcctgaatccagctgtgcactttscccaagtggtgaaggaatgccgggcagtggtcattgcsgggggkaccatgcagccggtgtctgacttccggcagcagctgctggcctgtgctggggtggaagctgagcgcgtggtggagttttcctgtggtcacgtgatccctccagacaacatctgcccctygtcatctgcagcgggatctccaaccagccgctggaattcacsttccagaaaagagacctgcctcagatgatattccaggaacctaagagcgcacaccaggtggagcaggtgctgctggcgtattccaggtgcatccaggcctgtggccaggagagaggccaggtgacagaggccctgctcctytctgtggttggaggaaagatgagtgaagggatcaacttctctgacaacctaggccggtgtgtggtgatggtgggcatgcccttccccaacatcaggtctgcagagctgcaggagaagatggcctacttggatcaaaccctccccagagcccccggccaggcacmcccagggaaggctctggtggasaacctgtgcatgaaggccgtcaaccagtccataggcagggccatcaggcaccagaaggattttgccagcatagtgctcctggaccagcgataygcccggccccctgtcctggccaagctgccggcctggatccgagccmgcgtggaggtcaaagctacctttggccccgccattgctgctgtgcagaagtttcaccgggagaagtcggcctcttcctgatgggcaaccacaccaccgcccggcgccgtgcccttcctttgtcctgccctctggagacagtgtttgtcgtgggcgtggtctgcagggatcctgttacaaaggtgaaacccaggaggagagtgtggagtccagagcgctgccrggacccaggcacaggygttagctcccgtaggagaaaatgsgggaatcctgaatgaacagtgggtcctggctgtccttggggcgttccagggcagctcccctcctggaatagaatctttctttccatcctgcatggctgagagccaggcytcctkcttggwgtccrcaggaggctgtggcagcwgtggcatccactgtggcatctccgtcctgcccaccttaagaggygagatggagcaggyccatctgcctctgccctttctagccaaggttatagctgccctggactgctcactctctggtctcaatttaaaatgatcccrtggccacagggctcctgcccaggggcttgtyaccttcccctcctccttcctgagtcactccttcagtagaaggccctgctctctatcctgccccayagccctgcctggatttgtatccttggcttcgtgccagttcctccaagtctatggcacctccctccctctcaaccacttgagcaaactccaagacaccttctaccccgacaccagcaattatgccaagggccattaggctctcaacatgactatagagaccccgtatcatcatggagacctttgttcctgtgggaaaatawccctcccacctgcarcagctgcccctgctgactgcgcctgtcttctccctctgaccccagagaaaggggcygtggtcagctgggatcttctgccaccatcagggacaaaccgggggcaggaggaaagtcactgatgcccagctgtttgcatcctgcacagctacaggtccttaattaaaagtgtrctgttggtt

SEQ ID NO: 3047 - DNA, 3964 bp, Homo sapiens
tagattctggctgttgcgtgttagcgcgcgtcccggagtgcgcatgcgcaacggcgggggttgttccggcagcctttcactgaggccacccgccagtttcaaattcagtggcgtttgccctgattcccggggcctggctttcagcgtagcaattctgccggcgaagaaggtgagcgcagtgctgtgtggcagcagaggtccttaggacgaggagcagcgggacgaggaagggcagactggtgaaatcgcaaactgggcgtctgttccggcgccggacccctgtttgcaaaggtccatggctaatgaaacacagaaggttggtgccatccattttccttttcccttcacaccctattccatccaggaagacttcatggcagagctgtaccgggttttggaggctggcaagattgggatatttgagagtccaactggcactgggaagtccttaagtcttatttgtggggccctctcctggctccgtgactttgaacagaagaagcgtgaagaagaggcacgactccttgaaactggaactggccccttacatgatgagaaagatgaatccctgtgtctgtcttcctcctgcgaaggggctgcaggcaccccgaggcctgctggagaaccggcctgggttactcagtttgtgcagaagaaagaagagagggacctggtgaaccgactraaggyggagcaggccaggaggaagcagcgagaagaacgcctgcagcagctgcagcacagggtgcagctcaagtatgcagccaagcgcctgaggcaggaagaagaagaaasagagaatctcctccgcctcagcagggagatgctagagacaggcccggaggctgagcggctggagcagctggagtctggggaggaggagctggtcctcgccgaatacgagagtgatgaggagaaaaaggtggcgagcggagtggatgaggatgaggatgacctggaggaagaacacataactaagatttattactgtagtcggacacactcccagctggcccagtttgtgcatgaggtgaagaagagcccctttggcaaggatgttcggctggtctccctcggctcccrgcagaacctttgtgtaaatgaagacrtgagaagcctaggttctgtgcagcttatcaacraccgctgcgtggacatgcagagaagcaggcacgagaagaagaaaggagctgaggaggagaagccaaagaggaggmggcaggaraagcaggcagcctgccccttctacaaccacgagcagatgggccttctccgggatgaggccctggcagaggtgaaggacatggagcagctgctggcccttgggaaggaggccmgggcctgtccctattacrggagccgccttgccatccctgcagccmagctggtggtgctgycctatcaratgctgctgcatgcgrccactcggcaggcygcvggcatccggctgcaggaccaggtggtgatcatcgacgaggcgcacaacctgatcgacaccaycacgrgcatgcacagmgtggaggtcagcggctcccagctctgccaggcccattcccagctgctgcagtacatggagcgatacgggaagcgtttgaaggccragaacctgatgtacctgaagcagatcctgtatttgctggagaaattcgtggctgtgctaggggggaacattaagcaaaatcccaatacacagagtctgtcacagacagggacggagctgaagacyatcaacgactttctcttccagagccagatcgacaacatcaacctgttcaaggtgcagcgatactgtgagaagagcatgatcagcagaaagctctttggcttcactgaacggtacggagcagtgttctcatcccgggagcagcccaaactggctgggtttcagcaattcctgcagagcctgcagcccaggacgactgaagcwcttgcagcccctgcagacgagagtcaggccagcgtcccgcaaccagcttccccrctratkcacatcsaaggcttcctggcagctctcactacggccaaccaggacggcagggtcatcctgagccgccaaggcagcctcagtsagagcaccctgaagtttttgctcctgaatccagctgtgcactttscccaagtggtgaaggaatgccgggcagtggtcattgcsgggggkaccatgcagccggtgtctgacttccggcagcagctgctggcctgtgctggggtggaagctgagcgcgtggtggagttttcctgtggtcacgtgatccctccagacaacatctgcccctygtcatctgcagcgggatctccaaccagccgctggaattcacsttccagaaaagagacctgcctcagatgatggacgaggtgggtcgcatyctctgtaacctgtgcggtgtggttyctggaggggtggtctgtttcttcccctcctacgagtacctgcgccaggtccatgcccactgggagaagggtggcctgctgggccgtctggctgccaggaagaagatattccaggaacctaagagcgcacaccaggtggagcaggtgctgctggcgtattccaggtgcatccaggcctgtggccaggagagaggccaggtgacagaggccctgctcctytctgtggttggaggaaagatgagtgaagggatcaacttctctgacaacctaggccggtgtgtggtgatggtgggcatgcccttccccaacatcaggtctgcagagctgcaggagaagatggcctacttggatcaaaccctcagcccccggccaggcacmcccagggaaggctctggtggasaacctgtgcatgaaggccgtcaaccagtccataggcagggccatcaggcaccagaaggattttgccagcatagtgctcctggaccagcgataygcccggccccctgtcctggccaagctgccggcctggatccgagccmgcgtggaggtcaaagctacctttggccccgccattgctgctgtgcagaagtttcaccgggagaagtcggcctcttcctgatgggcaaccacaccaccgcccggcgccgtgcccttcctttgtcctgccctctggagacagtgtttgtcgtgggcgtggtctgcagggatcctgttacaaaggtgaaacccaggaggagagtgtggagtccagagcgctgccrggacccaggcacaggygttagctcccgtaggagaaaatgsgggaatcctgaatgaacagtgggtcctggctgtccttggggcgttccagggcagctcccctcctggaatagaatctttctttccatcctgcatggctgagagccaggcytcctkcttggwgtccrcaggaggctgtggcagcwgtggcatccactgtggcatctccgtcctgcccaccttaagaggygagatggagcaggyccatctgcctctgccctttctagccaaggttatagctgccctggactgctcactctctggtctcaatttaaaatgatcccrtggccacagggctcctgcccaggggcttgtyaccttcccctcctccttcctgagtcactccttcagtagaaggccctgctctctatcctgccccayagccctgcctggatttgtatccttggcttcgtgccagttcctccaagtctatggcacctccctccctctcaaccacttgagcaaactccaagacaccttctaccccgacaccagcaattatgccaagggccattaggctctcaacatgactatagagaccccgtatcatcatggagacctttgttcctgtgggaaaatawccctcccacctgcarcagctgcccctgctgactgcgcctgtcttctccctctgaccccagagaaaggggcygtggtcagctgggatcttctgccaccatcagggacaaaccgggggcaggaggaaagtcactgatgcccagctgtttgcatcctgcacagctacaggtccttaattaaaagtgtrctgttggtt

SEQ ID NO: 3048 - DNA, 4257 bp, Homo sapiens
tagattctggctgttgcgtgttagcgcgcgtcccggagtgcgcatgcgcaacggcgggggttgttccggcagcctttcactgaggccacccgccagtttcaaattcagtggcgtttgccctgattcccggggcctggctttcagcgtagcaattctgccggcgaagaaggtgagcgcagtgctgtgtggcagcagaggtccttaggacgaggagcagcgggacgaggaagggcagactggtgaaatcgcaaactgggcgtctgttccggcgccggacccctgtttgcaaaggtccatggctaatgaaacacagaaggttggtgccatccattttccttttcccttcacaccctattccatccaggaagacttcatggcagagctgtaccgggttttggaggctggcaagattgggatatttgagagtccaactggcactgggaagtccttaagtcttatttgtggggccctctcctggctccgtgactttgaacagaagaagcgtgaagaagaggcacgactccttgaaactggaactggccccttacatgatgagaaagatgaatccctgtgtctgtcttcctcctgcgaaggggctgcaggcaccccgaggcctgctggagaaccggcctgggttactcagtttgtgcagaagaaagaagagagggacctggtgaaccgactraaggyggagcaggccaggaggaagcagcgagaagaacgcctgcagcagctgcagcacagggtgcagctcaagtatgcagccaagcgcctgaggcaggaagaagaagaaasagagaatctcctccgcctcagcagggagatgctagagacaggcccggaggctgagcggctggagcagctggagtctggggaggaggagctggtcctcgccgaatacgagagtgatgaggagaaaaaggtggcgagcggggcgccttctgacgccacctccagccgccatccaccagacgccagcttccccgctgccctgaacttcctccagcgcaccaggccttcctctgtcctgtctgaggatttgctcatgcaacgtgctgtggccaaacaccctgccctcctcccttcgcagatgtcttcctctcctttaaggcctggctcagagtggatgaggatgaggatgacctggaggaagaacacataactaagatttattactgtagtcggacacactcccagctggcccagtttgtgcatgaggtgaagaagagcccctttggcaaggatgttcggctggtctccctcggctcccrgcagaacctttgtgtaaatgaagacrtgagaagcctaggttctgtgcagcttatcaacraccgctgcgtggacatgcagagaagcaggcacgaagaagaaaggagctgaggaggagaagccaaagaggaggmggcaggaraagcaggcagcctgccccttctacaaccacgagcagatgggccttctccgggatgaggccctggcagaggtgaaggacatggagcagctgctggcccttgggaaggaggccmgggcctgtccctattacrggagccgccttgccatccctgcagccmagctggtggtgctgycctatcaratgctgctgcatgcgrccactcggcaggcygcvggcatccggctgcaggaccaggtggtgatcatcgacgaggcgcacaacctgatcgacaccaycacgrgcatgcacagmgtggaggtcagcggctcccagctctgccaggcccattcccagctgctgcagtacatggagcgatacgggaagcgtttgaaggccragaacctgatgtacctgaagcagatcctgtatttgctggagaaattcgtggctgtgctaggggggaacattaagcaaaatcccaatacacagagtctgtcacagacagggacggagctgaagacyatcaacgactttctcttccagagccagatcgacaacatcaacctgttcaaggtgcagcgatactgtgagaagagcatgatcagcagaaagctctttggcttcactgaacggtacggagcagtgttctcatcccgggagcagcccaaactggctgggtttcagcaattcctgcagagcctgcagcccaggacgactgaagcwcttgcagcccctgcagacgagagtcaggccagcgtcccgcaaccagcttccccrctratkcacatcsaaggcttcctggcagctctcactacggccaaccaggacggcagggtcatcctgagccgccaaggcagcctcagtsagagcaccctgaagtttttgctcctgaatccagctgtgcactttscccaagtggtgaaggaatgccgggcagtggtcattgcsgggggkaccatgcagccggtgtctgacttccggcagcagctgctggcctgtgctggggtggaagctgagcgcgtggtggagttttcctgtgttttcggcccctccctgatcttaccaggtcacgtgatccctccagacaacatctgcccctygtcatctgcagcgggatctccaaccagccgctggaattcacsttccagaaaagagacctgcctcagatgatggacgaggtgggtcgcatyctctgtaacctgtgcggtgtggttyctggaggggtggtctgtttcttcccctcctacgagtacctgcgccaggtccatgcccactgggagaagggtggcctgctgggccgtctggctgccaggaagaagatattccaggaacctaagagcgcacaccaggtggagcaggtgctgctggcgtattccaggtgcatccaggcctgtggccaggagagaggccaggtgacagaggccctgctcctytctgtggttggaggaaagatgagtgaagggatcaacttctctgacaacctaggccggtgtgtggtgatggtgggcatgcccttccccaacatcaggtctgcagagctgcaggagaagatggcctacttggatcaaaccctccccagagcccccggccaggcacmcccagggaaggctctggtggasaacctgtgcatgaaggccgtcaaccagtccataggcagggccatcaggcaccagaaggattttgccagcatagtgctcctggaccagcgataygcccggccccctgtcctggccaagctgccggcctggatccgagccmgcgtggaggtcaaagctacctttggccccgccattgctgctgtgcagaaggtcagtcctacctttttctttctgagagcctcccmaccccgagatcacatttctcactgccttctgtctgcccagtttcaccgggagaagtcggcctcttcctgatgggcaaccacaccaccgcccggcgccgtgcccttcctttgtcctgccctctggagacagtgtttgtcgtgggcgtggtctgcagggatcctgttacaaaggtgaaacccaggaggagagtgtggagtccagagcgctgccrggacccaggcacaggygttagctcccgtaggagaaaatgsgggaatcctgaatgaacagtgggtcctggctgtccttggggcgttccagggcagctcccctcctggaatagaatctttctttccatcctgcatggctgagagccaggcytcctkcttggwgtccrcaggaggctgtggcagcwgtggcatccactgtggcatctccgtcctgcccaccttaagaggygagatggagcaggyccatctgcctctgccctttctagccaaggttatagctgccctggactgctcactctctggtctcaatttaaaatgatcccrtggccacagggctcctgcccaggggcttgtyaccttcccctcctccttcctgagtcactccttcagtagaaggccctgctctctatcctgccccayagccctgcctggatttgtatccttggcttcgtgccagttcctccaagtctatggcacctccctccctctcaaccacttgagcaaactccaagacaccttctaccccgacaccagcaattatgccaagggccattaggctctcaacatgactatagagaccccgtatcatcatggagacctttgttcctgtgggaaaatawccctcccacctgcarcagctgcccctgctgactgcgcctgtcttctccctctgaccccagagaaaggggcygtggtcagctgggatcttctgccaccatcagggacaaaccgggggcaggaggaaagtcactgatgcccagctgtttgcatcctgcacagctacaggtccttaattaaaagtgtrctgttggtt

SEQ ID NO: 3049 - DNA, 5335 bp, Homo sapiens
cctgttccggaggcgcgggcgktgccactgtcttggtacctgcggtagtagcctggctttgctctgacggcgatctcgcggcccgagagccttttatagacagctccttcagtgtctctgtttccaaaccgcaaccgagaagagacagacggagaaaagagagttacttttccaggttgcttttcccggggatgtgaaggatacagaaatgactgtgaatcaacccatatcatcaaggagctgataatctagtggaagagttagacgtgtgcatacttcactatgatatgaggcagtctctgagcttatattctctgtggaagatgtgacatatccaggcggaacatcatgatgcagggaaacacatgtcacagaatgtcgttccacccgggacgagggtgtccccgaggacgaggaggacatggagccagaccctcagcaccatcctttaggccccaaaatctgaggctgcttcaccctcagcagcctcctgtgcaatatcaatatgaacctccaagtgccccttccaccactttctcaaactctmcagcccccaattttctccctccacgaccagactttgtacccttccccccacccatgcctccrtcagcgcaaggccctcttcccccctgcccaatcaggccgcctttccccaaccaccagatgaggcaccccttcccagttcctccttgttttcctcccatgccaccaccaatgccttgtcctaataaccccccagtccctggggcacctcctggacaaggcactttccccttcatgatgccccctccctccatgcctcatcccccgccccctccagtcatgccgcagcaggttaattatcagtaccctccgggctattctcaccacaacttcccacctcccagttttaatagtttccagaacaaccctagttctttcctgcccagtgctaataacagcagtagtcctcatttcagacatctccctccatacccactcccaaaggctcccagtgagagaaggtccccagaaaggctgaaacactatgatgaccacaggcaccgagatcacagtcatgggcgaggtgagaggcatcggtccctggatcggcgggagcgaggccgcagtccygacaggagaagacaagacagccggtacagatctgattatgaccgagggagaacaccatctcgccaccgcagctacgaacggagcagagagcgagaacgggagagacacaggcatcgagacaaccgaagatcaccatctctggaaaggtcctacaaaaaagagtataagagatctggaaggagttacggtttatcggttgttcctgaacctgctggatgcacaccagaattacctggggagattattaaaaatacagattcttgggccccacccctggagattgtgaatcatcgctccccaagtagggagaagaagagagctcgttgggaggaagaaaaagaccgttggagtgacaaccagagttctggcaaagacaagaactatacctcaatcaargaaaaagagcccgaggagaccatgcctgacaagaatgaggaggaagaagaagaacttcttaagcctgtgtggattcgatgcactcattcagaaaactactactccagtgaccccatggatcaggtgggagattctacagtggttggaacgagtaggcttcgtgacttatatgacaaatttgaggaggagttggggagcaggcaagaaaaggccaaagctgctcggcctccgtgggaacctccaaagacgaagctcgatgaagatttagagagttccagtgaatccgagtgtgagtctgatgaggacagcacctgttctagcagctcagactctgaagtttttgacgttattgcagaaatcaaacgcaaaaaggcccaccctgaccgacttcatgatgaactttggtacaacgatccaggccagatgaatgatggaccactctgcaaatgcagcgcaaaggcaagacgcacaggaattaggcacagcatttatcctggagaagaggccatcaagccctgtcgtcctatgaccaacaatgctggcagacttttccactaccggatcacagtctccccgcctacgaactttttaactgacaggccaactgttatagaatacgatgatcacgagtatatctttgaaggattttctatgtttgcacatgcccccctgaccaatattccactgtgtaaagtaattagattcaacatagactacacgattcatttcattgaagagatgatgccggagaatttttgtgtgaaagggcttgaactcttttcactgttcctattcagagatattttggaattatatgactggaatcttaaagatggaggaaaggaagtgctgtccatgcaccagattctcctgtacttgttaaggtgcagcaaagccctggtgcctgaggaggagattgccaatatgcttcagtgggaggagctggagtggcagaaatatgcagaagaatgcaaaggcatgattgttaccaaccctgggacgaaaccaagctctgtccgtatcgatcaactggatcgtgaacagttcaaccccgatgtgattacttttccgattatcgtccactttgggatacgccctgcacagttgagttatgcaggagacccacagtaccaaaaactgtggaagagttatgtgaaacttcgccacctcctagcaaatagtcccaaagtcaaacaaactgacaaacagaagctggcacagagggaggtctgaagccctccaaaaaatacggcagaagaatacaatgagacgagaagtaacggtggagctaagtagccaaggattctggaaaactggcatccgttytgatgtctgtcagcatgcaatgatgctacctgttctgacccatcatatccgctaccaccaatgcctaatgcatttggacaagttgataggatatactttccaagatcgttgtctgttgcagctggccatgactcatccaagtcatcatttaaattttggaatgaatcctgatcatgccaggaattcattatctaactgtggaattcggcagcccaaatacggagacagaaaagttcatcacatgcacatgcggaagaaagggattaacaccttgataaatatcatgtcacgccttggccaagatgacccaactccctcgaggattaaccacaatgaacggttggaattcctgggtgatgctgttgttgaatttctgaccagcgtccatttgtactatttgtttcctagtctggaagaaggaggattagcaacctatcggactgccattgttcagaatcagcaccttgccatgctagcaaagaaacttgaactggatcgatttatgctgtatgctcacgggcctgacctttgtagagaatcggaccttcgacatgcaatggccaattgttttgaagcgttaataggagctgtttacttggagggaagcctggaggaagccaagcagttatttggacgcttgctctttaatgatccggacctgcgcgaagtctggctcaattatcctctccacccactccaactacaagagccaaatactgatcgacaacttattgaaacttctccrgttctacaaaaacttactgagtttgaagaagcaattggagtaatttttactcatgttcgacttctggcaagggcattcacattgagaactgtgggatttaaccatctgaccctaggccacaatcagagaatggaattcctaggtgactccataatgcaactggtagccacagagtacttattcattcatttcccagatcatcatgaaggacacttaactttgttgcgaagctctttggtgaataatagaactcaggccaaggtagcggaggagctgggcatgcaggagtacgccataaccaacgacaagaccaagaggcctgtggcgcttcgcaccaagaccttggcggaccttttggaatcatttattgcagcgctgtacattgataaggatttggaatatgttcatactttcatgaatgtctgcttctttccacgattgaaagagttcattttgaaycaggattggaatgaccccaaatcccagcttcagcagtgttgcttgacacttaggacagaaggaaaagagccagacattcctctgtacaagactctgcagacagtgggcccatcccatgcccgaacctacactgtggctgtttatttcaagggagaaagaataggctgtgggaaaggaccaagtattcagcaagcggaaatgggagcagcaatggatgcgcttgaaaaatataattttccccagatggcccatcagaagcggttcatcgaacggaagtacagacaagagttaaaagaaatgaggtgggaaagagagcatcaagagagagagccagatgagactgaagacatcaagaaataaaggagggcatgcaagtgtggagtatttacttgctcagtaactgtgactgttgtctattgagacctagcctagttttcctgcagacaatgaaygaagtgtgctcattgaaataaaatacagagtcaaatcgctattgttgttttaatgatctgtttttagctggatggtctttattacaaagtattagatttttcttctatttaacggaaaacttgactttggtgaatgtgcattacttccttttattttgctctttaaataataaaattcaagaagcatattctatgtggaatagatcctgtttttccatctgtgtcccagattgtgaccctagactttcaattgacaagtaaaaaattgactttactagacattttgactgtgctctagtaacatctatcctttttcaaatctctggatttttaagtagattgttcagctttcatccggtggctgttcatcaagttatcagctgcaaatattgaacttacctctctctaagcagtgagtgttttgtagaaggaatccgtttaacrattaattggctaatgggagaaggggaaagactgatattcaagtcatacagattctttgaatcattagaataggagagaaatcatgattctaagccaggccacactttaaaccaagtgctctcaccctggggttagtggaacctttaagaagttaatgaacagacttcaaggaagtcaaaaacctcccaatactatattcaattttctgtgtgtgtttgagatttgagagggcatggggagcaggaaggaggagggtttatagcttttatcagcctctctaagtgggccctgcagtaaaaggctaacatgacattcaaagacataacattttaaaaaaagttattccaaactaaacatcactggtttcttattaataaaggcaaaacttctttgtaaa

SEQ ID NO: 3050 - DNA, 5331 bp, Homo sapiens
cctgttccggaggcgcgggcgktgccactgtcttggtacctgcggtagtagcctggctttgctctgacggcgatctcgcggcccgagagccttttatagacagctccttcagtgtctctgtttccaaaccgcaaccgagaagagacagacggagaaaagagagttacttttccaggttgcttttcccggggatgtgaaggatacagaaatgactgtgaatcaacccatatcatcaaggagctgataatctagtggaagagttagacgtgtgcatacttcactatgatatgaggcagtctctgagcttatattctctgtggaagatgtgacatatccaggcggaacatcatgatgcagggaaacacatgtcacagaatgtcgttccacccgggacgagggtgtccccgaggacgaggaggacatggagccagaccctcagcaccatcctttaggccccaaaatctgaggctgcttcaccctcagcagcctcctgtgcaatatcaatatgaacctccaagtgccccttccaccactttctcaaactctmcagcccccaattttctccctccacgaccagactttgtacccttccccccacccatgcctccrtcagcgcaaggccctcttcccccctgcccaatcaggccgcctttccccaaccaccagatgaggcaccccttcccagttcctccttgttttcctcccatgccaccaccaatgccttgtcctaataaccccccagtccctggggcacctcctggacaaggcactttccccttcatgatgccccctccctccatgcctcatcccccgccccctccagtcatgccgcagcaggttaattatcagtaccctccgggctattctcaccacaacttcccacctcccagttttaatagtttccagaacaaccctagttctttcctgcccagtgctaataacagcagtagtcctcatttcagacatctccctccatacccactcccaaaggctcccagtgagagaaggtccccagaaaggctgaaacactatgatgaccacaggcaccgagatcacagtcatgggcgaggtgagaggcatcggtccctggatcggcgggagcgaggccgcagtccygacaggagaagacaagacagccggtacagatctgattatgaccgagggagaacaccatctcgccaccgcagctacgaacggagcagagagcgagaacgggagagacacaggcatcgagacaaccgaagatcaccatctctggaaaggtcctacaaaaaagagtataagagatctggaaggagttacggtttatcggttgttcctgaacctgctggatgcacaccagaattacctggggagattattaaaaatacagattcttgggccccacccctggagattgtgaatcatcgctccccaagtagggagaagaagagagctcgttgggaggaagaaaaagaccgttggagtgacaaccagagttctggcaaagacaagaactatacctcaatcaargaaaaagagcccgaggagaccatgcctgacaagaatgaggaggaagaagaagaacttcttaagcctgtgtggattcgatgcactcattcagaaaactactactccagtgaccccatggatcaggtgggagattctacagtggttggaacgagtaggcttcgtgacttatatgacaaatttgaggaggagttggggagcaggcaagaaaaggccaaagctgctcggcctccgtgggaacctccaaagacgaagctcgatgaagatttagagagttccagtgaatccgagtgtgagtctgatgaggacagcacctgttctagcagctcagactctgaagtttttgacgttattgcagaaatcaaacgcaaaaaggcccaccctgaccgacttcatgatgaactttggtacaacgatccaggccagatgaatgatggaccactctgcaaatgcagcgcaaaggcaagacgcacaggaattaggcacagcatttatcctggagaagaggccatcaagccctgtcgtcctatgaccaacaatgctggcagacttttccactaccggatcacagtctccccgcctacgaactttttaactgacaggccaactgttatagaatacgatgatcacgagtatatctttgaaggattttctatgtttgcacatgcccccctgaccaatattccactgtgtaaagtaattagattcaacatagactacacgattcatttcattgaagagatgatgccggagaatttttgtgtgaaagggcttgaactcttttcactgttcctattcagagatattttggaattatatgactggaatcttaaagatggaggaaaggaagtgctgtccatgcaccagattctcctgtacttgttaaggtgcagcaaagccctggtgcctgaggaggagattgccaatatgcttcagtgggaggagctggagtggcagaaatatgcagaagaatgcaaaggcatgattgttaccaaccctgggacgaaaccaagctctgtccgtatcgatcaactggatcgtgaacagttcaaccccgatgtgattacttttccgattatcgtccactttgggatacgccctgcacagttgagttatgcaggagacccacagtaccaaaaactgtggaagagttatgtgaaacttcgccacctcctagcaaatagtcccaaagtcaaacaaactgacaaacagaagctggcacagagggaggaagccctccaaaaaatacggcagaagaatacaatgagacgagaagtaacggtggagctaagtagccaaggattctggaaaactggcatccgttytgatgtctgtcagcatgcaatgatgctacctgttctgacccatcatatccgctaccaccaatgcctaatgcatttggacaagttgataggatatactttccaagatcgttgtctgttgcagctggccatgactcatccaagtcatcatttaaattttggaatgaatcctgatcatgccaggaattcattatctaactgtggaattcggcagcccaaatacggagacagaaaagttcatcacatgcacatgcggaagaaagggattaacaccttgataaatatcatgtcacgccttggccaagatgacccaactccctcgaggattaaccacaatgaacggttggaattcctgggtgatgctgttgttgaatttctgaccagcgtccatttgtactatttgtttcctagtctggaagaaggaggattagcaacctatcggactgccattgttcagaatcagcaccttgccatgctagcaaagaaacttgaactggatcgatttatgctgtatgctcacgggcctgacctttgtagagaatcggaccttcgacatgcaatggccaattgttttgaagcgttaataggagctgtttacttggagggaagcctggaggaagccaagcagttatttggacgcttgctctttaatgatccggacctgcgcgaagtctggctcaattatcctctccacccactccaactacaagagccaaatactgatcgacaacttattgaaacttctccrgttctacaaaaacttactgagtttgaagaagcaattggagtaatttttactcatgttcgacttctggcaagggcattcacattgagaactgtgggatttaaccatctgaccctaggccacaatcagagaatggaattcctaggtgactccataatgcaactggtagccacagagtacttattcattcatttcccagatcatcatgaaggacacttaactttgttgcgaagctctttggtgaataatagaactcaggccaaggtagcggaggagctgggcatgcaggagtacgccataaccaacgacaagaccaagaggcctgtggcgcttcgcaccaagaccttggcggaccttttggaatcatttattgcagcgctgtacattgataaggatttggaatatgttcatactttcatgaatgtctgcttctttccacgattgaaagagttcattttgaaycaggattggaatgaccccaaatcccagcttcagcagtgttgcttgacacttaggacagaaggaaaagagccagacattcctctgtacaagactctgcagacagtgggcccatcccatgcccgaacctacactgtggctgtttatttcaagggagaaagaataggctgtgggaaaggaccaagtattcagcaagcggaaatgggagcagcaatggatgcgcttgaaaaatataattttccccagatggcccatcagaagcggttcatcgaacggaagtacagacaagagttaaaagaaatgaggtgggaaagagagcatcaagagagagagccagatgagactgaagacatcaagaaataaaggagggcatgcaagtgtggagtatttacttgctcagtaactgtgactgttgtctattgagacctagcctagttttcctgcagacaatgaaygaagtgtgctcattgaaataaaatacagagtcaaatcgctattgttgttttaatgatctgtttttagctggatggtctttattacaaagtattagatttttcttctatttaacggaaaacttgactttggtgaatgtgcattacttccttttattttgctctttaaataataaaattcaagaagcatattctatgtggaatagatcctgtttttccatctgtgtcccagattgtgaccctagactttcaattgacaagtaaaaaattgactttactagacattttgactgtgctctagtaacatctatcctttttcaaatctctggatttttaagtagattgttcagctttcatccggtggctgttcatcaagttatcagctgcaaatattgaacttacctctctctaagcagtgagtgttttgtagaaggaatccgtttaacrattaattggctaatgggagaaggggaaagactgatattcaagtcatacagattctttgaatcattagaataggagagaaatcatgattctaagccaggccacactttaaaccaagtgctctcaccctggggttagtggaacctttaagaagttaatgaacagacttcaaggaagtcaaaaacctcccaatactatattcaattttctgtgtgtgtttgagatttgagagggcatggggagcaggaaggaggagggtttatagcttttatcagcctctctaagtgggccctgcagtaaaaggctaacatgacattcaaagacataacattttaaaaaaagttattccaaactaaacatcactggtttcttattaataaaggcaaaacttctttgtaaa

SEQ ID NO: 3051 - DNA, 4297 bp, Homo sapiens
tcccccgccccctccagtcatgccgcagcaggttaattatcagtaccctccgggctattctcaccacaacttcccacctcccagttttaatagtttccagaacaaccctagttctttcctgcccagtgctaataacagcagtagtcctcatttcagacatctccctccatacccactcccaaaggctcccagtgagagaaggtccccagaaaggctgaaacactatgatgaccacaggcaccgagatcacagtcatgggcgaggtgagaggcatcggtccctggatcggcgggagcgaggccgcagtccygacaggagaagacaagacagccggtacagatctgattatgaccgagggagaacaccatctcgccaccgcagctacgaacggagcagtcgctccccaagtagggagaagaagagagctcgttgggaggaagaaaaagaccgttggagtgacaaccagagttctggcaaagacaagaactatacctcaatcaargaaaaagagcccgaggagaccatgcctgacaagaatgaggaggaagaagaagaacttcttaagcctgtgtggattcgatgcactcattcagaaaactactactccagtgaccccatggatcaggtgggagattctacagtggttggaacgagtaggcttcgtgacttatatgacaaatttgaggaggagttggggagcaggcaagaaaaggccaaagctgctcggcctccgtgggaacctccaaagacgaagctcgatgaagatttagagagttccagtgaatccgagtgtgagtctgatgaggacagcacctgttctagcagctcagactctgaagtttttgacgttattgcagaaatcaaacgcaaaaaggcccaccctgaccgacttcatgatgaactttggtacaacgatccaggccagatgaatgatggaccactctgcaaatgcagcgcaaaggcaagacgcacaggaattaggcacagcatttatcctggagaagaggccatcaagccctgtcgtcctatgaccaacaatgctggcagacttttccactaccggatcacagtctccccgcctacgaactttttaactgacaggccaactgttatagaatacgatgatcacgagtatatctttgaaggattttctatgtttgcacatgcccccctgaccaatattccactgtgtaaagtaattagattcaacatagactacacgattcatttcattgaagagatgatgccggagaatttttgtgtgaaagggcttgaactcttttcactgttcctattcagagatattttggaattatatgactggaatcttaaagatggaggaaaggaagtgctgtccatgcaccagattctcctgtacttgttaaggtgcagcaaagccctggtgcctgaggaggagattgccaatatgcttcagtgggaggagctggagtggcagaaatatgcagaagaatgcaaaggcatgattgttaccaaccctgggacgaaaccaagctctgtccgtatcgatcaactggatcgtgaacagttcaaccccgatgtgattacttttccgattatcgtccactttgggatacgccctgcacagtaccaaaaactgtggaagagttatgtgaaacttcgccacctcctagcaaatagtcccaaagtcaaacaaactgacaaacagaagctggcacagagggaggaagccctccaaaaaatacggcagaagaatacaatgagacgagaagtaacggtggagctaagtagccaaggattctggaaaactggcatccgttytgatgtctgtcagcatgcaatgatgctacctgttctgacccatcatatccgctaccaccaatgcctaatgcatttggacaagttgataggatatactttccaagatcgttgtctgttgcagctggccatgactcatccaagtcatcatttaaattttggaatgaatcctgatcatgccaggaattcattatctaactgtggaattcggcagcccaaatacggagacagaaaagttcatcacatgcacatgcggaagaaagggattaacaccttgataaatatcatgtcacgccttggccaagatgacccaactccctcgaggattaaccacaatgaacggttggaattcctgggtgatgctgttgttgaatttctgaccagcgtccatttgtactatttgtttcctagtctggaagaaggaggattagcaacctatcggactgccattgttcagaatcagcaccttgccatgctagcaaagaaacttgaactggatcgatttatgctgtatgctcacgggcctgacctttgtagagaatcggaccttcgacatgcaatggccaattgttttgaagcgttaataggagctgtttacttggagggaagcctggaggaagccaagcagttatttggacgcttgctctttaatgatccggacctgcgcgaagtctggctcaattatcctctccacccactccaactacaagagccaaatactgatcgacaacttattgaaacttctccrgttctacaaaaacttactgagtttgaagaagcaattggagtaatttttactcatgttcgacttctggcaagggcattcacattgagaactgtgggatttaaccatctgaccctaggccacaatcagagaatggaattcctaggtgactccataatgcaactggtagccacagagtacttattcattcatttcccagatcatcatgaaggacacttaactttgttgcgaagctctttggtgaataatagaactcaggccaaggtagcggaggagctgggcatgcaggagtacgccataaccaacgacaagaccaagaggcctgtggcgcttcgcaccaagaccttggcggaccttttggaatcatttattgcagcgctgtacattgataaggatttggaatatgttcatactttcatgaatgtctgcttctttccacgattgaaagagttcattttgaaycaggattggaatgaccccaaatcccagcttcagcagtgttgcttgacacttaggacagaaggaaaagagccagacattcctctgtacaagactctgcagacagtgggcccatcccatgcccgaacctacactgtggctgtttatttcaagggagaaagaataggctgtgggaaaggaccaagtattcagcaagcggaaatgggagcagcaatggatgcgcttgaaaaatataattttccccagatggcccatcagaagcggttcatcgaacggaagtacagacaagagttaaaagaaatgaggtgggaaagagagcatcaagagagagagccagatgagactgaagacatcaagaaataaaggagggcatgcaagtgtggagtatttacttgctcagtaactgtgactgttgtctattgagacctagcctagttttcctgcagacaatgaaygaagtgtgctcattgaaataaaatacagagtcaaatcgctattgttgttttaatgatctgtttttagctggatggtctttattacaaagtattagatttttcttctatttaacggaaaacttgactttggtgaatgtgcattacttccttttattttgctctttaaataataaaattcaagaagcatattctatgtggaatagatcctgtttttccatctgtgtcccagattgtgaccctagactttcaattgacaagtaaaaaattgactttactagacattttgactgtgctctagtaacatctatcctttttcaaatctctggatttttaagtagattgttcagctttcatccggtggctgttcatcaagttatcagctgcaaatattgaacttacctctctctaagcagtgagtgttttgtagaaggaatccgtttaacrattaattggctaatgggagaaggggaaagactgatattcaagtcatacagattctttgaatcattagaataggagagaaatcatgattctaagccaggccacactttaaaccaagtgctctcaccctggggttagtggaacctttaagaagttaatgaacagacttcaaggaagtcaaaaacctcccaatactatattcaattttctgtgtgtgtttgagatttgagagggcatggggagcaggaaggaggagggtttatagcttttatcagcctctctaagtgggccctgcagtaaaaggctaacatgacattcaaagacataacattttaaaaaaagttattccaaactaaacatcactggtttcttattaataaaggcaaaacttctttgtaaa

SEQ ID NO: 3052 - DNA, 5241 bp, Homo sapiens
gcgggcgktgccactgtcttggtacctgcggtagtagcctggctttgctctgacggcgatctcgcggcccgagagccttttataggttgcttttcccggggatgtgaaggatacagaaatgactgtgaatcaacccatatcatcaaggagctgataatctagtggaagagttagacgtgtgcatacttcactatgatatgaggcagtctctgagcttatattctctgtggaagatgtgacatatccaggcggaacatcatgatgcagggaaacacatgtcacagaatgtcgttccacccgggacgagggtgtccccgaggacgaggaggacatggagccagaccctcagcaccatcctttaggccccaaaatctgaggctgcttcaccctcagcagcctcctgtgcaatatcaatatgaacctccaagtgccccttccaccactttctcaaactctmcagcccccaattttctccctccacgaccagactttgtacccttccccccacccatgcctccrtcagcgcaaggccctcttcccccctgcccaatcaggccgcctttccccaaccaccagatgaggcaccccttcccagttcctccttgttttcctcccatgccaccaccaatgccttgtcctaataaccccccagtccctggggcacctcctggacaaggcactttccccttcatgatgccccctccctccatgcctcatcccccgccccctccagtcatgccgcagcaggttaattatcagtaccctccgggctattctcaccacaacttcccacctcccagttttaatagtttccagaacaaccctagttctttcctgcccagtgctaataacagcagtagtcctcatttcagacatctccctccatacccactcccaaaggctcccagtgagagaaggtccccagaaaggctgaaacactatgatgaccacaggcaccgagatcacagtcatgggcgaggtgagaggcatcggtccctggatcggcgggagcgaggccgcagtccygacaggagaagacaagacagccggtacagatctgattatgaccgagggagaacaccatctcgccaccgcagctacgaacggagcagagagcgagaacgggagagacacaggcatcgagacaaccgaagatcaccatctctggaaaggtcctacaaaaaagagtataagagatctggaaggagttacggtttatcggttgttcctgaacctgctggatgcacaccagaattacctggggagattattaaaaatacagattcttgggccccacccctggagattgtgaatcatcgctccccaagtagggagaagaagagagctcgttgggaggaagaaaaagaccgttggagtgacaaccagagttctggcaaagacaagaactatacctcaatcaargaaaaagagcccgaggagaccatgcctgacaagaatgaggaggaagaagaagaacttcttaagcctgtgtggattcgatgcactcattcagaaaactactactccagtgaccccatggatcaggtgggagattctacagtggttggaacgagtaggcttcgtgacttatatgacaaatttgaggaggagttggggagcaggcaagaaaaggccaaagctgctcggcctccgtgggaacctccaaagacgaagctcgatgaagatttagagagttccagtgaatccgagtgtgagtctgatgaggacagcacctgttctagcagctcagactctgaagtttttgacgttattgcagaaatcaaacgcaaaaaggcccaccctgaccgacttcatgatgaactttggtacaacgatccaggccagatgaatgatggaccactctgcaaatgcagcgcaaaggcaagacgcacaggaattaggcacagcatttatcctggagaagaggccatcaagccctgtcgtcctatgaccaacaatgctggcagacttttccactaccggatcacagtctccccgcctacgaactttttaactgacaggccaactgttatagaatacgatgatcacgagtatatctttgaaggattttctatgtttgcacatgcccccctgaccaatattccactgtgtaaagtaattagattcaacatagactacacgattcatttcattgaagagatgatgccggagaatttttgtgtgaaagggcttgaactcttttcactgttcctattcagagatattttggaattatatgactggaatcttaaagatggaggaaaggaagtgctgtccatgcaccagattctcctgtacttgttaaggtgcagcaaagccctggtgcctgaggaggagattgccaatatgcttcagtgggaggagctggagtggcagaaatatgcagaagaatgcaaaggcatgattgttaccaaccctgggacgaaaccaagctctgtccgtatcgatcaactggatcgtgaacagttcaaccccgatgtgattacttttccgattatcgtccactttgggatacgccctgcacagttgagttatgcaggagacccacagtaccaaaaactgtggaagagttatgtgaaacttcgccacctcctagcaaatagtcccaaagtcaaacaaactgacaaacagaagctggcacagagggaggaagccctccaaaaaatacggcagaagaatacaatgagacgagaagtaacggtggagctaagtagccaaggattctggaaaactggcatccgttytgatgtctgtcagcatgcaatgatgctacctgttctgacccatcatatccgctaccaccaatgcctaatgcatttggacaagttgataggatatactttccaagatcgttgtctgttgcagctggccatgactcatccaagtcatcatttaaattttggaatgaatcctgatcatgccaggaattcattatctaactgtggaattcggcagcccaaatacggagacagaaaagttcatcacatgcacatgcggaagaaagggattaacaccttgataaatatcatgtcacgccttggccaagatgacccaactccctcgaggattaaccacaatgaacggttggaattcctgggtgatgctgttgttgaatttctgaccagcgtccatttgtactatttgtttcctagtctggaagaaggaggattagcaacctatcggactgccattgttcagaatcagcaccttgccatgctagcaaagaaacttgaactggatcgatttatgctgtatgctcacgggcctgacctttgtagagaatcggaccttcgacatgcaatggccaattgttttgaagcgttaataggagctgtttacttggagggaagcctggaggaagccaagcagttatttggacgcttgctctttaatgatccggacctgcgcgaagtctggctcaattatcctctccacccactccaactacaagagccaaatactgatcgacaacttattgaaacttctccrgttctacaaaaacttactgagtttgaagaagcaattggagtaatttttactcatgttcgacttctggcaagggcattcacattgagaactgtgggatttaaccatctgaccctaggccacaatcagagaatggaattcctaggtgactccataatgcaactggtagccacagagtacttattcattcatttcccagatcatcatgaaggacacttaactttgttgcgaagctctttggtgaataatagaactcaggccaaggtagcggaggagctgggcatgcaggagtacgccataaccaacgacaagaccaagaggcctgtggcgcttcgcaccaagaccttggcggaccttttggaatcatttattgcagcgctgtacattgataaggatttggaatatgttcatactttcatgaatgtctgcttctttccacgattgaaagagttcattttgaaycaggattggaatgaccccaaatcccagcttcagcagtgttgcttgacacttaggacagaaggaaaagagccagacattcctctgtacaagactctgcagacagtgggcccatcccatgcccgaacctacactgtggctgtttatttcaagggagaaagaataggctgtgggaaaggaccaagtattcagcaagcggaaatgggagcagcaatggatgcgcttgaaaaatataattttccccagatggcccatcagaagcggttcatcgaacggaagtacagacaagagttaaaagaaatgaggtgggaaagagagcatcaagagagagagccagatgagactgaagacatcaagaaataaaggagggcatgcaagtgtggagtatttacttgctcagtaactgtgactgttgtctattgagacctagcctagttttcctgcagacaatgaaygaagtgtgctcattgaaataaaatacagagtcaaatcgctattgttgttttaatgatctgtttttagctggatggtctttattacaaagtattagatttttcttctatttaacggaaaacttgactttggtgaatgtgcattacttccttttattttgctctttaaataataaaattcaagaagcatattctatgtggaatagatcctgtttttccatctgtgtcccagattgtgaccctagactttcaattgacaagtaaaaaattgactttactagacattttgactgtgctctagtaacatctatcctttttcaaatctctggatttttaagtagattgttcagctttcatccggtggctgttcatcaagttatcagctgcaaatattgaacttacctctctctaagcagtgagtgttttgtagaaggaatccgtttaacrattaattggctaatgggagaaggggaaagactgatattcaagtcatacagattctttgaatcattagaataggagagaaatcatgattctaagccaggccacactttaaaccaagtgctctcaccctggggttagtggaacctttaagaagttaatgaacagacttcaaggaagtcaaaaacctcccaatactatattcaattttctgtgtgtgtttgagatttgagagggcatggggagcaggaaggaggagggtttatagcttttatcagcctctctaagtgggccctgcagtaaaaggctaacatgacattcaaagacataacattttaaaaaaagttattccaaactaaacatcactggtttcttattaataaaggcaaaacttctttgtaaa

SEQ ID NO: 3053 - DNA, 5331 bp, Homo sapiens; identical to SEQ ID NO: 3050

SEQ ID NO: 3054 - DNA, 1569 bp, Homo sapiens
ccgagggggaagagtgtgtgtctgcgggagaaagaggagaatcgcccaagcggcctcggaagccccagggagtggaggctcccgccgtggagccatgtggtgtatgtgtggtaacaccacgtctacgcccctctcactgatgctgccgcggtgtctggagctgagcgggaaacagccgcgggcacagctgggctgacgccctctccaccgtccggctccctcacgtcaaktccatctgtccccatgtgcctaggatccctgtgactctcaacatgaagatggtgacaccttcctgatttgacctgatggggctgagtccagatgccccagaggacgaggctggcatcaagaaggcagcagagaacatcaaggccttgaytgagcatgaaatgaagaacgggatccctgccaatcgaatcgtcctgggaggcttttcacagggcggggccctgtccctctacacggccctcacctgcccccacccgctggctggtatcgtagcatcgagctgctggctgcctctgcaccgggccttcccccaggcagctaaaggcagtggcaagggcctgaccatcctccagtgccatggggagctggaccccatggtgcccgtacggtttgggaccctgacggctgttgtcacacctgccagggtccagttcaagacatactcgggtgtcatgcacagctgctgtcctcaggagatggcagctgtgaaggaatttcttgagaagttgctgccttctgtctaactagtcgctggccccagtgcggtgccccagctcatgggggactcagcaagcaagcgtggcaccatcttggatctgagccagtcgagcccctgtccccacccttcctggcctgtccttttcccacaggcctctggggcaggtggcaaggcctggccgggctttccttcctggcctcagccacctggctctgtctgcagcaggggcaggctgctttcttatcccatttccctggaggcaggcctccctggcagcagtattggaggggctacaggaagctagagaaaggggcccagctgctgacccactcactcaggacctcactcactagccccgctttggggcccctcctgtgacctcagggtttggcccatggggcccttccaggcccctgctctaactgattctgcccagataatcgtgtgtctcctgcctccactcagctacttctcagtcatgaaggtggccatggccctgaggtccccttgctgctgtgggctccctgtccctgggcaggagtgctggtgaggaggtggagccttttgaggggggccttccctcagctgtttccccaaactggggggctgggccctgcctccccattaccctccttccctgcaggcctggagcctgtagggctggactgaggttcaggtctcccccaagctgtctcactctgactttgtccccactctagagcagggaaggggtgggggaggagttgtgtctcatcttctgtctccatgtggtttttgggtgcttttcttgttgtgtcctggattctgataaaattaaagaaattgcttcctcaaaaaaaaaa

SEQ ID NO: 3055 - DNA, 1511 bp, Homo sapiens
tgtgtctgcgggagaaagaggagaatcgcccaagcggcctcggaagccccagggagtggaggctcccgccgtggagccatgtggtgtatgtgtggtaacaccacgtctacgcccctctcactgatgctgccgcggtgtctggagctgagcgggaaacagccgcggttagttttttatatggacttggagacacagggcacagctgggctgacgccctctccaccgtccggctccctcacgtcaaktccatctgtccccatgtgcctaggatccctgtgactctcaacatgaagatggtgacaccttcctgatttgacctgatggggctgagtccagatgccccagaggacgaggctggcatcaagaaggcagcagagaacagggcggggccctgtccctctacacggccctcacctgcccccacccgctggctggtatcgtagcatcgagctgctggctgcctctgcaccgggccttcccccaggcagctaaaggcagtggcaagggcctgaccatcctccagtgccatggggagctggaccccatggtgcccgtacggtttgggaccctgacggctgttgtcacacctgccagggtccagttcaagacatactcgggtgtcatgcacagctgctgtcctcaggagatggcagctgtgaaggaatttcttgagaagttgctgccttctgtctaactagtcgctggccccagtgcggtgccccagctcatgggggactcagcaagcaagcgtggcaccatcttggatctgagccagtcgagcccctgtccccacccttcctggcctgtccttttcccacaggcctctggggcaggtggcaaggcctggccgggctttccttcctggcctcagccacctggctctgtctgcagcaggggcaggctgctttcttatcccatttccctggaggcaggcctccctggcagcagtattggaggggctacaggaagctagagaaaggggcccagctgctgacccactcactcaggacctcactcactagccccgctttggggcccctcctgtgacctcagggtttggcccatggggcccttccaggcccctgctctaactgattctgcccagataatcgtgtgtctcctgcctccactcagctacttctcagtcatgaaggtggccatggccctgaggtccccttgctgctgtgggctccctgtccctgggcaggagtgctggtgaggaggtggagccttttgaggggggccttccctcagctgtttccccaaactggggggctgggccctgcctccccattaccctccttccctgcaggcctggagcctgtagggctggactgaggttcaggtctcccccaagctgtctcactctgactttgtccccactctagagcagggaaggggtgggggaggagttgtgtctcatcttctgtctccatgtggtttttgggtgcttttcttgttgtgtcctggattctgataaaattaaagaaattgcttcctcaaaaaaaaaa

SEQ ID NO: 3056 - DNA, 1614 bp, Homo sapiens
tggagtgggggtggccgagggggaagagtgtgtgtctgcgggagaaagaggagaatcgcccaagcggcctcggaagccccagggagtggaggctcccgccgtggagccatgtggtgtatgtgtggtaacaccacgtctacgcccctctcactgatgctgccgcggtgtctggagctgagcgggaaacagccgcggttagttttttatatggacttggagacacagggcacagctgggctgacgccctctccaccgtccggctccctcacgtcaaktccatctgtccccatgtgcctaggatccctgtgactctcaacatgaagatggtgacaccttcctgatttgacctgatggggctgagtccagatgccccagaggacgaggctggcatcaagaaggcagcagagaacatcaaggccttgaytgagcatgaaatgaagaacgggatccctgccaatcgaatcgtcctgggaggcttttcacagggcggggccctgtccctctacacggccctcacctgcccccacccgctggctggtatcgtagcatcgagctgctggctgcctctgcaccgggccttcccccaggcagctaaaggcagtggcaagggcctgaccatcctccagtgccatggggagctggaccccatggtgcccgtacggtttgggaccctgacggctgttgtcacacctgccagggtccagttcaagacatactcgggtgtcatgcacagctgctgtcctcaggagatggcagctgtgaaggaatttcttgagaagttgctgccttctgtctaactagtcgctggccccagtgcggtgccccagctcatgggggactcagcaagcaagcgtggcaccatcttggatctgagccagtcgagcccctgtccccacccttcctggcctgtccttttcccacaggcctctggggcaggtggcaaggcctggccgggctttccttcctggcctcagccacctggctctgtctgcagcaggggcaggctgctttcttatcccatttccctggaggcaggcctccctggcagcagtattggaggggctacaggaagctagagaaaggggcccagctgctgacccactcactcaggacctcactcactagccccgctttggggcccctcctgtgacctcagggtttggcccatggggcccttccaggcccctgctctaactgattctgcccagataatcgtgtgtctcctgcctccactcagctacttctcagtcatgaaggtggccatggccctgaggtccccttgctgctgtgggctccctgtccctgggcaggagtgctggtgaggaggtggagccttttgaggggggccttccctcagctgtttccccaaactggggggctgggccctgcctccccattaccctccttccctgcaggcctggagcctgtagggctggactgaggttcaggtctcccccaagctgtctcactctgactttgtccccactctagagcagggaaggggtgggggaggagttgtgtctcatcttctgtctccatgtggtttttgggtgcttttcttgttgtgtcctggattctgataaaattaaagaaattgcttcctcaaaaaaaaaa

SEQ ID NO: 3057 - DNA, 4603 bp, Homo sapiens
ggagcaagatggcggcggcggggtccgtgaggcgcgggcggcggcgaccgcggcgccagtgagggggccctggggcccgggcggctccgggccggggccccgccgcgggacggaccatgctacgctccactggcttcttccgggccattgactgcccctattggtctggggcgcccggggggccctgccggcggccctactgccacttccggcaccgcggggcccggggccccggcgcgcccggtgacggcggagaggcgccccccgcagcagggctgggttacgacccctacaaccctgagctgcccaagccccccgcgcagagggagaatggcaccctgggcctgggggaggagccgcgcccggatgtgctggagttggagctggtcaaccaggccatcgaggccgtgcgcagtgaggtggagctggagcagcggcgctaccgggagctgctggagacgacccgtgagcaccgctccgccgaggcccccgccctggcgccccgcggccccaacgccagccccactgtgggcccggacgaggatgccttcccactggccttcgactacagccccggcagccacggcctattaagccctgatgccggctaccagcccaccccactggccgcccctgccgagccgggcagcaagtactcgctggcgtccctggacaggggtcagggcagaggtggagggggtggcggtgccctggaatacgtccccaaggctgtgagccagccccggcggcacagccgccccgttcccagtggcaagtacgtggtggacaactccaggccacccacagacctggagtatgaccctctctccaactactcggcccggcacctcagcagggccagctcccgggatgagcgggccgccaagcggccccggggctcccgcggcagtgagccctacacacctgctcccaagaagctctgtgacccctttggcagttgcgatgcaaggttctcagactcagaagatgaggccgccacggtcccaggtaacgagcccaccacggccagcacccccaaagccagggccgaccctgagatcaaggccaccgggcagccaccctccaaagagggcctggaggccgaggggggcggcctgcgggagaccaaggagacggccgtgcagtgcgacgtgggggacctccagccgcccccagccaagcccgcctcsccagcccaggtccagtcctcacaggatgggggctgccccaaggagggaaaacccaagaagaaaaaaaccggggccccacctgcccccagctgcaaagacggggcccaggggaaggacaagaccaaggacaagggccgagggcggcctgyggagaagccccgtgcggacaagaagggcccgcaggccagcagcccccggcgcaaggcagagtggccggaagggaccaagaagaagccatcttcggccactcctgtggccacctcagggaaagggaggcctgaccggccagcgcggcggccgagccccacaagcggggactcccgaccggcggccggcagaggcccaccccgccccctccagctgcccgacaggaagagcaccaaggccccgtcsgggaagctagtggagcggaaagcccgctcactagacgagggcgcctcccaggacgcccccaagctgaagaagcgggccctgagccacgccgacctctttggggacgagagtgaggacgaggccgcagggccaggggtgccgagcgtgtggccctctgccctccccagcctcagctcggactcagactccgactcagactccagcctgggcttcccggaggcgcaggggccgcccaagcggctcaaggcctccccgcccccctcccccgccccatcctcctcctcctcctcctcctcctccacctccagcgcgggggcggatgtggactactcggccctggagaaggaggtggactttgactccgaccccatggaggagtgcctgcggatcttcaacgagtccaccagcgtcaagacggaggacagaggccggctggcccggcagccccccaaggaaaagagtgaggagaaggggctttcgggtctgaccactctgttccccgggcagaagaggaggatctcccacctttccaagcaaggccaggaggtggagcccccgaggaggggtcccgcggtgcccccggcccggcccccgacggcgcaggaggtgtgctacctgcgggcccagcaggcgcagagggcatcggcgagcttgctgcaggcccccgccaggctggcagagaagtcgccctccgtccacatttccgcccctggcgagaagaggaggatcgcccacatccccaacccccgcctggctgcagcccccacaggtgccaagaggacccttgcggccagcggcagccagycctccaacggccctgagccaggtggccagcagctgaaaacacgcacattgtcggggatggcgtccaagactaccaccaccatcatccctaagcgaatcgcccacagtccatccttacagagtttaaagaaacccrttatccccaaagagtttgggggcaaagtccccaccgtcatccgccagcgctatctcaacctgttcatcgaggagtgtctcaagttctgtacctccaaccaggaggccatagagaaggcactgaacgaggagaaggtggyctatgaccgcagccccagcaagaacatctacctgaatgtggccgtgaacaccctcaagaagctcaggggcctggcccccagcgctgtgcccggcctcagcaaaaccrgtggccgcagggttgtgtcccacgaggtggtgttggggggcaggttggccgccaagaccagcttctcgctcagccgtccaagcagcccccgggtggaggacctgaaaggggctgccctgtacagccgcctcagggagtacctgctcacccaggaccagctcaaggagaacggctaccccttcccgcacccagagcggcccgggggcgcaatcatcttyacagctgaggagaagaggcccaaggactcttcctgcaggacctgctgccgctgtggcaccgagtacctcgtgtcctcttcaggccgctgcatccgggacgaggagtgttattaccactggggacggctgcgccggaaccgggtggccggaggctgggagacccagtacatgtgctgctcggctgccgccggctctgtcggctgccaagtcgcaaagcaacacgtgcaggatggccggaaggagcgccttgagggcttcgtgaagacctttgagaaagagctctcaggagacacccacccggggatctacgccctggactgcgagatgtcctacaccacatatggcctggagctgacgcgcgtcacggtggtcgacacggacgtgcacgtggtttatgacaccttcgtgaagcctgacaacgagatcgtggactacaacaccaggttttcgggggtgacggaggctgaccttgccgacacaagtgtcacgctgcgtgacgtccaggccgttctgctgagcatgttcagcgctgacaccatcctcatcggacacagcctggagagcgacctcctggccctgaaggtcatccacagcaccgtggtggacacgtctgtgctcttcccccaccgcctgggcctcccctacaagcggtccctgcggaacctcatggccgactacctcagacagatcatccaggacaatgtggatgggcacagctccagygaggacgccggcgcctgcatgcacctggtgatctggaaggttcgagaagacgccaagaccaagcgatgacgcctgcccgcctcccacccgcctctcctgccgtcccgctggtccttagccccatgcctcttccaaaacagtgcaataaatctccggtaacccgtccacctggccgaggcagcccagagcagcgggatgagctggcggccagagaacgcccagcccagcccacccccgctcacgtcctgccgcacccctccgccggtccccaccctctgccccccagccctctggcgtctctagaaactgctgctgatggagaccaggacagagcccgcccccacccggcccgcagcccctcctgcccctcctgccaggccctccctcccgggtggtggccggcacctctgctcctcacgtgggtcgcggggcgggcttgtcccaggtttgtttgagacagtctttttttattttgtattgttatttttattatttttaatttaaacctgatgacttgcacagcatctttcccaccgggaagagcgggcctgctgccttccctcctgcggggtgggggtgggacagaccccagtgggggccagggccacactcagcgcagtgtgggctggacccgcctctgtgctccaggggctggccggtcttcgggggcgccggcttccaccactcgccgccccacccctgcactccgtgacctctgagaacccagctggcccctcgttagccccagggtctgccgtctagagggagcccaccggcctccggacactgtcttcccgctagagccccgtcctcctytgcggggctctccggacccccttccccctcacctccaggcagggacagaataaatgtttgtatggattttagatttt

SEQ ID NO: 3058 - DNA, 4355 bp, Homo sapiens
ggccacccacagacctggagtatgaccctctctccaactactcggcccggcacctcagcagggccagctcccgggatgagcgggccgccaagcggccccggggctcccgcggcagtgagccctacacacctgctcccaagaagctctgtgacccctttggcagttgcgatgcaaggttctcagactcagaagatgaggccgccacggtcccaggtaacgagcccaccacggccagcacccccaaagccagggccgaccctgagatcaaggccaccgggcagccaccctccaaagagggcctggaggccgaggggggcggcctgcgggagaccaaggagacggccgtgcagtgcgacgtgggggacctccagccgcccccagccaagcccgcctcsccagcccaggggccgcccaagcggctcaaggcctccccgcccccctcccccgccccatcctcctcctcctcctcctcctcctccacctccagcgcgggggcggatgtggactactcggccctggagaaggaggtggactttgactccgaccccatggaggagtgcctgcggatcttcaacgagtccaccagcgtcaagacggaggacagaggccggctggcccggcaggccccgcccttcggccgtgaccgcgtccctgaggcctggcccccatcctgctcggccgtgctccgctcggccccaccctcgaggccccgccccttcttcgccttggccccacccaccccctccaggccccgcccccggcccccttccggggtccgaactggctccaccttcgccttggccgggccccgaggccccgccccgagatcccgccccccgtttcaggaccgttggcaccgggctaacggttccaccacgtccgccgccctggacgcccgcggcctgcccccccctgcctctcctgcgccgatacacttcgagtggattctggccatttgagcattctctccaactctccaatccccagtctgcccccacgggggtctcccccacctctcccccgtcccacagcctaaacccctcttcgccctgaacctcccttttcctcatgcggtgaatgggcactggccccgctcagactcccaggagcaccagagctggccctgagccaagccctgccccaccaggacctggggacacgggtgactcagacgtgactcaggaaggctcaggtcctgctggcatccgcagagccccaccagcatgggcagcctcggccagagagaagatctccaagatgaggacaggaactcagcattcacctggaaggtccaggccaacaaccgtgcctacaacgggcagttcaaggagaaggtgatcctgtgctggcaaaggaagaaatacaagaccaatgtcatccgcacggccaagtacaacttctactcgttcctgccgctgaacctgtaygagcagttccaccgcgtgtccaacctgttcttcctcatcatcatcatcctgcagagcattcccgacatctccacgctgccctggttctcgctcagtacccctatggtctgcctcctcttcatccgtgccacccgggacctggtggacgacatggggagacacaagagtgacagagccatcaacaacagaccctgccagattctgatggggaagagcttcaagcagaagaaatggcaggatctgtgcgtgggggatgtggtctgtctccgcaaggacaacatcgtcccagccgacatgctcttgctggccagcacggagcccagcagcctgtgctatgtggagacggtggacattgacggggagaccaacttgaagttcagacaggccctgatggtcacccacaaagaactggccactataaagaagatggcgtcctttcaaggcacagtgacgtgtgaggcgcctaacagtcggatgcaccacttcgtggggtgcctggaatggaatgacaagaaatactccctggacattggcaacctcctcctccgaggctgcaggattcgcaacacagacacctgctatggactggtcatttatgctggttttgacacaaaaattatgaagaactgtggcaagatccatttgaagagaaccaagctggacctcctgatgaacaagctggtggttgtgatcttcatctccgtggtgcttgtctgcctggtgttggccttcggcttcggtttctcagtcaaagaattcaaagaccaccactactacctctcgggggtgcatgggagcagcgtggccgcagagtccttcttcgtcttctggagcttcctcatcctgctcagcgtcaccatcccgatgtccatgttcatcctgtccgagttcatctacctggggaacagcgtcttcatcgactgggacgtgcagatgtactacaagccgcaggacgtgcctgccaaggcccgcagcaccagcctcaacgaccacctgggccaggtggaatacatcttctcggacaagacgggcacgctcacgcagaacatcttgaccttcaacaagtgctgcatcagcggccgcgtctatggagaacccctacctctggaacaagttcgccgacgggaagctgctcttccacaatgcggccctgctgcacctcgtgcggaccaacggggacgaggccgtgcgggagttctggcgcctgctggccatctgccacacggtgatgaccagctgttgtaccaggcggcctcccccgacgagggggcgctggtcaccgcagcccggaacttcggctacgtgttcctgtcccgcacccaggacaccrtcacgatcatggagctgggggaggaacgggtctaccaggtcctggccataakggacttcaacagcacgcgcaaacggatgtcggtgctggttcgaaagccagagggcgccatctgcctgtacaccaagggcgccgacacggtcatcttcgaacgcttgcacaggaggggggcaatggaatttgccacagaggaggccttggctgcctttgcccaggagaccctgcggacactgtgcctggcctacagggaggtggctgaggacatttacgaggactggcagcagcgccaccaggaggccagcctcctgctgcagaaccgggcacaggccctgcaacaggtgtacaacgagatggagcaggacctcaggctgctgggagccacagccatcgaggacagactccaggacggtgtccctgaaaccatcaaatgtctcaagaagagcaacatcaaaatatgggtgctcaccggggacaagcaggaaacggctgtgaacatcggcttcgcctgcgagctgctgtcagagaatatgctcattctggaggagaaggagattagccgcatcctggagacctactgggaaaacagtaacaaccttctaaccagggagtccctgtcgcaggtcaagctggccttggtcattaacggagacttcctggacaaactgctggtgtccctgcggaaggagccgcgcgccctggcgcagaacgtgaacatggacgaggcgtggcaggagctcggccagtccaggagggatttcctctacgccaggcgcctgtccctgctgtgccggaggttcgggctcccgctggctgcaccgccagcccargactccagagcccgccgtagctccgaggtgctgcaggagcgcgccttcgtggacctggcgtccaagtgccaggcggtcatctgctgccgcgtgacgcccaagcagaaggccctgatcgtggccctggtcaagaagtaccaccaggtggtgaccctggccatcggggacggtgccaacgacatcaacatgatcaagaccgcggacgtgggcgtggggctggcgggccaggarggcatgcaggcagttcagaacagcgacttcgtgctcggccagttctgcttcctgcagcgcctcctgctggtgcacggccgctggtcctacgtgcggatctgcaagttcctgcgctacttcttctacaagagcatggccagcatgatggtgcaggtctggtttgcctgctacaacggcttcaccggccaggacgtgagcgcagagcagagcctggagaagccggagctgtacgtggtggggcagaaggacgagctcttcaactactgggtcttcgtccaagccatcgcccatggtgtgaccacctctctggtcaacttcttcatgacactgtggatcagccgcgacacggcgggacccgccagcttcagcgaccaccagtcctttgcggtcgtggtggccctgtcttgcctgctgtccatcaccatggaggtcattcttatcatcaagtactggaccgccctgtgcgtggcgaccatcctcctcagccttggtttctacgccatcatgactaccaccacccagagcttctggctcttcaga

SEQ ID NO: 3059 - DNA, 2569 bp, Homo sapiens
ctgagactcccaagtagctgggattacaggcacccacaaccacgcccggctaattttttgcatctttagtagagatggggttttgtcatgttggccaggctggtctggaactcctgacctcaagtgatccacccaccttgacctcccgaaatgctgggattacaggggtgagccaccatgtctggccgatatttttattttcatctcgaggacygaaccgcccgtcctaaccaaatcactggtttggcacaagagttctgtgtgtctcatttgccctgtcccagtgcacgtgagggtcagttaatacccaacctgaaagtacaatgtgtccatcgcggccctacctgaaatcctcttgggtgtcttgctttgggaaatgctggtcacagctccgtgagtctttgcactcagtagaagcttgattaatgctggctccaggcttttacattactgagcaggtgctcagtaaatgctggyctgaggccttgcattcagcaggtgctcagtwaatgctggcctgaggccttgcattcagcaggtgctcagtaaatgctggtctgaggccttgcattcagcaggtgctcagtaactgctggctcagtagatgcttaatgaatggtgtcccatagcccagaggatgctgggcgaggccaagtgaggcaggtctggcctcgggcacccccatcccctggcctggatggcacccctctgccaggcagcccgcggctctcgttccagaccaatgtcatccgcacggccaagtacaacttctactcgttcctgccgctgaacctgtaygagcagttccaccgcgtgtccaacctgttcttcctcatcatcatcatcctgcagagcattcccgacatctccacgctgccctggttctcgctcagtacccctatggtctgcctcctcttcatccgtgccacccgggacctggtggacgacatggggagacacaagagtgacagagccatcaacaacagaccctgccagattctgatggggaagaggtgaggctggggctgcagctggggatccgcggggacacgggggctccagcccagcagggtcatcggcctcggcaagtgtccatcaccttccgtgctccctgatctcccggctggttgagtccgacaggaaccgggcctgcattcattaggcgtttggccgggacgaggacagaggccgaggccctgatggcgaacccttgcagagcttagggctcgggcgatggggaggacaaggaaagtctgaagaggacgtgggtgcaggaccctggaggtcactgggtgggagcgtggacccgcggggagtggggtgggagcccggggaaggcttcctgagggggcaaaggcccggaggtggggactgcagctgcgggccccccgtcatcccgtgcctctggtctcccggtgtggggagggttggcagagggaggggcctccttcacaaccccctctccccgcagcttcaagcagaagaaatggcaggatctgtgcgtgggggatgtggtctgtctccgcaaggacaacatcgtcccagtgagctggggttgaccccgaggtcccagaaccacgcgccccctcaccgagagcacccctcccagggtggggagggctgccgcacccccaatttgtcttgcatcccctcttgcaacgctgccccccactccacaccaggccgacatgctcttgctggccagcacggagcccagcagcctgtgctatgtggagacggtggacattgacggggagaccaacttgaagttcagacaggccctgatggtcacccacaaagaactggccactataaagaagatggcgtcctttcaaggcacagtgacgtgtgaggcgcctaacagtcggatgcaccacttcgtggggtgcctggaatggaatgacaagaaatactccctggacattggcaacctcctcctccgaggctgcaggattcgcaacacagacacctgctatggactggtcatttatgctggttttgacacaaaaattatgaagaactgtggcaagatccatttgaagagaaccaagctggacctcctgatgaacaagctggtggttgtgatcttcatctccgtggtgcttgtctgcctggtgttggccttcggcttcggtttctcagtcaaagaattcaaagaccaccactactacctctcgggggtgcatgggagcagcgtggccgcagagtccttcttcgtcttctggagcttcctcatcctgctcagcgtcaccatcccgatgtccatgttcatcctgtgagtctccgccggctgcgtccccggtgcaaacgcggaacggggaggcatggggatggcacacagcaggcggggctgacygtgaccctgagtgcctctgcaggtccgagttcatctacctggggaacagcgtcttcatcgactgggacgtgcagatgtactacaagccgcaggacgtgcctgccaaggcccgcagcaccagcctcaacgaccacctgggccaggtggaatacatcttctcggacaagacgggcacgctcacgcagaacatcttgaccttcaacaagtgctgca

SEQ ID NO: 3060 - DNA, 2189 bp, Homo sapiens
taaaatgcacaagccgcaaaccatcagtttctctcttgtccctctctccctttctccttctctctctcataaacacacacacacaaatctattcccttttccttcaaaaaacacacacacacacaagtgcatttacactagtttcattttatttattttttaatccccaaaggattcatagagcaggctgtgtgcagctgccgtattttccactggttaaattggcagttacctactgtgtggagttgctaggagaaggagcatcatcatggggtctagtgccacagagattgaagaattggaaaacaccacttttaagtatcttacaggagaacagactgaaaaaatgtggcagcgcctgaaaggaatactaagatgcttggtgaagcagctggaaagaggtgatgttaacgtcgtcgacttaaagaagaatattgaatatgcggcatctgtgctggaagcagtttatatcgatgaaacaakaagacttctggatactgaagatgagctcagtgacattcagactgactcagtcccatctgaagtccgggactggttggcttctacctttacacggaaaatggggatgacaaaaaagaaacctgaggaaaaaccaaaatttcggagcattgtgcatgctgttcaagctggaatttttgtggaaagaatgtaccgaaaaacatatcatatggttggtttggcatatccagcagctgtcatcgtaacattaaaggatgttgataaatggtctttcgatgtatttgccctaaatgaagcaagtggagagcatagtctgaagtttatgatttatgaactgtttaccagatatgatcttatcaaccgtttcaagattcctgtttcttgcctaatcacctttgcagaagctttagaagttggttacagcaagtacaaaaatccatatcacaatttgattcatgcagctgatgtcactcaaactgtgcattacataatgcttcatacaggtatcatgcactggctcactgaactggaaattttagcaatggtctttgctgctgccattcatgattatgagcatacagggacaacaaacaactttcacattcagacaaggtcagatgttgccattttgtataatgatcgctctgtccttgagaatcaccacgtgagtgcagcttatcgacttatgcaagaagaagaaatgaatatcttgataaatttatccaaagatgactggagggatcttcggaacctagtgattgaaatggttttatctacagacatgtcaggtcacttccagcaaattaaaaatataagaaacagtttgcagcagcctgaagggattgacagagccaaaaccatgtccctgattctccacgcagcagacatcagccacccagccaaatcctggaagctgcattatcggtggaccatggccctaatggaggagtttttcctgcagggagataaagaagctgaattagggcttccattttccccactttgtgatcggaagtcaaccatggtggcccagtcacaaataggtttcatcgatttcatagtagagccaacattttctcttctgacagactcaacagagaaaattgttattcctcttatagaggaagcctcaaaagccgaaacttcttcctatgtggcaagcagctcaaccaccattgtggggttacacattgctgatgcactaagacgatcaaatacaaaaggctccatgagtgatgggtcctattccccagactactcccttgcagcagtggacctgaagagtttcaagaacaacctggtggacatcattcagcagaacaaagagaggtggaaagagttagctgcacaagaagcaagaaccagttcacagaagtgtgagtttattcatcagtaaacacctttaagtaaaacctygtgcatggtggcagctctaatttgaccaaaagacttggagattttgattatgcttgctggaaatctaccctgtcctgtgtgagacaggaaatctatttttgcagattgctcaataagcatcatgagccacataaataacagctgtaaactccttaattcaccgggctcaactgctaccgaacagattcatctagtggctacatcagcaccttgtgctttcagatatctgtttcaatggcattttgtggcatttgtctttaccgagtgccaataaattttctttgagcagctaa

SEQ ID NO: 3061 - DNA, 666 bp, Homo sapiens
ggtgaggtggtgagcagtggatatatgcctgtcaaagtcaatagcaaatctgtcagagtcttccctcagctttgtacatcagcactgttttgatagataagagaggctactgtataagtgtgtaagatttgtaatggactgaggaatgcttgttctagctgctgaaactgactgtaactgtattgtcttaggagcatcatcatggggtctagtgccacagagattgaagaattggaaaacaccacttttaagtatcttacaggagaacagactgaaaaaatgtggcagcgcctgaaaggaatactaagatgcttggtgaagcagctggaaagaggtgatgttaacgtcgtcgacttaaagaagaatattgaatatgcggcatctgtgctggaagcagtttatatcgatgaaacaakaagacttctggatactgaagatgagctcagtgacattcagactgactcagtcccatctgaagtccgggactggttggcttctacctttacacggaaaatggggatgacaaaaaagaaacctgaggaaaaaccaaaatttcggagcattgtgcatgctgttcaagctggaatttttgtggaaagaatgtaccgaaaaacatatcatatggttggtttggcatatccagcagctgtcatcgtaacattaaag

SEQ ID NO: 3062 - DNA, 2744 bp, Homo sapiens
ggtgaggtggtgagcagtggatatatgcctgtcaaagtcaatagcaaatctgtcagagtcttccctcagctttgtacatcagcactgttttgatagataagagaggctactgtataagtgtgtaagatttgtaatggactgaggaatgcttgttctagctgctgaaactgactgtaactgtattgtcttaggagcatcatcatggggtctagtgccacagagattgaagaattggaaaacaccacttttaagtatcttacaggagaacagactgaaaaaatgtggcagcgcctgaaaggaatactaagatgcttggtgaagcagctggaaagaggtgatgttaacgtcgtcgacttaaagaagaatattgaatatgcggcatctgtgctggaagcagtttatatcgatgaaacaakaagacttctggatactgaagatgagctcagtgacattcagactgactcagtcccatctgaagtccgggactggttggcttctacctttacacggaaaatggggatgacaaaaaagaaacctgaggaaaaaccaaaatttcggagcattgtgcatgctgttcaagctggaatttttgtggaaagaatgtaccgaaaaacatatcatatggttggtttggcatatccagcagctgtcatcgtaacattaaaggatgttgataaatggtctttcgatgtatttgccctaaatgaagcaagtggagagcatagtctgaagtttatgatttatgaactgtttaccagatatgatcttatcaaccgtttcaagattcctgtttcttgcctaatcacctttgcagaagctttagaagttggttacagcaagtacaaaaatccatatcacaatttgattcatgcagctgatgtcactcaaactgtgcattacataatgcttcatacaggtatcatgcactggctcactgaactggaaattttagcaatggtctttgctgctgccattcatgattatgagcatacagggacaacaaacaactttcacattcagacaaggtcagatgttgccattttgtataatgatcgctctgtccttgagaatcaccacgtgagtgcagcttatcgacttatgcaagaagaagaaatgaatatcttgataaatttatccaaagatgactggagggatcttcggaacctagtgattgaaatggttttatctacagacatgtcaggtcacttccagcaaattaaaaatataagaaacagtttgcagcagcctgaagggattgacagagccaaaaccatgtccctgattctccacgcagcagacatcagccacccagccaaatcctggaagctgcattatcggtggaccatggccctaatggaggagtttttcctgcagggagataaagaagctgaattagggcttccattttccccactttgtgatcggaagtcaaccatggtggcccagtcacaaataggtttcatcgatttcatagtagagccaacattttctcttctgacagactcaacagagaaaattgttattcctcttatagaggaagcctcaaaagccgaaacttcttcctatgtggcaagcagctcaaccaccattgtggggttacacattgctgatgcactaagacgatcaaatacaaaaggctccatgagtgatgggtcctattccccagactactcccttgcagcagtggacctgaagagtttcaagaacaacctggtggacatcattcagcagaacaaagagaggtggaaagagttagctgcacaaggtgaatctgatcttcataagaactcagaagacttagtaaatgctgaagaaaaacatgatgagacacattcataggcccgaaacaccttaaagacttctgtcattttaaacatgagaggacaatgaaatcagcatgaaaacatcctaaattctcaactttccacaaagctatggctcttctttcaacatagaattggattgggccattttaattgactcctatacaaggaattaagaagaacataaattttgagctagtaactctggccaaataaatacactcaagtttttatcagagtttttggccagtgcttctgccatttttttccctccacaatttggccttcttcaatcaagccagataaatttttgagacaaaagycagmcagtttttaatttttcttgctttgaaccctgtcataatgactgtgcaatacatgtgcagaagatgaggtattttaaaatttacttccttgcactgtcttacamagagtgctataactataaatttttcaaggtcttaaataaaaggaagcaaaaacaaaattattgaaaaattttttttgttgtgctggggaatatactatttagattgtccttcttattttaaatgcatgggaacagaatgacaggkgggatgctgaggagctggttgaagcatcagagcaatgctacagtccaacaatggagcattagatccccagctaggtgacctgatgaacacctttgtaaactctcatactgggaaatggcagtgaaacctttttctgaacccgtggaccagcctgcgtccgtccccatggtttcaaagcacgaatgcattacctccatggttgtggttacaagcaagtcacatgctatctacagttcatgataacaagaccgtcaaccattgctggagacagacactagaatggaaaatgaaatttgccagcgggatgtttatcccatcagaatgtaacaaaatatattaccagcca

SEQ ID NO: 3063 - DNA, 2811 bp, Homo sapiens
taaaatgcacaagccgcaaaccatcagtttctctcttgtccctctctccctttctccttctctctctcataaacacacacacacaaatctattcccttttccttcaaaaaacacacacacacacaagtgcatttacactagtttcattttatttattttttaatccccaaaggattcatagagcaggctgtgtgcagctgccgtattttccactggttaaattggcagttacctactgtgtggagttgctaggagaaggagcatcatcatggggtctagtgccacagagattgaagaattggaaaacaccacttttaagtatcttacaggagaacagactgaaaaaatgtggcagcgcctgaaaggaatactaagatgcttggtgaagcagctggaaagaggtgatgttaacgtcgtcgacttaaagaagaatattgaatatgcggcatctgtgctggaagcagtttatatcgatgaaacaakaagacttctggatactgaagatgagctcagtgacattcagactgactcagtcccatctgaagtccgggactggttggcttctacctttacacggaaaatggggatgacaaaaaagaaacctgaggaaaaaccaaaatttcggagcattgtgcatgctgttcaagctggaatttttgtggaaagaatgtaccgaaaaacatatcatatggttggtttggcatatccagcagctgtcatcgtaacattaaaggatgttgataaatggtctttcgatgtatttgccctaaatgaagcaagtggagagcatagtctgaagtttatgatttatgaactgtttaccagatatgatcttatcaaccgtttcaagattcctgtttcttgcctaatcacctttgcagaagctttagaagttggttacagcaagtacaaaaatccatatcacaatttgattcatgcagctgatgtcactcaaactgtgcattacataatgcttcatacaggtatcatgcactggctcactgaactggaaattttagcaatggtctttgctgctgccattcatgattatgagcatacagggacaacaaacaactttcacattcagacaaggtcagatgttgccattttgtataatgatcgctctgtccttgagaatcaccacgtgagtgcagcttatcgacttatgcaagaagaagaaatgaatatcttgataaatttatccaaagatgactggagggatcttcggaacctagtgattgaaatggttttatctacagacatgtcaggtcacttccagcaaattaaaaatataagaaacagtttgcagcagcctgaagggattgacagagccaaaaccatgtccctgattctccacgcagcagacatcagccacccagccaaatcctggaagctgcattatcggtggaccatggccctaatggaggagtttttcctgcagggagataaagaagctgaattagggcttccattttccccactttgtgatcggaagtcaaccatggtggcccagtcacaaataggtttcatcgatttcatagtagagccaacattttctcttctgacagactcaacagagaaaattgttattcctcttatagaggaagcctcaaaagccgaaacttcttcctatgtggcaagcagctcaaccaccattgtggggttacacattgctgatgcactaagacgatcaaatacaaaaggctccatgagtgatgggtcctattccccagactactcccttgcagcagtggacctgaagagtttcaagaacaacctggtggacatcattcagcagaacaaagagaggtggaaagagttagctgcacaaggtgaatctgatcttcataagaactcagaagacttagtaaatgctgaagaaaaacatgatgagacacattcataggcccgaaacaccttaaagacttctgtcattttaaacatgagaggacaatgaaatcagcatgaaaacatcctaaattctcaactttccacaaagctatggctcttctttcaacatagaattggattgggccattttaattgactcctatacaaggaattaagaagaacataaattttgagctagtaactctggccaaataaatacactcaagtttttatcagagtttttggccagtgcttctgccatttttttccctccacaatttggccttcttcaatcaagccagataaatttttgagacaaaagycagmcagtttttaatttttcttgctttgaaccctgtcataatgactgtgcaatacatgtgcagaagatgaggtattttaaaatttacttccttgcactgtcttacamagagtgctataactataaatttttcaaggtcttaaataaaaggaagcaaaaacaaaattattgaaaaattttttttgttgtgctggggaatatactatttagattgtccttcttattttaaatgcatgggaacagaatgacaggkgggatgctgaggagctggttgaagcatcagagcaatgctacagtccaacaatggagcattagatccccagctaggtgacctgatgaacacctttgtaaactctcatactgggaaatggcagtgaaacctttttctgaacccgtggaccagcctgcgtccgtccccatggtttcaaagcacgaatgcattacctccatggttgtggttacaagcaagtcacatgctatctacagttcatgataacaagaccgtcaaccattgctggagacagacactagaatggaaaatgaaatttgccagcgggatgtttatcccatcagaatgtaacaaaatatattaccagcca

SEQ ID NO: 3064 - DNA, 3362 bp, Homo sapiens
ggaggaaaataaaaaggtgatctttctccctggaagtatttggagagtgccaataactacagatagtatcctcctttgtgacatttgatctttatttttatggatcattcaactaaagctctggtcagcttcgcatgggcttctatcagttgatatggcatcttcaacttcagccaagaggaggttattagattataagtgctaaaaatgatgagtcrtctccacacttcagccagcatgaatacaagcaagattgtaaaataattataatctgaagcagagccagccatgcaacccgagcctrtctttcttcattaatttgtatacagttcttattttaagagaacaaactttcagagggtactcacatggggctgctgaaccagctgtacaacttttattttgaagaaaaaaagttgagcctcagaacagtctgttttaaagacagggagggacttagcctttcggagcttgaccagcatgtggaaggagagctctcatggctgcaataacttagggagttcctacctggatgacactggggtaggaagttttctgtttgttttgttctgtttcggagggtcccgtgcacttctcttgcctggatcaacgtgactcttggtggtttttgcacaccctgctctgtgggggagtgccccaacgtgcctgtcttatgtggcctctatggacacactgctcagctggcagagaacagggaagttttctcccagcacccaaaaagagaaagaggaaactactttttctttctgggctccttgcagcacaatagatcaggataagcttccacatttcctctctggagtttctggagtggtttccaggaagaagttaaaccttcacctttaaatggatgaccatgtcacaatcaggaagaaacatctccaaagacccatctttagactaagatgcttggtgaagcagctggaaagaggtgatgttaacgtcgtcgacttaaagaagaatattgaatatgcggcatctgtgctggaagcagtttatatcgatgaaacaakaagacttctggatactgaagatgagctcagtgacattcagactgactcagtcccatctgaagtccgggactggttggcttctacctttacacggaaaatggggatgacaaaaaagaaacctgaggaaaaaccaaaatttcggagcattgtgcatgctgttcaagctggaatttttgtggaaagaatgtaccgaaaaacatatcatatggttggtttggcatatccagcagctgtcatcgtaacattaaaggatgttgataaatggtctttcgatgtatttgccctaaatgaagcaagtggagagcatagtctgaagtttatgatttatgaactgtttaccagatatgatcttatcaaccgtttcaagattcctgtttcttgcctaatcacctttgcagaagctttagaagttggttacagcaagtacaaaaatccatatcacaatttgattcatgcagctgatgtcactcaaactgtgcattacataatgcttcatacaggtatcatgcactggctcactgaactggaaattttagcaatggtctttgctgctgccattcatgattatgagcatacagggacaacaaacaactttcacattcagacaaggtcagatgttgccattttgtataatgatcgctctgtccttgagaatcaccacgtgagtgcagcttatcgacttatgcaagaagaagaaatgaatatcttgataaatttatccaaagatgactggagggatcttcggaacctagtgattgaaatggttttatctacagacatgtcaggtcacttccagcaaattaaaaatataagaaacagtttgcagcagcctgaagggattgacagagccaaaaccatgtccctgattctccacgcagcagacatcagccacccagccaaatcctggaagctgcattatcggtggaccatggccctaatggaggagtttttcctgcagggagataaagaagctgaattagggcttccattttccccactttgtgatcggaagtcaaccatggtggcccagtcacaaataggtttcatcgatttcatagtagagccaacattttctcttctgacagactcaacagagaaaattgttattcctcttatagaggaagcctcaaaagccgaaacttcttcctatgtggcaagcagctcaaccaccattgtggggttacacattgctgatgcactaagacgatcaaatacaaaaggctccatgagtgatgggtcctattccccagactactcccttgcagcagtggacctgaagagtttcaagaacaacctggtggacatcattcagcagaacaaagagaggtggaaagagttagctgcacaaggtgaatctgatcttcataagaactcagaagacttagtaaatgctgaagaaaaacatgatgagacacattcataggcccgaaacaccttaaagacttctgtcattttaaacatgagaggacaatgaaatcagcatgaaaacatcctaaattctcaactttccacaaagctatggctcttctttcaacatagaattggattgggccattttaattgactcctatacaaggaattaagaagaacataaattttgagctagtaactctggccaaataaatacactcaagtttttatcagagtttttggccagtgcttctgccatttttttccctccacaatttggccttcttcaatcaagccagataaatttttgagacaaaagycagmcagtttttaatttttcttgctttgaaccctgtcataatgactgtgcaatacatgtgcagaagatgaggtattttaaaatttacttccttgcactgtcttacamagagtgctataactataaatttttcaaggtcttaaataaaaggaagcaaaaacaaaattattgaaaaattttttttgttgtgctggggaatatactatttagattgtccttcttattttaaatgcatgggaacagaatgacaggkgggatgctgaggagctggttgaagcatcagagcaatgctacagtccaacaatggagcattagatccccagctaggtgacctgatgaacacctttgtaaactctcatactgggaaatggcagtgaaacctttttctgaacccgtggaccagcctgcgtccgtccccatggtttcaaagcacgaatgcattacctccatggttgtggttacaagcaagtcacatgctatctacagttcatgataacaagaccgtcaaccattgctggagacagacactagaatggaaaatgaaatttgccagcgggatgtttatcccatcagaatgtaacaaaatatattaccagcca

SEQ ID NO: 3065 - DNA, 2740 bp, Homo sapiens
ggaggaaaataaaaaggtgatctttctccctggaagtatttggagagtgccaataactacagatagtatcctcctttgtgacatttgatctttatttttatggatcattcaactaaagctctggtcagcttcgcatgggcttctatcagttgatatggcatcttcaacttcagccaagaggaggttattagattataagtgctaaaaatgatgagtcrtctccacacttcagccagcatgaatacaagcaagattgtaaaataattataatctgaagcagagccagccatgcaacccgagcctrtctttcttcattaatttgtatacagttcttattttaagagaacaaactttcagagggtactcacatggggctgctgaaccagctgtacaacttttattttgaagaaaaaaagttgagcctcagaacagtctgttttaaagacagggagggacttagcctttcggagcttgaccagcatgtggaaggagagctctcatggctgcaataacttagggagttcctacctggatgacactggggtaggaagttttctgtttgttttgttctgtttcggagggtcccgtgcacttctcttgcctggatcaacgtgactcttggtggtttttgcacaccctgctctgtgggggagtgccccaacgtgcctgtcttatgtggcctctatggacacactgctcagctggcagagaacagggaagttttctcccagcacccaaaaagagaaagaggaaactactttttctttctgggctccttgcagcacaatagatcaggataagcttccacatttcctctctggagtttctggagtggtttccaggaagaagttaaaccttcacctttaaatggatgaccatgtcacaatcaggaagaaacatctccaaagacccatctttagactaagatgcttggtgaagcagctggaaagaggtgatgttaacgtcgtcgacttaaagaagaatattgaatatgcggcatctgtgctggaagcagtttatatcgatgaaacaakaagacttctggatactgaagatgagctcagtgacattcagactgactcagtcccatctgaagtccgggactggttggcttctacctttacacggaaaatggggatgacaaaaaagaaacctgaggaaaaaccaaaatttcggagcattgtgcatgctgttcaagctggaatttttgtggaaagaatgtaccgaaaaacatatcatatggttggtttggcatatccagcagctgtcatcgtaacattaaaggatgttgataaatggtctttcgatgtatttgccctaaatgaagcaagtggagagcatagtctgaagtttatgatttatgaactgtttaccagatatgatcttatcaaccgtttcaagattcctgtttcttgcctaatcacctttgcagaagctttagaagttggttacagcaagtacaaaaatccatatcacaatttgattcatgcagctgatgtcactcaaactgtgcattacataatgcttcatacaggtatcatgcactggctcactgaactggaaattttagcaatggtctttgctgctgccattcatgattatgagcatacagggacaacaaacaactttcacattcagacaaggtcagatgttgccattttgtataatgatcgctctgtccttgagaatcaccacgtgagtgcagcttatcgacttatgcaagaagaagaaatgaatatcttgataaatttatccaaagatgactggagggatcttcggaacctagtgattgaaatggttttatctacagacatgtcaggtcacttccagcaaattaaaaatataagaaacagtttgcagcagcctgaagggattgacagagccaaaaccatgtccctgattctccacgcagcagacatcagccacccagccaaatcctggaagctgcattatcggtggaccatggccctaatggaggagtttttcctgcagggagataaagaagctgaattagggcttccattttccccactttgtgatcggaagtcaaccatggtggcccagtcacaaataggtttcatcgatttcatagtagagccaacattttctcttctgacagactcaacagagaaaattgttattcctcttatagaggaagcctcaaaagccgaaacttcttcctatgtggcaagcagctcaaccaccattgtggggttacacattgctgatgcactaagacgatcaaatacaaaaggctccatgagtgatgggtcctattccccagactactcccttgcagcagtggacctgaagagtttcaagaacaacctggtggacatcattcagcagaacaaagagaggtggaaagagttagctgcacaagaagcaagaaccagttcacagaagtgtgagtttattcatcagtaaacacctttaagtaaaacctygtgcatggtggcagctctaatttgaccaaaagacttggagattttgattatgcttgctggaaatctaccctgtcctgtgtgagacaggaaatctatttttgcagattgctcaataagcatcatgagccacataaataacagctgtaaactccttaattcaccgggctcaactgctaccgaacagattcatctagtggctacatcagcaccttgtgctttcagatatctgtttcaatggcattttgtggcatttgtctttaccgagtgccaataaattttctttgagcagctaa

SEQ ID NO: 3066 - DNA, 2570 bp, Homo sapiens
tgttctacctacmctgtatctgatcactgcataagagatagtagaaatggcattatctttaaagtagtgatattttcaagccatgaagtttagtgacttgctgaaatgggctagggaatctaatttcaaatgggcaaaaagataaacaaactattttgctttaattttctagttcagtgttttaggggtaaatcaaaaccatccaaatgtcagatcagaaagaaagttaaaaatcatatagaaagacttctggatactgaagatgagctcagtgacattcagactgactcagtcccatctgaagtccgggactggttggcttctacctttacacggaaaatggggatgacaaaaaagaaacctgaggaaaaaccaaaatttcggagcattgtgcatgctgttcaagctggaatttttgtggaaagaatgtaccgaaaaacatatcatatggttggtttggcatatccagcagctgtcatcgtaacattaaaggatgttgataaatggtctttcgatgtatttgccctaaatgaagcaagtggagagcatagtctgaagtttatgatttatgaactgtttaccagatatgatcttatcaaccgtttcaagattcctgtttcttgcctaatcacctttgcagaagctttagaagttggttacagcaagtacaaaaatccatatcacaatttgattcatgcagctgatgtcactcaaactgtgcattacataatgcttcatacaggtatcatgcactggctcactgaactggaaattttagcaatggtctttgctgctgccattcatgattatgagcatacagggacaacaaacaactttcacattcagacaaggtcagatgttgccattttgtataatgatcgctctgtccttgagaatcaccacgtgagtgcagcttatcgacttatgcaagaagaagaaatgaatatcttgataaatttatccaaagatgactggagggatcttcggaacctagtgattgaaatggttttatctacagacatgtcaggtcacttccagcaaattaaaaatataagaaacagtttgcagcagcctgaagggattgacagagccaaaaccatgtccctgattctccacgcagcagacatcagccacccagccaaatcctggaagctgcattatcggtggaccatggccctaatggaggagtttttcctgcagggagataaagaagctgaattagggcttccattttccccactttgtgatcggaagtcaaccatggtggcccagtcacaaataggtttcatcgatttcatagtagagccaacattttctcttctgacagactcaacagagaaaattgttattcctcttatagaggaagcctcaaaagccgaaacttcttcctatgtggcaagcagctcaaccaccattgtggggttacacattgctgatgcactaagacgatcaaatacaaaaggctccatgagtgatgggtcctattccccagactactcccttgcagcagtggacctgaagagtttcaagaacaacctggtggacatcattcagcagaacaaagagaggtggaaagagttagctgcacaaggtgaatctgatcttcataagaactcagaagacttagtaaatgctgaagaaaaacatgatgagacacattcataggcccgaaacaccttaaagacttctgtcattttaaacatgagaggacaatgaaatcagcatgaaaacatcctaaattctcaactttccacaaagctatggctcttctttcaacatagaattggattgggccattttaattgactcctatacaaggaattaagaagaacataaattttgagctagtaactctggccaaataaatacactcaagtttttatcagagtttttggccagtgcttctgccatttttttccctccacaatttggccttcttcaatcaagccagataaatttttgagacaaaagycagmcagtttttaatttttcttgctttgaaccctgtcataatgactgtgcaatacatgtgcagaagatgaggtattttaaaatttacttccttgcactgtcttacamagagtgctataactataaatttttcaaggtcttaaataaaaggaagcaaaaacaaaattattgaaaaattttttttgttgtgctggggaatatactatttagattgtccttcttattttaaatgcatgggaacagaatgacaggkgggatgctgaggagctggttgaagcatcagagcaatgctacagtccaacaatggagcattagatccccagctaggtgacctgatgaacacctttgtaaactctcatactgggaaatggcagtgaaacctttttctgaacccgtggaccagcctgcgtccgtccccatggtttcaaagcacgaatgcattacctccatggttgtggttacaagcaagtcacatgctatctacagttcatgataacaagaccgtcaaccattgctggagacagacactagaatggaaaatgaaatttgccagcgggatgtttatcccatcagaatgtaacaaaatatattaccagcca

SEQ ID NO: 3067 - DNA, 1924 bp, Homo sapiens
taaaatgcacaagccgcaaaccatcagtttctctcttgtccctctctccctttctccttctctctctcataaacacacacacacaaatctattcccttttccttcaaaaaacacacacacacacaagtgcatttacactagtttcattttatttattttttaatccccaaaggattcatagagcaggctgtgtgcagctgccgtattttccactggttaaattggcagttacctactgtgtggagttgctaggagaaggagcatcatcatggggtctagtgccacagagattgaagaattggaaaacaccacttttaagtatcttacaggagaacagactgaaaaaatgtggcagcgcctgaaaggaatactaagatgcttggtgaagcagctggaaagaggtgatgttaacgtcgtcgacttaaagaagaatattgaatatgcggcatctgtgctggaagcagtttatatcgatgaaacaakaagacttctggatactgaagatgagctcagtgacattcagactgactcagtcccatctgaagtccgggactggttggcttctacctttacacggaaaatggggatgacaaaaaagaaacctgaggaaaaaccaaaatttcggagcattgtgcatgctgttcaagctggaatttttgtggaaagaatgtaccgaaaaacatatcatatggttggtttggcatatccagcagctgtcatcgtaacattaaaggatgttgataaatggtctttcgatgtatttgccctaaatgaagcaagtggagagcatagtctgaagtttatgatttatgaactgtttaccagatatgatcttatcaaccgtttcaagattcctgtttcttgcctaatcacctttgcagaagctttagaagttggttacagcaagtacaaaaatccatatcacaatttgattcatgcagctgatgtcactcaaactgtgcattacataatgcttcatacaggtatcatgcactggctcactgaactggaaattttagcaatggtctttgctgctgccattcatgattatgagcatacagggacaacaaacaactttcacattcagacaaggtcagatgttgccattttgtataatgatcgctctgtccttgagaatcaccacgtgagtgcagcttatcgacttatgcaagaagaagaaatgaatatcttgataaatttatccaaagatgactggagggatcttcggaacctagtgattgaaatggttttatctacagacatgtcaggtcacttccagcaaattaaaaatataagaaacagtttgcagcagcctgaagggattgacagagccaaaaccatgtccctgattctccacgcagcagacatcagccacccagccaaatcctggaagctgcattatcggtggaccatggccctaatggaggagtttttcctgcagggagataaagaagctgaattagggcttccattttccccactttgtgatcggaagtcaaccatggtggcccagtcacaaataggtttcatcgatttcatagtagagccaacattttctcttctgacagactcaacagagaaaattgttattcctcttatagaggaagcctcaaaagccgaaacttcttcctatgtggcaagcagctcaaccaccattgtggggttacacattgctgatgcactaagacgatcaaatacaaaaggctccatgagtgatgggtcctattccccagactactcccttgcagcagtggacctgaagagtttcaagaacaacctggtggacatcattcagcagaacaaagagaggtggaaagagttagctgcacaaggtagtgttgtttatgaggccttactgccatctctctctgtcttcacttctcctctaagagtttggattacttcttctagatttcttcttcta

SEQ ID NO: 3068 - DNA, 581 bp, Homo sapiens
cttgttctgttggtagagaggaattcagcttcttctggagcgcgaaagtcattcacgtttctcttgtgcataatagagctcgtaaactgtaggaattctgatgtgcttcagtgcacagaacagtaacagatgagctgcttttggggagagcttgagtactcagtcggtcagtagtacagtagcaggctcacatgtacggattgttcttgtgaggagcatcatcatggggtctagtgccacagagattgaagaattggaaaacaccacttttaagtatcttacaggagaacagactgaaaaaatgtggcagcgcctgaaaggaataaaagatgacagtctcagaagacaccagaaaaggatctacaatggttctccttaaaactcaattcccaggcttggggtrggcagacttatcaccctccagaaatgtccacgtcttaatcccctgaaccaaaggatatgttacttcatttgaaagggagaattaaaggagcagatggagttaaaattgctaatcagctgactttaaaatagggagmgtatcctgtattacccaggtgagcctaatgtaatcacaaaga

SEQ ID NO: 3069 - DNA, 1683 bp, Homo sapiens
tgttctacctacmctgtatctgatcactgcataagagatagtagaaatggcattatctttaaagtagtgatattttcaagccatgaagtttagtgacttgctgaaatgggctagggaatctaatttcaaatgggcaaaaagataaacaaactattttgctttaattttctagttcagtgttttaggggtaaatcaaaaccatccaaatgtcagatcagaaagaaagttaaaaatcatatagaaagacttctggatactgaagatgagctcagtgacattcagactgactcagtcccatctgaagtccgggactggttggcttctacctttacacggaaaatggggatgacaaaaaagaaacctgaggaaaaaccaaaatttcggagcattgtgcatgctgttcaagctggaatttttgtggaaagaatgtaccgaaaaacatatcatatggttggtttggcatatccagcagctgtcatcgtaacattaaaggatgttgataaatggtctttcgatgtatttgccctaaatgaagcaagtggagagcatagtctgaagtttatgatttatgaactgtttaccagatatgatcttatcaaccgtttcaagattcctgtttcttgcctaatcacctttgcagaagctttagaagttggttacagcaagtacaaaaatccatatcacaatttgattcatgcagctgatgtcactcaaactgtgcattacataatgcttcatacaggtatcatgcactggctcactgaactggaaattttagcaatggtctttgctgctgccattcatgattatgagcatacagggacaacaaacaactttcacattcagacaaggtcagatgttgccattttgtataatgatcgctctgtccttgagaatcaccacgtgagtgcagcttatcgacttatgcaagaagaagaaatgaatatcttgataaatttatccaaagatgactggagggatcttcggaacctagtgattgaaatggttttatctacagacatgtcaggtcacttccagcaaattaaaaatataagaaacagtttgcagcagcctgaagggattgacagagccaaaaccatgtccctgattctccacgcagcagacatcagccacccagccaaatcctggaagctgcattatcggtggaccatggccctaatggaggagtttttcctgcagggagataaagaagctgaattagggcttccattttccccactttgtgatcggaagtcaaccatggtggcccagtcacaaataggtttcatcgatttcatagtagagccaacattttctcttctgacagactcaacagagaaaattgttattcctcttatagaggaagcctcaaaagccgaaacttcttcctatgtggcaagcagctcaaccaccattgtggggttacacattgctgatgcactaagacgatcaaatacaaaaggctccatgagtgatgggtcctattccccagactactcccttgcagcagtggacctgaagagtttcaagaacaacctggtggacatcattcagcagaacaaagagaggtggaaagagttagctgcacaaggtagtgttgtttatgaggccttactgccatctctctctgtcttcacttctcctctaagagtttggattacttcttctagatttcttcttcta

SEQ ID NO: 3070 - DNA, 1948 bp, Homo sapiens
tgttctacctacmctgtatctgatcactgcataagagatagtagaaatggcattatctttaaagtagtgatattttcaagccatgaagtttagtgacttgctgaaatgggctagggaatctaatttcaaatgggcaaaaagataaacaaactattttgctttaattttctagttcagtgttttaggggtaaatcaaaaccatccaaatgtcagatcagaaagaaagttaaaaatcatatagaaagacttctggatactgaagatgagctcagtgacattcagactgactcagtcccatctgaagtccgggactggttggcttctacctttacacggaaaatggggatgacaaaaaagaaacctgaggaaaaaccaaaatttcggagcattgtgcatgctgttcaagctggaatttttgtggaaagaatgtaccgaaaaacatatcatatggttggtttggcatatccagcagctgtcatcgtaacattaaaggatgttgataaatggtctttcgatgtatttgccctaaatgaagcaagtggagagcatagtctgaagtttatgatttatgaactgtttaccagatatgatcttatcaaccgtttcaagattcctgtttcttgcctaatcacctttgcagaagctttagaagttggttacagcaagtacaaaaatccatatcacaatttgattcatgcagctgatgtcactcaaactgtgcattacataatgcttcatacaggtatcatgcactggctcactgaactggaaattttagcaatggtctttgctgctgccattcatgattatgagcatacagggacaacaaacaactttcacattcagacaaggtcagatgttgccattttgtataatgatcgctctgtccttgagaatcaccacgtgagtgcagcttatcgacttatgcaagaagaagaaatgaatatcttgataaatttatccaaagatgactggagggatcttcggaacctagtgattgaaatggttttatctacagacatgtcaggtcacttccagcaaattaaaaatataagaaacagtttgcagcagcctgaagggattgacagagccaaaaccatgtccctgattctccacgcagcagacatcagccacccagccaaatcctggaagctgcattatcggtggaccatggccctaatggaggagtttttcctgcagggagataaagaagctgaattagggcttccattttccccactttgtgatcggaagtcaaccatggtggcccagtcacaaataggtttcatcgatttcatagtagagccaacattttctcttctgacagactcaacagagaaaattgttattcctcttatagaggaagcctcaaaagccgaaacttcttcctatgtggcaagcagctcaaccaccattgtggggttacacattgctgatgcactaagacgatcaaatacaaaaggctccatgagtgatgggtcctattccccagactactcccttgcagcagtggacctgaagagtttcaagaacaacctggtggacatcattcagcagaacaaagagaggtggaaagagttagctgcacaagaagcaagaaccagttcacagaagtgtgagtttattcatcagtaaacacctttaagtaaaacctygtgcatggtggcagctctaatttgaccaaaagacttggagattttgattatgcttgctggaaatctaccctgtcctgtgtgagacaggaaatctatttttgcagattgctcaataagcatcatgagccacataaataacagctgtaaactccttaattcaccgggctcaactgctaccgaacagattcatctagtggctacatcagcaccttgtgctttcagatatctgtttcaatggcattttgtggcatttgtctttaccgagtgccaataaattttctttgagcagctaa

SEQ ID NO: 3071 - DNA, 636 bp, Homo sapiens
tcagatgaaagcagacaaatcaccctcacccaccagcaagtcatatcaagagatccacctgatggcgagagaaagctgaattttagtttggtgcttgaacagatggaccaccaagaatgccttgctcttggggtacatccatccagtgagtggtctcttggaatggatataagcaaaatggctttaactttgctaccttctcctttgtctaggagcatcatcatggggtctagtgccacagagattgaagaattggaaaacaccacttttaagtatcttacaggagaacagactgaaaaaatgtggcagcgcctgaaaggaatatatgtggttcagatatgcagaaaggtaactaagaaagccatttgccgggatactgccacaaataaaatttccctcaggaaaaggctaaagccaagasactgtgactggagctgcctttgtcagcaaggagaaagaagatccaatgggcttgtactaatgtcaggggcacgtgtccctctgccggccacgtgcaccttagaaagaagtcagcctggaccaattcaagagatcctgcctaagatgactgcctggaagtgccgagcacccccgacagagtggaccactgaagctagggatgagaaagggagtcct

SEQ ID NO: 3072 - DNA, 4095 bp, Homo sapiens
cccctgtcgcgggccgggccgcggcgccgagcgcgagggccgggctcccggggctggcggccatgggcaggagccggaggcggcagcggcagcggcgggccccgcgggcggggaggcgcgcggcccacggcccctgacggcccctggcggcccggcgcgcccccgcgctccctggggggccgtagcctggcaacgcccggcgcgcccgcccatcccccgctgccctttttctcctggccgggtagggccgccggcgctgcggcgggggcgcggccctccgcggggaggagcgggccagtggggaggcccggagcggcgggcgtgggagagcgggagggctcgaggaggacaaggtgaacgggaaggagctctccaagctgtctcaggagcaaactctgcaggccctgcgctcctccaaggagcccctggtgatccaggtgctgagacgcagcccccgcctccggggggacagctcctgtcacgacctgcagctggtggacagtggcactcagaccgacatcaccttcgagcatatcatggcgctgggcaagctgcgtccgcccaccccgcccatggtcatcctggagccgtacgtcctctctgagctggccgagggaggaccctcctgtccgggacgtcgctgccggaagtgccagggttgagggcctcagctcctcctcctccatcctctctcctctgccgcctcacaagcatcactccttgaatcttcttgcatcccttgtctgtctcattcctctacctgctctgaatttcctccatctcttcagcttctttctttggcccgaccggaagaagggcctttcatccaggcctggtggctcatgaccgcgtgagcgctgcctcattctgctaatcttagccygggctgcggggagccccccaatcagccatgagtattatgacccggcggagtttatggagggcggcccgcaggaggcagaccgcttggatgagctggagtatgaggaggtggagctgtataaaagcagccaccgggacaagctgggcctgatggtttgctaccgcacggacgacgaggaggacctgggcatttatgtcggagaggtaaatcccaacagcattgcagccaaagacggccggatccgtgagggagaccgcatcatccagattaacggtgtagacgtccagaaccgggaagaggcggtggccatcctgagccaggaagagaayaccaacatctccctgctggtggcccgacctgagagtcagctggcgaaaaggtggaaggacagcgaccgggatgacttcctggatgactttggctctgagaatgagggggagctgcgtgctcgtaaactgaaatcaccccctgcccagcagcccggaaacgaagaggagaagggggctcccgatgccggcccaggcctgagcaacagccaggagctggacagcggggtgggccggactgacgagagcacccggaacgaagagagctctgagcacgacctgctgggggacgaacccccgagctccaccaacaccccgggaagcctgcgcaagtttggcctgcaaggggacgccctgcagagccgggacttccatttcagcatggactctctgctggccgagggggcggggctgggagggggcgacgtcccgggcctcacggatgaggagtatgagcgctaccgtgagctcctggagatcaagtgccacctggagaacggcaaccagctgggcctcctctttccccgggcctccggaggcaacagcgccctggacgtcaaccgcaacgagagcctgggccacgagatggccatgctggaggaggagctaaggcacctggaattcaagtgccgcaacatactgcgggcgcagaagatgcagcagctgcgtgagcgctgcatgaaggcctggctgctggaggaggagagcctctacgacctggcggccagcgagcccaagaagcacgagctgtccgacatctccgagctgcccgagaagtcggacaaggacagcaccagcgcctacaacactggggagagctgccgcagcaccccgctgcttgtggagcccctgcccgagagccccctgcggcgggccatggccggcaactccaacttgaaccggacccctcccggccccgctgttgccacccccgccaaggcagctcctccaccggggagccccgccaagttccggtccctctcccgggatcctgaggccggccggaggcagcacgcggaggagcgcggccgccgcaaccccaagacggggttgaccctggagcgtgtgggccctgaaagcagcccttacctctcgcggcgccaccgcggccagggccaggagggcgagcactaccacagctgcgtgcagctggccccgacgcgaggcctggaggagctgggccacggccccctgagcttggccggtggccctcgggtgggcggggtggcggccgcggccactgaagcaccgcgcatggagtggaaagtgaaggtgcgcagcgacggaacccgctacgtggccaagcggcccgtgcgagatcggctgctgaaagcccgtgccctgaagatccgggaggagcgcagcggtatgacgaccgacgacgacgcggtgagcgagatgaagatgggccgctactggagcaaggaggagcggaagcagcacctgatccgggcccgtgagcagcggaagcggcgcgagttcatgatgcagagccggctggagtgcctgcgggagcagcagaatggcgacagcaagcccgagctcaacatcattgccctgagccaccgcaaaaccatgaagaagcggaacaagaagatcctggacaactggatcaccatccaggagatgctggcccacggcgcgcgctccgccgatggcaagcgggtctacaaccctcttctctcagtcaccaccgtgtgagctgcccgggcgggtacacggcccaggcccagggaaccccctggggccccggccctcactctcctatagagattgtgtgtgtgtgtgtgtgcgcgcgcgcgtgctckctgtgcgcacgcacacatctcgtctgggtgtgcgcacagggctttgttagcagagagaagcccctgaggagaagggacgcttttcttccttctgcccaagtaaagtgaccatgccagtggccagcactgggggcacacctgtgatgggcaccccttcagctgtgcgtgtgcattccccatcccccatgctcttgcgtgtgcttgcacgtgcacgcacacacacacccagtgctctctccacccgacccgtgtacttgcagacagggaagctgagctgaaaggagcacaagagagtgtccggcttcgctgctgagcgcggcctctccccgccgctgcgcactgcagttatttgtagacaaaggcacccctgatttttgtggtttttctccctttctgtgcttgccaatagttgttttgttttgtggacctgccctgggggctggcagctccttcaggcagcctggcagaagtggaactcccctctccactgatggctgggaagggagttggggaggaagagtgggagggagggctggggatggatgggagggaaggggagggaaaggtgggaggaatgggaagcagctgttctggtggcttccactctgaggtgtgggaacggggagcctctggggggcacctgtttccccagtgactcagagagagcaagactgcaggaacggaggggtcctgcagggtgtccaccaagaagtcacagagcccgttctgcgccccacaccatctggagcaggggcttctcttctgagtgaactgaggaaggtgcttagatggtgagggctctagaaaccaagccccatgagcagcagtggaagacctcgggccatgcggcctggggaggacttggtggcgatccgcaacctggaccccagtgagaggcggtgggctgactgggaaggagaggcccccaacctcctcaggatttgcacgtgtgaactasgctgcctgtggggtgccccttaggcttggagagccccagattggaggcagacagactgcaccaccccttccccccctgcatctcaagaataaagcaagctgcctttgtacttggttgaat

SEQ ID NO: 3073 - DNA, 3707 bp, Homo sapiens
cgggatggaggttgcatagcaacgagcgcagttccccgcacacgctctccccgcaggacccagggcgggggagggagccaggctcccgccgtgcggggggcgccgaatctagatcccggcgggcctggagcgtgggagtgcgtgggcgtccccgggcgcggtccaagtccgtccgggggctgggtgcccaccccgacacccactcccgcctggccctgcccgaacgatgggctcccgggccttaggcgtctcgggtgaacgggaaggagctctccaagctgtctcaggagcaaactctgcaggccctgcgctcctccaaggagcccctggtgatccaggtgctgagacgcagcccccgcctccggggggacagctcctgtcacgacctgcagctggtggacagtggcactcagaccgacatcaccttcgagcatatcatggcgctgggcaagctgcgtccgcccaccccgcccatggtcatcctggagccgtacgtcctctctgagctccccccaatcagccatgagtattatgacccggcggagtttatggagggcggcccgcaggaggcagaccgcttggatgagctggagtatgaggaggtggagctgtataaaagcagccaccgggacaagctgggcctgatggtttgctaccgcacggacgacgaggaggacctgggcatttatgtcggagaggtaaatcccaacagcattgcagccaaagacggccggatccgtgagggagaccgcatcatccagattaacggtgtagacgtccagaaccgggaagaggcggtggccatcctgagccaggaagagaayaccaacatctccctgctggtggcccgacctgagagtcagctggcgaaaaggtggaaggacagcgaccgggatgacttcctggatgactttggctctgagaatgagggggagctgcgtgctcgtaaactgaaatcaccccctgcccagcagcccggaaacgaagaggagaagggggctcccgatgccggcccaggcctgagcaacagccaggagctggacagcggggtgggccggactgacgagagcacccggaacgaagagagctctgagcacgacctgctgggggacgaacccccgagctccaccaacaccccgggaagcctgcgcaagtttggcctgcaaggggacgccctgcagagccgggacttccatttcagcatggactctctgctggccgagggggcggggctgggagggggcgacgtcccgggcctcacggatgaggagtatgagcgctaccgtgagctcctggagatcaagtgccacctggagaacggcaaccagctgggcctcctctttccccgggcctccggaggcaacagcgccctggacgtcaaccgcaacgagagcctgggccacgagatggccatgctggaggaggagctaaggcacctggaattcaagtgccgcaacatactgcgggcgcagaagatgcagcagctgcgtgagcgctgcatgaaggcctggctgctggaggaggagagcctctacgacctggcggccagcgagcccaagaagcacgagctgtccgacatctccgagctgcccgagaagtcggacaaggacagcaccagcgcctacaacactggggagagctgccgcagcaccccgctgcttgtggagcccctgcccgagagccccctgcggcgggccatggccggcaactccaacttgaaccggacccctcccggccccgctgttgccacccccgccaaggcagctcctccaccggggagccccgccaagttccggtccctctcccgggatcctgaggccggccggaggcagcacgcggaggagcgcggccgccgcaaccccaagacggggttgaccctggagcgtgtgggccctgaaagcagcccttacctctcgcggcgccaccgcggccagggccaggagggcgagcactaccacagctgcgtgcagctggccccgacgcgaggcctggaggagctgggccacggccccctgagcttggccggtggccctcgggtgggcggggtggcggccgcggccactgaagcaccgcgcatggagtggaaagtgaaggtgcgcagcgacggaacccgctacgtggccaagcggcccgtgcgagatcggctgctgaaagcccgtgccctgaagatccgggaggagcgcagcggtatgacgaccgacgacgacgcggtgagcgagatgaagatgggccgctactggagcaaggaggagcggaagcagcacctgatccgggcccgtgagcagcggaagcggcgcgagttcatgatgcagagccggctggagtgcctgcgggagcagcagaatggcgacagcaagcccgagctcaacatcattgccctgagccaccgcaaaaccatgaagaagcggaacaagaagatcctggacaactggatcaccatccaggagatgctggcccacggcgcgcgctccgccgatggcaagcgggtctacaaccctcttctctcagtcaccaccgtgtgagctgcccgggcgggtacacggcccaggcccagggaaccccctggggccccggccctcactctcctatagagattgtgtgtgtgtgtgtgtgcgcgcgcgcgtgctckctgtgcgcacgcacacatctcgtctgggtgtgcgcacagggctttgttagcagagagaagcccctgaggagaagggacgcttttcttccttctgcccaagtaaagtgaccatgccagtggccagcactgggggcacacctgtgatgggcaccccttcagctgtgcgtgtgcattccccatcccccatgctcttgcgtgtgcttgcacgtgcacgcacacacacacccagtgctctctccacccgacccgtgtacttgcagacagggaagctgagctgaaaggagcacaagagagtgtccggcttcgctgctgagcgcggcctctccccgccgctgcgcactgcagttatttgtagacaaaggcacccctgatttttgtggtttttctccctttctgtgcttgccaatagttgttttgttttgtggacctgccctgggggctggcagctccttcaggcagcctggcagaagtggaactcccctctccactgatggctgggaagggagttggggaggaagagtgggagggagggctggggatggatgggagggaaggggagggaaaggtgggaggaatgggaagcagctgttctggtggcttccactctgaggtgtgggaacggggagcctctggggggcacctgtttccccagtgactcagagagagcaagactgcaggaacggaggggtcctgcagggtgtccaccaagaagtcacagagcccgttctgcgccccacaccatctggagcaggggcttctcttctgagtgaactgaggaaggtgcttagatggtgagggctctagaaaccaagccccatgagcagcagtggaagacctcgggccatgcggcctggggaggacttggtggcgatccgcaacctggaccccagtgagaggcggtgggctgactgggaaggagaggcccccaacctcctcaggatttgcacgtgtgaactasgctgcctgtggggtgccccttaggcttggagagccccagattggaggcagacagactgcaccaccccttccccccctgcatctcaagaataaagcaagctgcctttgtacttggttgaat

SEQ ID NO: 3074 - DNA, 3821 bp, Homo sapiens
ctttgcggggcgtggaccagcagggccccgcggggagggaaggagacgcggggcccggagctcggacctggagcccagccccgcggcccggaacggggcttcttgcctgtgcgtggcgtgactacgtgaacgggaaggagctctccaagctgtctcaggagcaaactctgcaggccctgcgctcctccaaggagcccctggtgatccaggtgctgagacgcagcccccgcctccggggggacagctcctgtcacgacctgcagctggtggacagtggcactcagaccgacatcaccttcgagcatatcatggcgctgggcaagctgcgtccgcccaccccgcccatggtcatcctggagccgtacgtcctctctgagctggccgagggaggaccctcctgtccgggacgtcgctgccggaagtgccagggttgagggcctcagctcctcctcctccatcctctctcctctgccgcctcacaagcatcactccttgaatcttcttgcatcccttgtctgtctcattcctctacctgctctgaatttcctccatctcttcagcttctttctttggcccgaccggaagaagggcctttcatccaggcctggtggctcatgaccgcccccccaatcagccatgagtattatgacccggcggagtttatggagggcggcccgcaggaggcagaccgcttggatgagctggagtatgaggaggtggagctgtataaaagcagccaccgggacaagctgggcctgatggtttgctaccgcacggacgacgaggaggacctgggcatttatgtcggagaggtaaatcccaacagcattgcagccaaagacggccggatccgtgagggagaccgcatcatccagattaacggtgtagacgtccagaaccgggaagaggcggtggccatcctgagccaggaagagaayaccaacatctccctgctggtggcccgacctgagagtcagctggcgaaaaggtggaaggacagcgaccgggatgacttcctggatgactttggctctgagaatgagggggagctgcgtgctcgtaaactgaaatcaccccctgcccagcagcccggaaacgaagaggagaagggggctcccgatgccggcccaggcctgagcaacagccaggagctggacagcggggtgggccggactgacgagagcacccggaacgaagagagctctgagcacgacctgctgggggacgaacccccgagctccaccaacaccccgggaagcctgcgcaagtttggcctgcaaggggacgccctgcagagccgggacttccatttcagcatggactctctgctggccgagggggcggggctgggagggggcgacgtcccgggcctcacggatgaggagtatgagcgctaccgtgagctcctggagatcaagtgccacctggagaacggcaaccagctgggcctcctctttccccgggcctccggaggcaacagcgccctggacgtcaaccgcaacgagagcctgggccacgagatggccatgctggaggaggagctaaggcacctggaattcaagtgccgcaacatactgcgggcgcagaagatgcagcagctgcgtgagcgctgcatgaaggcctggctgctggaggaggagagcctctacgacctggcggccagcgagcccaagaagcacgagctgtccgacatctccgagctgcccgagaagtcggacaaggacagcaccagcgcctacaacactggggagagctgccgcagcaccccgctgcttgtggagcccctgcccgagagccccctgcggcgggccatggccggcaactccaacttgaaccggacccctcccggccccgctgttgccacccccgccaaggcagctcctccaccggggagccccgccaagttccggtccctctcccgggatcctgaggccggccggaggcagcacgcggaggagcgcggccgccgcaaccccaagacggggttgaccctggagcgtgtgggccctgaaagcagcccttacctctcgcggcgccaccgcggccagggccaggagggcgagcactaccacagctgcgtgcagctggccccgacgcgaggcctggaggagctgggccacggccccctgagcttggccggtggccctcgggtgggcggggtggcggccgcggccactgaagcaccgcgcatggagtggaaagtgaaggtgcgcagcgacggaacccgctacgtggccaagcggcccgtgcgagatcggctgctgaaagcccgtgccctgaagatccgggaggagcgcagcggtatgacgaccgacgacgacgcggtgagcgagatgaagatgggccgctactggagcaaggaggagcggaagcagcacctgatccgggcccgtgagcagcggaagcggcgcgagttcatgatgcagagccggctggagtgcctgcgggagcagcagaatggcgacagcaagcccgagctcaacatcattgccctgagccaccgcaaaaccatgaagaagcggaacaagaagatcctggacaactggatcaccatccaggagatgctggcccacggcgcgcgctccgccgatggcaagcgggtctacaaccctcttctctcagtcaccaccgtgtgagctgcccgggcgggtacacggcccaggcccagggaaccccctggggccccggccctcactctcctatagagattgtgtgtgtgtgtgtgtgcgcgcgcgcgtgctckctgtgcgcacgcacacatctcgtctgggtgtgcgcacagggctttgttagcagagagaagcccctgaggagaagggacgcttttcttccttctgcccaagtaaagtgaccatgccagtggccagcactgggggcacacctgtgatgggcaccccttcagctgtgcgtgtgcattccccatcccccatgctcttgcgtgtgcttgcacgtgcacgcacacacacacccagtgctctctccacccgacccgtgtacttgcagacagggaagctgagctgaaaggagcacaagagagtgtccggcttcgctgctgagcgcggcctctccccgccgctgcgcactgcagttatttgtagacaaaggcacccctgatttttgtggtttttctccctttctgtgcttgccaatagttgttttgttttgtggacctgccctgggggctggcagctccttcaggcagcctggcagaagtggaactcccctctccactgatggctgggaagggagttggggaggaagagtgggagggagggctggggatggatgggagggaaggggagggaaaggtgggaggaatgggaagcagctgttctggtggcttccactctgaggtgtgggaacggggagcctctggggggcacctgtttccccagtgactcagagagagcaagactgcaggaacggaggggtcctgcagggtgtccaccaagaagtcacagagcccgttctgcgccccacaccatctggagcaggggcttctcttctgagtgaactgaggaaggtgcttagatggtgagggctctagaaaccaagccccatgagcagcagtggaagacctcgggccatgcggcctggggaggacttggtggcgatccgcaacctggaccccagtgagaggcggtgggctgactgggaaggagaggcccccaacctcctcaggatttgcacgtgtgaactasgctgcctgtggggtgccccttaggcttggagagccccagattggaggcagacagactgcaccaccccttccccccctgcatctcaagaataaagcaagctgcctttgtacttggttgaat

SEQ ID NO: 3075 - DNA, 2948 bp, Homo sapiens
ggggccgccgccgcgccgctgcccccctgtcgcgggccgggccgcggcgccgagcgcgagggccgggctcccggggctggcggccatgggcaggagccggaggcggcagcggcagcggcgggccccgcgggcggggaggcgcgcggcccacggcccctgacggcccctggcggcccggcgcgcccccgcgctccctggggggccgtagcctggcaacgcccggcgcgcccgcccatcccccgctgccctttttctcctggccgggtgcgagggagcatgcccgcgcctggcctcggccagcgaagagttaacctgaggggcgagccgctgcccccacctcgggggcgtgcccccctcccccgctaggcggcccgccccccgcgccagggtatggcccctggccccggcccgggacccgaggtcccgcgcccgggtcagtgaaaggcgtcttcccgttcccgccctccgcctcctctcgccggccagcaacatgggatgtaatatgtgcgtggtccagaaaccggaggagcagtacaaagtgatgctgcaggtgaacgggaaggagctctccaagctgtctcaggagcaaactctgcaggccctgcgctcctccaaggagcccctggtgatccaggtgctgagacgcagcccccgcctccggggggacagctcctgtcacgacctgcagctggtggacagtggcactcagaccgacatcaccttcgagcatatcatggcgctgggcaagctgcgtccgcccaccccgcccatggtcatcctggagccgtacgtcctctctgagctggccgagggaggaccctcctgtccgggacgtcgctgccggaagtgccagggttgagggcctcagctcctcctcctccatcctctctcctctgccgcctcacaagcatcactccttgaatcttcttgcatcccttgtctgtctcattcctctacctgctctgaatttcctccatctcttcagcttctttctttggcccgaccggaagaagggcctttcatccaggcctggtggctcatgaccgcccccccaatcagccatgagtattatgacccggcggagtttatggagggcggcccgcaggaggcagaccgcttggatgagctggagtatgaggaggtggagctgtataaaagcagccaccgggacaagctgggcctgatggtttgctaccgcacggacgacgaggaggacctgggcatttatgtcggagaggtaaatcccaacagcattgcagccaaagacggccggatccgtgagggagaccgcatcatccagattaacggtgtagacgtccagaaccgggaagaggcggtggccatcctgagccaggaagagaayaccaacatctccctgctggtggcccgacctgagagtcagctggcgaaaaggtggaaggacagcgaccgggatgacttcctggatgactttggctctgagaatgagggggagctgcgtgctcgtaaactgaaatcaccccctgcccagcaggttctaggcgcccacgaggtcccctcgaggaacatcttttcagtaacctccgtccgctaagtatggcgggcggcacacggtgaccatgatcccaggggatggcatcgggccagagctcatgctgcatgtcaagtccgtcttcaggcacgcatgtgtaccagtggactttgaagaggtgcacgtgagttccaatgctgatgaagaggacattcgcaatgccatcatggccatccgccggaaccgcgtggccctgaagggcaacatcgaaaccaaccataacctgccaccgtcgcacaaatctcgaaacaacatccttcgcaccagcctggacctctatgccaacgtcatccactgtaagagccttccaggcgtggtgacccggcacaaggacatagacatcctcattgtccgggagaacacagagggcgagtacagcagcctggagcatgagagtgtggcgggagtggtggagagcctgaagatcatcaccaaggccaagtccctgcgcattgccgagtatgccttcaagctggcgcaggagagcgggcgcaagaaagtgacggccgtgcacaaggccaacatcatgaaactgggcgatgggcttttcctccagtgctgcagggaggtggcagcccgctaccctcagatcaccttcgagaacatgattgtggataacaccaccatgcagctggtgtcccggccccagcagtttgatgtcatggtgatgcccaatctctatggcaacatcgtcaacaatgtctgcgcgggactggtcgggggcccaggccttgtggctggggccaactatggccatgtgtacgcggtgtttgaaacagctacgaggaacaccggcaagagtatcgccaataagaacatcgccaaccccacggccaccctgctggccagctgcatgatgctggaccacctcaagctgcactcctatgccacctccatccgtaaggctgtcctggcatccatggacaatgagaatgtgaggttcccctcgcaccctaccctgctgccccgcccagtctccccctgcagcctcctgtagcccgcctcatgcactgaccacagcccccaggggaggatggtactggatctggccccatcttctggcccttagctggtgccacttccctcctgtggcaatcccagtcctgcacgtcacaggagacagcggggggtggcagggcctggtgtgtgccgagcctgcctgtgtcctacagatgcacactccggacatcgggggccagggcacaacatctgaagccatccaggacgtcatccgccacatccgcgtcatcaacggccgggccgtggaggcctaggctggccctaggaccttcttggtttgctccttggattccccttcccactccagcaccccagccagcctggtacgcagatcccagaataaagcaccttctcccta

SEQ ID NO: 3076 - DNA, 4003 bp, Homo sapiens
ggggccgccgccgcgccgctgcccccctgtcgcgggccgggccgcggcgccgagcgcgagggccgggctcccggggctggcggccatgggcaggagccggaggcggcagcggcagcggcgggccccgcgggcggggaggcgcgcggcccacggcccctgacggcccctggcggcccggcgcgcccccgcgctccctggggggccgtagcctggcaacgcccggcgcgcccgcccatcccccgctgccctttttctcctggccgggtgcgagggagcatgcccgcgcctggcctcggccagcgaagagttaacctgaggggcgagccgctgcccccacctcgggggcgtgcccccctcccccgctaggcggcccgccccccgcgccagggtatggcccctggccccggcccgggacccgaggtcccgcgcccgggtcagtgaaaggcgtcttcccgttcccgccctccgcctcctctcgccggccagcaacatgggatgtaatatgtgcgtggtccagaaaccggaggagcagtacaaagtgatgctgcaggtgaacgggaaggagctctccaagctgtctcaggagcaaactctgcaggccctgcgctcctccaaggagcccctggtgatccaggtgctgagacgcagcccccgcctccggggggacagctcctgtcacgacctgcagctggtggacagtggcactcagaccgacatcaccttcgagcatatcatggcgctgggcaagctgcgtccgcccaccccgcccatggtcatcctggagccgtacgtcctctctgagctccccccaatcagccatgagtattatgacccggcggagtttatggagggcggcccgcaggaggcagaccgcttggatgagctggagtatgaggaggtggagctgtataaaagcagccaccgggacaagctgggcctgatggtttgctaccgcacggacgacgaggaggacctgggcatttatgtcggagaggtaaatcccaacagcattgcagccaaagacggccggatccgtgagggagaccgcatcatccagattaacggtgtagacgtccagaaccgggaagaggcggtggccatcctgagccaggaagagaayaccaacatctccctgctggtggcccgacctgagagtcagctggcgaaaaggtggaaggacagcgaccgggatgacttcctggatgactttggctctgagaatgagggggagctgcgtgctcgtaaactgaaatcaccccctgcccagcagcccggaaacgaagaggagaagggggctcccgatgccggcccaggcctgagcaacagccaggagctggacagcggggtgggccggactgacgagagcacccggaacgaagagagctctgagcacgacctgctgggggacgaacccccgagctccaccaacaccccgggaagcctgcgcaagtttggcctgcaaggggacgccctgcagagccgggacttccatttcagcatggactctctgctggccgagggggcggggctgggagggggcgacgtcccgggcctcacggatgaggagtatgagcgctaccgtgagctcctggagatcaagtgccacctggagaacggcaaccagctgggcctcctctttccccgggcctccggaggcaacagcgccctggacgtcaaccgcaacgagagcctgggccacgagatggccatgctggaggaggagctaaggcacctggaattcaagtgccgcaacatactgcgggcgcagaagatgcagcagctgcgtgagcgctgcatgaaggcctggctgctggaggaggagagcctctacgacctggcggccagcgagcccaagaagcacgagctgtccgacatctccgagctgcccgagaagtcggacaaggacagcaccagcgcctacaacactggggagagctgccgcagcaccccgctgcttgtggagcccctgcccgagagccccctgcggcgggccatggccggcaactccaacttgaaccggacccctcccggccccgctgttgccacccccgccaaggcagctcctccaccggggagccccgccaagttccggtccctctcccgggatcctgaggccggccggaggcagcacgcggaggagcgcggccgccgcaaccccaagacggggttgaccctggagcgtgtgggccctgaaagcagcccttacctctcgcggcgccaccgcggccagggccaggagggcgagcactaccacagctgcgtgcagctggccccgacgcgaggcctggaggagctgggccacggccccctgagcttggccggtggccctcgggtgggcggggtggcggccgcggccactgaagcaccgcgcatggagtggaaagtgaaggtgcgcagcgacggaacccgctacgtggccaagcggcccgtgcgagatcggctgctgaaagcccgtgccctgaagatccgggaggagcgcagcggtatgacgaccgacgacgacgcggtgagcgagatgaagatgggccgctactggagcaaggaggagcggaagcagcacctgatccgggcccgtgagcagcggaagcggcgcgagttcatgatgcagagccggctggagtgcctgcgggagcagcagaatggcgacagcaagcccgagctcaacatcattgccctgagccaccgcaaaaccatgaagaagcggaacaagaagatcctggacaactggatcaccatccaggagatgctggcccacggcgcgcgctccgccgatggcaagcgggtctacaaccctcttctctcagtcaccaccgtgtgagctgcccgggcgggtacacggcccaggcccagggaaccccctggggccccggccctcactctcctatagagattgtgtgtgtgtgtgtgtgcgcgcgcgcgtgctckctgtgcgcacgcacacatctcgtctgggtgtgcgcacagggctttgttagcagagagaagcccctgaggagaagggacgcttttcttccttctgcccaagtaaagtgaccatgccagtggccagcactgggggcacacctgtgatgggcaccccttcagctgtgcgtgtgcattccccatcccccatgctcttgcgtgtgcttgcacgtgcacgcacacacacacccagtgctctctccacccgacccgtgtacttgcagacagggaagctgagctgaaaggagcacaagagagtgtccggcttcgctgctgagcgcggcctctccccgccgctgcgcactgcagttatttgtagacaaaggcacccctgatttttgtggtttttctccctttctgtgcttgccaatagttgttttgttttgtggacctgccctgggggctggcagctccttcaggcagcctggcagaagtggaactcccctctccactgatggctgggaagggagttggggaggaagagtgggagggagggctggggatggatgggagggaaggggagggaaaggtgggaggaatgggaagcagctgttctggtggcttccactctgaggtgtgggaacggggagcctctggggggcacctgtttccccagtgactcagagagagcaagactgcaggaacggaggggtcctgcagggtgtccaccaagaagtcacagagcccgttctgcgccccacaccatctggagcaggggcttctcttctgagtgaactgaggaaggtgcttagatggtgagggctctagaaaccaagccccatgagcagcagtggaagacctcgggccatgcggcctggggaggacttggtggcgatccgcaacctggaccccagtgagaggcggtgggctgactgggaaggagaggcccccaacctcctcaggatttgcacgtgtgaactasgctgcctgtggggtgccccttaggcttggagagccccagattggaggcagacagactgcaccaccccttccccccctgcatctcaagaataaagcaagctgcctttgtacttggttgaat

SEQ ID NO: 3077 - DNA, 2451 bp, Homo sapiens
ggggccgccgccgcgccgctgcccccctgtcgcgggccgggccgcggcgccgagcgcgagggccgggctcccggggctggcggccatgggcaggagccggaggcggcagcggcagcggcgggccccgcgggcggggaggcgcgcggcccacggcccctgacggcccctggcggcccggcgcgcccccgcgctccctggggggccgtagcctggcaacgcccggcgcgcccgcccatcccccgctgccctttttctcctggccgggtgcgagggagcatgcccgcgcctggcctcggccagcgaagagttaacctgaggggcgagccgctgcccccacctcgggggcgtgcccccctcccccgctaggcggcccgccccccgcgccagggtatggcccctggccccggcccgggacccgaggtcccgcgcccgggtcagtgaaaggcgtcttcccgttcccgccctccgcctcctctcgccggccagcaacatgggatgtaatatgtgcgtggtccagaaaccggaggagcagtacaaagtgatgctgcaggtgaacgggaaggagctctccaagctgtctcaggagcaaactctgcaggccctgcgctcctccaaggagcccctggtgatccaggtgctgagacgcagcccccgcctccggggggacagctcctgtcacgacctgcagctggtggacagtggcactcagaccgacatcaccttcgagcatatcatggcgctgggcaagctgcgtccgcccaccccgcccatggtcatcctggagccccccccaatcagccatgagtattatgacccggcggagtttatggagggcggcccgcaggaggcagaccgcttggatgagctggagtatgaggaggtggagctgtataaaagcagccaccgggacaagctgggcctgatggtttgctaccgcacggacgacgaggaggacctgggcatttatgtcggagaggtaaatcccaacagcattgcagccaaagacggccggatccgtgagggagaccgcatcatccagattaacggtgtagacgtccagaaccgggaagaggcggtggccatcctgagccaggaagagaayaccaacatctccctgctggtggcccgacctgagagtcagctggcgaaaaggtggaaggacagcgaccgggatgacttcctggatgactttggctctgagaatgagggggagctgcgtgctcgtaaactgaaatcaccccctgcccagcaggttctaggcgcccacgaggtcccctcgaggaacatcttttcagtaacctccgtccgctaagtatggcgggcggcacacggtgaccatgatcccaggggatggcatcgggccagagctcatgctgcatgtcaagtccgtcttcaggcacgcatgtgtaccagtggactttgaagaggtgcacgtgagttccaatgctgatgaagaggacattcgcaatgccatcatggccatccgccggaaccgcgtggccctgaagggcaacatcgaaaccaaccataacctgccaccgtcgcacaaatctcgaaacaacatccttcgcaccagcctggacctctatgccaacgtcatccactgtaagagccttccaggcgtggtgacccggcacaaggacatagacatcctcattgtccgggagaacacagagggcgagtacagcagcctggagcatgagagtgtggcgggagtggtggagagcctgaagatcatcaccaaggccaagtccctgcgcattgccgagtatgccttcaagctggcgcaggagagcgggcgcaagaaagtgacggccgtgcacaaggccaacatcatgaaactgggcgatgggcttttcctccagtgctgcagggaggtggcagcccgctaccctcagatcaccttcgagaacatgattgtggataacaccaccatgcagctggtgtcccggccccagcagtttgatgtcatggtgatgcccaatctctatggcaacatcgtcaacaatgtctgcgcgggactggtcgggggcccaggccttgtggctggggccaactatggccatgtgtacgcggtgtttgaaacagctacgaggaacaccggcaagagtatcgccaataagaacatcgccaaccccacggccaccctgctggccagctgcatgatgctggaccacctcaagctgcactcctatgccacctccatccgtaaggctgtcctggcatccatggacaatgagaatatgcacactccggacatcgggggccagggcacaacatctgaagccatccaggacgtcatccgccacatccgcgtcatcaacggccgggccgtggaggcctaggctggccctaggaccttcttggtttgctccttggattccccttcccactccagcaccccagccagcctggtacgcagatcccagaataaagcaccttctccctaga

SEQ ID NO: 3078 - DNA, 2483 bp, Homo sapiens
ggggccgccgccgcgccgctgcccccctgtcgcgggccgggccgcggcgccgagcgcgagggccgggctcccggggctggcggccatgggcaggagccggaggcggcagcggcagcggcgggccccgcgggcggggaggcgcgcggcccacggcccctgacggcccctggcggcccggcgcgcccccgcgctccctggggggccgtagcctggcaacgcccggcgcgcccgcccatcccccgctgccctttttctcctggccgggtgcgagggagcatgcccgcgcctggcctcggccagcgaagagttaacctgaggggcgagccgctgcccccacctcgggggcgtgcccccctcccccgctaggcggcccgccccccgcgccagggtatggcccctggccccggcccgggacccgaggtcccgcgcccgggtcagtgaaaggcgtcttcccgttcccgccctccgcctcctctcgccggccagcaacatgggatgtaatatgtgcgtggtccagaaaccggaggagcagtacaaagtgatgctgcaggtgaacgggaaggagctctccaagctgtctcaggagcaaactctgcaggccctgcgctcctccaaggagcccctggtgatccaggtgctgagacgcagcccccgcctccggggggacagctcctgtcacgacctgcagctggtggacagtggcactcagaccgacatcaccttcgagcatatcatggcgctgggcaagctgcgtccgcccaccccgcccatggtcatcctggagccccccccaatcagccatgagtattatgacccggcggagtttatggagggcggcccgcaggaggcagaccgcttggatgagctggagtatgaggaggtggagctgtataaaagcagccaccgggacaagctgggcctgatggtttgctaccgcacggacgacgaggaggacctgggcatttatgtcggagaggtaaatcccaacagcattgcagccaaagacggccggatccgtgagggagaccgcatcatccagattaacggtgtagacgtccagaaccgggaagaggcggtggccatcctgagccaggaagagaayaccaacatctccctgctggtggcccgacctgagagtcagctggcgaaaaggtggaaggacagcgaccgggatgacttcctggatgactttggctctgagaatgagggggagctgcgtgctcgtaaactgaaatcaccccctgcccagcaggttctaggcgcccacgaggtcccctcgaggaacatcttttcagtaacctccgtccgctaagtatggcgggcggcacacggtgaccatgatcccaggggatggcatcgggccagagctcatgctgcatgtcaagtccgtcttcaggcacgcatgtgtaccagtggactttgaagaggtgcacgtgagttccaatgctgatgaagaggacattcgcaatgccatcatggccatccgccggaaccgcgtggccctgaagggcaacatcgaaaccaaccataacctgccaccgtcgcacaaatctcgaaacaacatccttcgcaccagcctggacctctatgccaacgtcatccactgtaagagccttccaggcgtggtgacccggcacaaggacatagacatcctcattgtccgggagaacacagagggcgagtacagcagcctggagcatgagagtgtggcgggagtggtggagagcctgaagatcatcaccaaggccaagtccctgcgcattgccgagtatgccttcaagctggcgcaggagagcgggcgcaagaaagtgacggccgtgcacaaggccaacatcatgaaactgggcgatgggcttttcctccagtgctgcagggaggtggcagcccgctaccctcagatcaccttcgagaacatgattgtggataacaccaccatgcagctggtgtcccggccccagcagtttgatgtcatggtgatgcccaatctctatggcaacatcgtcaacaatgtctgcgcgggactggtcgggggcccaggccttgtggctggggccaactatggccatgtgtacgcggtgtttgaaacagctacgaggaacaccggcaagagtatcgccaataagaacatcgccaaccccacggccaccctgctggccagctgcatgatgctggaccacctcaagctgcactcctatgccacctccatccgtaaggctgtcctggcatccatggacaatgagaatggcctggtgtgtgccgagcctgcctgtgtcctacagatgcacactccggacatcgggggccagggcacaacatctgaagccatccaggacgtcatccgccacatccgcgtcatcaacggccgggccgtggaggcctaggctggccctaggaccttcttggtttgctccttggattccccttcccactccagcaccccagccagcctggtacgcagatcccagaataaagcaccttctccc

SEQ ID NO: 3079 - DNA, 3496 bp, Homo sapiens
agccgtccgcaccctcccatcctggggctgttgggtgttggcgctccgtgggaaccagccacgggtggggtgggaagttggggttggcccgggtggggcgcgcttccgtcccgggaggcgcggtgcggcgggcgcgggatggaggttgcatagcaacgagcgcagttccccgcacacgctctccccgcaggacccagggcgggggagggagccaggctcccgccgtgcggggggcgccgaatctagatcccggcgggcctggagcgtgggagtgcgtgggcgtccccgggcgcggtccaagtccgtccgggggctgggtgcccaccccgacacccactcccgcctggccctgcccgaacgatgggctcccgggccttaggcgtctcgggaggtggagctgtataaaagcagccaccgggacaagctgggcctgatggtttgctaccgcacggacgacgaggaggacctgggcatttatgtcggagaggtaaatcccaacagcattgcagccaaagacggccggatccgtgagggagaccgcatcatccagattaacggtgtagacgtccagaaccgggaagaggcggtggccatcctgagccaggaagagaayaccaacatctccctgctggtggcccgacctgagagtcagctggcgaaaaggtggaaggacagcgaccgggatgacttcctggatgactttggctctgagaatgagggggagctgcgtgctcgtaaactgaaatcaccccctgcccagcagcccggaaacgaagaggagaagggggctcccgatgccggcccaggcctgagcaacagccaggagctggacagcggggtgggccggactgacgagagcacccggaacgaagagagctctgagcacgacctgctgggggacgaacccccgagctccaccaacaccccgggaagcctgcgcaagtttggcctgcaaggggacgccctgcagagccgggacttccatttcagcatggactctctgctggccgagggggcggggctgggagggggcgacgtcccgggcctcacggatgaggagtatgagcgctaccgtgagctcctggagatcaagtgccacctggagaacggcaaccagctgggcctcctctttccccgggcctccggaggcaacagcgccctggacgtcaaccgcaacgagagcctgggccacgagatggccatgctggaggaggagctaaggcacctggaattcaagtgccgcaacatactgcgggcgcagaagatgcagcagctgcgtgagcgctgcatgaaggcctggctgctggaggaggagagcctctacgacctggcggccagcgagcccaagaagcacgagctgtccgacatctccgagctgcccgagaagtcggacaaggacagcaccagcgcctacaacactggggagagctgccgcagcaccccgctgcttgtggagcccctgcccgagagccccctgcggcgggccatggccggcaactccaacttgaaccggacccctcccggccccgctgttgccacccccgccaaggcagctcctccaccggggagccccgccaagttccggtccctctcccgggatcctgaggccggccggaggcagcacgcggaggagcgcggccgccgcaaccccaagacggggttgaccctggagcgtgtgggccctgaaagcagcccttacctctcgcggcgccaccgcggccagggccaggagggcgagcactaccacagctgcgtgcagctggccccgacgcgaggcctggaggagctgggccacggccccctgagcttggccggtggccctcgggtgggcggggtggcggccgcggccactgaagcaccgcgcatggagtggaaagtgaaggtgcgcagcgacggaacccgctacgtggccaagcggcccgtgcgagatcggctgctgaaagcccgtgccctgaagatccgggaggagcgcagcggtatgacgaccgacgacgacgcggtgagcgagatgaagatgggccgctactggagcaaggaggagcggaagcagcacctgatccgggcccgtgagcagcggaagcggcgcgagttcatgatgcagagccggctggagtgcctgcgggagcagcagaatggcgacagcaagcccgagctcaacatcattgccctgagccaccgcaaaaccatgaagaagcggaacaagaagatcctggacaactggatcaccatccaggagatgctggcccacggcgcgcgctccgccgatggcaagcgggtctacaaccctcttctctcagtcaccaccgtgtgagctgcccgggcgggtacacggcccaggcccagggaaccccctggggccccggccctcactctcctatagagattgtgtgtgtgtgtgtgtgcgcgcgcgcgtgctckctgtgcgcacgcacacatctcgtctgggtgtgcgcacagggctttgttagcagagagaagcccctgaggagaagggacgcttttcttccttctgcccaagtaaagtgaccatgccagtggccagcactgggggcacacctgtgatgggcaccccttcagctgtgcgtgtgcattccccatcccccatgctcttgcgtgtgcttgcacgtgcacgcacacacacacccagtgctctctccacccgacccgtgtacttgcagacagggaagctgagctgaaaggagcacaagagagtgtccggcttcgctgctgagcgcggcctctccccgccgctgcgcactgcagttatttgtagacaaaggcacccctgatttttgtggtttttctccctttctgtgcttgccaatagttgttttgttttgtggacctgccctgggggctggcagctccttcaggcagcctggcagaagtggaactcccctctccactgatggctgggaagggagttggggaggaagagtgggagggagggctggggatggatgggagggaaggggagggaaaggtgggaggaatgggaagcagctgttctggtggcttccactctgaggtgtgggaacggggagcctctggggggcacctgtttccccagtgactcagagagagcaagactgcaggaacggaggggtcctgcagggtgtccaccaagaagtcacagagcccgttctgcgccccacaccatctggagcaggggcttctcttctgagtgaactgaggaaggtgcttagatggtgagggctctagaaaccaagccccatgagcagcagtggaagacctcgggccatgcggcctggggaggacttggtggcgatccgcaacctggaccccagtgagaggcggtgggctgactgggaaggagaggcccccaacctcctcaggatttgcacgtgtgaactasgctgcctgtggggtgccccttaggcttggagagccccagattggaggcagacagactgcaccaccccttccccccctgcatctcaagaataaagcaagctgcctttgtacttggttgaat

SEQ ID NO: 3080 - DNA, 3985 bp, Homo sapiens
ggggccgccgccgcgccgctgcccccctgtcgcgggccgggccgcggcgccgagcgcgagggccgggctcccggggctggcggccatgggcaggagccggaggcggcagcggcagcggcgggccccgcgggcggggaggcgcgcggcccacggcccctgacggcccctggcggcccggcgcgcccccgcgctccctggggggccgtagcctggcaacgcccggcgcgcccgcccatcccccgctgccctttttctcctggccgggtgcgagggagcatgcccgcgcctggcctcggccagcgaagagttaacctgaggggcgagccgctgcccccacctcgggggcgtgcccccctcccccgctaggcggcccgccccccgcgccagggtatggcccctggccccggcccgggacccgaggtcccgcgcccgggtcagtgaaaggcgtcttcccgttcccgccctccgcctcctctcgccggccagcaacatgggatgtaatatgtgcgtggtccagaaaccggaggagcagtacaaagtgatgctgcaggtgaacgggaaggagctctccaagctgtctcaggagcaaactctgcaggccctgcgctcctccaaggagcccctggtgatccaggtgctgagacgcagcccccgcctccggggggacagctcctgtcacgacctgcagctggtggacagtggcactcagaccgacatcaccttcgagcatatcatggcgctgggcaagctgcgtccgcccaccccgcccatggtcatcctggagccccccccaatcagccatgagtattatgacccggcggagtttatggagggcggcccgcaggaggcagaccgcttggatgagctggagtatgaggaggtggagctgtataaaagcagccaccgggacaagctgggcctgatggtttgctaccgcacggacgacgaggaggacctgggcatttatgtcggagaggtaaatcccaacagcattgcagccaaagacggccggatccgtgagggagaccgcatcatccagattaacggtgtagacgtccagaaccgggaagaggcggtggccatcctgagccaggaagagaayaccaacatctccctgctggtggcccgacctgagagtcagctggcgaaaaggtggaaggacagcgaccgggatgacttcctggatgactttggctctgagaatgagggggagctgcgtgctcgtaaactgaaatcaccccctgcccagcagcccggaaacgaagaggagaagggggctcccgatgccggcccaggcctgagcaacagccaggagctggacagcggggtgggccggactgacgagagcacccggaacgaagagagctctgagcacgacctgctgggggacgaacccccgagctccaccaacaccccgggaagcctgcgcaagtttggcctgcaaggggacgccctgcagagccgggacttccatttcagcatggactctctgctggccgagggggcggggctgggagggggcgacgtcccgggcctcacggatgaggagtatgagcgctaccgtgagctcctggagatcaagtgccacctggagaacggcaaccagctgggcctcctctttccccgggcctccggaggcaacagcgccctggacgtcaaccgcaacgagagcctgggccacgagatggccatgctggaggaggagctaaggcacctggaattcaagtgccgcaacatactgcgggcgcagaagatgcagcagctgcgtgagcgctgcatgaaggcctggctgctggaggaggagagcctctacgacctggcggccagcgagcccaagaagcacgagctgtccgacatctccgagctgcccgagaagtcggacaaggacagcaccagcgcctacaacactggggagagctgccgcagcaccccgctgcttgtggagcccctgcccgagagccccctgcggcgggccatggccggcaactccaacttgaaccggacccctcccggccccgctgttgccacccccgccaaggcagctcctccaccggggagccccgccaagttccggtccctctcccgggatcctgaggccggccggaggcagcacgcggaggagcgcggccgccgcaaccccaagacggggttgaccctggagcgtgtgggccctgaaagcagcccttacctctcgcggcgccaccgcggccagggccaggagggcgagcactaccacagctgcgtgcagctggccccgacgcgaggcctggaggagctgggccacggccccctgagcttggccggtggccctcgggtgggcggggtggcggccgcggccactgaagcaccgcgcatggagtggaaagtgaaggtgcgcagcgacggaacccgctacgtggccaagcggcccgtgcgagatcggctgctgaaagcccgtgccctgaagatccgggaggagcgcagcggtatgacgaccgacgacgacgcggtgagcgagatgaagatgggccgctactggagcaaggaggagcggaagcagcacctgatccgggcccgtgagcagcggaagcggcgcgagttcatgatgcagagccggctggagtgcctgcgggagcagcagaatggcgacagcaagcccgagctcaacatcattgccctgagccaccgcaaaaccatgaagaagcggaacaagaagatcctggacaactggatcaccatccaggagatgctggcccacggcgcgcgctccgccgatggcaagcgggtctacaaccctcttctctcagtcaccaccgtgtgagctgcccgggcgggtacacggcccaggcccagggaaccccctggggccccggccctcactctcctatagagattgtgtgtgtgtgtgtgtgcgcgcgcgcgtgctckctgtgcgcacgcacacatctcgtctgggtgtgcgcacagggctttgttagcagagagaagcccctgaggagaagggacgcttttcttccttctgcccaagtaaagtgaccatgccagtggccagcactgggggcacacctgtgatgggcaccccttcagctgtgcgtgtgcattccccatcccccatgctcttgcgtgtgcttgcacgtgcacgcacacacacacccagtgctctctccacccgacccgtgtacttgcagacagggaagctgagctgaaaggagcacaagagagtgtccggcttcgctgctgagcgcggcctctccccgccgctgcgcactgcagttatttgtagacaaaggcacccctgatttttgtggtttttctccctttctgtgcttgccaatagttgttttgttttgtggacctgccctgggggctggcagctccttcaggcagcctggcagaagtggaactcccctctccactgatggctgggaagggagttggggaggaagagtgggagggagggctggggatggatgggagggaaggggagggaaaggtgggaggaatgggaagcagctgttctggtggcttccactctgaggtgtgggaacggggagcctctggggggcacctgtttccccagtgactcagagagagcaagactgcaggaacggaggggtcctgcagggtgtccaccaagaagtcacagagcccgttctgcgccccacaccatctggagcaggggcttctcttctgagtgaactgaggaaggtgcttagatggtgagggctctagaaaccaagccccatgagcagcagtggaagacctcgggccatgcggcctggggaggacttggtggcgatccgcaacctggaccccagtgagaggcggtgggctgactgggaaggagaggcccccaacctcctcaggatttgcacgtgtgaactasgctgcctgtggggtgccccttaggcttggagagccccagattggaggcagacagactgcaccaccccttccccccctgcatctcaagaataaagcaagctgcctttgtacttggttgaat

SEQ ID NO: 3081 - DNA, 3613 bp, Homo sapiens
tgtgcgcggaggctcccccggccccgcatttgtgtactttctgtgtgcaccctgcagactgtctagagaaatgtcccggatgctgtgggctgagacctcctagggctaagtggagggaggtcaaggtcaaggcacccaggagcagacagggctcagacaggtgaacgggaaggagctctccaagctgtctcaggagcaaactctgcaggccctgcgctcctccaaggagcccctggtgatccaggtgctgagacgcagcccccgcctccggggggacagctcctgtcacgacctgcagctggtggacagtggcactcagaccgacatcaccttcgagcatatcatggcgctgggcaagctgcgtccgcccaccccgcccatggtcatcctggagccgtacgtcctctctgagctccccccaatcagccatgagtattatgacccggcggagtttatggagggcggcccgcaggaggcagaccgcttggatgagctggagtatgaggaggtggagctgtataaaagcagccaccgggacaagctgggcctgatggtttgctaccgcacggacgacgaggaggacctgggcatttatgtcggagaggtaaatcccaacagcattgcagccaaagacggccggatccgtgagggagaccgcatcatccagattaacggtgtagacgtccagaaccgggaagaggcggtggccatcctgagccaggaagagaayaccaacatctccctgctggtggcccgacctgagagtcagctggcgaaaaggtggaaggacagcgaccgggatgacttcctggatgactttggctctgagaatgagggggagctgcgtgctcgtaaactgaaatcaccccctgcccagcagcccggaaacgaagaggagaagggggctcccgatgccggcccaggcctgagcaacagccaggagctggacagcggggtgggccggactgacgagagcacccggaacgaagagagctctgagcacgacctgctgggggacgaacccccgagctccaccaacaccccgggaagcctgcgcaagtttggcctgcaaggggacgccctgcagagccgggacttccatttcagcatggactctctgctggccgagggggcggggctgggagggggcgacgtcccgggcctcacggatgaggagtatgagcgctaccgtgagctcctggagatcaagtgccacctggagaacggcaaccagctgggcctcctctttccccgggcctccggaggcaacagcgccctggacgtcaaccgcaacgagagcctgggccacgagatggccatgctggaggaggagctaaggcacctggaattcaagtgccgcaacatactgcgggcgcagaagatgcagcagctgcgtgagcgctgcatgaaggcctggctgctggaggaggagagcctctacgacctggcggccagcgagcccaagaagcacgagctgtccgacatctccgagctgcccgagaagtcggacaaggacagcaccagcgcctacaacactggggagagctgccgcagcaccccgctgcttgtggagcccctgcccgagagccccctgcggcgggccatggccggcaactccaacttgaaccggacccctcccggccccgctgttgccacccccgccaaggcagctcctccaccggggagccccgccaagttccggtccctctcccgggatcctgaggccggccggaggcagcacgcggaggagcgcggccgccgcaaccccaagacggggttgaccctggagcgtgtgggccctgaaagcagcccttacctctcgcggcgccaccgcggccagggccaggagggcgagcactaccacagctgcgtgcagctggccccgacgcgaggcctggaggagctgggccacggccccctgagcttggccggtggccctcgggtgggcggggtggcggccgcggccactgaagcaccgcgcatggagtggaaagtgaaggtgcgcagcgacggaacccgctacgtggccaagcggcccgtgcgagatcggctgctgaaagcccgtgccctgaagatccgggaggagcgcagcggtatgacgaccgacgacgacgcggtgagcgagatgaagatgggccgctactggagcaaggaggagcggaagcagcacctgatccgggcccgtgagcagcggaagcggcgcgagttcatgatgcagagccggctggagtgcctgcgggagcagcagaatggcgacagcaagcccgagctcaacatcattgccctgagccaccgcaaaaccatgaagaagcggaacaagaagatcctggacaactggatcaccatccaggagatgctggcccacggcgcgcgctccgccgatggcaagcgggtctacaaccctcttctctcagtcaccaccgtgtgagctgcccgggcgggtacacggcccaggcccagggaaccccctggggccccggccctcactctcctatagagattgtgtgtgtgtgtgtgtgcgcgcgcgcgtgctckctgtgcgcacgcacacatctcgtctgggtgtgcgcacagggctttgttagcagagagaagcccctgaggagaagggacgcttttcttccttctgcccaagtaaagtgaccatgccagtggccagcactgggggcacacctgtgatgggcaccccttcagctgtgcgtgtgcattccccatcccccatgctcttgcgtgtgcttgcacgtgcacgcacacacacacccagtgctctctccacccgacccgtgtacttgcagacagggaagctgagctgaaaggagcacaagagagtgtccggcttcgctgctgagcgcggcctctccccgccgctgcgcactgcagttatttgtagacaaaggcacccctgatttttgtggtttttctccctttctgtgcttgccaatagttgttttgttttgtggacctgccctgggggctggcagctccttcaggcagcctggcagaagtggaactcccctctccactgatggctgggaagggagttggggaggaagagtgggagggagggctggggatggatgggagggaaggggagggaaaggtgggaggaatgggaagcagctgttctggtggcttccactctgaggtgtgggaacggggagcctctggggggcacctgtttccccagtgactcagagagagcaagactgcaggaacggaggggtcctgcagggtgtccaccaagaagtcacagagcccgttctgcgccccacaccatctggagcaggggcttctcttctgagtgaactgaggaaggtgcttagatggtgagggctctagaaaccaagccccatgagcagcagtggaagacctcgggccatgcggcctggggaggacttggtggcgatccgcaacctggaccccagtgagaggcggtgggctgactgggaaggagaggcccccaacctcctcaggatttgcacgtgtgaactasgctgcctgtggggtgccccttaggcttggagagccccagattggaggcagacagactgcaccaccccttccccccctgcatctcaagaataaagcaagctgcctttgtacttggttgaat

SEQ ID NO: 3082 - DNA, 1295 bp, Homo sapiens
agtgggcggggccgggcccctgctgggaggcgaagaccaggcgggcactgttgcccggcgacgctccggcgctgggtccccgaggcccggcccctccccgggaggaggtgggcttcgagtcacgtgacccgtgccctacgggagggggtgcggtcggggacccggcaggaggcggccgagaagagaggaccgtgggggcgttcgcgtggctcccagcccgggaccccacccccgctggacagtgggggaaactgaggcctgagcggagtgaccaccccggctatggccagccagcctccagggagcgcgagtgctgctgacaggggccaacgctggtgttggtgaggagctggcctatcactacgcgcgtctgggctcccacctggtgctcactgcccacactgaggctctcctgcagaagggtcggcccgaaataggcggagttgggattcgaactcatttcacaggcagagggaggagagcagccatagccacctccactggttccgactccagctcccgggctcgcaggagtaaacgcgcatgctcagggagctcggtcgcgcatgctcagcgcaacggcggggaagactccagccgccagggggagcgcgtgccgttcttgcctctctggcctgcgcctcctgagccgagtagatatcccggagttccgcgcggcgccarcccttccgcsacggccgtctctggagagcagcagccakggccctacgctaccctatggccgtgggcctcaacaagggccacaaagtgaccaagaacgtgagcaagcccaggcacagccgacgccgcgggcgtctgaccaaacacaccaagttcgtgcgggacatgattcgggaggtgtgtggctttgccccgtacgagcggcgcgccatggagttactgaaggtctccaaggacaaacgggccctcaaatttatcaagaaaagggtggggacgcacatccgcgccaagaggaagcgggaggagctgagcaacgtactggccgccatgaggaaagctgctgccaagaaagactgagcccctcccctgccctctccctgaaataaagaacagcttgacagaagccctggctctcctgctgtccgtgggtgggtgtgggtgtgtcgggggcccgcagtcccctgtctggtgcccgctctgagccacaccctctccgggtgctgcctggtcgtgaatcaaaagccgtggcccgcccacccttcccggggcagcaggtgaggaagccgccgtactgcaaatgactttaatcattaaatagcttctatgccacactc

SEQ ID NO: 3083 - DNA, 874 bp, Homo sapiens
ggtcggcccgaaataggcggagttgggattcgaactcatttcacaggcagagggaggagagcagccatagccacctccactggttccgactccagctcccgggctcgcaggagtaaacgcgcatgctcagggagctcggtcgcgcatgctcagcgcaacggcggggaagactccagccgccagggggagcgcgtgccgttcttgcctctctggcctgcgcctcctgagccgagtagatatcccggagttccgcgcggcgccarcccttccgcsacggccgtctctggagagcagcagccakggccctacgctaccctatggccgtgggcctcaacaagggccacaaagtgaccaagaacgtgagcaagcccaggcacagccgacgccgcgggcgtctgaccaaacacaccaagttcgtgcgggacatgattcgggaggtgtgtggctttgccccgtacgagcggcgcgccatggagttactgaaggtctccaaggacaaacgggccctcaaatttatcaagaaaagggtggggacgcacatccgcgccaagaggaagcgggaggagctgagcaacgtactggccgccatgaggaaagctgctgccaagaaagactgagcccctcccctgccctctccctgaaataaagaacagcttgacagaagccctggctctcctgctgtccgtgggtgggtgtgggtgtgtcgggggcccgcagtcccctgtctggtgcccgctctgagccacaccctctccgggtgctgcctggtcgtgaatcaaaagccgtggcccgcccacccttcccggggcagcaggtgaggaagccgccgtactgcaaatgactttaatcattaaatagcttctatgccacactc

SEQ ID NO: 3084 - DNA, 1468 bp, Homo sapiens
cggggccgggcccctgctgggaggcgaagaccaggcgggcactgttgcccggcgacgctccggcgctgggtccccgaggcccggcccctccccgggaggaggtgggcttcgagtcacgtgacccgtgccctacgggagggggtgcggtcggggacccggcaggaggcggccgagaagagaggaccgtgggggcgttcgcgtggctcccagcccgggaccccacccccgctggacagtgggggaaactgaggcctgagcgggcccacacaggaccatgaaggtgcttctcctcacagggctgggggccctgttcttcgcctattattgggatgacaacttcgacccaggcgggctggactacctcgtgctgaaccacatcggcggcgccccggccggcacgcgagcccgcagcccccaggcaactcgctggctcatgcaggtaaactttgtgagctacgtgcaactgacgtcgcgggcgctgcccagcctgacggacagcaagggctccctggtggtggtgtcctcgctgctcggccgcgtgcccacgtcgttctccactccctactcggcggccaagtttgcgctggacggcttcttcggctccctgcggcgggagctggacgtgcaggacgtgaacgtggccatcaccatgtgcgtcctgggcctccgagatcgcgcctccgccgccgaggcagtcaggggagtcacgagggtcaaggcggccccggggcccaaggcagccctggccgtgatccgcggcggcgccacgcgcgcggccggcgtcttctacccgtggcgtttccgcctgctgtgcttgctccggcgctggctaccgcgcccgcgggcctggtttatccgccaggagctcaacgtcacggccgcggcagcctgagcaccggggggtgcccctccagtcccagacggcaatgttcctccctccaactgtccctggagccagaacactcacagagacacccctgagagggtggccacagcccaagatgaagtcatcaagacagaaaagcaaaaccgagaaaaacgacgggcacctggaaccagtcacggcttgggaggtgcaggtgccccgtgttaggcgcctttgtcggggacttgcaaggcctcayctgtttggccatgattgatgacgtgactgcttccattttgcagatgaggaaactaaggctcagagaggccacgccacccttgagccacccatggacccctctccatctcctgcctgcgcctttaagtccctgatttattctttccattcattccatctgggaggaacccccccaactcctgccagcttcccctagctggggtctctggtactcttcacacctgcaggggcgtctacactgttcgtctacctggtggcagggtctgagcgggaggaggagggaaagagtgtgttctgagctggacccagcctcttgttcgagaataaaaactcttcttctcttgc

SEQ ID NO: 3085 - DNA, 763 bp, Homo sapiens
agcagcaggtaagtggtttcccgcactgccggtatccgccgccatccggactcccgggtcctctgtgcaggttggaggatggttgrttgtggcgagcgaggctgaaggagccgggacgcggggctctgggcctcgggaactgagccggtactcacctccgcccyttctccccgtcgctgtccgcagccakggccctacgctaccctatggccgtgggcctcaacaagggccacaaagtgaccaagaacgtgagcaagcccaggcacagccgacgccgcgggcgtctgaccaaacacaccaagttcgtgcgggacatgattcgggaggtgtgtggctttgccccgtacgagcggcgcgccatggagttactgaaggtctccaaggacaaacgggccctcaaatttatcaagaaaagggtggggacgcacatccgcgccaagaggaagcgggaggagctgagcaacgtactggccgccatgaggaaagctgctgccaagaaagactgagcccctcccctgccctctccctgaaataaagaacagcttgacagaagccctggctctcctgctgtccgtgggtgggtgtgggtgtgtcgggggcccgcagtcccctgtctggtgcccgctctgagccacaccctctccgggtgctgcctggtcgtgaatcaaaagccgtggcccgcccacccttcccggggcagcaggtgaggaagccgccgtactgcaaatgactttaatcattaaatagcttctatgccacactc

SEQ ID NO: 3086 - DNA, 1788 bp, Homo sapiens
agtcgtggtgtcttgcggctctgagactccagagaagggctgcggtctcgcagcggagggccgctgggaaatggacgctttaaggcccgggccgccgcaaggctgtctgggaaatgtagtcagcacggcgctgtttgcacctggccgcggagcctcctgggaaatgtagttcggcccggccctggcaccgtgaggggaaagaggcgtcaggtgcctggctgaagcctgaaggtgacccgaaaacaagtcagagcccgagagatccacccgcgcccgcgcgggggaccaagggcccggatttaagaagagtgtgcctacaaggcggttgtcacggcaacgagagggcgggattgttcgagcgctgcggccccctcacgtgatcgattcggaggcggggcgtccgcccagtgggcggggccgggcccctgctgggaggcgaagaccaggcgggcactgttgcccggcgacgctccggcgctgggtccccgaggcccggcccctccccgggaggaggtgggcttcgagtcacgtgacccgtgccctacgggagggggtgcggtcggggacccggcaggaggcggccgagaagagaggaccgtgggggcgttcgcgtggctcccagcccgggaccccacccccgctggacagtgggggaaactgaggcctgagcgggcctgtgccggccacctctgtcccctgtccctctgcaggcccacacaggaccatgaaggtgcttctcctcacagggctgggggccctgttcttcgcctattattgggatgacaacttcgacccagccagcctccagggagcgcgagtgctgctgacaggggccaacgctggtgttggtgaggagctggcctatcactacgcgcgtctgggctcccacctggtgctcactgcccacactgaggctctcctgcagaaggtggtagggaactgccggaagctgggcgcccccaaggtcttctacatcgcggcggacatggcctcccctgaggcgcccgagagcgtggtgcagtttgcgctggacaagctgggcgggctggactacctcgtgctgaaccacatcggcggcgccccggccggcacgcgagcccgcagcccccaggcaactcgctggctcatgcaggtaaactttgtgagctacgtgcaactgacgtcgcgggcgctgcccagcctgacggacagcaagggctccctggtggtggtgtcctcgctgctcggccgcgtgcccacgtcgttctccactccctactcggcggccaagtttgcgctggacggcttcttcggctccctgcggcgggagctggacgtgcaggacgtgaacgtggccatcaccatgtgcgtcctgggcctccgagatcgcgcctccgccgccgaggcagtcaggggagtcacgagggtcaaggcggccccggggcccaaggcagccctggccgtgatccgcggcggcgccacgcgcgcggccggcgtcttctacccgtggcgtttccgcctgctgtgcttgctccggcgctggctaccgcgcccgcgggcctggtttatccgccaggagctcaacgtcacggccgcggcagcctgagcaccggggggtgcccctccagtcccagacggcaatgttcctccctccaactgtccctggagccagaacactcacagagacacccctgagagggtggccacagcccaagatgaagtcatcaagacagtgccccgtgttaggcgcctttgtcggggacttgcaaggcctcayctgtttggccatgattgatgacgtgactgctt

SEQ ID NO: 3087 - DNA, 2117 bp, Homo sapiens
ggcagtggctccttgcacagcagctgcacgcgccgtggctccggatctcttcgtctttgcagcgtagcccgagtcggtcagcgccggaggtgagcgccatgtcgaagccccatagtgaagcygggactgccttcattcagacccagcagctgcacgcagccatggctgacacattcctggagcacatgtgccgcctggacattgattcaccacccatcacagcccggaacactggcatcatctgtaccattggcccagcttcccgatcagtggagacgttgaaggagatgattaagtctggaatgaatgtggctcgtctgaacttctctcatggaactcatgagtaccatgcggagaccatcaagaatgtgcgcacagccacggaaagctttgcttctgaccccatcctctaccggcccgttgctgtggctctagacactaaaggacctgagatccgaactgggctcatcaagggcagyggcactgcagaggtggagctgaagaagggagccactctcaaaatcacgctggataaygcctacatggaaaagtgtgacgagarcatcctgtggctggactacaagaacatctgcaaggtggtggaagtgggcagcaagatctacgtggatgatgggcttatttctctccaggtgaagcagaaaggtgccgacttcctggtgacggaggtggaaaatggtggctccytgggcagcaagaagggtgtgaaccttcctggggctgctgtggacttgcctgctgtgtcggagaaggacatccaggatctgaagtttggggtcgagcaggatgttgatatggtgtttgcgtcattcatccgcaaggcatctgatgtccatgaagttaggaaggtcctgggagagaagggaaagaacatcaagattatcagcaaaatcgagaatcatgagggggttcggaggcagtttgatgaaatcctggaggccagtgatgggatcatggtggctcgtggtgatctaggcattgagattcctgcagagaaggtcttccttgctcagaagatgatgattggacggtgcaaccgagctgggaagcctgtcatctgtgctactcaggcatatgctggagagcatgatcaagaagccccsscccactcgggctgaaggcagtgatgtggccaatgcagtcctggatggagccgactgcatcatgctgtctggagaaacagccaaaggggactatcctctggaggctgtgcgcatgcagcacctgattgcccgtgaggcagaggctgccatctaccacttgcaattatttgaggaactccgccgcctggcgcccattaccagcgaccccacagaagccaccgccgtgggtgccgtggaggcctccttcaagtgctgcagtggggccataatcgtcctcaccaagtctggcaggtctgctcaccaggtggccagataccgcccacgtgcccccatcattgctgtgacccggaatccccagacagctcgtcaggcccacctgtaccgtggcatcttccctgtgctgtgcaaggacccagtccaggaggcctgggctgaggacgtggacctccgggtgaactttgccatgaatgttggcaaggcccgaggcttcttcaagaagggagatgtggtcattgtgctgaccggatggcgccctggctccggcttcaccaacaccatgcgtgttgttcctgtgccgtgatggaccccagagcccctcctccagcccctgtcccacccccttcccccagcccatccatggtaggttgggacaccagggaagaagatcaacgcctcactgaaacatggctgtgtttgcagcctgctctagtgggacagcccagagcctggctgcccatcatgtggccccacccaatcaagggaagaaggaggaatgctggactggaggcccctggagccagatggcaagagggtgacagcttcctttcctgtgtgtactctgtccagttcctttagaaaaaccgactctggccctggcccttacttgcttctctagctytytaggcctctccagtttgcacctgtccccaccctccactcagctgtcctgcagcaaacactccaccctccaccttccattttcccccactactgcag

SEQ ID NO: 3088 - DNA, 2498 bp, Homo sapiens
ccaccgaaagggcaacctgcccgcgcgttccgccrccgccgccgcgcttcctcctgaaggtgactgcgcccgcggggacgcagggggcggggcccgggtcgcccggagccgggattgggcagagggcggggcggcggagggattgcggcggcccgcagcgggataaccttgaggctgaggcagtggctccttgcacagcagctgcacgcgccgtggctccggatctcttcgtctttgcagcgtagcccgagtcggtcagcgccggaggacctcagcagccatgtcgaagccccatagtgaagcygggactgccttcattcagacccagcagctgcacgcagccatggctgacacattcctggagcacatgtgccgcctggacattgattcaccacccatcacagcccggaacactggcatcatctgtaccattggcccagcttcccgatcagtggagacgttgaaggagatgattaagtctggaatgaatgtggctcgtctgaacttctctcatggaactcatgagtaccatgcggagaccatcaagaatgtgcgcacagccacggaaagctttgcttctgaccccatcctctaccggcccgttgctgtggctctagacactaaaggacctgagatccgaactgggctcatcaagggcagyggcactgcagaggtggagctgaagaagggagccactctcaaaatcacgctggataaygcctacatggaaaagtgtgacgagarcatcctgtggctggactacaagaacatctgcaaggtggtggaagtgggcagcaagatctacgtggatgatgggcttatttctctccaggtgaagcagaaaggtgccgacttcctggtgacggaggtggaaaatggtggctccytgggcagcaagaagggtgtgaaccttcctggggctgctgtggacttgcctgctgtgtcggagaaggacatccaggatctgaagtttggggtcgagcaggatgttgatatggtgtttgcgtcattcatccgcaaggcatctgatgtccatgaagttaggaaggtcctgggagagaagggaaagaacatcaagattatcagcaaaatcgagaatcatgagggggttcggaggtttgatgaaatcctggaggccagtgatgggatcatggtggctcgtggtgatctaggcattgagattcctgcagagaaggtcttccttgctcagaagatgatgattggacggtgcaaccgagctgggaagcctgtcatctgtgctactcagatgctggagagcatgatcaagaagccccsscccactcgggctgaaggcagtgatgtggccaatgcagtcctggatggagccgactgcatcatgctgtctggagaaacagccaaaggggactatcctctggaggctgtgcgcatgcagcacctgatagctcgtgaggctgaggcagccatgttccaccgcaagctgtttgaagaacttgtgcgagcctcaagtcactccacagacctcatggaagccatggccatgggcagcgtggaggcttcttataagtgtttagcagcagctttgatagttctgacggagtctggcaggtctgctcaccaggtggccagataccgcccacgtgcccccatcattgctgtgacccggaatccccagacagctcgtcaggcccacctgtaccgtggcatcttccctgtgctgtgcaaggacccagtccaggaggcctgggctgaggacgtggacctccgggtgaactttgccatgaatgttggcaaggcccgaggcttcttcaagaagggagatgtggtcattgtgctgaccggatggcgccctggctccggcttcaccaacaccatgcgtgttgttcctgtgccgtgatggaccccagagcccctcctccagcccctgtcccacccccttcccccagcccatccattaggccagcaacgcttgtagaactcactctgggctgtaacgtggcactggtaggttgggacaccagggaagaagatcaacgcctcactgaaacatggctgtgtttgcagcctgctctagtgggacagcccagagcctggctgcccatcatgtggccccacccaatcaagggaagaaggaggaatgctggactggaggcccctggagccagatggcaagagggtgacagcttcctttcctgtgtgtactctgtccagttcctttagaaaaaatggatgcccagaggactcccaaccctggcttggggtcaagaaacagccagcaagagttaggggccttagggcactgggctgttgttccattgaagccgactctggccctggcccttacttgcttctctagctytytaggcctctccagtttgcacctgtccccaccctccactcagctgtcctgcagcaaacactccaccctccaccttccattttcccccactactgcagcacctccaggcctgttgctatagagcctacctgtatgtcaataaacaacagctgaagcacct

SEQ ID NO: 3089 - DNA, 2490 bp, Homo sapiens
tcgtctttgcagcgtagcccgagtcggtcagcgccggaggtgagcggtgcaggaggctacgccatcagtccccaccaagggccagtcgcccggctagtgcggaatcccggcgcgccggccggccccgggcacgcaggcagggcggcgcaggatccrgggcgtctgggatgcagtggagctcagagagaggagaacggctcctcacgcctggggcctgctcttcagaagtccccagcgccgttccttccagatcaggcgggacctcagcagccatgtcgaagccccatagtgaagcygggactgccttcattcagacccagcagctgcacgcagccatggctgacacattcctggagcacatgtgccgcctggacattgattcaccacccatcacagcccggaacactggcatcatctgtaccattggcccagcttcccgatcagtggagacgttgaaggagatgattaagtctggaatgaatgtggctcgtctgaacttctctcatggaactcatgagtaccatgcggagaccatcaagaatgtgcgcacagccacggaaagctttgcttctgaccccatcctctaccggcccgttgctgtggctctagacactaaaggacctgagatccgaactgggctcatcaagggcagyggcactgcagaggtggagctgaagaagggagccactctcaaaatcacgctggataaygcctacatggaaaagtgtgacgagarcatcctgtggctggactacaagaacatctgcaaggtggtggaagtgggcagcaagatctacgtggatgatgggcttatttctctccaggtgaagcagaaaggtgccgacttcctggtgacggaggtggaaaatggtggctccytgggcagcaagaagggtgtgaaccttcctggggctgctgtggacttgcctgctgtgtcggagaaggacatccaggatctgaagtttggggtcgagcaggatgttgatatggtgtttgcgtcattcatccgcaaggcatctgatgtccatgaagttaggaaggtcctgggagagaagggaaagaacatcaagattatcagcaaaatcgagaatcatgagggggttcggaggtttgatgaaatcctggaggccagtgatgggatcatggtggctcgtggtgatctaggcattgagattcctgcagagaaggtcttccttgctcagaagatgatgattggacggtgcaaccgagctgggaagcctgtcatctgtgctactcagatgctggagagcatgatcaagaagccccsscccactcgggctgaaggcagtgatgtggccaatgcagtcctggatggagccgactgcatcatgctgtctggagaaacagccaaaggggactatcctctggaggctgtgcgcatgcagcacctgatagctcgtgaggctgaggcagccatgttccaccgcaagctgtttgaagaacttgtgcgagcctcaagtcactccacagacctcatggaagccatggccatgggcagcgtggaggcttcttataagtgtttagcagcagctttgatagttctgacggagtctggcaggtctgctcaccaggtggccagataccgcccacgtgcccccatcattgctgtgacccggaatccccagacagctcgtcaggcccacctgtaccgtggcatcttccctgtgctgtgcaaggacccagtccaggaggcctgggctgaggacgtggacctccgggtgaactttgccatgaatgttggcaaggcccgaggcttcttcaagaagggagatgtggtcattgtgctgaccggatggcgccctggctccggcttcaccaacaccatgcgtgttgttcctgtgccgtgatggaccccagagcccctcctccagcccctgtcccacccccttcccccagcccatccattaggccagcaacgcttgtagaactcactctgggctgtaacgtggcactggtaggttgggacaccagggaagaagatcaacgcctcactgaaacatggctgtgtttgcagcctgctctagtgggacagcccagagcctggctgcccatcatgtggccccacccaatcaagggaagaaggaggaatgctggactggaggcccctggagccagatggcaagagggtgacagcttcctttcctgtgtgtactctgtccagttcctttagaaaaaatggatgcccagaggactcccaaccctggcttggggtcaagaaacagccagcaagagttaggggccttagggcactgggctgttgttccattgaagccgactctggccctggcccttacttgcttctctagctytytaggcctctccagtttgcacctgtccccaccctccactcagctgtcctgcagcaaacactccaccctccaccttccattttcccccactactgcagcacctccaggcctgttgctatagagcctacctgtatgtcaataaacaacagctgaagcacct

SEQ ID NO: 3090 - DNA, 2392 bp, Homo sapiens
agcgggataaccttgaggctgaggcagtggctccttgcacagcagctgcacgcgccgtggctccggatctcttcgtctttgcagcgyagcccgagtcggtcagcgccggagatgactcaacctttcaattattctgcttttgagagaattatcttcgctgggacctcagcagccatgtcgaagccccatagtgaagccgggactgccttcattcagacccagcagctgcacgcagccatggctgacacattcctggagcacatgtgccgcctggacattgattcaccacccatcacagcccggaacactggcatcatctgtaccattggcccagcttcccgatcagtggagacgttgaaggagatgattaagtctggaatgaatgtggctcgtctgaacttctctcatggaactcatgagtaccatgcggagaccatcaagaaygtgcgcacagccacggaaagctttgcttctgaccccatcctctaccggcccgttgcygtggctctagacactaaaggacctgrgatccgaactgggctcatcaagggcagcggcactgcagaggtggagctgaagaagggagccactctcaaaatcacgctggataacgcctacatggaaaagtgtgacgagaacatcctgtggctggactacaagaacatctgcaaggtggtggaagtgggcagcaagatctacgtggatgatgggcttatttctctccaggtgaagcagaaaggtgccgacttcctggtgacggaggtggaaaatggtggctccttgggcagcaagaagggtgtgaaccttcctggggctgctgtggacttgcctgctgtgtcggagaaggacatccaggatctgaagtttggggtcgagcaggatgttgatatggtgtttgcgtcattcatccgcaaggcatctgatgtccatgaagttaggaaggtcctgggagagaagggaaagaacatcaagattatcagcaaaatcgagaatcatgagggggttcggaggtttgatgaaatcctggaggccagtgatgggatcatggtggctcgtggtgatctaggcattgagattcstgcagagaaggtcttccttgctcagaagatgatgattggacggtgcaaccgagctgggaagcctgtcatctgtgctactcagatgctggagagcatgatcaagaagccccgccccactcgggctgaaggcagtgatgtggccaatgcagtcctggatggagccgactgcatcatgctgtctggagaaacagccaaaggggactatcctctggaggctgtgcgcatgcagcacctgattgcccgtgaggcagaggctgccatctaccacttgcaattatttgaggaactccgccgcctggcgcccattaccagcgaccccacagaagccaccgccgtgggtgccgtggaggcctccttcaagtgctgcagtggggccataatcgtcctcaccaagtctggcaggtctgctcaccaggtggccagataccgcccacgtgcccccatcattgctgtgacccggaatccccagacagctcgtcaggcccacctgtaccgtggcatcttccctgtgctgtgcaaggacccagtccaggaggcctgggctgaggacgtggacctccgggtgaactttgccatgaatgttggcaaggcccgaggcttcttcaagaagggagatgtggtcattgtgctgaccggatggcgccctggctccggcttcaccaacaccatgcgtgttgttcctgtgccgtgatggaccccagagcccctcctccagcccctgtcccacccccttcccccagcccatccattaggccagcaacgcttgtagaactcactctgggctgtaacgtggcactggtaggttgggacaccagggaagaagatcaacgcctcactgaaacatggctgtgtttgcagcctgctctagtgggacagcccagagcctggctgcccatcatgtggccccacccaatcaagggaagaaggaggaatgctggactggaggcccctggagccagatggcaagagggtgacagcttcctttcctgtgtgtactctgtccagttcctttagaaaaaatggatgcccagaggactcccaycyctggcttggggtcaagaaacagccagcaagagttaggggccttagggcactgggctgttgttccattgaagccgactctggccctggcccttacttgcttctctagctctctaggcctctccagtttgcacctgtccccaccctccactcagctgtcctgcagcaaacactccaccctccaccttccattttcccccactactgcagcacctccaggcctgttgctatagagcctacctgtatgtcaataaacaacagctgaagcacct

SEQ ID NO: 3091 - DNA, 2498 bp, Homo sapiens
ccaccgaaagggcaacctgcccgcgcgttccgccrccgccgccgcgcttcctcctgaaggtgactgcgcccgcggggacgcagggggcggggcccgggtcgcccggagccgggattgggcagagggcggggcggcggagggattgcggcggcccgcagcgggataaccttgaggctgaggcagtggctccttgcacagcagctgcacgcgccgtggctccggatctcttcgtctttgcagcgtagcccgagtcggtcagcgccggaggacctcagcagccatgtcgaagccccatagtgaagcygggactgccttcattcagacccagcagctgcacgcagccatggctgacacattcctggagcacatgtgccgcctggacattgattcaccacccatcacagcccggaacactggcatcatctgtaccattggcccagcttcccgatcagtggagacgttgaaggagatgattaagtctggaatgaatgtggctcgtctgaacttctctcatggaactcatgagtaccatgcggagaccatcaagaatgtgcgcacagccacggaaagctttgcttctgaccccatcctctaccggcccgttgctgtggctctagacactaaaggacctgagatccgaactgggctcatcaagggcagyggcactgcagaggtggagctgaagaagggagccactctcaaaatcacgctggataaygcctacatggaaaagtgtgacgagarcatcctgtggctggactacaagaacatctgcaaggtggtggaagtgggcagcaagatctacgtggatgatgggcttatttctctccaggtgaagcagaaaggtgccgacttcctggtgacggaggtggaaaatggtggctccytgggcagcaagaagggtgtgaaccttcctggggctgctgtggacttgcctgctgtgtcggagaaggacatccaggatctgaagtttggggtcgagcaggatgttgatatggtgtttgcgtcattcatccgcaaggcatctgatgtccatgaagttaggaaggtcctgggagagaagggaaagaacatcaagattatcagcaaaatcgagaatcatgagggggttcggaggtttgatgaaatcctggaggccagtgatgggatcatggtggctcgtggtgatctaggcattgagattcctgcagagaaggtcttccttgctcagaagatgatgattggacggtgcaaccgagctgggaagcctgtcatctgtgctactcagatgctggagagcatgatcaagaagccccsscccactcgggctgaaggcagtgatgtggccaatgcagtcctggatggagccgactgcatcatgctgtctggagaaacagccaaaggggactatcctctggaggctgtgcgcatgcagcacctgattgcccgtgaggcagaggctgccatctaccacttgcaattatttgaggaactccgccgcctggcgcccattaccagcgaccccacagaagccaccgccgtgggtgccgtggaggcctccttcaagtgctgcagtggggccataatcgtcctcaccaagtctggcaggtctgctcaccaggtggccagataccgcccacgtgcccccatcattgctgtgacccggaatccccagacagctcgtcaggcccacctgtaccgtggcatcttccctgtgctgtgcaaggacccagtccaggaggcctgggctgaggacgtggacctccgggtgaactttgccatgaatgttggcaaggcccgaggcttcttcaagaagggagatgtggtcattgtgctgaccggatggcgccctggctccggcttcaccaacaccatgcgtgttgttcctgtgccgtgatggaccccagagcccctcctccagcccctgtcccacccccttcccccagcccatccattaggccagcaacgcttgtagaactcactctgggctgtaacgtggcactggtaggttgggacaccagggaagaagatcaacgcctcactgaaacatggctgtgtttgcagcctgctctagtgggacagcccagagcctggctgcccatcatgtggccccacccaatcaagggaagaaggaggaatgctggactggaggcccctggagccagatggcaagagggtgacagcttcctttcctgtgtgtactctgtccagttcctttagaaaaaatggatgcccagaggactcccaaccctggcttggggtcaagaaacagccagcaagagttaggggccttagggcactgggctgttgttccattgaagccgactctggccctggcccttacttgcttctctagctytytaggcctctccagtttgcacctgtccccaccctccactcagctgtcctgcagcaaacactccaccctccaccttccattttcccccactactgcagcacctccaggcctgttgctatagagcctacctgtatgtcaataaacaacagctgaagcacct

SEQ ID NO: 3092 - DNA, 2117 bp, Homo sapiens
ggcagtggctccttgcacagcagctgcacgcgccgtggctccggatctcttcgtctttgcagcgtagcccgagtcggtcagcgccggaggtgagcgccatgtcgaagccccatagtgaagcygggactgccttcattcagacccagcagctgcacgcagccatggctgacacattcctggagcacatgtgccgcctggacattgattcaccacccatcacagcccggaacactggcatcatctgtaccattggcccagcttcccgatcagtggagacgttgaaggagatgattaagtctggaatgaatgtggctcgtctgaacttctctcatggaactcatgagtaccatgcggagaccatcaagaatgtgcgcacagccacggaaagctttgcttctgaccccatcctctaccggcccgttgctgtggctctagacactaaaggacctgagatccgaactgggctcatcaagggcagyggcactgcagaggtggagctgaagaagggagccactctcaaaatcacgctggataaygcctacatggaaaagtgtgacgagarcatcctgtggctggactacaagaacatctgcaaggtggtggaagtgggcagcaagatctacgtggatgatgggcttatttctctccaggtgaagcagaaaggtgccgacttcctggtgacggaggtggaaaatggtggctccytgggcagcaagaagggtgtgaaccttcctggggctgctgtggacttgcctgctgtgtcggagaaggacatccaggatctgaagtttggggtcgagcaggatgttgatatggtgtttgcgtcattcatccgcaaggcatctgatgtccatgaagttaggaaggtcctgggagagaagggaaagaacatcaagattatcagcaaaatcgagaatcatgagggggttcggaggcagtttgatgaaatcctggaggccagtgatgggatcatggtggctcgtggtgatctaggcattgagattcctgcagagaaggtcttccttgctcagaagatgatgattggacggtgcaaccgagctgggaagcctgtcatctgtgctactcaggcatatgctggagagcatgatcaagaagccccsscccactcgggctgaaggcagtgatgtggccaatgcagtcctggatggagccgactgcatcatgctgtctggagaaacagccaaaggggactatcctctggaggctgtgcgcatgcagcacctgatagctcgtgaggctgaggcagccatgttccaccgcaagctgtttgaagaacttgtgcgagcctcaagtcactccacagacctcatggaagccatggccatgggcagcgtggaggcttcttataagtgtttagcagcagctttgatagttctgacggagtctggcaggtctgctcaccaggtggccagataccgcccacgtgcccccatcattgctgtgacccggaatccccagacagctcgtcaggcccacctgtaccgtggcatcttccctgtgctgtgcaaggacccagtccaggaggcctgggctgaggacgtggacctccgggtgaactttgccatgaatgttggcaaggcccgaggcttcttcaagaagggagatgtggtcattgtgctgaccggatggcgccctggctccggcttcaccaacaccatgcgtgttgttcctgtgccgtgatggaccccagagcccctcctccagcccctgtcccacccccttcccccagcccatccatggtaggttgggacaccagggaagaagatcaacgcctcactgaaacatggctgtgtttgcagcctgctctagtgggacagcccagagcctggctgcccatcatgtggccccacccaatcaagggaagaaggaggaatgctggactggaggcccctggagccagatggcaagagggtgacagcttcctttcctgtgtgtactctgtccagttcctttagaaaaaccgactctggccctggcccttacttgcttctctagctytytaggcctctccagtttgcacctgtccccaccctccactcagctgtcctgcagcaaacactccaccctccaccttccattttcccccactactgcag

SEQ ID NO: 3093 - DNA, 384 bp, Homo sapiens
atggcccacggggcggtagacaccaccgggaaaggcggctgggccggcaggggcccacgaagcaccgtgtggcasagcaggggctgggccggcagaggcccacgaagcaccgtgtggcagagcaggggcagggccttacctttcaggtcctccacccgggggctgcttggacggctgagcgagaagctggtcttggcggccaacctgccccccaacaccacctcgtgggacacaaccctgcggccacyggtttctggaaggaagggagggaggggaggagggtgtgaagtagctggctcagacccctgccccgcctgctctcccacccaccctgccctcctcagacctctgcctcaactccccctttctgggacagcaccccac

SEQ ID NO: 3094 - DNA, 1170 bp, Homo sapiens
gagcctgtccggcccccgcccgctccggagcaacccgcgagcttacaccggcttctctctgtcctcagcccgcgcgccgccatcgccgtcatgctgggcgccgctctccgccgmtgcgctgtggccgcaaccacccgggccgaccctcgaggcctcctgcactccgcccggacccccggccccgccgtggctatccagtcagttcgctgctattcccatgggtcacargagacagatgaggagtttgatgctcgctgggtaacatacttcaacaagccagatatagatgcctgggaattgcgtaaagggataaacacacttgttacctatgatatggttccagagcccaaaatcattgatgctgctttkcgggcatgcagacggttaaatgattttgctagtacagttcgtatcctagaggttgttaakgacaaagcaggacctcataaggaaatctacccctatgtcatccaggaacttagaccaactttaaatgaactggraatctccactccggaggaactgggccttgacaaagtgtaaaccgcatggatgggcttccccaaggatttattgacattgctacttgagtgtgaacagttacctggaaatactgatgataacatattaccttatttgaacaagttttcctttattgagtaccaagccatgtaatggtaacttggactttaataaaagggaaatgagtttgaactgaaattaggtatttgtttcatgtgtttgcattaataagcagaaaattaagtgctgtattggtttcatggttttgctgccctcttacatgctgagagaactgtgttaattctctggaaaccatctgacatgaaaatcagcttcattaatatgtttgggtgccctagcttgtaaattagctgaaggctagaagtcatttatatagaattttcttgttgacaccctaggcttaggggactggttgtctgtggggatagatcaaatygtgtacctttccaaaacaggttttaatgatgtttaaaagtggtcactgagatagtcttgaggatgtgctatgcagtagccaagccctcttacggtgtgttcctctcttagtgcccctttcctttcctacctrttcttcccttgcagtggtgtattagccttggacattaaaacatttgctttgtaaatttg

SEQ ID NO: 3095 - DNA, 849 bp, Homo sapiens
atgaacctggcacctctcgagtgccaggccactgcagggtcacgatgctcttggccatcaggaggaagtacctgcagcgccggtgcctcgaggcactgcttcacgggctgcggggttcccagcaggccaggtgcctggcagtggcatggcagcactgggtggatgcccaaggggcagagcagctggtgcggaccctgccagccttccagaagtctgtgccacagccrcgcaccgtggagctttccctgcttgccagccccggggccccttcgttttcaggggaggggggaacggggcagcatcaggcctccacagccaggcaaaaggggaaggccacgagccccaccaagcacaagggttcagactgccttcaacccttaaggggcactttttctctcaaggctcagaatagacaactgtgccaaaaagcagcatggtaggtgtcagcccaatgcccatccagggggctggtgccatggacggctaagtgggcaggcagggcagtggtgtgccccttcagtcacaagtaggtggggcccagctgcccacctctaggaggtggaagggtacagcactttgccacatctcttctacgatgccaccagtgcctgatgcccttgcgtgttttgcctgtactgcacgggctccaagkgtaagttcactgggagtcccaggctggctctggaggctgccttggttcgagggcttagttggcaacaaccactctcctcgccttctcaggaggtgccacccactgtggtcctctgcaggacgcaagtgctccccaccaaaagagcacagactcctggctagagcagagagtactaggttcccatgtggggccgactc

SEQ ID NO: 3096 - DNA, 1152 bp, Homo sapiens
atgcagacctttctgaaagggaagagagttggctactggctgagcgagaagaaaatcaagaagctgaatttccaggccttcgccgagctgtgcagagcctcgcagcagccctgcaaattggccagggtggtgattctgggccacctgtctgagaacggggaccgatcggcagaggagcgggggcagtgccccctggtggccacatttctatactggctgcaaaatgctgcaactgttgagccagtgaccagggagccccggacctttggcctttgtagatttagtgttcttggttttggcagtttgcaagtcaccctgaaggccacgatggctgaactgatcatcttgcagggatattttaaagtcctaacattcgtcatgggatccttgaaaagaaaaggaattatggccttgccactagaggcctttgccgcctccctgcaggaaggtgtgtcccgcggcattgggatcgtgttggagaaaggttttgcttcctgcacatgggtcccgtccccacgctgtgactgccaggtgtggacacaygctcgtcaagtggtgaagaacgtggagccgccaaggcttccaggcctggagcctttggtctccagcacccagttcccccacatcccttccctgggcttctttcccrccattcccatcagggacccctgyggccatgctgggctgtacccagtgccccttgggaatctgcgggccagcccagtgcgtgacagagaagcccagcaaatgtttgaccaaaatcagaccaggaaactctcgctgcctgtggttggaggtgcagcagcagggcaaagacaactaaactttaagggcttgggatccagggaccaggagctgcccccagccctcaggccaggaggggacatggtcacctctgttcacatctcattgcccaaggcaagtcctgtggccatgcctgactgggggcagggacaacacagtggcactgagtgtccaggagggaaattgccggctttgatggccaccattgatgttcaccaccgagcattagcctgcaaatcagatcctgcttccactggtcacagagaagcacatggagtcgctcttgtggacaagcagctgtccccatacccagctgctcctgagcaacacccggagtgcgatgaaccc

SEQ ID NO: 3097 - DNA, 3529 bp, Homo sapiens
ggcggcggcgggcaggggcggcgagtgcgcgggcgctcgccgccgcccttctcggcgggcagcgcgcgaggaccaggccgaggaggaagtggcggcggcggcggcggactcggcctgtgggcgatttcctccggacccaggctccccgcccgaggaggaagatgcagacctttctgaaagggaagagagttggctactggctgagcgagaagaaaatcaagaagctgaatttccaggccttcgccgagctgtgcaggaagcgagggatggaggttgtgcagctgaaccttagccggccgatcgaggagcagggccccctggacgtcatcatccacaagctgactgacgtcatccttgaagccgaccagaatgatagccagtccctggagctggtgcacaggttccaggagtacatcgatgcccaccctgagaccatcgtcctggacccgctccctgccatcagaaccctgcttgaccgctccaagtcctatgagctcatccggaagattgaggcctacatggaagacgacaggatctgctcgccacccttcatggagctcacgagcctgtgcggggatgacaccatgcggctgctggagaagaacggcttgactttcccattcatttgcaaaaccagagtggctcatggcaccaactctcacgagatggctatcgtgttcaaccaggagggcctgaacgccatccagccaccctgcgtggtccagaatttcatcaaccacaacgccgtcctgtacaaggtgttygtggttggcgagtcctacaccgtggtccagaggccctcactcaagaacttctccgcaggcacatcagaccgtgagtccatcttcttcaacagccacaacgtgtcaaagccggagtcgtcatcggtcctgacggagctggacaagatcgagggcgtgttcgagcggccgagcgacgaggtcatccgggagctctcccgggccctgcggcaggcactgggcgtgtcactcttyggcatcgacatcatcatcaacaaccagacagggcagcacgccgtcattgacatcaatgccttcccaggctacgagggcgtgagcgagttcttcacagacctcctgaaccacatcgccactgtcctgcagggccagagcacagccatggcagccacaggggacgtggccctgctgaggcacagcaagcttctggccgagccggcgggcggcctggtgggcgagcggacatgcagcgccagccccggctgctgcggcagcatgatgggccaggacgcgccctggaaggctgaggccgacgcgggcggcaccgccaagctgccgcaccagagactcggctgcaacgccggcgtgtcgcccagcttccagcagcattgtgtggcctccctggccaccaaggcctcctcccagtagccacggagccgggacccagaggggcagcgcagggcgcagagcacacccgctgggccagcagctcccaacggcgatgctactactaagaatccccagtgatctgattcttctgttttttaatttttaacctgattytctgatgtcatgatctaaatgaggggtagtgggggatggaagagagtaccaggtggtccaccgttggggagtggggccgtccgcctgctctctactgtgcagacctcctaactgagtttacacacgcttgtgtttgcaacactaggtctggatgrgaggtgaggggtgtgcgtatggctgccatgccrgtgtctgtgcacatccctgtctgttggtctccatggccactgtggacygggacccttgggggaagcctgcccatgtcgggctgtgggaggctgatcrgtgcrtgtgagagtggcttcccttctgcctgactccccactccctgacctgccccttccttgtttttcctcctactggtctccaccaaggctttgttagcccccaccctgcctggtgtgcagctaacccckgtctgggctgtgctccctcactaaagggaaggaaaggaagctgggcgtcctcygggccccccaacacacgtcccatttagccctgcacagcggtctccttcccctaagccagcactgctgctccctggagcccgggaaggaggctgcctggctggaggcccgagccratggcgcctgtgctgaggatttgtgctgtgatttgggcaaatcattccaggtctttgggcctccaccccctygtctctagtggacatttgagatcagagagcaccacagggctggctttgtgccctaacccctgggatgcagcctgcctttccataaagtcacctaggtgaggataggcgcgggagcctcggcatgacaccatggagatcggggccctcttcccagtgggttcactccttttcacacctgctgggtccctcctcacccagcaggcctggtccacctctcattgcaagccccaagcactgagccagcaggtgccagggagccacccgccccccatmgcttctgcacacctcagactcaccccatcaccttggcagcaaagcactggctctgccgtctgacccctgatccaggcagccccctcygcagagaaaagggttggggagaagcctctgcagtcctggaagatgtggggtgctgggtgagaggcatcagcccccacaagtatgtttttgtgtcttaagatagcagtttactttgaaaaagtgaaaaaggcttccgggctgtcctctgcccagtgagatggaggacgctagagaaagtgctgagtgtcccgagagaggccmccgagccagtgcatggaggtccttcggcctggctcagctgggctgcaggatgcccactttgaggagggaggcacagggcttgggcgaggggcagaggccatcagaactgcccggcttttttggaaactgaggacccaacaactaaccacgtttacacgacttgagttttgaaccccgattaatgtctgtacrtcacctttcctagttctgaccctgagccctggggaacaggaaagcgtggctggcctcttgcactgctttgtctccaaaataaactactgaaatcaaaccgcatttcacacgtgtttacacatgttgctcaagtttgttatgtcatactcccagtccttaaaagacgtttaataaaacagctttaccttttaaaaataaaatttcaatcccagtctgcctcaggtacgggtgggggtgtgcagcgtgactcctggctgtgttcctgtaccgtttgtggcctccggggtcttgcgcgtccagggcccagataccgagtaactgccatgtggtgtcgtggtggcgtccataggcctccgtggtggggcgggggcggggctgtgggtgtgcagggcagctgcattttccaagagtggagatggaggatggagatttgcttcgtaaaggcctgggagctacatgggaggtagggaggggccagccacacccagggctggggggccggtggactctgcccagtgaagccaggggagtgtcagcaatgaggggcctggacagcgacgcgggacccgcacctgggagc

SEQ ID NO: 3098 - DNA, 1103 bp, Homo sapiens
ggcggcggcgggcaggggcggcgagtgcgcgggcgctcgccgccgcccttctcggcgggcagcgcgcgaggaccaggccgaggaggaagtggcggcggcggcggcggactcggcctgtgggcgatttcctccggacccaggctccccgcccgaggaggaagatgcagacctttctgaaagggaagagagttggctactggctgagcgagaagaaaatcaagaagctgaatttccaggccttcgccgagctgtgcaggaagcgagggatggaggttgtgcagctgaaccttagccggccgatcgaggagcagggccccctggacgtcatcatccacaagctgactgacgtcatccttgaagccgaccagaatgatagccagtccctggagctggtgcacaggttccaggagtacatcgatgcccaccctgagaccatcgtcctggacccgctccctgccatcagaaccctgcttgaccgctccaagtcctatgagctcatccggaagattgaggcctacatggaagacgacaggatctgctcgccacccttcatggagctcacgagcctgtgcggggatgacaccatgcggctgctggagaagaacggcttgactttcccattcatttgcaaaaccagagtggctcatggcaccaactctcacgagatggctatcgtgttcaaccaggagggcctgaacgccatccagccaccctgcgtggtccagaatttcatcaaccacaacgccgtcctgtacaaggtgttygtggttggcgagtcctacaccgtggtccagaggccctcactcaagaacttctccgcaggcacatcagaccgtgagtccatcttcttcaacagccacaacgtgtcaaagccggagtcgtcatcggtcctgacggagctggacaagatcgagggcgtgttcgagcggccgagcgacgaggtcatccgggagctctcccgggccctgcggcaggcactgggcgtgtcactcttyggcatcgacatcatcatcaacaaccagacagggcagcacgccgtcattgacatcaatgccttcccaggggactgccaagtgtgctttatagaaggctggaagaccgac

SEQ ID NO: 3099 - DNA, 3546 bp, Homo sapiens
gcggcgggcaggggcggcgagtgcgcgggcgctcgccgccgcccttctcggcgggcagcgcgcgaggaccaggccgaggaggaagtggcggcggcggcggcgggctccccgcccgaggaggaagatgcagacctttctgaaagggaagagagttggctactggctgagcgagaagaaaatcaagaagctgaatttccaggccttcgccgagctgtgcaggaagcgagggatggaggttgtgcagctgaaccttagccggccgatcgaggagcagggccccctggacgtcatcatccacaagctgactgacgtcatccttgaagccgaccagaatgatagccagtccctggagctggtgcacaggttccaggagtacatcgatgcccaccctgagaccatcgtcctggacccgctccctgccatcagaaccctgcttgaccgctccaagtcctatgagctcatccggaagattgaggcctacatggaagacgacaggatctgctcgccacccttcatggagctcacgagcctgtgcggggatgacaccatgcggctgctggagaagaacggcttgactttcccattcatttgcaaaaccagagtggctcatggcaccaactctcacgagatggctatcgtgttcaaccaggagggcctgaacgccatccagccaccctgcgtggtccagaatttcatcaaccacaacgccgtcctgtacaaggtgttygtggttggcgagtcctacaccgtggtccagaggccctcactcaagaacttctccgcaggcacatcagaccgtgagtccatcttcttcaacagccacaacgtgtcaaagccggagtcgtcatcggtcctgacggagctggacaagatcgagggcgtgttcgagcggccgagcgacgaggtcatccgggagctctcccgggccctgcggcaggcactgggcgtgtcactcttyggcatcgacatcatcatcaacaaccagacagggcagcacgccgtcattgacatcaatgccttcccaggctacgagggcgtgagcgagttcttcacagacctcctgaaccacatcgccactgtcctgcagggccagagcacagccatggcagccacaggggacgtggccctgctgaggcacagcaagcttctggccgagccggcgggcggcctggtgggcgagcggacatgcagcgccagccccggctgctgcggcagcatgatgggccaggacgcgccctggaaggctgaggccgacgcgggcggcaccgccaagctgccgcaccagagactcggctgcaacgccggcgtgtcgcccagcttccagcagcattgtgtggcctccctggccaccaaggcctcctcccagtagccacggagccgggacccagaggggcagcgcagggcgcagagcacacccgctgggccagcagctcccaacggcgatgctactactaagaatccccagtgatctgattcttctgttttttaatttttaacctgattytctgatgtcatgatctaaatgaggggtagtgggggatggaagagagtaccaggtggtccaccgttggggagtggggccgtccgcctgctctctactgtgcagacctcctaactgagtttacacacgcttgtgtttgcaacactaggtctggatgrgaggtgaggggtgtgcgtatggctgccatgccrgtgtctgtgcacatccctgtctgttggtctccatggccactgtggacygggacccttgggggaagcctgcccatgtcgggctgtgggaggctgatcrgtgcrtgtgagagtggcttcccttctgcctgactccccactccctgacctgccccttccttgtttttcctcctactggtctccaccaaggctttgttagcccccaccctgcctggtgtgcagctaacccctccctccccacagccagaggaggccacagacccctcaggggagttccgcgctggkgtctgggctgtgctccctcactaaagggaaggaaaggaagctgggcgtcctcygggccccccaacacacgtcccatttagccctgcacagcggtctccttcccctaagccagcactgctgctccctggagcccgggaaggaggctgcctggctggaggcccgagccratggcgcctgtgctgaggatttgtgctgtgatttgggcaaatcattccaggtctttgggcctccaccccctygtctctagtggacatttgagatcagagagcaccacagggctggctttgtgccctaacccctgggatgcagcctgcctttccataaagtcacctaggtgaggataggcgcgggagcctcggcatgacaccatggagatcggggccctcttcccagtgggttcactccttttcacacctgctgggtccctcctcacccagcaggcctggtccacctctcattgcaagccccaagcactgagccagcaggtgccagggagccacccgccccccatmgcttctgcacacctcagactcaccccatcaccttggcagcaaagcactggctctgccgtctgacccctgatccaggcagccccctcygcagagaaaagggttggggagaagcctctgcagtcctggaagatgtggggtgctgggtgagaggcatcagcccccacaagtatgtttttgtgtcttaagatagcagtttactttgaaaaagtgaaaaaggcttccgggctgtcctctgcccagtgagatggaggacgctagagaaagtgctgagtgtcccgagagaggccmccgagccagtgcatggaggtccttcggcctggctcagctgggctgcaggatgcccactttgaggagggaggcacagggcttgggcgaggggcagaggccatcagaactgcccggcttttttggaaactgaggacccaacaactaaccacgtttacacgacttgagttttgaaccccgattaatgtctgtacrtcacctttcctagttctgaccctgagccctggggaacaggaaagcgtggctggcctcttgcactgctttgtctccaaaataaactactgaaatcaaaccgcatttcacacgtgtttacacatgttgctcaagtttgttatgtcatactcccagtccttaaaagacgtttaataaaacagctttaccttttaaaaataaaatttcaatcccagtctgcctcaggtacgggtgggggtgtgcagcgtgactcctggctgtgttcctgtaccgtttgtggcctccggggtcttgcgcgtccagggcccagataccgagtaactgccatgtggtgtcgtggtggcgtccataggcctccgtggtggggcgggggcggggctgtgggtgtgcagggcagctgcattttccaagagtggagatggaggatggagatttgcttcgtaaaggcctgggagctacatgggaggtagggaggggccagccacacccagggctggggggccggtggactctgcccagtgaagccaggggagtgtcagcaatgaggggcctggacagcgacgcgggacccgcacctgggagc

SEQ ID NO: 3100 - DNA, 3425 bp, Homo sapiens
agcagacgcctctgccccctacacacacacacacacacacatacacacacacacatgcacgcgcacacacgcacgcacaccaagctgagctgcctgttggtgtgtcctcctgaggctgggacttgctggtctctgaggagcacgtggtctggccctgatgtgcgctgtgtctactggctgaaccttagccggccgatcgaggagcagggccccctggacgtcatcatccacaagctgactgacgtcatccttgaagccgaccagaatgatagccagtccctggagctggtgcacaggttccaggagtacatcgatgcccaccctgagaccatcgtcctggacccgctccctgccatcagaaccctgcttgaccgctccaagtcctatgagctcatccggaagattgaggcctacatggaagacgacaggatctgctcgccacccttcatggagctcacgagcctgtgcggggatgacaccatgcggctgctggagaagaacggcttgactttcccattcatttgcaaaaccagagtggctcatggcaccaactctcacgagatggctatcgtgttcaaccaggagggcctgaacgccatccagccaccctgcgtggtccagaatttcatcaaccacaacgccgtcctgtacaaggtgttygtggttggcgagtcctacaccgtggtccagaggccctcactcaagaacttctccgcaggcacatcagaccgtgagtccatcttcttcaacagccacaacgtgtcaaagccggagtcgtcatcggtcctgacggagctggacaagatcgagggcgtgttcgagcggccgagcgacgaggtcatccgggagctctcccgggccctgcggcaggcactgggcgtgtcactcttyggcatcgacatcatcatcaacaaccagacagggcagcacgccgtcattgacatcaatgccttcccaggctacgagggcgtgagcgagttcttcacagacctcctgaaccacatcgccactgtcctgcagggccagagcacagccatggcagccacaggggacgtggccctgctgaggcacagcaagcttctggccgagccggcgggcggcctggtgggcgagcggacatgcagcgccagccccggctgctgcggcagcatgatgggccaggacgcgccctggaaggctgaggccgacgcgggcggcaccgccaagctgccgcaccagagactcggctgcaacgccggcgtgtcgcccagcttccagcagcattgtgtggcctccctggccaccaaggcctcctcccagtagccacggagccgggacccagaggggcagcgcagggcgcagagcacacccgctgggccagcagctcccaacggcgatgctactactaagaatccccagtgatctgattcttctgttttttaatttttaacctgattytctgatgtcatgatctaaatgaggggtagtgggggatggaagagagtaccaggtggtccaccgttggggagtggggccgtccgcctgctctctactgtgcagacctcctaactgagtttacacacgcttgtgtttgcaacactaggtctggatgrgaggtgaggggtgtgcgtatggctgccatgccrgtgtctgtgcacatccctgtctgttggtctccatggccactgtggacygggacccttgggggaagcctgcccatgtcgggctgtgggaggctgatcrgtgcrtgtgagagtggcttcccttctgcctgactccccactccctgacctgccccttccttgtttttcctcctactggtctccaccaaggctttgttagcccccaccctgcctggtgtgcagctaacccckgtctgggctgtgctccctcactaaagggaaggaaaggaagctgggcgtcctcygggccccccaacacacgtcccatttagccctgcacagcggtctccttcccctaagccagcactgctgctccctggagcccgggaaggaggctgcctggctggaggcccgagccratggcgcctgtgctgaggatttgtgctgtgatttgggcaaatcattccaggtctttgggcctccaccccctygtctctagtggacatttgagatcagagagcaccacagggctggctttgtgccctaacccctgggatgcagcctgcctttccataaagtcacctaggtgaggataggcgcgggagcctcggcatgacaccatggagatcggggccctcttcccagtgggttcactccttttcacacctgctgggtccctcctcacccagcaggcctggtccacctctcattgcaagccccaagcactgagccagcaggtgccagggagccacccgccccccatmgcttctgcacacctcagactcaccccatcaccttggcagcaaagcactggctctgccgtctgacccctgatccaggcagccccctcygcagagaaaagggttggggagaagcctctgcagtcctggaagatgtggggtgctgggtgagaggcatcagcccccacaagtatgtttttgtgtcttaagatagcagtttactttgaaaaagtgaaaaaggcttccgggctgtcctctgcccagtgagatggaggacgctagagaaagtgctgagtgtcccgagagaggccmccgagccagtgcatggaggtccttcggcctggctcagctgggctgcaggatgcccactttgaggagggaggcacagggcttgggcgaggggcagaggccatcagaactgcccggcttttttggaaactgaggacccaacaactaaccacgtttacacgacttgagttttgaaccccgattaatgtctgtacrtcacctttcctagttctgaccctgagccctggggaacaggaaagcgtggctggcctcttgcactgctttgtctccaaaataaactactgaaatcaaaccgcatttcacacgtgtttacacatgttgctcaagtttgttatgtcatactcccagtccttaaaagacgtttaataaaacagctttaccttttaaaaataaaatttcaatcccagtctgcctcaggtacgggtgggggtgtgcagcgtgactcctggctgtgttcctgtaccgtttgtggcctccggggtcttgcgcgtccagggcccagataccgagtaactgccatgtggtgtcgtggtggcgtccataggcctccgtggtggggcgggggcggggctgtgggtgtgcagggcagctgcattttccaagagtggagatggaggatggagatttgcttcgtaaaggcctgggagctacatgggaggtagggaggggccagccacacccagggctggggggccggtggactctgcccagtgaagccaggggagtgtcagcaatgaggggcctggacagcgacgcgggacccgcacctgggagc

SEQ ID NO: 3101 - DNA, 1251 bp, Homo sapiens
gttcagggcggggccggtcggtgagtcagcggctctctgatccagccmgggagaggaccgagctggaggagctgggtgtggggtgcgttgggctggtggggaggcctagtttgggtgcaagtaggtctgattgagcttgtgttgtgctgaagggacagccctgggtctaggggagagagtccctgagtgtgagacccgccttccccggtcccagcccctcccagttcccccagggacggccacttcctggtccccgacgcaaccatggctgaagaacaaccgcaggtcgaattgttcgtgaaggctggcagtgatggggccaagattgggaactgcccattctcccagagactgttcatggtactgtggctcaagggagtcaccttcaatgttaccaccgttgacaccaaaaggcggaccgagacagtgcagaagctgtgcccaggggggcagctcccattcctgctgtatggcactgaagtgcacacagacaccaacaagattgaggaatttctggaggcagtgctgtgccctcccaggtaccccaagctggcagctctgaaccctgagtccaacacagctgggctggacatatttgccaaattttctgcctacatcaagaattcaaacccagcactcaatgacaatctggagaagggactcctgaaagccctgaaggttttagacaattacttaacatcccccctcccagaagaagtggatgaaaccagtgctgaagatgaaggtgtctctcagaggaagtttttggatggcaacgagctcaccctggctgactgcaacctgttgccaaagttacacatagtacaggtggtgtgtaagaagtaccggggattcaccatccccgaggccttccggggagtgcatcggtacttgagcaatgcctacgcccgggaagaattcgcttccacctgtccagatgatgaggagatcgagctcgcctatgagcaagtggcaaaggccctcaaataagcccctcctgggactccctcaaccccctccattttctccacaaaggccctggtggtttccacattgctacccaawggacacactccaaaatggccagtgggcagggaatcctggagcacttgttccgggatggtgtggtggaagaggggatgagggaaagaaatggrgggcctgggtcagatttttattgtggggtgggatgagtaggacaacatatttcagtaataaaatacagaataaaaatcaagtgtttttacgcaa

SEQ ID NO: 3102 - DNA, 2739 bp, Homo sapiens
ggctaacctgttgtaagcccgcagctttgggcctggtctctgctgctcccaggcggcccctttgggtactgcctgagcaagaagtgctggagaggaggaccagtcatcaatrggaggatgagattgggagagacactcggtrcaggaggctgagtgagcaggggagcactaagacccagrggtagtggaggactgcagcaacgagctggaggaggagaagtaagcggtggggggtgggagccatctggtactttgacagcattcaaaacagcatcggccataacaacagaaatggccagtcagtcccaaggtatccagcagcttctgcaagctgagaagcgggcagctgagaaggtggcagatgccagaaagaggaaggcccggcgactgaagcaggcaaaggaggaggcacagatggaggtggagcaataccgcagagagcgagagcacgaattccagagcaagcagcaggcgacaggcattttccaaaggcaagcctggagcgcacggatctgtataaccgcggaaggccctgtttccggtcccttgcgcctgcgctcttgcagccaagaaggcgggaggctggagtagagggaagcctgcaaccggaagtgaaggcasatttccctccttcgtcgctgttgctgccgccatacgcgctctccctgtttagctcttctgttagaaatagtatctttgttttcctttgctgttcctcaatcccctactcttcaccccttgttttcacctattttgcgagaacccatccagatcccccttcccttcttcccctgccggcccagttatggcagagaacgatgtggacaatgagctcttggactatgaagatgatgaggtggagacagcagctgggggagatggggctgaggcccctgccaagaaggatgtcaagggctcctatgtctccatccacagctctggctttcgtgacttcctgctcaagccagagttgctccgggccattgtcgactgtggctttgagcatccgtcagaagtccagcatgagtgcatccctcaggccattctgggaatggatgtcctgtgccaggccaagtcgggcatgggaaagacagcagtgtttgtcttggccacactgcaacagctggagccagttactgggcaggtgtctgtrctggtgatgtgtcacactcgggagttggcttttcagatcagcaaggaatatgagcgcttctctaaatacatgcccaatgtcaaggttgctgttttttttggtggtctgtctatcaagaaggatgaagaggtgctgaagaagaactgcccgcatatcgtcgtggggactccaggccgtatcctagccctggctcgaaataagagcctcaacctcaaacacattaaacactttattttggatgaatgtgataagatgcttgaacagctcgacatgcgtcgggatgtccaggaaatttttcgcatgaccccccacgagaagcaggtcatgatgttcagtgctaccttgagcaaagagatccgtccagtctgccgcaagttcatgcaagatccaatggagatcttcgtggatgatgagacgaagttgacgctgcatgggttgcagcagtactacgtgaaactgaaggacaacgagaagaaccggaagctctttgaccttctggatgtccttgagttcaaccaggtggtgatctttgtgaagtctgtgcagcggtgcattgccttggcccagctactagtggagcagaacttcccagccattgccatccaccgtgggatgccccaggaggagaggctttctcggtatcagcagtttaaagattttcaacgacgaattcttgtggctaccaacctatttggccgaggcatggacatcgagcgggtgaacattgcttttaattatgacatgcctgaggattctgacacctacctgcatcgggtggccagagcaggccggtttggcaccaagggcttggctatcacatttgtgtccgatgagaatgatgccaagatcctcaatgatgtgcaggatcgctttgaggtcaatattagtgagctgcctgatgagatagacatctcctcctacattgaacagacacggtagaagactckcccattttggaatgtgaccgtctgtccttcaggagaggacaccagggtgggggtgaaggagacactactgcccccacccctgacagcccccaccccatggcttccatcttttgcatcaccaccactcctgaacccccatttytgatttgtcagaatttttttttaacaaaactaaaaatgaaacacatgtgtctgtggtatctataagtgcttcgtccctttattgtatttggggtgaggttattttagggcatggtccagggtgaattcctataaggcctgggtgccctgcctgctgtgagatcaaaggggaatgggactaagactgcagagccctggctcccccactgcctgccaattgcctgcgstttgtggtctcttccactttctctggcctgggaagacgctggggtgtttatgatcccaaggctcctggtgggtggtgcgtgtattttcagygccggagggtgctgtgggcactgggggaaacttaggcrcctcctccaaggctctcttggtgcctcctcatctgttccttcagcttctggatcttgagcaccagggcttgggcctcccaggctccctcctgcccttcaaggagggcctggtacagctccagctgctgctccaacaactctt

SEQ ID NO: 3103 - DNA, 1449 bp, Homo sapiens
ctaacctgttgtaagcccgcagctttgggcctggtctctgctgctcccaggcggcccctttgggtactgcctgagcaagaagtgctggagaggaggaccagtcatcaatrggaggatgagattgggagagacactcggtrcaggaggctgagtgagcaggggagcactaagacccagrggtagtggaggactgcagcaacgagctggaggaggagaaggaaggcccggcgactgaagcaggcaaaggaggaggcacagatggaggtggagcaataccgcagagagcgagagcacgaattccagagcaagcagcaggcggccatgggctcccaggggaacctgtctgctgaggtggagcaggctacaaggcgccaggtgcagggcatgcagagctcccagcagagaaaccgagagcgtgtcctggcccagcttcttggcatggtctgcgacgtcaggccccaggtccaccccaactaccggatttctgcctagggccaccgtagggcctgactccttctgccagttccctccctcaaagaaatcctccaatcaaaatcacctcccaccataatccctgtcttctttccatcccctagaaatcctgggaggcaggatccaataattttcctgtgacacttataaatatcctgctcacatctgaatctccttgttgttctttaaccctcactgggactttgtaaacttccaagtcattctcacctaaaccctctgtgaaatttgtaatatggggaagtaggaatgtggaaaacatcctgacttcagtgtctggccgatgtgggtccctctcttgaccctgtcacttgctggctgtgaaaccaggacaagctacttaacttggtagcctcgatgtcctcctytgtgaaactgggatgataataatgcctaccttgtgagggttgcttcaatgattaggaatcattctgtaaagtctagcasagttccttgcatgttgtagcagtgattcagtaagtagcaaccctgtgatactattaccaccacctgctcactggtcaaaacctacacagctgtttcctcacgtccatcactggctctctaattccacttgttcattctgtgaccctagttattttctgaaaaattggttcttctcttttcccagagaccttctgatctccaaaaagaggagatgactacatttagcccctctcttataattccaggtagataactgcattttgtagcctctctttgtttttcttttgctgatctttgtctttattagattttcctcctttcctatttccccaaagacttatcagatgctcattgctttctaagatctaaaatgatactgtgttccctcatatgcatgcccttcctttctatatccttgacaccttactttcccattgtaacaataaaaaaagtatcaataaaataattattggcaaataaattggtgagttg

SEQ ID NO: 3104 - DNA, 2790 bp, Homo sapiens
ctcagctagggcctgccggttcctagtgcgtgcccagcagtcctcaggtcaccttcactaccgggccaaggaccccgtgggaactcgcagccttcgccacactcgttcctcgcgcatccayggaggggtgcctacagagaagacctgcgtggcaaaaacctaaacgaagagatgaggggcatggagaggagtaggataagagaataaagataacagtggggggsagacgttagtttcctttatatcttttgttactggmggtagcagtgaagttagaaacggttttaaaacaaatttcagacaggcattttccaaaggcaagcctggagcgcacggatctgtataaccgcggaaggccctgtttccggtcccttgcgcctgcgctcttgcagccaagaaggcgggaggctggagtagagggaagcctgcaaccggaagtgaaggcasatttccctccttcgtcgctgttgctgccgccatacgcgctctccctgtttagctcttctgttagaaatagtatctttgttttcctttgctgttcctcaatcccctactcttcaccccttgttttcacctattttgcgagaacccatccagatcccccttcccttcttcccctgccggcccagttatggcagagaacgatgtggacaatgagctcttggactatgaagatgatgaggtggagacagcagctgggggagatggggctgaggcccctgccaagaaggatgtcaagggctcctatgtctccatccacagctctggctttcgtgacttcctgctcaagccagagttgctccgggccattgtcgactgtggctttgagcatccgtcagaagtccagcatgagtgcatccctcaggccattctgggaatggatgtcctgtgccaggccaagtcgggcatgggaaagacagcagtgtttgtcttggccacactgcaacagctggagccagttactgggcaggtgtctgtrctggtgatgtgtcacactcgggagttggcttttcagatcagcaaggaatatgagcgcttctctaaatacatgcccaatgtcaaggttgctgttttttttggtggtctgtctatcaagaaggatgaagaggtgctgaagaagaactgcccgcatatcgtcgtggggactccaggccgtatcctagccctggctcgaaataagagcctcaacctcaaacacattaaacactttattttggatgaatgtgataagatgcttgaacagctcgacatgcgtcgggatgtccaggaaatttttcgcatgaccccccacgagaagcaggtcatgatgttcagtgctaccttgagcaaagagatccgtccagtctgccgcaagttcatgcaagatgtaaatacccttctaccttctctccctccactccccgcccgctgcctcctccccttcctcgccctcttcctcagactcccttgtcattcaagtgccaagaaggcggcttgtgcccaactgggagtaatgactccttgaagagacatacagaagcagagacagctagtgttagggcctgcgcgggtgccagggaaactccggaagacttggtcgggttaatgtgagagcgggtagtgttcgactttttcataaatcacaacatttttgaacctcttctcccttygggggagggcaggatttttctgccctaccacccacccatccatcgtctcttacatgcaccctacagccacgcaccctcaaggtggcatcgagcrtacagctggagccttctgctcaccaaaactcctacttcccggtggcaggagagcaagagagggacagacagatggcagggcatgtccaaaagaagagcatcagcacaaatgaatcctccccttccccacctccaggggtgggggcctttggcacctcaatccccgataccctactccttcccacccacatctccttgcacccatctggaacctcggttgatgtgagccggcaacagagaagcaccgtggcgcggcgagggaatgcagacggcacccagcggtggatggcggcagcggaggccgcggggaaacctgaccaggaagctgaggaccaaaccagcctctttttccgttcccggtttttttcctgaacccaacgcgtgccgtgccccgtttcccccaatatgtgttggggaggggtgtcctgaatggggtggtagattttttttcttaaaaaaatttttttgttttttttaatactcagaggagagggacataggaaaggtaaagtggatgtaatcgggtggttgttagggtttggggctaggtggggccaattgcataagcagtggagtgtgttcttcccctccctgcagtgttccttcccgtgggatgatcactctttagctgtatttggggctagaatgagatttgaaggaggccatggaacttctctttagaaagcctgccttggctgggcctggtggctcacctctaatcccagcactttgggaggccaaggtgggaggattgcttgagcccaggaatttgagactagctggggcagtgtagtgagactttgtctctaccagaaaaaccgggcgtggtggcgcatgcctgtagtcccagctacttgggaagctgaggcaggagggtttgcttgagcccgggacgtggaggtggcagtaagctgtaattgtgccactgtactccagcctgggtgatagagtgagaccctgtatcaaaacaaaacaaaaaacaaaacctgccttctgggattgggcttctggtttttttcccatgacacacrcatcctttcctattttg

SEQ ID NO: 3105 - DNA, 876 bp, Homo sapiens
ggctaacctgttgtaagcccgcagctttgggcctggtctctgctgctcccaggcggcccctttgggtactgcctgagcaagaagtgctggagaggaggaccagtcatcaatrggaggatgagattgggagagacactcggtrcaggaggctgagtgagcaggggagcactaagacccagrggtagtggaggactgcagcaacgagctggaggaggagaagtaagcggtggggggtgggagccatctggtactttgacagcattcaaaacagcatcggccataacaacagaaatggccagtcagtcccaaggtatccagcagcttctgcaagctgagaagcgggcagctgagaaggtggcagatgccagaaagaggaaggcccggcgactgaagcaggcaaaggaggaggcacagatggaggtggagcaataccgcagagagcgagagcacgaattccagagcaagcagcaggcggtgagttgaggcagagtcgggwtgagaccccactgcaagttggtgggtgcatctagtgaggtgtgtaagggtgactcaacaagaaaatatggtggcagagggctgaggctgaggggaccctggcagggaccacaacattggtgaaactttgtgatgatatgtaggagagtctgggagttttgaaggccacatagagcttgtgggcggaatgccacagtctgtgtaaagtataacatctatgtggagtatgattaacatttgtggtggagggtagagttttatggtcatggatggtgaggtggtggggatattacggtctgttttagkatgaagttgcatgttaggtctaaggggaaaggggactgtgttgatctctttggtgttgggatatttctgtgggat

SEQ ID NO: 3106 - DNA, 2659 bp, Homo sapiens
gsagacgttagtttcctttatatcttttgttactggmggtagcagtgaagttagaaacggttttaaaacaaatttcagacaggcattttccaaaggcaagcctggagcgcacggatctgtataaccgcggaaggccctgtttccggtcccttgcgcctgcgctcttgcagccaagaaggcgggaggctggagtagagggaagcctgcaaccggaagtgaaggcasatttccctccttcgtcgctgttgctgccgccatacgcgctctccctgtttaggtaagctttggccttcgctacaatccgtttccatctgcgcttctccgcacccatcccgtcacatgggttcctgatacccttttcacaggcgatggtctggtcgctggggcctagttggttcgctatttccttagcttgcatccctttcgagagcaaagagctcctgggggaaggaagggaagctaaggggggacccaatccaagatggtgtcctcggcgccattgtgttcgttttgctcccttcttccaatgggttcttctcatattggaggcctcagcatcaatgagaggcggygctcggcgtcccttggtcttgctcttctgttagaaatagtatctttgttttcctttgctgttcctcaatcccctactcttcaccccttgttttcacctattttgcgagaacccatccagatcccccttcccttcttcccctgccggcccagttatggcagagaacgatgtggacaatgagctcttggactatgaagatgatgaggtggagacagcagctgggggagatggggctgaggcccctgccaagaaggatgtcaagggctcctatgtctccatccacagctctggctttcgtgacttcctgctcaagccagagttgctccgggccattgtcgactgtggctttgagcatccgtcagaagtccagcatgagtgcatccctcaggccattctgggaatggatgtcctgtgccaggccaagtcgggcatgggaaagacagcagtgtttgtcttggccacactgcaacagctggagccagttactgggcaggtgtctgtrctggtgatgtgtcacactcgggagttggcttttcagatcagcaaggaatatgagcgcttctctaaatacatgcccaatgtcaaggttgctgttttttttggtggtctgtctatcaagaaggatgaagaggtgctgaagaagaactgcccgcatatcgtcgtggggactccaggccgtatcctagccctggctcgaaataagagcctcaacctcaaacacattaaacactttattttggatgaatgtgataagatgcttgaacagctcgacatgcgtcgggatgtccaggaaatttttcgcatgaccccccacgagaagcaggtcatgatgttcagtgctaccttgagcaaagagatccgtccagtctgccgcaagttcatgcaagatccaatggagatcttcgtggatgatgagacgaagttgacgctgcatgggttgcagcagtactacgtgaaactgaaggacaacgagaagaaccggaagctctttgaccttctggatgtccttgagttcaaccaggtggtgatctttgtgaagtctgtgcagcggtgcattgccttggcccagctactagtggagcagaacttcccagccattgccatccaccgtgggatgccccaggaggagaggctttctcggtatcagcagtttaaagattttcaacgacgaattcttgtggctaccaacctatttggccgaggcatggacatcgagcgggtgaacattgcttttaattatgacatgcctgaggattctgacacctacctgcatcgggtggccagagcaggccggtttggcaccaagggcttggctatcacatttgtgtccgatgagaatgatgccaagatcctcaatgatgtgcaggatcgctttgaggtcaatattagtgagctgcctgatgagatagacatctcctcctacattgaacagacacggtagaagactckcccattttggaatgtgaccgtctgtccttcaggagaggacaccagggtgggggtgaaggagacactactgcccccacccctgacagcccccaccccatggcttccatcttttgcatcaccaccactcctgaacccccatttytgatttgtcagaatttttttttaacaaaactaaaaatgaaacacatgtgtctgtggtatctataagtgcttcgtccctttattgtatttggggtgaggttattttagggcatggtccagggtgaattcctataaggcctgggtgccctgcctgctgtgagatcaaaggggaatgggactaagactgcagagccctggctcccccactgcctgccaattgcctgcgstttgtggtctcttccactttctctggcctgggaagacgctggggtgtttatgatcccaaggctcctggtgggtggtgcgtgtattttcagygccggagggtgctgtgggcactgggggaaacttaggcrcctcctccaaggctctcttggtgcctcctcatctgttccttcagcttctggatcttgagcaccagggcttgggcctcccaggctccctcctgcccttcaaggagggcctggtacagctccagctgctgctccaacaactctt

SEQ ID NO: 3107 - DNA, 2265 bp, Homo sapiens
acaggcattttccaaaggcaagcctggagcgcacggatctgtataaccgcggaaggccctgtttccggtcccttgcgcctgcgctcttgcagccaagaaggcgggaggctggagtagagggaagcctgcaaccggaagtgaaggcasatttccctccttcgtcgctgttgctgccgccatacgcgctctccctgtttagctcttctgttagaaatagtatctttgttttcctttgctgttcctcaatcccctactcttcaccccttgttttcacctattttgcgagaacccatccagatcccccttcccttcttcccctgccggcccagttatggcagagaacgatgtggacaatgagctcttggactatgaagatgatgaggtggagacagcagctgggggagatggggctgaggcccctgccaagaaggatgtcaagggctcctatgtctccatccacagctctggctttcgtgacttcctgctcaagccagagttgctccgggccattgtcgactgtggctttgagcatccgtcagaagtccagcatgagtgcatccctcaggccattctgggaatggatgtcctgtgccaggccaagtcgggcatgggaaagacagcagtgtttgtcttggccacactgcaacagctggagccagttactgggcaggtgtctgtrctggtgatgtgtcacactcgggagttggcttttcagatcagcaaggaatatgagcgcttctctaaatacatgcccaatgtcaaggttgctgttttttttggtggtctgtctatcaagaaggatgaagaggtgctgaagaagaactgcccgcatatcgtcgtggggactccaggccgtatcctagccctggctcgaaataagagcctcaacctcaaacacattaaacactttattttggatgaatgtgataagatgcttgaacagctcgacatgcgtcgggatgtccaggaaatttttcgcatgaccccccacgagaagcaggtcatgatgttcagtgctaccttgagcaaagagatccgtccagtctgccgcaagttcatgcaagatccaatggagatcttcgtggatgatgagacgaagttgacgctgcatgggttgcagcagtactacgtgaaactgaaggacaacgagaagaaccggaagctctttgaccttctggatgtccttgagttcaaccaggtggtgatctttgtgaagtctgtgcagcggtgcattgccttggcccagctactagtggagcagaacttcccagccattgccatccaccgtgggatgccccaggaggagaggctttctcggtatcagcagtttaaagattttcaacgacgaattcttgtggctaccaacctatttggccgaggcatggacatcgagcgggtgaacattgcttttaattatgacatgcctgaggattctgacacctacctgcatcgggtggccagagcaggccggtttggcaccaagggcttggctatcacatttgtgtccgatgagaatgatgccaagatcctcaatgatgtgcaggatcgctttgaggtcaatattagtgagctgcctgatgagatagacatctcctcctacattgaacagacacggtagaagactckcccattttggaatgtgaccgtctgtccttcaggagaggacaccagggtgggggtgaaggagacactactgcccccacccctgacagcccccaccccatggcttccatcttttgcatcaccaccactcctgaacccccatttytgatttgtcagaatttttttttaacaaaactaaaaatgaaacacatgtgtctgtggtatctataagtgcttcgtccctttattgtatttggggtgaggttattttagggcatggtccagggtgaattcctataaggcctgggtgccctgcctgctgtgagatcaaaggggaatgggactaagactgcagagccctggctcccccactgcctgccaattgcctgcgstttgtggtctcttccactttctctggcctgggaagacgctggggtgtttatgatcccaaggctcctggtgggtggtgcgtgtattttcagygccggagggtgctgtgggcactgggggaaacttaggcrcctcctccaaggctctcttggtgcctcctcatctgttccttcagcttctggatcttgagcaccagggcttgggcctcccaggctccctcctgcccttcaaggagggcctggtacagctccagctgctgctccaacaactctt

SEQ ID NO: 3108 - DNA, 2435 bp, Homo sapiens
ctcagctagggcctgccggttcctagtgcgtgcccagcagtcctcaggtcaccttcactaccgggccaaggaccccgtgggaactcgcagccttcgccacactcgttcctcgcgcatccayggaggggtgcctacagagaagacctgcgtggcaaaaacctaaacgaagagatgaggggcatggagaggagtaggataagagaataaagataacagtggggggsagacgttagtttcctttatatcttttgttactggmggtagcagtgaagttagaaacggttttaaaacaaatttcagacaggcattttccaaaggcaagcctggagcgcacggatctgtataaccgcggaaggccctgtttccggtcccttgcgcctgcgctcttgcagccaagaaggcgggaggctggagtagagggaagcctgcaaccggaagtgaaggcasatttccctccttcgtcgctgttgctgccgccatacgcgctctccctgtttagttatggcagagaacgatgtggacaatgagctcttggactatgaagatgatgaggtggagacagcagctgggggagatggggctgaggcccctgccaagaaggatgtcaagggctcctatgtctccatccacagctctggctttcgtgacttcctgctcaagccagagttgctccgggccattgtcgactgtggctttgagcatccgtcagaagtccagcatgagtgcatccctcaggccattctgggaatggatgtcctgtgccaggccaagtcgggcatgggaaagacagcagtgtttgtcttggccacactgcaacagctggagccagttactgggcaggtgtctgtrctggtgatgtgtcacactcgggagttggcttttcagatcagcaaggaatatgagcgcttctctaaatacatgcccaatgtcaaggttgctgttttttttggtggtctgtctatcaagaaggatgaagaggtgctgaagaagaactgcccgcatatcgtcgtggggactccaggccgtatcctagccctggctcgaaataagagcctcaacctcaaacacattaaacactttattttggatgaatgtgataagatgcttgaacagctcgacatgcgtcgggatgtccaggaaatttttcgcatgaccccccacgagaagcaggtcatgatgttcagtgctaccttgagcaaagagatccgtccagtctgccgcaagttcatgcaagatccaatggagatcttcgtggatgatgagacgaagttgacgctgcatgggttgcagcagtactacgtgaaactgaaggacaacgagaagaaccggaagctctttgaccttctggatgtccttgagttcaaccaggtggtgatctttgtgaagtctgtgcagcggtgcattgccttggcccagctactagtggagcagaacttcccagccattgccatccaccgtgggatgccccaggaggagaggctttctcggtatcagcagtttaaagattttcaacgacgaattcttgtggctaccaacctatttggccgaggcatggacatcgagcgggtgaacattgcttttaattatgacatgcctgaggattctgacacctacctgcatcgggtggccagagcaggccggtttggcaccaagggcttggctatcacatttgtgtccgatgagaatgatgccaagatcctcaatgatgtgcaggatcgctttgaggtcaatattagtgagctgcctgatgagatagacatctcctcctacattgaacagacacggtagaagactckcccattttggaatgtgaccgtctgtccttcaggagaggacaccagggtgggggtgaaggagacactactgcccccacccctgacagcccccaccccatggcttccatcttttgcatcaccaccactcctgaacccccatttytgatttgtcagaatttttttttaacaaaactaaaaatgaaacacatgtgtctgtggtatctataagtgcttcgtccctttattgtatttggggtgaggttattttagggcatggtccagggtgaattcctataaggcctgggtgccctgcctgctgtgagatcaaaggggaatgggactaagactgcagagccctggctcccccactgcctgccaattgcctgcgstttgtggtctcttccactttctctggcctgggaagacgctggggtgtttatgatcccaaggctcctggtgggtggtgcgtgtattttcagygccggagggtgctgtgggcactgggggaaacttaggcrcctcctccaaggctctcttggtgcctcctcatctgttccttcagcttctggatcttgagcaccagggcttgggcctcccaggctccctcctgcccttcaaggagggcctggtacagctccagctgctgctccaacaactctt

SEQ ID NO: 3109 - DNA, 2565 bp, Homo sapiens
ctcagctagggcctgccggttcctagtgcgtgcccagcagtcctcaggtcaccttcactaccgggccaaggaccccgtgggaactcgcagccttcgccacactcgttcctcgcgcatccayggaggggtgcctacagagaagacctgcgtggcaaaaacctaaacgaagagatgaggggcatggagaggagtaggataagagaataaagataacagtggggggsagacgttagtttcctttatatcttttgttactggmggtagcagtgaagttagaaacggttttaaaacaaatttcagacaggcattttccaaaggcaagcctggagcgcacggatctgtataaccgcggaaggccctgtttccggtcccttgcgcctgcgctcttgcagccaagaaggcgggaggctggagtagagggaagcctgcaaccggaagtgaaggcasatttccctccttcgtcgctgttgctgccgccatacgcgctctccctgtttagctcttctgttagaaatagtatctttgttttcctttgctgttcctcaatcccctactcttcaccccttgttttcacctattttgcgagaacccatccagatcccccttcccttcttcccctgccggcccagttatggcagagaacgatgtggacaatgagctcttggactatgaagatgatgaggtggagacagcagctgggggagatggggctgaggcccctgccaagaaggatgtcaagggctcctatgtctccatccacagctctggctttcgtgacttcctgctcaagccagagttgctccgggccattgtcgactgtggctttgagcatccgtcagaagtccagcatgagtgcatccctcaggccattctgggaatggatgtcctgtgccaggccaagtcgggcatgggaaagacagcagtgtttgtcttggccacactgcaacagctggagccagttactgggcaggtgtctgtrctggtgatgtgtcacactcgggagttggcttttcagatcagcaaggaatatgagcgcttctctaaatacatgcccaatgtcaaggttgctgttttttttggtggtctgtctatcaagaaggatgaagaggtgctgaagaagaactgcccgcatatcgtcgtggggactccaggccgtatcctagccctggctcgaaataagagcctcaacctcaaacacattaaacactttattttggatgaatgtgataagatgcttgaacagctcgacatgcgtcgggatgtccaggaaatttttcgcatgaccccccacgagaagcaggtcatgatgttcagtgctaccttgagcaaagagatccgtccagtctgccgcaagttcatgcaagatccaatggagatcttcgtggatgatgagacgaagttgacgctgcatgggttgcagcagtactacgtgaaactgaaggacaacgagaagaaccggaagctctttgaccttctggatgtccttgagttcaaccaggtggtgatctttgtgaagtctgtgcagcggtgcattgccttggcccagctactagtggagcagaacttcccagccattgccatccaccgtgggatgccccaggaggagaggctttctcggtatcagcagtttaaagattttcaacgacgaattcttgtggctaccaacctatttggccgaggcatggacatcgagcgggtgaacattgcttttaattatgacatgcctgaggattctgacacctacctgcatcgggtggccagagcaggccggtttggcaccaagggcttggctatcacatttgtgtccgatgagaatgatgccaagatcctcaatgatgtgcaggatcgctttgaggtcaatattagtgagctgcctgatgagatagacatctcctcctacattgaacagacacggtagaagactckcccattttggaatgtgaccgtctgtccttcaggagaggacaccagggtgggggtgaaggagacactactgcccccacccctgacagcccccaccccatggcttccatcttttgcatcaccaccactcctgaacccccatttytgatttgtcagaatttttttttaacaaaactaaaaatgaaacacatgtgtctgtggtatctataagtgcttcgtccctttattgtatttggggtgaggttattttagggcatggtccagggtgaattcctataaggcctgggtgccctgcctgctgtgagatcaaaggggaatgggactaagactgcagagccctggctcccccactgcctgccaattgcctgcgstttgtggtctcttccactttctctggcctgggaagacgctggggtgtttatgatcccaaggctcctggtgggtggtgcgtgtattttcagygccggagggtgctgtgggcactgggggaaacttaggcrcctcctccaaggctctcttggtgcctcctcatctgttccttcagcttctggatcttgagcaccagggcttgggcctcccaggctccctcctgcccttcaaggagggcctggtacagctccagctgctgctccaacaactctt

SEQ ID NO: 3110 - DNA, 2569 bp, Homo sapiens
ctcagctagggcctgccggttcctagtgcgtgcccagcagtcctcaggtcaccttcactaccgggccaaggaccccgtgggaactcgcagccttcgccacactcgttcctcgcgcatccayggaggggtgcctacagagaagacctgcgtggcaaaaacctaaacgaagagatgaggggcatggagaggagtaggataagagaataaagataacagtggggggsagacgttagtttcctttatatcttttgttactggmggtagcagtgaagttagaaacggttttaaaacaaatttcagacaggcattttccaaaggcaagcctggagcgcacggatctgtataaccgcggaaggccctgtttccggtcccttgcgcctgcgctcttgcagccaagaaggcgggaggctggagtagagggaagcctgcaaccggaagtgaaggcasatttccctccttcgtcgctgttgctgccgccatacgcgctctccctgtttagctcttctgttagaaatagtatctttgttttcctttgctgttcctcaatcccctactcttcaccccttgttttcacctattttgcgagaacccatccagatcccccttcccttcttcccctgccggcccagttatggcagagaacgatgtggacaatgagctcttggactatgaagatgatgaggtggagacagcagctgggggagatggggctgaggcccctgccaagaaggatgtcaagggctcctatgtctccatccacagctctggctttcgtgacttcctgctcaagccagagttgctccgggccattgtcgactgtggctttgagcatccgtcagaaggttgctgttttttttggtggtctgtctatcaagaaggatgaagaggtgctgaagaagaactgcccgcatatcgtcgtggggactccaggccgtatcctagccctggctcgaaataagagcctcaacctcaaacacattaaacactttattttggatgaatgtgataagatgcttgaacagctcgacatgcgtcgggatgtccaggaaatttttcgcatgaccccccacgagaagcaggtcatgatgttcagtgctaccttgagcaaagagatccgtccagtctgccgcaagttcatgcaagatgtaaatacccttctaccttctctccctccactccccgcccgctgcctcctccccttcctcgccctcttcctcagactcccttgtcattcaagtgccaagaaggcggcttgtgcccaactgggagtaatgactccttgaagagacatacagaagcagagacagctagtgttagggcctgcgcgggtgccagggaaactccggaagacttggtcgggttaatgtgagagcgggtagtgttcgactttttcataaatcacaacatttttgaacctcttctcccttygggggagggcaggatttttctgccctaccacccacccatccatcgtctcttacatgcaccctacagccacgcaccctcaaggtggcatcgagcrtacagctggagccttctgctcaccaaaactcctacttcccggtggcaggagagcaagagagggacagacagatggcagggcatgtccaaaagaagagcatcagcacaaatgaatcctccccttccccacctccaggggtgggggcctttggcacctcaatccccgataccctactccttcccacccacatctccttgcacccatctggaacctcggttgatgtgagccggcaacagagaagcaccgtggcgcggcgagggaatgcagacggcacccagcggtggatggcggcagcggaggccgcggggaaacctgaccaggaagctgaggaccaaaccagcctctttttccgttcccggtttttttcctgaacccaacgcgtgccgtgccccgtttcccccaatatgtgttggggaggggtgtcctgaatggggtggtagattttttttcttaaaaaaatttttttgttttttttaatactcagaggagagggacataggaaaggtaaagtggatgtaatcgggtggttgttagggtttggggctaggtggggccaattgcataagcagtggagtgtgttcttcccctccctgcagtgttccttcccgtgggatgatcactctttagctgtatttggggctagaatgagatttgaaggaggccatggaacttctctttagaaagcctgccttggctgggcctggtggctcacctctaatcccagcactttgggaggccaaggtgggaggattgcttgagcccaggaatttgagactagctggggcagtgtagtgagactttgtctctaccagaaaaaccgggcgtggtggcgcatgcctgtagtcccagctacttgggaagctgaggcaggagggtttgcttgagcccgggacgtggaggtggcagtaagctgtaattgtgccactgtactccagcctgggtgatagagtgagaccctgtatcaaaacaaaacaaaaaacaaaacctgccttctgggattgggcttctggtttttttcccatgacacacrcatcctttcctattttg

SEQ ID NO: 3111 - DNA, 2256 bp, Homo sapiens
ggctaacctgttgtaagcccgcagctttgggcctggtctctgctgctcccaggcggcccctttgggtactgcctgagcaagaagtgctggagaggaggaccagtcatcaatrggaggatgagattgggagagacactcggtrcaggaggctgagtgagcaggggagcactaagacccagrggtagtggaggactgcagcaacgagctggaggaggagaagtaagcggtggggggtgggagccatctggtactttgacagcattcaaaacagcatcggccataacaacagaaatggccagtcagtcccaaggtatccagcagcttctgcaagctgagaagcgggcagctgagaaggtggcagatgccagaaagaggaaggcccggcgactgaagcaggcaaaggaggaggcacagatggaggtggagcaataccgcagagagcgagagcacgaattccagagcaagcagcaggcgacaggcattttccaaaggcaagcctggagcgcacggatctgtataaccgcggaaggccctgtttccggtcccttgcgcctgcgctcttgcagccaagaaggcgggaggctggagtagagggaagcctgcaaccggaagtgaaggcasatttccctccttcgtcgctgttgctgccgccatacgcgctctccctgtttagctcttctgttagaaatagtatctttgttttcctttgctgttcctcaatcccctactcttcaccccttgttttcacctattttgcgagaacccatccagatcccccttcccttcttcccctgccggcccagttatggcagagaacgatgtggacaatgagctcttggactatgaagatgatgaggtggagacagcagctgggggagatggggctgaggcccctgccaagaaggatgtcaagggctcctatgtctccatccacagctctggctttcgtgacttcctgctcaagccagagttgctccgggccattgtcgactgtggctttgagcatccgtcagaagtccagcatgagtgcatccctcaggccattctgggaatggatgtcctgtgccaggccaagtcgggcatgggaaagacagcagtgtttgtcttggccacactgcaacagctggagccagttactgggcaggtgtctgtrctggtgatgtgtcacactcgggagttggcttttcagatcagcaaggaatatgagcgcttctctaaatacatgcccaatgtcaaggttgctgttttttttggtggtctgtctatcaagaaggatgaagaggtgctgaagaagaactgcccgcatatcgtcgtggggactccaggccgtatcctagccctggctcgaaataagagcctcaacctcaaacacattaaacactttattttggatgaatgtgataagatgcttgaacagctcgacatgcgtcgggatgtccaggaaatttttcgcatgaccccccacgagaagcaggtcatgatgttcagtgctaccttgagcaaagagatccgtccagtctgccgcaagttcatgcaagatccaatggagatcttcgtggatgatgagacgaagttgacgctgcatgggttgcagcagtactacgtgaaactgaaggacaacgagaagaaccggaagctctttgaccttctggatgtccttgagttcaaccaggtggtgatctttgtgaagtctgtgcagcggtgcattgccttggcccagctactagtggagcagaacttcccagccattgccatccaccgtgggatgccccaggaggagaggctttctcggtatcagcagtttaaagattttcaacgacgaattcttgtggctaccaacctatttggccgaggcatggacatcgagcgggtgaacattgcttttaattatgacatgcctgaggattctgacacctacctgcatcgggtggccagagcaggccggtttggcaccaagggcttggctatcacatttgtgtccgatgagaatgatgccaagatcctcaatgatgtgcaggatcgctttgaggtcaatattagtgagctgcctgatgagatagacatctcctcctacagtgagtactgatctcatgaaaccctttaggtcctccctgttccttagtgtgtttgtcckaaatcccatcacataggtcatgggcatctgatgcataatggacacttgactggttcatgccccctggtctttgatgctgtgttgggatgtttttctgacctttatgtggggtttctgtcttc

SEQ ID NO: 3112 - DNA, 2281 bp, Homo sapiens
ccttcgctacaatccgtttccatctgcgcttctccgcacccatcccgtcacatgggttcctgatacccttttcacaggcgatggtctggtcgctggggcctagttggttcgctatttccttagcttgcatccctttcgagagcaaagagctcctgggggaaggaagggaagctaaggggggacccaatccaagatggtgtcctcggcgccattgtctcttctgttagaaatagtatctttgttttcctttgctgttcctcaatcccctactcttcaccccttgttttcacctattttgcgagaacccatccagatcccccttcccttcttcccctgccggcccagttatggcagagaacgatgtggacaatgagctcttggactatgaagatgatgaggtggagacagcagctgggggagatggggctgaggcccctgccaagaaggatgtcaagggctcctatgtctccatccacagctctggctttcgtgacttcctgctcaagccagagttgctccgggccattgtcgactgtggctttgagcatccgtcagaagtccagcatgagtgcatccctcaggccattctgggaatggatgtcctgtgccaggccaagtcgggcatgggaaagacagcagtgtttgtcttggccacactgcaacagctggagccagttactgggcaggtgtctgtrctggtgatgtgtcacactcgggagttggcttttcagatcagcaaggaatatgagcgcttctctaaatacatgcccaatgtcaaggttgctgttttttttggtggtctgtctatcaagaaggatgaagaggtgctgaagaagaactgcccgcatatcgtcgtggggactccaggccgtatcctagccctggctcgaaataagagcctcaacctcaaacacattaaacactttattttggatgaatgtgataagatgcttgaacagctcgacatgcgtcgggatgtccaggaaatttttcgcatgaccccccacgagaagcaggtcatgatgttcagtgctaccttgagcaaagagatccgtccagtctgccgcaagttcatgcaagatccaatggagatcttcgtggatgatgagacgaagttgacgctgcatgggttgcagcagtactacgtgaaactgaaggacaacgagaagaaccggaagctctttgaccttctggatgtccttgagttcaaccaggtggtgatctttgtgaagtctgtgcagcggtgcattgccttggcccagctactagtggagcagaacttcccagccattgccatccaccgtgggatgccccaggaggagaggctttctcggtatcagcagtttaaagattttcaacgacgaattcttgtggctaccaacctatttggccgaggcatggacatcgagcgggtgaacattgcttttaattatgacatgcctgaggattctgacacctacctgcatcgggtggccagagcaggccggtttggcaccaagggcttggctatcacatttgtgtccgatgagaatgatgccaagatcctcaatgatgtgcaggatcgctttgaggtcaatattagtgagctgcctgatgagatagacatctcctcctacattgaacagacacggtagaagactckcccattttggaatgtgaccgtctgtccttcaggagaggacaccagggtgggggtgaaggagacactactgcccccacccctgacagcccccaccccatggcttccatcttttgcatcaccaccactcctgaacccccatttytgatttgtcagaatttttttttaacaaaactaaaaatgaaacacatgtgtctgtggtatctataagtgcttcgtccctttattgtatttggggtgaggttattttagggcatggtccagggtgaattcctataaggcctgggtgccctgcctgctgtgagatcaaaggggaatgggactaagactgcagagccctggctcccccactgcctgccaattgcctgcgstttgtggtctcttccactttctctggcctgggaagacgctggggtgtttatgatcccaaggctcctggtgggtggtgcgtgtattttcagygccggagggtgctgtgggcactgggggaaacttaggcrcctcctccaaggctctcttggtgcctcctcatctgttccttcagcttctggatcttgagcaccagggcttgggcctcccaggctccctcctgcccttcaaggagggcctggtacagctccagctgctgctccaacaactctt

SEQ ID NO: 3113 - DNA, 2660 bp, Homo sapiens
ctcagctagggcctgccggttcctagtgcgtgcccagcagtcctcaggtcaccttcactaccgggccaaggaccccgtgggaactcgcagccttcgccacactcgttcctcgcgcatccayggaggggtgcctacagagaagacctgcgtggcaaaaacctaaacgaagagatgaggggcatggagaggagtaggataagagaataaagataacagtggggggsagacgttagtttcctttatatcttttgttactggmggtagcagtgaagttagaaacggttttaaaacaaatttcagacaggcattttccaaaggcaagcctggagcgcacggatctgtataaccgcggaaggccctgtttccggtcccttgcgcctgcgctcttgcagccaagaaggcgggaggctggagtagagggaagcctgcaaccggaagtgaaggcasatttccctccttcgtcgctgttgctgccgccatacgcgctctccctgtttagttatggcagagaacgatgtggacaatgagctcttggactatgaagatgatgaggtggagacagcagctgggggagatggggctgaggcccctgccaagaaggatgtcaagggctcctatgtctccatccacagctctggctttcgtgacttcctgctcaagccagagttgctccgggccattgtcgactgtggctttgagcatccgtcagaagtccagcatgagtgcatccctcaggccattctgggaatggatgtcctgtgccaggccaagtcgggcatgggaaagacagcagtgtttgtcttggccacactgcaacagctggagccagttactgggcaggtgtctgtrctggtgatgtgtcacactcgggagttggcttttcagatcagcaaggaatatgagcgcttctctaaatacatgcccaatgtcaaggttgctgttttttttggtggtctgtctatcaagaaggatgaagaggtgctgaagaagaactgcccgcatatcgtcgtggggactccaggccgtatcctagccctggctcgaaataagagcctcaacctcaaacacattaaacactttattttggatgaatgtgataagatgcttgaacagctcgacatgcgtcgggatgtccaggaaatttttcgcatgaccccccacgagaagcaggtcatgatgttcagtgctaccttgagcaaagagatccgtccagtctgccgcaagttcatgcaagatgtaaatacccttctaccttctctccctccactccccgcccgctgcctcctccccttcctcgccctcttcctcagactcccttgtcattcaagtgccaagaaggcggcttgtgcccaactgggagtaatgactccttgaagagacatacagaagcagagacagctagtgttagggcctgcgcgggtgccagggaaactccggaagacttggtcgggttaatgtgagagcgggtagtgttcgactttttcataaatcacaacatttttgaacctcttctcccttygggggagggcaggatttttctgccctaccacccacccatccatcgtctcttacatgcaccctacagccacgcaccctcaaggtggcatcgagcrtacagctggagccttctgctcaccaaaactcctacttcccggtggcaggagagcaagagagggacagacagatggcagggcatgtccaaaagaagagcatcagcacaaatgaatcctccccttccccacctccaggggtgggggcctttggcacctcaatccccgataccctactccttcccacccacatctccttgcacccatctggaacctcggttgatgtgagccggcaacagagaagcaccgtggcgcggcgagggaatgcagacggcacccagcggtggatggcggcagcggaggccgcggggaaacctgaccaggaagctgaggaccaaaccagcctctttttccgttcccggtttttttcctgaacccaacgcgtgccgtgccccgtttcccccaatatgtgttggggaggggtgtcctgaatggggtggtagattttttttcttaaaaaaatttttttgttttttttaatactcagaggagagggacataggaaaggtaaagtggatgtaatcgggtggttgttagggtttggggctaggtggggccaattgcataagcagtggagtgtgttcttcccctccctgcagtgttccttcccgtgggatgatcactctttagctgtatttggggctagaatgagatttgaaggaggccatggaacttctctttagaaagcctgccttggctgggcctggtggctcacctctaatcccagcactttgggaggccaaggtgggaggattgcttgagcccaggaatttgagactagctggggcagtgtagtgagactttgtctctaccagaaaaaccgggcgtggtggcgcatgcctgtagtcccagctacttgggaagctgaggcaggagggtttgcttgagcccgggacgtggaggtggcagtaagctgtaattgtgccactgtactccagcctgggtgatagagtgagaccctgtatcaaaacaaaacaaaaaacaaaacctgccttctgggattgggcttctggtttttttcccatgacacacrcatcctttcctattttg

SEQ ID NO: 3114 - DNA, 1605 bp, Homo sapiens
ggctaacctgttgtaagcccgcagctttgggcctggtctctgctgctcccaggcggcccctttgggtactgcctgagcaagaagtgctggagaggaggaccagtcatcaatrggaggatgagattgggagagacactcggtrcaggaggctgagtgagcaggggagcactaagacccagrggtagtggaggactgcagcaacgagctggaggaggagaagtaagcggtggggggtgggagccatctggtactttgacagcattcaaaacagcatcggccataacaacagaaatggccagtcagtcccaaggtatccagcagcttctgcaagctgagaagcgggcagctgagaaggtggcagatgccagaaagaggaaggcccggcgactgaagcaggcaaaggaggaggcacagatggaggtggagcaataccgcagagagcgagagcacgaattccagagcaagcagcaggcggccatgggctcccaggggaacctgtctgctgaggtggagcaggctacaaggcgccaggtgcagggcatgcagagctcccagcagagaaaccgagagcgtgtcctggcccagcttcttggcatggtctgcgacgtcaggccccaggtccaccccaactaccggatttctgcctagggccaccgtagggcctgactccttctgccagttccctccctcaaagaaatcctccaatcaaaatcacctcccaccataatccctgtcttctttccatcccctagaaatcctgggaggcaggatccaataattttcctgtgacacttataaatatcctgctcacatctgaatctccttgttgttctttaaccctcactgggactttgtaaacttccaagtcattctcacctaaaccctctgtgaaatttgtaatatggggaagtaggaatgtggaaaacatcctgacttcagtgtctggccgatgtgggtccctctcttgaccctgtcacttgctggctgtgaaaccaggacaagctacttaacttggtagcctcgatgtcctcctytgtgaaactgggatgataataatgcctaccttgtgagggttgcttcaatgattaggaatcattctgtaaagtctagcasagttccttgcatgttgtagcagtgattcagtaagtagcaaccctgtgatactattaccaccacctgctcactggtcaaaacctacacagctgtttcctcacgtccatcactggctctctaattccacttgttcattctgtgaccctagttattttctgaaaaattggttcttctcttttcccagagaccttctgatctccaaaaagaggagatgactacatttagcccctctcttataattccaggtagataactgcattttgtagcctctctttgtttttcttttgctgatctttgtctttattagattttcctcctttcctatttccccaaagacttatcagatgctcattgctttctaagatctaaaatgatactgtgttccctcatatgcatgcccttcctttctatatccttgacaccttactttcccattgtaacaataaaaaaagtatcaataaaataattattggcaaataaattggtgagttg

SEQ ID NO: 3115 - DNA, 2884 bp, Homo sapiens
gsagacgttagtttcctttatatcttttgttactggmggtagcagtgaagttagaaacggttttaaaacaaatttcagacaggcattttccaaaggcaagcctggagcgcacggatctgtataaccgcggaaggccctgtttccggtcccttgcgcctgcgctcttgcagccaagaaggcgggaggctggagtagagggaagcctgcaaccggaagtgaaggcasatttccctccttcgtcgctgttgctgccgccatacgcgctctccctgtttaggtaagctttggccttcgctacaatccgtttccatctgcgcttctccgcacccatcccgtcacatgggttcctgatacccttttcacaggcgatggtctggtcgctggggcctagttggttcgctatttccttagcttgcatccctttcgagagcaaagagctcctgggggaaggaagggaagctaaggggggacccaatccaagatggtgtcctcggcgccattgtgttcgttttgctcccttcttccaatgggttcttctcatattggaggcctcagcatcaatgagaggcggygctcggcgtcccttggtcttgctcttctgttagaaatagtatctttgttttcctttgctgttcctcaatcccctactcttcaccccttgttttcacctattttgcgagaacccatccagatcccccttcccttcttcccctgccggcccagttatggcagagaacgatgtggacaatgagctcttggactatgaagatgatgaggtggagacagcagctgggggagatggggctgaggcccctgccaagaaggatgtcaagggctcctatgtctccatccacagctctggctttcgtgacttcctgctcaagccagagttgctccgggccattgtcgactgtggctttgagcatccgtcagaagtccagcatgagtgcatccctcaggccattctgggaatggatgtcctgtgccaggccaagtcgggcatgggaaagacagcagtgtttgtcttggccacactgcaacagctggagccagttactgggcaggtgtctgtrctggtgatgtgtcacactcgggagttggcttttcagatcagcaaggaatatgagcgcttctctaaatacatgcccaatgtcaaggttgctgttttttttggtggtctgtctatcaagaaggatgaagaggtgctgaagaagaactgcccgcatatcgtcgtggggactccaggccgtatcctagccctggctcgaaataagagcctcaacctcaaacacattaaacactttattttggatgaatgtgataagatgcttgaacagctcgacatgcgtcgggatgtccaggaaatttttcgcatgaccccccacgagaagcaggtcatgatgttcagtgctaccttgagcaaagagatccgtccagtctgccgcaagttcatgcaagatgtaaatacccttctaccttctctccctccactccccgcccgctgcctcctccccttcctcgccctcttcctcagactcccttgtcattcaagtgccaagaaggcggcttgtgcccaactgggagtaatgactccttgaagagacatacagaagcagagacagctagtgttagggcctgcgcgggtgccagggaaactccggaagacttggtcgggttaatgtgagagcgggtagtgttcgactttttcataaatcacaacatttttgaacctcttctcccttygggggagggcaggatttttctgccctaccacccacccatccatcgtctcttacatgcaccctacagccacgcaccctcaaggtggcatcgagcrtacagctggagccttctgctcaccaaaactcctacttcccggtggcaggagagcaagagagggacagacagatggcagggcatgtccaaaagaagagcatcagcacaaatgaatcctccccttccccacctccaggggtgggggcctttggcacctcaatccccgataccctactccttcccacccacatctccttgcacccatctggaacctcggttgatgtgagccggcaacagagaagcaccgtggcgcggcgagggaatgcagacggcacccagcggtggatggcggcagcggaggccgcggggaaacctgaccaggaagctgaggaccaaaccagcctctttttccgttcccggtttttttcctgaacccaacgcgtgccgtgccccgtttcccccaatatgtgttggggaggggtgtcctgaatggggtggtagattttttttcttaaaaaaatttttttgttttttttaatactcagaggagagggacataggaaaggtaaagtggatgtaatcgggtggttgttagggtttggggctaggtggggccaattgcataagcagtggagtgtgttcttcccctccctgcagtgttccttcccgtgggatgatcactctttagctgtatttggggctagaatgagatttgaaggaggccatggaacttctctttagaaagcctgccttggctgggcctggtggctcacctctaatcccagcactttgggaggccaaggtgggaggattgcttgagcccaggaatttgagactagctggggcagtgtagtgagactttgtctctaccagaaaaaccgggcgtggtggcgcatgcctgtagtcccagctacttgggaagctgaggcaggagggtttgcttgagcccgggacgtggaggtggcagtaagctgtaattgtgccactgtactccagcctgggtgatagagtgagaccctgtatcaaaacaaaacaaaaaacaaaacctgccttctgggattgggcttctggtttttttcccatgacacacrcatcctttcctattttg

SEQ ID NO: 3116 - DNA, 1352 bp, Homo sapiens
ccgagtcaccgcctgccgccgcgcccccggtttctataaattgagcccgcagcctcccgcttcgctctctgctcctcctgttcgacagtcagccgcatcttcttttgcgtcgccagccgagccacatcgctsagacaccatggggaaggtgaaggtcggagtcaacggatttggtcgtattgggcgcctggtcaccagggctgcttttaactctggtaaagtggatattgttgccatcaatgaccccttcattgacctcaactacatggtttacatgttccaatatgattccacccatggcaaattccatggcaccgtcaaggctgagaacgggaagcttgtcatcaatggaaatcccatcaccatcttccaggagcgagatccctccaaaatcaagtggggcgatgctggcgctgagtacgtcgtggagtccactggcgtcttcaccaccatggagaaggctggggctcatttgcaggggggagccaaaagggtcatcatctctgccccctctgctgaygcccccatgttcgtcatgggtgtgaaccatgagaagtatgacaacagcctcaagatcatcagcaatgcctcctgcaccaccaactgcttagcacccctggccaaggtcatccatgacaactttggtatcgtggaaggactcatgaccacagtccatgccatcactgccacccagaagactgtggatggcccctccgggaaactgtggcgtgatggccgcggggctctccagaacatcatccctgcctctactggcgctgccaaggctgtgggcaaggtcatccctgagctgaacgggaagctcactggcatggccttccgtgtccccactgccaacgtgtcagtggtggacctgacctgccgtctagaaaamcctgccaaatatgatgacatcaagaaggtggtgaagcaggcgtcggagggccccytcaagggcrtcytgggctacactgagcaccaggtggtctcctctkacttcaacagcgacacccactcctccaycttygacgctggggctggcattgccctcaacgaccactttgtcaagctcatttcctggtatgacaacgaatttggctacagcaacagggtgrtggacctcatkgcccacatggcctccaaggagtaagacccytggaccaccagccccagcaagagcacaagaggaagagagagaccctcactgctggggagtccctgccacactcagtcccccaccacactgaatctcccctcctcacagttkccatgtagaccccttgaaraggggaggggcctagggagccgcmccttgtcatgtaccatcaataaagtaccctgtgctcaaccagtta

SEQ ID NO: 3117 - DNA, 1242 bp, Homo sapiens
gttcgacagtcagccgcatcttcttttgcccgagccacatcgctsagacaccatggggaaggtgaaggtcggagtcaacggatttggtcgtattgggcgcctggtcaccagggctgcttttaactctggtaaagtggatattgttgccatcaatgaccccttcattgacctcaactacatggtttacatgttccaatatgattccacccatggcaaattccatggcaccgtcaaggctgagaacgggaagcttgtcatcaatggaaatcccatcaccatcttccaggagcgagatccctccaaaatcaagtggggcgatgctggcgctgagtacgtcgtggagtccactggcgtcttcaccaccatggagaaggctggggctcatttgcaggggggagccaaaagggtcatcatctctgccccctctgctgaygcccccatgttcgtcatgggtgtgaaccatgagaagtatgacaacagcctcaagatcatcagcaatgcctcctgcaccaccaactgcttagcacccctggccaaggtcatccatgacaactttggtatcgtggaaggactcatgaccacagtccatgccatcactgccacccagaagactgtggatggcccctccgggaaactgtggcgtgatggccgcggggctctccagaacatcatccgctgtgggcaaggtcatccctgagctgaacgggaagctcactggcatggccttccgtgtccccactgccaacgtgtcagtggtggacctgacctgccgtctagaaaamcctgccaaatatgatgacatcaagaaggtggtgaagcaggcgtcggagggccccytcaagggcrtcytgggctacactgagcaccaggtggtctcctctkacttcaacagcgacacccactcctccaycttygacgctggggctggcattgccctcaacgaccactttgtcaagctcatttcctggtatgacaacgaatttggctacagcaacagggtgrtggacctcatkgcccacatggcctccaaggagtaagacccytggaccaccagccccagcaagagcacaagaggaagagagagaccctcactgctggggagtccctgccacactcagtcccccaccacactgaatctcccctcctcacagttkccatgtagaccccttgaaraggggaggggcctagggagccgcmccttgtcatgtaccatcaataaagtaccctgtgctcaaccagtta

SEQ ID NO: 3118 - DNA, 1158 bp, Homo sapiens
gttcgacagtcagccgcatcttcttttgcccgagccacatcgctsagacaccatggggaaggtgaaggtcggagtcaacggatttggtcgtattgggcgcctggtcaccagggctgcttttaactctggtaaagtggatattgttgccatcaatgaccccttcattgacctcaactacatggtttacatgttccaatatgattccacccatggcaaattccatggcaccgtcaaggctgagaacgggaagcttgtcatcaatggaaatcccatcaccatcttccaggagcgagatccctccaaaatcaagtggggcgatgctggcgctgagtacgtcgtggagtccactggcgtcttcaccaccatggagaaggctggggctcatttgcaggggggagccaaaagggtcatcatctctgccccctctgctgaygcccccatgttcgtcatgggtgtgaaccatgagaagtatgacaacagcctcaagatcatcagcaatgcctcctgcaccaccaactgcttagcacccctggccaaggtcatccatgacaactttggtatcgtggaaggactcatgaccacagtccatgccatcactgccacccagaagactgtggatggcccctccgggaaactgtggcgtgatggccgcggggctctccagaacatcatccctgcctctactggcgctgccaaggctgtgggcaaggtcatccctgagctgaacgggaagctcactggcatggccttccgtgtccccactgccaacgtgtcagtggtggacctgacctgccgtctagaaaamcctgccaaatatgatgacatcaagaaggtggtgaagcaggcgtcggagggccccytcaagggcrtcytgggctacactgagcaccaggtggtctcctctkacttcaacagcgacacccactcctccaycttygacgctggggctggcattgccctcaacgaccactttgtcaagctcatttcctggtatgacaacgaatttggctacagcaacagggtgrtggacctcatkgcccacatggcctccaaggagtaagacccytggaccaccagccccagcaagagcactcccccaccacactgaatctcccctcctcacagttkccatgtagaccccttgaaraggggaggggc

SEQ ID NO: 3119 - DNA, 3293 bp, Homo sapiens
gcacgtgcggccggaagggaagtaacgtcagcctgagaactgagtagctgtactgtgtggcgccttattctaggcacttgttgggcagaatgtcacacctgccgatgaaactcctgcgtaagaagatcgagaagcggaacctcaaattgcggcagcggaacctaaagtttcagggggcctcaaatctgaccctatcggaaactcaaaatggagatgtatctgaagaaacaatgggaagtagaaaggttaaaaaatcaaaacaaaagcccatgaatgtgggcttatcagaaactcaaaatggaggcatgtctcaagaagcagtgggaaatataaaagttacaaagtctccccagaaatccactgtattaascaatggagaagcagcaatgcagtcttccaattcagaatcaaaaaagaaaaagaagaaaaagagaaaaatggtgaatgatgctgagcctgatacgaaaaaagcaaaaactgaaaacaaagggaaatctgaagaagaaagtgccgagactactaaagaaacagaaaataatgtggagaagccagataatgatgaagatgagagtgaggtgcccagtctgcccctgggactgacaggagcttttgaggatacttcgtttgcttctctatgtaatcttgtcaatgaaaacactctgaaggcaataaaagaaatgggttttacaaacatgactgaaattcagcataaaagtatcagaccacttctggaaggcagggatcttctagcagctgcaaaaacaggcagtggtaaaaccctggcttttctcatccctgcagttgaactcattgttaagttaaggttcatgcccaggaatggaacaggagtccttattctctcacctactagagaactagccatgcaaacctttggtgttcttaaggagctgatgactcaccacgtgcatacctatggcttgataatgggtggcagtaacagatctgctgaagcacagaaacttggtaatgggatcaacatcattgtggccacaccaggccgtctgctggaccatatgcagaataccccaggatttatgtataaaaacctgcagtgtctggttattgatgaagctgatcgtatcttggatgtggggtttgaagaggaattaaagcaaattattaaacttttgccaacacgtagacagactatgctcttttctgccacccaaactcgaaaagttgaagacctggcaaggatttctctgaaaaaggagccattgtatgttggcgttgatgatgataaagcgaatgcaacagtggatggtcttgaacagggatatgttgtttgtccttctgaaaagagattccttctgctctttacattccttaagaagaaccgaaagaagaagcttatggtcttcttttcatcytgtatgtctgtgaaataccactatgagttgctgaactacattgatttgcccgtcttggccattcatggaaagcaaaagcaaaataagcgtacaaccacattcttccagttctgcaaaatgaaggcaagcagaaaaagcgaggaggtggtggtggatttggctaccagaaaaccargaaagttgagaaatccaaaatctttaaacacattagcaagaaatcatctgacagcaggcagttctctcactgaacacatgccttcctttcatcttgaataactttgtcctaaaatgaattttttttccccttgatttaacaggatttttgtagactttagaatttggacttacctaacaagagtataaattgacttgggttgcaagcactgagcactgttacttctatcacgtctctcttttatttctgggatataaaacaggctttaagtttcttggttgcccaagggcagagcaaggaatatctggtgtttcttgtgatgataatattttaattttaaatatccctccctcatacaagtgtatgttaccattttaatataattctttttgtayctttccttcttgttttgygaagatttttgtggcatggattgctgtgctcactgctgtaaaaggtgacctagtgtactgggcagctggtggyggtgcagaaaagagtctcaggttattttttgtttttagttatttcttggaccttgacagtatctaatgactcctcctgaaaatgctgcagtataaaagagcaaagagctttgggaaatacctaagaagcaccttaagattagggtggcattgcttttatagattcttgattttaaagcaacagkcctttctcaggtgttgcattttttggagcaaaaactatgggttgtaatttgaataaagtgtcactaagcagttataacgtttgatggctggggggtaggaagaggatggaattgagatgtttgagcctcatktacatcaatagaggtgtaatgtactgcatttcttcatttggtaacataacaaagactttcatacaaagaacgatgatgctcctcattaagatttgtttaattcaaggtggtttggatttggtaagcctttgcactctgtagagtacttagaagacaagggcaacttacttggagttagagccaagctgtcagacggtgcccagcacacattaatgttagcttctttctgagaaaaaaatacctcttccaggccctgaaacaaaaaatacatttgctgtgaagattgaaaatgaacaaagttagaaaaaaaaacagcaaaatcagtgatttagtcagatgagtttttcgttgtaggagcacttgatttctagtgtgttttgtacagtatataactacaagatagtacattttgtagcagttcaaagccaaagttgctagcatcattttgctgttgtgccagttaatcataggatcccattaaataagtgtgctaacatcgaatatagagaaaactggtaaagaacattccagtaggaaaagaaaagaacaatcttccatttctgggcttggccaccaycaccctggtcggacctgtcctggacttccaaccttgactgctgagctcctggcttagcttcttgggttcctaattcctggtgtttaataattctctccacgatcatgtttttctgattttttttttcagaaataatgttttttaaaagacaaaaacaaagggaagaatatttaattactgagcagaagtaaatactgttggyattttgtacataatctaatttttatatgcatgtthatgctttttaatttttttatcaaaaattaagtcatctacctactacttgtaacyagcttgtttcatarcatgttattttcctgtgtcattaaataattacttcaatgttgt

SEQ ID NO: 3120 - DNA, 3761 bp, Homo sapiens
gcacgtgcggccggaagggaagtaacgtcagcctgagaactgagtagctgtactgtgtggcgccttattctaggcacttgttgggcagaatgtcacacctgccgatgaaactcctgcgtaagaagatcgagaagcggaacctcaaattgcggcagcggaacctaaagtttcagggggcctcaaatctgaccctatcggaaactcaaaatggagatgtatctgaagaaacaatgggaagtagaaaggttaaaaaatcaaaacaaaagcccatgaatgtgggcttatcagaaactcaaaatggaggcatgtctcaagaagcagtgggaaatataaaagttacaaagtctccccagaaatccactgtattaascaatggagaagcagcaatgcagtcttccaattcagaatcaaaaaagaaaaagaagaaaaagagaaaaatggtgaatgatgctgagcctgatacgaaaaaagcaaaaactgaaaacaaagggaaatctgaagaagaaagtgccgagactactaaagaaacagaaaataatgtggagaagccagataatgatgaagatgagagtgaggtgcccagtctgcccctgggactgacaggagcttttgaggatacttcgtttgcttctctatgtaatcttgtcaatgaaaacactctgaaggcaataaaagaaatgggttttacaaacatgactgaaattcagcataaaagtatcagaccacttctggaaggcagggatcttctagcagctgcaaaaacaggcagtggtaaaaccctggcttttctcatccctgcagttgaactcattgttaagttaaggttcatgcccaggaatggaacaggagtccttattctctcacctactagagaactagccatgcaaacctttggtgttcttaaggagctgatgactcaccacgtgcatacctatggcttgataatgggtggcagtaacagatctgctgaagcacagaaacttggtaatgggatcaacatcattgtggccacaccaggccgtctgctggaccatatgcagaataccccaggatttatgtataaaaacctgcagtgtctggttattgatgaagctgatcgtatcttggatgtggggtttgaagaggaattaaagcaaattattaaacttttgccaacacgtagacagactatgctcttttctgccacccaaactcgaaaagttgaagacctggcaaggatttctctgaaaaaggagccattgtatgttggcgttgatgatgataaagcgaatgcaacagtggatggtcttgaacagggatatgttgtttgtccttctgaaaagagattccttctgctctttacattccttaagaagaaccgaaagaagaagcttatggtcttcttttcatcytgtatgtctgtgaaataccactatgagttgctgaactacattgatttgcccgtcttggccattcatggaaagcaaaagcaaaataagcgtacaaccacattcttccagttctgcaatgcagattcgggaacactattgtgtacrgatgtggcagcgagaggactagacattcctgaagtcgactggattgttcagtatgaccctccggatgaccctaaggaatatattcatcgtgtgggtagaacagccagaggcctaaatgggagagggcatgccttgctcattttgcgcccagaagaattgggttttcttcgytacttgaaacaatccaaggttccattaagtgaatttgacttttcctggtctaaaatttctgacattcagtctcagcttgagaaaytgattgaaaagaattactttcttcataagtcagcccaggaagcatataagtcatacatacgagcctatgattcccattctctgaaacagatctttaatgttaataacctaaatttgcctcaggttgctctgtcatttggtttcaaggtgcctcccttygttgatctgaacgtcaacagtaatgaaggcaagcagaaaaagcgaggaggtggtggtggatttggctaccagaaaaccargaaagttgagaaatccaaaatctttaaacacattagcaagaaatcatctgacagcaggcagttctctcactgaacacatgccttcctttcatcttgaataactttgtcctaaaatgaattttttttccccttgatttaacaggatttttgtagactttagaatttggacttacctaacaagagtataaattgacttgggttgcaagcactgagcactgttacttctatcacgtctctcttttatttctgggatataaaacaggctttaagtttcttggttgcccaagggcagagcaaggaatatctggtgtttcttgtgatgataatattttaattttaaatatccctccctcatacaagtgtatgttaccattttaatataattctttttgtayctttccttcttgttttgygaagatttttgtggcatggattgctgtgctcactgctgtaaaaggtgacctagtgtactgggcagctggtggyggtgcagaaaagagtctcaggttattttttgtttttagttatttcttggaccttgacagtatctaatgactcctcctgaaaatgctgcagtataaaagagcaaagagctttgggaaatacctaagaagcaccttaagattagggtggcattgcttttatagattcttgattttaaagcaacagkcctttctcaggtgttgcattttttggagcaaaaactatgggttgtaatttgaataaagtgtcactaagcagttataacgtttgatggctggggggtaggaagaggatggaattgagatgtttgagcctcatktacatcaatagaggtgtaatgtactgcatttcttcatttggtaacataacaaagactttcatacaaagaacgatgatgctcctcattaagatttgtttaattcaaggtggtttggatttggtaagcctttgcactctgtagagtacttagaagacaagggcaacttacttggagttagagccaagctgtcagacggtgcccagcacacattaatgttagcttctttctgagaaaaaaatacctcttccaggccctgaaacaaaaaatacatttgctgtgaagattgaaaatgaacaaagttagaaaaaaaaacagcaaaatcagtgatttagtcagatgagtttttcgttgtaggagcacttgatttctagtgtgttttgtacagtatataactacaagatagtacattttgtagcagttcaaagccaaagttgctagcatcattttgctgttgtgccagttaatcataggatcccattaaataagtgtgctaacatcgaatatagagaaaactggtaaagaacattccagtaggaaaagaaaagaacaatcttccatttctgggcttggccaccaycaccctggtcggacctgtcctggacttccaaccttgactgctgagctcctggcttagcttcttgggttcctaattcctggtgtttaataattctctccacgatcatgtttttctgattttttttttcagaaataatgttttttaaaagacaaaaacaaagggaagaatatttaattactgagcagaagtaaatactgttggyattttgtacataatctaatttttatatgcatgtthatgctttttaatttttttatcaaaaattaagtcatctacctactacttgtaacyagcttgtttcatarcatgttattttcctgtgtcattaaataattacttcaatgttgtwtttc

SEQ ID NO: 3121 - DNA, 2365 bp, Homo sapiens
cgagtgcgcacaggactgaacgagcacgcccggtccctgctccggagcggaggacacgacgcggacccgcacggtgcaccgcagtgacctgaggaaggagcgacgggcgctcgcgccmaaggcgtccgagtgcctggtaaactgtaaagcgcggtcctgcagctgacatcgcgctgatcggattggccgtcatgggccagaacttaattctgaacatgaatgaccacggctttgtggtctgtgcttttaataggactgtctccaaagttgaygatttcttggccaatgaggcaaagggaaccaaagtggtgggtgcccagtccctgaaagagatggtctccaagctgaagaagccccggcggatcatcctcctggtgaaggctgggcaagctgtggatgatttcatcgagaaattggtaccattgttggatactggtgacatcatcattgacggaggaaattctgaatatagggacaccacaagacggtgccgagacctcaaggccaagggaattttatttgtggggagcggagtcagtggtggagaggaaggggcccggtatggcccatcgctcatgccaggagggaacaaagaagcgtggccccacatcaagaccatcttccaaggcattgctgcaaaagtgggaactggagaaccctgctgtgactgggtgggagatgagggagcaggccacttcgtgaagatggtgcacaacgggatagagtatggggacatgcagctgatctgtgaggcataccacctgatgaaagacgtgctgggcatggcgcaggacgagatggcccaggcctttgaggattggaataagacagagctagactcattcctgattgaaatcacagccaatattctcaagttccaagayaccratggcaaacacctgctgccaaagatcagggacagcgcrgggcagaagggcacagggaagtggaccgccatctccgccctggaatacggcgtacccgtcaccctcattggagaagctgtctttgctcggtgcttatcatctctgaaggatgagagaattcaagctagcaaaaagctgaagggtccccagaagttccagtttgatggtgataagaaatcattcctggaggacattcggaaggcactctacgcttccaagatcatctcttacgctcaaggctttatgctgctaaggcaggcagccaccgagtttggctggactctcaattatggtggcatcgccctgatgtggagagggggctgcatcattagaagtgtattcctaggaaagataaaggatgcatttgatcgaaacccggaacttcagaacctcctactggacgacttctttaagtcagctgttgaaaactgccaggactcctggcggcgggcagtcagcactggggtccaggctggcattcccatgccctgttttaccactgccctctccttctatgacgggtacagacatgagatgcttccagccagcctcatccaggctcagcgggattacttcggggctcacacctatgaactcttggccaaaccagggcagtttatccacaccaactggacaggccatggtggcaccgtgtcatcctcrtcatacaatgcctgatcatgctgctcctgtcaccctccacgattccacagaccaggacattccatgtgcctcatggcactgccacctggccctttgccctattttctgttcagttttttaaaagtgttgtaagagactcctgaggaagacacacagtttatttgtaaagtagctctgtgagagccaccatgccctctgcccttgcctcttgggactgaccaggagctgctcatgtgcgtgagagtgggaaccatctccttgcggcagtggcttccgcgtgccccgtgtgctggtgcggttcccatcacgcagacaggaagggtgtttgcgcactctgatcaactggaacctctgtatcatgcggctgaattccctttttcctttactcaataaaagctacatcagactgatgctctttctccagattcttagtctcacctcggccacatggagccattatccccattggcagaaaratttttctttaaaaaaaaagactagaataacacaagaaaccmcatttaggattatgcttcmctcagaggaggcaggcagggaggacmcaccaggggctttaawacmctgggcatgttttctttctccaattgggcaatgggkacatggacgttcmctgtaacgkgctttttctttcgtctttttttttttttttttttttttgctcctggcaarctgtgcgtgacattctttatggctttttgtatgtcaaawacttcatactaaactttctagagaattaaactttaatgatgggctca

SEQ ID NO: 3122 - DNA, 2289 bp, Homo sapiens
cgagtgcgcacaggactgaacgagcacgcccggtccctgctccggagcggaggacacgacgcggacccgcacggtgcaccgcagtgacctgaggaaggagcgacgggcgctcgcgccmaaggcgtccgagtgcctggtaaactgtaaagcgcggtcctgcagctgacatcgcgctgatcggattggccgtcatgggccagaacttaattctgaacatgaatgaccacggctttgtggtctgtgcttttaataggactgtctccaaagttgaygatttcttggccaatgaggcaaagggaaccaaagtggtgggtgcccagtccctgaaagagatggtctccaagctgaagaagccccggcggatcatcctcctggtgaaggctgggcaagctgtggatgatttcatcgagaaattggtaccattgttggatactggtgacatcatcattgacggaggaaattctgaatatagggacaccacaagacggtgccgagacctcaaggccaagggaattttatttgtggggagcggagtcagtggtggagaggaaggggcccggtatggcccatcgctcatgccaggagggaacaaagaagcgtggccccacatcaagaccatcttccaaggcattgctgcaaaagtgggaactggagaaccctgctgtgactgggcaagtgggagatgagggagcaggccacttcgtgaagatggtgcacaacgggatagagtatggggacatgcagctgatctgtgaggcataccacctgatgaaagacgtgctgggcatggcgcaggacgagatggcccaggcctttgaggattggaataagacagagctagactcattcctgattgaaatcacagccaatattctcaagttccaagayaccratggcaaacacctgctgccaaagatcagggacagcgcrgggcagaagggcacagggaagtggaccgccatctccgccctggaatacggcgtacccgtcaccctcattggagaagctgtctttgctcggtgcttatcatctctgaaggatgagagaattcaagctagcaaaaagctgaagggtccccagaagttccagtttgatggtgataagaaatcattcctggaggacattcggaaggcactctacgcttccaagatcatctcttacgctcaaggctttatgctgctaaggcaggcagccaccgagtttggctggactctcaattatggtggcatcgccctgatgtggagagggggctgcatcattagaagtgtattcctaggaaagataaaggatgcatttgatcgaaacccggaacttcagaacctcctactggacgacttctttaagtcagctgttgaaaactgccaggactcctggcggcgggcagtcagcactggggtccaggctggcattcccatgccctgttttaccactgccctctccttctatgacgggtacagacatgagatgcttccagccagcctcatccaggctcagcgggattacttcggggctcacacctatgaactcttggccaaaccagggcagtttatccacaccaactggacaggccatggtggcaccgtgtcatcctcrtcatacaatgcctttgccctattttctgttcagttttttaaaagtgttgtaagagactcctgaggaagacacacagtttatttgtaaagtagctctgtgagagccaccatgccctctgcccttgcctcttgggactgaccaggagctgctcatgtgcgtgagagtgggaaccatctccttgcggcagtggcttccgcgtgccccgtgtgctggtgcggttcccatcacgcagacaggaagggtgtttgcgcactctgatcaactggaacctctgtatcatgcggctgaattccctttttcctttactcaataaaagctacatcagactgatgctctttctccagattcttagtctcacctcggccacatggagccattatccccattggcagaaaratttttctttaaaaaaaaagactagaataacacaagaaaccmcatttaggattatgcttcmctcagaggaggcaggcagggaggacmcaccaggggctttaawacmctgggcatgttttctttctccaattgggcaatgggkacatggacgttcmctgtaacgkgctttttctttcgtctttttttttttttttttttttttgctcctggcaarctgtgcgtgacattctttatggctttttgtatgtcaaawacttcatactaaactttctagagaattaaactttaatgatgggctca

SEQ ID NO: 3123 - DNA, 2288 bp, Homo sapiens
agggagccgctgcgggtctttccctcactcgtcctccgcgcgtcgccgctcttcggttctgctctgtccgccgccatggcccaagctgacatcgcgctgatcggattggccgtcatgggccagaacttaattctgaacatgaatgaccacggctttgtggtctgtgcttttaataggactgtctccaaagttgaygatttcttggccaatgaggcaaagggaaccaaagtggtgggtgcccagtccctgaaagagatggtctccaagctgaagaagccccggcggatcatcctcctggtgaaggctgggcaagctgtggatgatttcatcgagaaattggtaccattgttggatactggtgacatcatcattgacggaggaaattctgaatatagggacaccacaagacggtgccgagacctcaaggccaagggaattttatttgtggggagcggagtcagtggtggagaggaaggggcccggtatggcccatcgctcatgccaggagggaacaaagaagcgtggccccacatcaagaccatcttccaaggcattgctgcaaaagtgggaactggagaaccctgctgtgactgggtgggagatgagggagcaggccacttcgtgaagatggtgcacaacgggatagagtatggggacatgcagctgatctgtgaggcataccacctgatgaaagacgtgctgggcatggcgcaggacgagatggcccaggcctttgaggattggaataagacagagctagactcattcctgattgaaatcacagccaatattctcaagttccaagayaccratggcaaacacctgctgccaaagatcagggacagcgcrgggcagaagggcacagggaagtggaccgccatctccgccctggaatacggcgtacccgtcaccctcattggagaagctgtctttgctcggtgcttatcatctctgaaggatgagagaattcaagctagcaaaaagctgaagggtccccagaagttccagtttgatggtgataagaaatcattcctggaggacattcggaaggcactctacgcttccaagatcatctcttacgctcaaggctttatgctgctaaggcaggcagccaccgagtttggctggactctcaattatggtggcatcgccctgatgtggagagggggctgcatcattagaagtgtattcctaggaaagataaaggatgcatttgatcgaaacccggaacttcagaacctcctactggacgacttctttaagtcagctgttgaaaactgccaggactcctggcggcgggcagtcagcactggggtccaggctggcattcccatgccctgttttaccactgccctctccttctatgacgggtacagacatgagatgcttccagccagcctcatccaggctcagcgggattacttcggggctcacacctatgaactcttggccaaaccagggcagtttatccacaccaactggacaggccatggtggcaccgtgtcatcctcrtcatacaatgcctgatcatgctgctcctgtcaccctccacgattccacagaccaggacattccatgtgcctcatggcactgccacctggccctttgccctattttctgttcagttttttaaaagtgttgtaagagactcctgaggaagacacacagtttatttgtaaagtagctctgtgagagccaccatgccctctgcccttgcctcttgggactgaccaggagctgctcatgtgcgtgagagtgggaaccatctccttgcggcagtggcttccgcgtgccccgtgtgctggtgcggttcccatcacgcagacaggaagggtgtttgcgcactctgatcaactggaacctctgtatcatgcggctgaattccctttttcctttactcaataaaagctacatcagactgatgctctttctccagattcttagtctcacctcggccacatggagccattatccccattggcagaaaratttttctttaaaaaaaaagactagaataacacaagaaaccmcatttaggattatgcttcmctcagaggaggcaggcagggaggacmcaccaggggctttaawacmctgggcatgttttctttctccaattgggcaatgggkacatggacgttcmctgtaacgkgctttttctttcgtctttttttttttttttttttttttgctcctggcaarctgtgcgtgacattctttatggctttttgtatgtcaaawacttcatactaaactttctagagaattaaactttaatgatgggctca

SEQ ID NO: 3124 - DNA, 2205 bp, Homo sapiens
agctgacatcgcgctgatcggattggccgtcatgggccagaacttaattctgaacatgaatgaccacggctttgtggtctgtgcttttaataggactgtctccaaagttgaygatttcttggccaatgaggcaaagggaaccaaagtggtgggtgcccagtccctgaaagagatggtctccaagctgaagaagccccggcggatcatcctcctggtgaaggctgggcaagctgtggatgatttcatcgagaaattggtaccattgttggatactggtgacatcatcattgacggaggaaattctgaatatagggacaccacaagacggtgccgagacctcaaggccaagggaattttatttgtggggagcggagtcagtggtggagaggaaggggcccggtatggcccatcgctcatgccaggagggaacaaagaagcgtggccccacatcaagaccatcttccaaggcattgctgcaaaagtgggaactggagaaccctgctgtgactgggtgggagatgagggagcaggccacttcgtgaagatggtgcacaacgggatagagtatggggacatgcagctgatctgtgaggcataccacctgatgaaagacgtgctgggcatggcgcaggacgagatggcccaggcctttgaggattggaataagacagagctagactcattcctgattgaaatcacagccaatattctcaagttccaagayaccratggcaaacacctgctgccaaagatcagggacagcgcrgggcagaagggcacagggaagtggaccgccatctccgccctggaatacggcgtacccgtcaccctcattggagaagctgtctttgctcggtgcttatcatctctgaaggatgagagaattcaagctagcaaaaagctgaagggtccccagaagttccagtttgatggtgataagaaatcattcctggaggacattcggaaggcactctacgcttccaagatcatctcttacgctcaaggctttatgctgctaaggcaggcagccaccgagtttggctggactctcaattatggtggcatcgccctgatgtggagagggggctgcatcattagaagtgtattcctaggaaagataaaggatgcatttgatcgaaacccggaacttcagaacctcctactggacgacttctttaagtcagctgttgaaaactgccaggactcctggcggcgggcagtcagcactggggtccaggctggcattcccatgccctgttttaccactgccctctccttctatgacgggtacagacatgagatgcttccagccagcctcatccaggctcagcgggattacttcggggctcacacctatgaactcttggccaaaccagggcagtttatccacaccaactggacaggccatggtggcaccgtgtcatcctcrtcatacaatgcctgatcatgctgctcctgtcaccctccacgattccacagaccaggacattccatgtgcctcatggcactgccacctggccctttgccctattttctgttcagttttttaaaagtgttgtaagagactcctgaggaagacacacagtttatttgtaaagtagctctgtgagagccaccatgccctctgcccttgcctcttgggactgaccaggagctgctcatgtgcgtgagagtgggaaccatctccttgcggcagtggcttccgcgtgccccgtgtgctggtgcggttcccatcacgcagacaggaagggtgtttgcgcactctgatcaactggaacctctgtatcatgcggctgaattccctttttcctttactcaataaaagctacatcagactgatgctctttctccagattcttagtctcacctcggccacatggagccattatccccattggcagaaaratttttctttaaaaaaaaagactagaataacacaagaaaccmcatttaggattatgcttcmctcagaggaggcaggcagggaggacmcaccaggggctttaawacmctgggcatgttttctttctccaattgggcaatgggkacatggacgttcmctgtaacgkgctttttctttcgtctttttttttttttttttttttttgctcctggcaarctgtgcgtgacattctttatggctttttgtatgtcaaawacttcatactaaactttctagagaattaaactttaatgatgggctca

SEQ ID NO: 3125 - DNA, 1458 bp, Homo sapiens
aatgatcgaaacagtacaaatcaggggagaatgcgcccaagacatggagaactgataatacattgtggtttatccttgcaatggaacactatatggcagtgaaaatgattgaaatagagctatacacatcatcacagacaaatttcagaaacaacgctgagtgaaaaatccacccacaaatgaattatcaggtgtgaacccacaggcaagtatgaatgaaagtccacagacaaatgaatttaaaggcacaaccgaggagacacctgcgaaagaaaccccacacacaggtgaatttaaaggagcagccctggtgtcacctatcagtaaaagtatttctctagctattgccttattttttctcatggatgttcttcttcgagtatttgtagaaggatggacacattttgatcgacttctacgacttattattctggtaagaatttttcatctgtttcatcaaaaaagacaacttgaaaagctgataagaaggctggtttcagaaaacaaaaggcgataaacaagggatggatttgacctagacctcacttacattacaaatgtattattgctatgtcatttccatcttttggaaggcagtctttctatagaaatccagtcgaggaagttgtgcggtttctagataagaaacatccatgccgctatcgagtctacaatctatgcagtgaaagagcttatgatcctaagcacttctataatagggttggtagaatcatgattgatgatcataatgtccccactctacatgagatggtggttttcaccaaggaagtaaatgagtggatggctcaagatcttgaaaacatggtagcaattcactgtaaaggaggaaaaggaagaaccagaactatggtttgtgccttccttattgcctctgacatatttttaactgcagagaaagctggtattattttggagaaaggcaaagagataaaacccacagcaaaaaaatttcagggagtaraaactccttctcagaatagatatgtcggatattttgcacaagtgaaacatctctacaactggaatctctctccaagacggatactctttataaaaagattcattatttattcgattcgtggttatgtacatgatctaaaagtccaaatagtaatggagaaaaaggttgtcttttccggtacttcattaggaaattgttcaatattgcatgacattacaaggcaaagtattaattgatgtattcgacagtccacctctgtatgatgatgtaaaagtgcattttttctcttcgaatcttcctaaatactatgacaattgttcatttttcttctggtgccacacatcttttattcagaataacagctttatctaccaagaaatgaattggataatccacataaacaaaaagcttgracaatttatccaccagaatttgccgtggagatactttttggcaagaaatgacttccaatgaca

SEQ ID NO: 3126 - DNA, 1760 bp, Homo sapiens
atctctctcattattctaatcttactgaccattctcaaatttgctgtagctcttattcaggcttatgtcttcacactactagaagtacatttcaaagccacgatacaacaattgtccaaaaaggtgtccgatatggaacaattctatttattatctcagaggcataatattatcaatattcattataattactcttataactttaaatatacatttcgctctagcatccacaatacccattattctcctagtatttgctgcctgtgaagctgcagtgggccttgccttactagtttcagtctccaacatatacagcctagattatgtacaaaatctaagtttacttcaatgctagaagttattattccaaaaattatactgttaccaataacatgactctctaaaaactctatatgccgaattaacatgactactcacagcccattcatcagccttattacgctactatttttaaccaattaaatgataactcatctaacttctcattaatcttctcctctgaccctctaacttcgccccttgtaatctttacaacctgactactacctcttataattctagcaagccaatatcacctttccaatgagtcacccccatggaacaaactctatatttccatattaatttccctacaaatttttttaatcatagcattcacagccacagaactaattatattttatattctctttgaagccacacttattcctaccctaattatcattaccygctgaggtaaccaatcagaacgactcaatgcaagctcatatttcttattttacacactagtagggtcccttcccctacttgttacacttgtccatactcaaaatacctcgggttctctaaatataactgtaataatatttaccacccaagaactattaaactcctgttctaataatcttatatgattagcatgtattttagcttttatggtaaaaatgcctccatatggacttcacctgtgactccccaaagcccacgtggaagcccctattgctggctcaatagtacttgcagcagtactcctaaagctaggtggccacagtattatacggcttacccttaccctcaaccccctaacaaatatatagcctaccccttcctcatactatccttatgagggatcttatgacaagctctatttgtctatgacaaactgatttaaaatcacttatcgcatattcctccgtaagccacatagcacttgttattatagctattctcattcaaaccccttgaagctttacaggtgcagtcacccttataattgcccgtggactcacttcatccttactattctgcctagcaaatttgaattatgagcgagtccatagccaaattatattacttgaggccttcaaacactgcttccactgatagcctcttgatgacttttagcaagtcttactaaccttgccttacccactgctattaatctagtaggagaactcttcctcgctatggcttcattctcctgatcaaacatcaccattatgcttataggacttaatatactaattacagccctttactcctcacatatgctaaccacaacacaacgagggacacttgtgtattacattaacagtattaaaccatcctttacatgagaaaatacattaatacttatacactttgcacctatcttcctattatccttaatccttattattatggggtttgcattctgtaaatatagtttaaccaaaacattagattgtgaatctaataat

SEQ ID NO: 3127 - DNA, 1007 bp, Homo sapiens
gaaaaggaggaaagacaggttagctggggatgatgacggatctgaagcaaagccattcagtgaggctgaatgatggacccttcatgccagtgctgggatttggcacttatgctcctgatcatactcccaaaagccaggctgccraggccaccaaagtggctattgacgtaggcttccrccatattgattcagcatacttataccaaaatgaggaggaggttggacaggccatttgggagaagatcgctgatggtaccgtcaagagagaggaaatattctacaccatcaagctttgggctactttctttcgggcagaattggttcacccggccctagaaaggtcactgaagaaacttggacyrgactatgtagatctcttcattattcatgtaccatttgctatgaagcctgggaaagaattactkccaaaggatgccagtggagagattattttagaaactgtggagctttgtgacacttgggaggccctggagaagtgcaaagaagcaggtttaaccaggtccattggggtgtccaatttcaatcacaagctgctggaactcatcctcaacaagccagggctcaagtacaagcccacctgcaaccaggtggaatgtcacccttacctcaaccagagcaaactcctggagttctkcaagtccaaggacattgttctagttgcctacagtgccctgggatcccaaagagacccacagtgggtggatcccgactgcccacatctcttggaggagccgatcttgaaatccattgccaagaaacacagtsgaagcccaggccaggtcgccctgcgctaccagctgcagcggggagtggtggtgctggccaagagcttctctcaggagagaatcaaagagaacttccagatttttgactttgagttgactccagaggacatgaaagccattgatggcctcaacagaaatctccgatatgayaagttacaatttgctgctaatcacccttattttccattttctgaagaatat

SEQ ID NO: 3128 - DNA, 933 bp, Homo sapiens
atggatctgaagcaaagccattccgtgaggctgaatgatggacatgtcatgccgatgctgggatttggcacttatgctcctgatcatacccccaagagcaaggctggtgaagccaccgaagtggctattgatgcaggcttccgtcacattgatgcggcgttcttctaccaaaacgaggaggaggtcggaaaggccattcgagagaagattgctgayggccctgtgaagagagaggacattttctacaccactgagctttggacaactttctttagaccagaattagttcgcccagccctggaarggtcactgaagaaacttcaactggactatgtcgatctcttcattatccacaatccattggctatgaagcctggggaggaattgctgcctaaggatgccagtggaaacattatttttgatactgtggatcttygtgacacatgggaggccctggagaagtgcaaagaagcaggtttaaccaagtccatcggggtgtccaatttcaatcacaaactgctggaactcatcctcaacaagccagggctcaagtacaagcccacctgcaaccaggtggaatgtcacccttacctcaactagagcaaactcctggagttctgcaagtccaaggacattgttctagttgcctacagggccctggcatctcacagagacccaaactggatggacccagatagcccatatctcttagaggagccaaccttgaaatccattgccaagaaatrcaatagaagcccaggccaggttgccctgtgytatgagctgcagcggggggtggtggtcctggccaagagcttctctgagaagagaatcaaagagaacttccaggtttttgactttgagttgactccagaggacatgaaagccactgatggcctcaacagaaatttccgatatgctaagttacaattg

SEQ ID NO: 3129 - DNA, 1413 bp, Homo sapiens
taggaagaagtgaatagaagaaaagagggtgttgcaaatcaaaagcacatagagatatcatcttacaccagtcagaatggctattcttaaaatgtcagacaacaacagatattggattaccacatcatcaggaccacaccttcatcaggaatgaatattcctactacaattaaagaagaaacaaaattaatttgytggtgaaaaayatgttgctgaaggaaacaggatctgcttagtgaaagaagtggcaagcaatggatcccaaatatcagcgtgtagagctaaatgatggtcacttcatgcccgtattgggatttggcacctatgcacctccagaggttccgaggaacagagctgtrgaggtcaccaaattagcaatagaagctggcttccgccatattgattctgcttatttatacaataatgaggagcaggttggactggccatccgaagcaagattgcagatggcagtgtgaagagagaagacatattctacacttcaaagctttggtgcactttctttcaacyacagatggtccaaccagccttggaaagctcactgaaaaaacttcaactggactatgttgacctctatcttcttcatttcccaatggctctcaagccaggtgagacgccactaccaaaagatgaaaatggaaaagtaatattcgacacagtggatctctstgccacatgggaggtcatggagaagtgtaaggatgcaggattggccaagtccatcggggtgtcaaacttcaactgcaggcagctggagatgatcctcaacaagccaggactcaagtacaagcctgtctgcaaccaggtagaatgtcatccttacctcaaccagagcaaactgctggatttctgcaagtcaaaagacattgttctggttgcccacagtgctctgggaacccaacgacataaactatgggtggacccaaactccccagttcttttggaggacccagttctttgtgccttagcaaagaaacacaaacraaccccagccctgattgccctgcgctaccagctgcagcgtggggttgtggtcctggccaagagctacaatgagcagcggatcagagagaacatccaggtttttgaattccagttgacatcagaggatatgaaagttctagatggtctaaacagaaattatcgatatgttgtcatggattttcttatggaccatcctgattatccattttcagatgaatattagcatagagggtgttgcacgacatctagcagaaggccctgtgtgtggatggtgatgcagaggatgtctctatgctggtgactggacacacrgcctctggttaaatccctcccctcctgcttggcaacttcagctagctagatatatccatggtccagaaagcaaacataataaatttttatcttgaagt

SEQ ID NO: 3130 - DNA, 1207 bp, Homo sapiens
atgttgctgaaggaaacaggatctgcttagtgaaagaagtggcaagcaatggatcccaaatatcagcgtgtagagctaaatgatggtcacttcatgcccgtattgggatttggcacctatgcacctccagaggttccgaggaacagagctgtrgaggtcaccaaattagcaatagaagctggcttccgccatattgattctgcttatttatacaataatgaggagcaggttggactggccatccgaagcaagattgcagatggcagtgtgaagagagaagacatattctacacttcaaagctttggtgcactttctttcaacyacagatggtccaaccagccttggaaagctcactgaaaaaacttcaactggactatgttgacctctatcttcttcatttcccaatggctctcaagccaggtgagacgccactaccaaaagatgaaaatggaaaagtaatattcgacacagtggatctctstgccacatgggaggtcatggagaagtgtaaggatgcaggattggccaagtccatcggggtgtcaaacttcaactgcaggcagctggagatgatcctcaacaagccaggactcaagtacaagcctgtctgcaaccaggtagaatgtcatccttacctcaaccagagcaaactgctggatttctgcaagtcaaaagacattgttctggttgcccacagtgctctgggaacccaacgacataaactatgggtggacccaaactccccagttcttttggaggacccagttctttgtgccttagcaaagaaacacaaacraaccccagccctgattgccctgcgctaccagctgcagcgtggggttgtggtcctggccaagagctacaatgagcagcggatcagagagaacatccaggtttttgaattccagttgacatcagaggatatgaaagttctagatggtctaaacagaaattatcgatatgttgtcatggattttcttatggaccatcctgattatccattttcagatgaatattagcatagagggtgttgcacgacatctagcagaaggccctgtgtgtggatggtgatgcagaggatgtctctatgctggtgactggacacacrgcctctggttaaatccctcccctcctgcttggcaacttcagctagctagatatatccatggtccagaaagcaaacataataaatttttatcttgaagt

SEQ ID NO: 3131 - DNA, 476 bp, Homo sapiens
aattaaggatgttaatgattgggttgggccaccaaatrataatggagtaaytaaagaagttactattaatccagacactacttgtggcaatgactgsgtctgtgaacatcgatggcgccaaataaggaacatggttawtttccgcaatgtagtggatggccagccttttacaaaytggtatgataatgggagcaaccaagtggcttttgggagaggaaacagaggattcattgttttcaacaatgatgactggacattttctttaactttgcaaactggtcttcctgctggcacatactgtgatgtcatttctggagataaaattaatggcaactgcacaggcattaaaatctacgtttctgatgatggcaaagctcatttttctattagtaactctgctgargatccatttattgcaattcatgctgaatctaaattrtaaaatttaaaattaaatgcaaatccgcaaagcaata

SEQ ID NO: 3132 - DNA, 3026 bp, Homo sapiens
ggacgggggcggggtgggggcagccctttcccaggcggtagcgggggcggcgtcgctgttgcccttttaagccgcggggccgccgcctcctgccgctggagtcggttacaaaggaagcgccacccaggccgccacacgccgaggcttccgcgcccctcgccattttccagcagcgctcgacgaggcggagccgcgagagcgcggcccaggccggccccgcggggcggtcgcggccgtgacggcggctccgggcccggctccccttccgcgcccggctccccttccgcgcccctcccgccggagatgaggggaagatgtccgtgtcagggctcaaggccgagctgaagttcctggcgtccatcttcgacaagaaccacgagcgattccgcatcgtcagttggaagctggacgagctgcactgccagttcctggtgccgcagcagggcagcccgcactcgctgccgccgccactcacgctccactgcaacatcacggaatcctatccatcttcttcaccgatatggtttgtggattctgaagacccaaatctgacatcagttctggaacgtctagaagatactaagaacaacaatttgcttcgtcagcaattgaagtggttgatatgtgaactctgcagtttatataaccttcctaagcacctggatgttgagatgctagatcaaccactacccacgggtcagaatgggacaacagaagaagtgacttcagaagaagaggaagaagaagaagagatggctgaagatatagaagacttagatcactatgagatgaaggaagaagagcctattagtgggaaaaagtcagaggatgaaggaattgaaaaagaaaatttggcaatattagagaaaattaggaagactcaaaggcaagaccatttaaatggtgcagtgtctgggtcagtgcaagcttcagatagacttatgaaagagctcagggacatatacagatcacagagttataaaacagggatttattcagtggaactcataaatgacagtttatatgactggcatgttaaactgcagaaggttgaccctgatagtcctttgcacagtgatcttcagatcttaaaagaaaaagaaggcatagaatatattttgcttaacttctcttttaaggataactttccatttgatcctccatttgttcgagtggtgttacctgttctctcaggagggtatgtattgggtggaggagcattatgtatggaacttctcacaaaacagggctggagcagtgcctactcaatagaatcggtcatcatgcaaataaatgccaccttagtcaaaggcaaagccagagtgcagtttggagcaaataagaatcaatataatctagcaagagcccaacaatcctataattccattgtacagatacatgagaaaaatggctggtacacccctccaaaggaagatggctaaatrtgttgactgttgtatgtttggactaatgttgctttaaagaaaatctttcyaacatgcagacaaaagctttgagtgcccctattacagcagtaccgaagatgttagttaatagatattttagtggataatctgtcatctgacatccagtataagttacagccttygcattttgctcattttagatatcttggactgagcagtggggcctttactgtatttttcctgataaatacacatactggccactccttatctctttttcttgaaaagtgaactttttaaagcagccaagtcaacatcaggctactgaagttgaggctttagggtaactttcctatattgagcccatgggttacaaggatttgcaatatattgttccatttacagccaatacaggtttaatcgatgttcaatattggtttaggaaatttaaggccttctaaatcataatagctctttcatgtctaaaaccattttatgatattgccaaaatgtgataggaaacctactcattaaattgttaaactttttaatgactatgtgaagatatgaattgtttcctgaagataatactcttaattgagttgtattgtacttcttaggcaaagcagtgtaaaactgtatcaattaaggcttgtgagtagtgatttccactggggcatcagagtcttggctgggctgaatctgctgcttgttggttcagtgtttcttatgaacaagagccacagtacagagcttcaagttatttaaaatactaagtcatcttacgtttccattttattaacgggatgttgcaatcgtttgtaaactaataaacttataaagtgattggcacaaagactccttgagcaaaagctgtgcagttaagtacaaaaagatacttaatttggagactcttacagtaatttttgccatgtcaaaacaatggcttttacattgaaagattaatagaaactctacatatgttaatttttttatagaacctgactcaaatcaaggtactctccattttattgccttacctgaatcagtcctttttggttggtaatagatttttttatacacccacgtttgatttaaaagtaaattctagttcttaagcacttttaacaagaaatccagaagcacatttttctgcacaaacaagttacaaagttcaaaagtgtttcttgtgcattagctttgagattcagtttttaactttgtaaaccacatctgagagacttgtcatttctacattgtgtgtgtttaatttcttttgattccattttggttaagagagcagtaaatagattttctggtattcttgttcacttgattacatttgtataaagttctgattgccagttgctcagataacaagtgacaaggcagaattctttaaatcagtaaagttccttaagcctaaggctaaatcttgaatacattgttgaattctttaatatcctgatggcaagcagactgatagctgcacatttggcatgctttgtttaatggattttatttttaattgcagatttatttggcaatgtacagtaaattttgtaaacttgcatcaagtttatgaataaagaaccattt

SEQ ID NO: 3133 - DNA, 2814 bp, Homo sapiens
ggacgggggcggggtgggggcagccctttcccaggcggtagcgggggcggcgtcgctgttgcccttttaagccgcggggccgccgcctcctgccgctggagtcggttacaaaggaagcgccacccaggccgccacacgccgaggcttccgcgcccctcgccattttccagcagcgctcgacgaggcggagccgcgagagcgcggcccaggccggccccgcggggcggtcgcggccgtgacggcggctccgggcccggctccccttccgcgcccggctccccttccgcgcccctcccgccggagatgaggggaagatgtccgtgtcagggctcaaggccgagctgaagttcctggcgtccatcttcgacaagaaccacgagcgattccgcatcgtcagttggaagctggacgagctgcactgccagttcctggtgccgcagcagggcagcccgcactcgctgccgccgccactcacgctccactgcaacatcacggaatcctatccatcttcttcaccgatatggtttgtggattctgaagacccaaatctgacatcagttctggaacgtctagaagatactaagaacaacaatttgcttcgtcagcaattgaagtggttgatatgtgaactctgcagtttatataaccttcctaagcacctggatgttgagatgctagatcaaccactacccacgggtcagaatgggacaacagaagaagtgacttcagaagaagaggaagaagaagaagagatggctgaagatatagaagacttagatcactatgagatgaaggaagaagagcctattagtgggaaaaagtcagaggatgaaggaattgaaaaagaaaatttggcaatattagagaaaattaggaagactcaaaggcaagaccatttaaatggtgcagtgtctgggtcagtgcaagcttcagatagacttatgaaagagctcagggacatatacagatcacagagttataaaacagggatttattcagtggaactcataaatgacagtttatatgactggcatgttaaactgcagaaggttgaccctgatagtcctttgcacagtgatcttcagatcttaaaagaaaaagaaggcatagaatatattttgcttaacttctcttttaaggataactttccatttgatcctccatttgttcgagtggtgttacctgttctctcaggagggctggtacacccctccaaaggaagatggctaaatrtgttgactgttgtatgtttggactaatgttgctttaaagaaaatctttcyaacatgcagacaaaagctttgagtgcccctattacagcagtaccgaagatgttagttaatagatattttagtggataatctgtcatctgacatccagtataagttacagccttygcattttgctcattttagatatcttggactgagcagtggggcctttactgtatttttcctgataaatacacatactggccactccttatctctttttcttgaaaagtgaactttttaaagcagccaagtcaacatcaggctactgaagttgaggctttagggtaactttcctatattgagcccatgggttacaaggatttgcaatatattgttccatttacagccaatacaggtttaatcgatgttcaatattggtttaggaaatttaaggccttctaaatcataatagctctttcatgtctaaaaccattttatgatattgccaaaatgtgataggaaacctactcattaaattgttaaactttttaatgactatgtgaagatatgaattgtttcctgaagataatactcttaattgagttgtattgtacttcttaggcaaagcagtgtaaaactgtatcaattaaggcttgtgagtagtgatttccactggggcatcagagtcttggctgggctgaatctgctgcttgttggttcagtgtttcttatgaacaagagccacagtacagagcttcaagttatttaaaatactaagtcatcttacgtttccattttattaacgggatgttgcaatcgtttgtaaactaataaacttataaagtgattggcacaaagactccttgagcaaaagctgtgcagttaagtacaaaaagatacttaatttggagactcttacagtaatttttgccatgtcaaaacaatggcttttacattgaaagattaatagaaactctacatatgttaatttttttatagaacctgactcaaatcaaggtactctccattttattgccttacctgaatcagtcctttttggttggtaatagatttttttatacacccacgtttgatttaaaagtaaattctagttcttaagcacttttaacaagaaatccagaagcacatttttctgcacaaacaagttacaaagttcaaaagtgtttcttgtgcattagctttgagattcagtttttaactttgtaaaccacatctgagagacttgtcatttctacattgtgtgtgtttaatttcttttgattccattttggttaagagagcagtaaatagattttctggtattcttgttcacttgattacatttgtataaagttctgattgccagttgctcagataacaagtgacaaggcagaattctttaaatcagtaaagttccttaagcctaaggctaaatcttgaatacattgttgaattctttaatatcctgatggcaagcagactgatagctgcacatttggcatgctttgtttaatggattttatttttaattgcagatttatttggcaatgtacagtaaattttgtaaacttgcatcaagtttatgaataaagaaccattt

SEQ ID NO: 3134 - DNA, 1348 bp, Homo sapiens
atgtcggacctgggctcggaggagttggaggaggagggagagaatgatattggggtgagagctcctggaatatgaggggggtcggaatgaggcaggcgaaaggcacggacgtgggagggcacggctacccaacggggacacctacgaagggagctacgaattcggtaaaagacatggccaggggatctacaaatttaaaaatggtgctcgatatatcggagaatatgttagaaataaaaagcacggtcaaggcacttttatatatccagatggatccagatatgaaggagagtgggcaaatgacctgcggcacggccatggcgtatactactacatcaataatgacacctacactggagagtggtttgctcatcaaaggcatgggcaaggcacctatttatacgcrgagacgggcagtaagtatgttggcacctgggtgaacggacagcaggagggcacggccgagctcattcacctgaaccacaggtaccagggcaagttcttgaacaaaaatcctgttggccctggaaagtatgtatttgatgttgggtgtgaacaacatggtgaatatcgtttaacagatatggaaagaggagaagaggaagaggaggaagaattagtaactgttgttccaaaatggaaagctacccaaatcactgaattggccctgtggacaccaactctccccaaaaagccgacctctacggatggacctggccaagacgctccaggagctgagagtgcaggagaacccggggaggaggcccaggctctgctggagggcttcgagggtgagatggacatgaggcctggagatgaagatgcagacgtcctccgggaagagagccgggagtatgaccaggaggagttccgctatgacatggatgagggtgaggtccctgcgcagggaagtggggcgagggcccgcacttaggggccacgaacagtgggattccccttcccttcaccaaggaaacattaattctgaagaagaagaaactagacagtcagacctccaggactaagatgaagtgagccgagaggagatcgtatcataagaatgcttctgtcgttagcygggtgcagtgctgtgtgtatctagttccagctacttgagaggctgaggcaggaggattgcttgagtccagaaagtggcagttgcagtgagtggagatcgygccactgctctccagcctgggtggcagarcgagaccctgtctcaaaaaataaacaaaaacaaaatgcttctgtcagttaacaatctttattagagggtttttagtctttctttctcagctgtatgttaagttgrttgacaaatgcaaataaacgtctttattatcctttc

SEQ ID NO: 3135 - DNA, 1429 bp, Homo sapiens
tggctcctcccgcttcgtccgcgtcgcctgtccccgctccccatcttccgggctgggagggaggcgggaccggccgcgtctccatggcgacgcgggacgcggcggtggaggcggttgctacccacytgctagaggcgctgcggctgtgatccaggctggggcgagaccatgtcggacctgggctcggaggagttggaggaggagggagagaatgatattggggaatatgaggggggtcggaatgaggcaggcgaaaggcacggacgtgggagggcacggctacccaacggggacacctacgaagggagctacgaattcggtaaaagacatggccaggggatctacaaatttaaaaatggtgctcgatatatcggagaatatgttagaaataaaaagcacggtcaaggcacttttatatatccagatggatccagatatgaaggagagtgggcaaatgacctgcggcacggccatggcgtatactactacatcaataatgacacctacactggagagtggtttgctcatcaaaggcatgggcaaggcacctatttatacgcrgagacgggcagtaagtatgttggcacctgggtgaacggacagcaggagggcacggccgagctcattcacctgaaccacaggtaccagggcaagttcttgaacaaaaatcctgttggccctggaaagtatgtatttgatgttgggtgtgaacaacatggtgaatatcgtttaacagatatggaaagaggagaagaggaagaggaggaagaattagtaactgttgttccaaaatggaaagctacccaaatcactgaattggccctgtggacaccaactctccccaaaaagccgacctctacggatggacctggccaagacgctccaggagctgagagtgcaggagaacccggggaggaggcccaggctctgctggagggcttcgagggtgagatggacatgaggcctggagatgaagatgcagacgtcctccgggaagagagccgggagtatgaccaggaggagttccgctatgacatggatgagggaaacattaattctgaagaagaagaaactagacagtcagacctccaggactaagatgaagtgagccgagaggagatcgtatcataagaatgcttctgtcgttagcygggtgcagtgctgtgtgtatctagttccagctacttgagaggctgaggcaggaggattgcttgagtccagaaagtggcagttgcagtgagtggagatcgygccactgctctccagcctgggtggcagarcgagaccctgtctcaaaaaataaacaaaaacaaaatgcttctgtcagttaacaatctttattagagggtttttagtctttctttctcagctgtatgttaagttgrttgacaaatgcaaataaacgtctttattatcctttctttctgaa

SEQ ID NO: 3136 - DNA, 894 bp, Homo sapiens
atggccgtggtagtggtagtgcacttggatatggccagaagccctctccctgaagaaggcagccctccccagtccagggaagaggtgaagtacgcttccatcaaacaaatccaggataccattgatttggagaagtcacagcaggctgtgggtcacaagtgccattacctttttgatgccaagaggaataacattgctatgactttggagaatactcttcaggaatggctgcatcgagtatataaggagaactttggaagatgttttgtttgtgttaaaggactaaaacatccagcagtctctgagcgtgtgctgggtggctatgtgcgaggggctaccctaagcaataaattgtctggcctgctcatttattcctctgtgcggaagattagtaccattttgggaacagagatggaaagacttactaatgttaaaattctggaaatcagtctgstggaggagatatttggagtttgggtgcaggcagaggatggaaaagtggggctggcaccaaatcaggaagaaggtggtgacagagtctcaatatcaaatgactctaggatgattacacagggttgccagataacttacatttgtatcacctggcttgataagaatgtgaaagacctgaccttggcccaagatcctgactttctacgggacagtcctgatggatttgtcctgcagagggattgtaataattctgagaagaatgtagactgggctacagagttggccatgaagaagaaggacaacaacaacacacttgtgtttattgtggatgtcaaggccaacaagtaccagaccaaacaggctgtggaaaagttctatgacattgacatgaccagtgccaacaccttgatcaggcctgatggagagaagaagacatttgtt

SEQ ID NO: 3137 - DNA, 483 bp, Homo sapiens
ccttgtcacaaagatgtcactaaaggcaaagaagcccctgctcttcccaaagccaaagccaaaccaaaggttttgagagccaagaaggcagtactgaaaggtgtctatagacacagatccayatgtcacccatcttccagtcacccaaaatactttggatttggaggcagcccaaatatttttggaagtgtgtccccaggagaaagaagcttgacyactatgccatcatcaattttccttgaccatagagttggccatgaagaagaaggacaacaacaacacacttgtgtttattgtggatgtcaaggccaacaagtaccagaccaaacaggctgtggaaaagttctatgacattgacatgaccagtgccaacaccttgatcaggcctgatggagagaagaagacatttgtttgactggctcctgactatgatgctttggatatagccaacacaattgggattattaaaactgagtccagctg

SEQ ID NO: 3138 - DNA, 1212 bp, Homo sapiens
atgtctggcaggaaggcctgcagcatccgcacagtccctactacattcacgtccagcacagaggccacggcgtcctcccccagcgcctccagcggccccagcaggcccaggcctgcgttacacactgcggagacaagaggcccgaccagcccgcctcagcatcaccctcagcacggcctgtcccctcgtgctccckgggcctgggaacatgttggtttcaacgcagggcggagaaggctcctaggagcccatatgcttccaggaggctcacccagcacgtccacgcggccctcagtcacgcgttcccgggcagcggccacggattttgagtcccttacgtccagctgcaacstctccagggatccckgagggcatgccagggcccgggccgcctcccacagccggccctgtgttttcaggtccctcaacgtggcatacactggaggttttgggagaggaggaagatctgacttcccttctrgcctccaagggctyctcccttctctccctccctgtccctgcctatctatacctttgaagctctgggatggatctgaagccagacgtacggccaagtgcaggccgatgcccgaggaacagccggtgatgagcaccacggtgcrggccatggtgagactgtggggagaggctggggctctgggcttgatatcacctgcttcgccccgccccgcctgcgggcccccaccccttgttgtgtctcccacgcaatctcaaggataagccttcctgcgggtccctggcccgctctccccaccctgttctgagccaaaacagacatgagcccactgcttggaacaacaaactgtcctggttgctggtcaragggaggggaggctttacaagcaggtgtgggttcccacgtgggcacagagtggccccctgggcagattcccctgggtatgcctctgtgccacaggagcgattayagtgaccgcagtttgctgcagaggctgtgaaagtaaaggcgttgggaggtgggagatgattgtatatgtgytggtttcgtccagggttcctagctcataactcacatgaccatggttacagtcttacgttgtcatgttggggtgcctcaggcctcaaaaaacagcctttcgtctctctgaccttctcctgtcctcttttcagctgcccaaggcaggactctaatctgattgtgggttgtaggatcctcattccagagtgggtcct

SEQ ID NO: 3139 - DNA, 3284 bp, Homo sapiens
ggctgggagcgcggcgccgctctccgctgcgggggaggccatggcggaaccttcccaggccccgaccccggccccggctgcgcagccccggccccttcagtccccagcccctgccccaactccgactcctgcacccagcccggcttcagccccgattccgactcccaccccggcaccagcccctgccccagctgcagccccagccggcagcacagggactggggggcccggggtaggaagtgggggggccgggagcgggggggatccggctcgacctggcctgagccagcagcagcgcgccagtcagaggaaggcgcaagtccgggggctgccgcgcgccaagaagcttgagaagctaggggtcttctcggcttgcaaggccaatgaaacctgtaagtgtaatggctggaaaaaccccaagccccccactgcaccccgcatggatctgcagcagccagctgccaacctgagtgagctgtgccgcagttgtgagcaccccttggctgaccacgtatcccacttggagaatgtgtcagaggatgagataaaccgactgctggggatggtggtggatgtggagaatctcttcatgtctgttcacaaggaagaggacacagacaccaagcaggtctatttctacctcttcaagctactgcggaaatgcatcctgcagatgacccggcctgtggtggaggggtccctgggcagccctccatttgagaaacctaatattgagcagggtgtgctgaactttgtgcagtacaagtttagtcacctggctccccgggagcggcagacgatgttcgagctctcaaagatgttcttgctctgccttaactactggaagcttgagacacctgcccagtttcggcagaggtctcaggctgaggacgtggctacctacaaggtcaattacaccagatggctctgttactgccacgtgccccagagctgtgatagcctcccccgctacgaaaccactcatgtctttgggcgaagccttctccggtccattttcaccgttacccgccggcagctgctggaaaagttccgagtggagaaggacaaattggtgcccgagaagaggaccctcatcctcactcacttccccaagtaaggctccttctggcctaccaggatttggccccaagttcacatcctccctgttgtccccttttttccaggaaggcttcctggattggtccctcctctccctccatgggccttttgggatctgggcgtctacctggcagacttgcccatggcccagaagcaacttgctagtactagtctggggatggcagattcctgtccatgctggaggaggagatctatggggcaaactctccaatctgggagtcaggcttcaccatgccaccctcagaggggacacagctggttccccggccagcttcagtcagtgcagcggttgttcccagcacccccatcttcagccccagcatgggtgggggcagcaacagctccctgagtctggattstgcaggggccgagcctatgccaggcgagaagaggacgctcccagagaacctgaccctggaggatgccaagcggctccgtgtgatgggtgacatccccatggagctggtcaatgaggtcatgctgaccatcactgaccctgctgccatgctggggcctgagacgagcctgctttcggccaatgcggcccgggatgagacagcccgcctggaggagcgccgcggcatcatcgagttccatgtcatcggcaactcactgacgcccaaggccaaccggcgggtgttgctgtggctcgtggggctgcagaatgtcttttcccaccagctgccgcgcatgcctaaggagtatatcgcccgcctcgtctttgacccgaagcacaagactctggccttgatcaaggatgggcgggtcatcggtggcatctgcttccgcatgtttcccacccagggcttcacggagattgtcttctgtgctgtcacctcgaatgagcaggtcaagggttatgggacccacctgatgaaccacctgaaggagtatcacatcaagcacaacattctctacttcctcacctacgccgacgagtacgccatcggctacttcaaaaagcagggtttctccaaggacatcaaggtgcccaagagccgctacctgggctacatcaaggactacgagggagcgacgctgatggagtgtgagctgaatccccgcatcccctacacggagytgtcccacatcatcaagaagcagaaagaggtgatcatcaagaagctgattgagcgcaaacaggcccagatccgcaaggtctacccggggctcagctgcttcaaggagggcgtgaggcagatccctgtggagagcgttcctggcattcgagagacaggctggaagccaytggggaaggagaaggggaaggagctgaaggaccccgaccagctctacacaaccctcaaaaacctgctggcccaaatcaagtctcaccccagtgcctggcccttcatggagcctgtgaagaagtcggaggcccctgactactacgaggtcatccgcttccccattgacctgaagaccatgactgagcggctgcgaagccgctactacgtgacccggaagctctttgtggccgacctgcagcgggtcatcgccaactgtcgcgagtacaaccccccggacagcgagtactgccgctgtgccagcgccctggagaagttcttctacttcaagctcaaggagggaggcctcattgacaagtaggcccatctttgggccgcagccctgacctggaatgtctccacctcggattctgatctgatccttagggggtgccctggccccacggacccgactcagcttgagacactccagccaagggtcctccggacccgatcctgcagctctttytggaccttcaggcacccccaagcgtgcagctctgtcccagccttcactgtgtgtgagaggtytcctgggttggggcccagcccctctagagtagctggtggccagggatgaaccttgcccagccgtggtggcccccaggcctggtccccaagagctttggaggcttggattcctgggcctggcccaggtggctgtttccctgaggaccagaactgctcattttagcttgagtgatggcttcaggggttggaagttcagcccaaactgaagggggccatgccttgtccagcactgttctgtcagtctcccccaggggtggggggtatggggaccattcattccctggcattaatcccttagagggaataataaagctttttatttctctg

SEQ ID NO: 3140 - DNA, 3090 bp, Homo sapiens
ggctgggagcgcggcgccgctctccgctgcgggggaggccatggcggaaccttcccaggccccgaccccggccccggctgcgcagccccggccccttcagtccccagcccctgccccaactccgactcctgcacccagcccggcttcagccccgattccgactcccaccccggcaccagcccctgccccagctgcagccccagccggcagcacagggactggggggcccggggtaggaagtgggggggccgggagcgggggggatccggctcgacctggcctgagccagcagcagcgcgccagtcagaggaaggcgcaagtccgggggctgccgcgcgccaagaagcttgagaagctaggggtcttctcggcttgcaaggccaatgaaacctgtaagtgtaatggctggaaaaaccccaagccccccactgcaccccgcatggatctgcagcagccagctgccaacctgagtgagctgtgccgcagttgtgagcaccccttggctgaccacgtatcccacttggagaatgtgtcagaggatgagataaaccgactgctggggatggtggtggatgtggagaatctcttcatgtctgttcacaaggaagaggacacagacaccaagcaggtctatttctacctcttcaagctactgcggaaatgcatcctgcagatgacccggcctgtggtggaggggtccctgggcagccctccatttgagaaacctaatattgagcagggtgtgctgaactttgtgcagtacaagtttagtcacctggctccccgggagcggcagacgatgttcgagctctcaaagatgttcttgctctgccttaactactggaagcttgagacacctgcccagtttcggcagaggtctcaggctgaggacgtggctacctacaaggtcaattacaccagatggctctgttactgccacgtgccccagagctgtgatagcctcccccgctacgaaaccactcatgtctttgggcgaagccttctccggtccattttcaccgttacccgccggcagctgctggaaaagttccgagtggagaaggacaaattggtgcccgagaagaggaccctcatcctcactcacttccccaaattcctgtccatgctggaggaggagatctatggggcaaactctccaatctgggagtcaggcttcaccatgccaccctcagaggggacacagctggttccccggccagcttcagtcagtgcagcggttgttcccagcacccccatcttcagccccagcatgggtgggggcagcaacagctccctgagtctggattstgcaggggccgagcctatgccaggcgagaagaggacgctcccagagaacctgaccctggaggatgccaagcggctccgtgtgatgggtgacatccccatggagctggtcaatgaggtcatgctgaccatcactgaccctgctgccatgctggggcctgagacgagcctgctttcggccaatgcggcccgggatgagacagcccgcctggaggagcgccgcggcatcatcgagttccatgtcatcggcaactcactgacgcccaaggccaaccggcgggtgttgctgtggctcgtggggctgcagaatgtcttttcccaccagctgccgcgcatgcctaaggagtatatcgcccgcctcgtctttgacccgaagcacaagactctggccttgatcaaggatgggcgggtcatcggtggcatctgcttccgcatgtttcccacccagggcttcacggagattgtcttctgtgctgtcacctcgaatgagcaggtcaagggttatgggacccacctgatgaaccacctgaaggagtatcacatcaagcacaacattctctacttcctcacctacgccgacgagtacgccatcggctacttcaaaaagcagggtttctccaaggacatcaaggtgcccaagagccgctacctgggctacatcaaggactacgagggagcgacgctgatggagtgtgagctgaatccccgcatcccctacacggagytgtcccacatcatcaagaagcagaaagagatcatcaagaagctgattgagcgcaaacaggcccagatccgcaaggtctacccggggctcagctgcttcaaggagggcgtgaggcagatccctgtggagagcgttcctggcattcgagagacaggctggaagccaytggggaaggagaaggggaaggagctgaaggaccccgaccagctctacacaaccctcaaaaacctgctggcccaaatcaagtctcaccccagtgcctggcccttcatggagcctgtgaagaagtcggaggcccctgactactacgaggtcatccgcttccccattgacctgaagaccatgactgagcggctgcgaagccgctactacgtgacccggaagctctttgtggccgacctgcagcgggtcatcgccaactgtcgcgagtacaaccccccggacagcgagtactgccgctgtgccagcgccctggagaagttcttctacttcaagctcaaggagggaggcctcattgacaagtaggcccatctttgggccgcagccctgacctggaatgtctccacctcggattctgatctgatccttagggggtgccctggccccacggacccgactcagcttgagacactccagccaagggtcctccggacccgatcctgcagctctttytggaccttcaggcacccccaagcgtgcagctctgtcccagccttcactgtgtgtgagaggtytcctgggttggggcccagcccctctagagtagctggtggccagggatgaaccttgcccagccgtggtggcccccaggcctggtccccaagagctttggaggcttggattcctgggcctggcccaggtggctgtttccctgaggaccagaactgctcattttagcttgagtgatggcttcaggggttggaagttcagcccaaactgaagggggccatgccttgtccagcactgttctgtcagtctcccccaggggtggggggtatggggaccattcattccctggcattaatcccttagagggaataataaagctttttatttctctg

SEQ ID NO: 3141 - DNA, 950 bp, Homo sapiens
atgcagtcgaagccctgtggctccaccccgagggtccagcccttaccactgctaagaactacaactcccagcccgagggaggtctctgcgcctgcggcctgacgccctacgcctacacttcccagagaacctagcggttacgccaacgcgcgcgtgcgcccttgcgcgtttctctcttcccactcgggtttgacctacagccgcccgggagaagatggctgccccagcagtgtccgggctctcccggcaggtgcgatgcttcagtacctctgtggtcagaccatttgccaagcttgtgaggcctcctgttcaggtatacggtattgaaggtcgctatgccacagctctttattctgctgcatcaaaacagaataagctggagcaagtagaaaaggagttgttgagagtagcacaaatcctgaaggaacccaaagtggctgcttctgttttgaatccctatgtgaagcgttccattaaagtgaaaagcctaaatgacatcacagcaaragagaggttctctcccctcactaccaayctgatcaatttgcttgctgaaaatggtcgattaagcaatacccaaggagtcgtttctgccttttytaccatgatgagtgtccatcgcggagaggtaccttgcacagtgacctctgcatctcctttagaagaagccacactctctgaattaaaaactgtcctcaagagcttcctaartcaaggccaaktattgaaattggaggctaagactgatccgtcaatcttgggtggaatgattgtgcgcattggcgagaaatatgttgacatgtctgtcaagaccaagattcagaagctgggcagggctatgcgggagattgtctaaaagtgttggttttctgccatcagtgaaaattcttaaacttggagcaacaataaaaagcttccagaacagatcatattatgttcactgtctttta

SEQ ID NO: 3142 - DNA, 964 bp, Homo sapiens
aaggagccaagatggccgaataggaacagctctggtctacagctcccagcgtgagcgacgcagaagacggtgatttctgcatttccatctgaggtaccgggttcatctctctagggagtgccagacagtgggcgcagatgcagtcgaagccctgtggctccaccccgagggtccagcccttaccactgctaagaactacaactcccagcccgagggaggtctctgcgcctgcggcctgacgccctacgcctacacttcccagagaacctagcggttacgccaacgcgcgcgtgcgcccttgcgcgtttctctcttcccactcgggtttgacctacagccgcccgggagaagatggctgccccagcagtgtccgggctctcccggcaggtgcgatgcttcagtacctctgtggtcagaccatttgccaagcttgtgaggcctcctgttcaggtatacggtattgaaggtcgctatgccacagctctttattctgctgcatcaaaacagaataagctggagcaagtagaaaaggagttgttgagagtagcacaaatcctgaaggaacccaaagtggctgcttctgttttgaatccctatgtgaagcgttccattaaagtgaaaagcctaaatgacatcacagcaaragagaggttctctcccctcactaccaayctgatcaatttgcttgctgaaaatggtcgattaagcaatacccaaggagtcgtttctgccttttytaccatgatgagtgtccatcgcggagaggtaccttgcacagtgacctctgcatctgtaagtaacgggttgttgctgctgtgtttgccttgatattacatgtgtcaccttttgcaggaagaaaagggaaaaacagggtaaaatcaagaaattgggaaaggtaacttgtcacctgggatgtttgtttcatttttatatcagcttctgtgaccctttgctttggaaaagc

SEQ ID NO: 3143 - DNA, 1087 bp, Homo sapiens
aaggagccaagatggccgaataggaacagctctggtctacagctcccagcgtgagcgacgcagaagacggtgatttctgcatttccatctgaggtaccgggttcatctctctagggagtgccagacagtgggcgcagatgcagtcgaagccctgtggctccaccccgagggtccagcccttaccactgctaagaactacaactcccagcccgagggaggtctctgcgcctgcggcctgacgccctacgcctacacttcccagagaacctagcggttacgccaacgcgcgcgtgcgcccttgcgcgtttctctcttcccactcgggtttgacctacagccgcccgggagaagatggctgccccagcagtgtccgggctctcccggcaggtgcgatgcttcagtacctctgtggtcagaccatttgccaagcttgtgaggcctcctgttcaggtatacggtattgaaggtcgctatgccacagctctttattctgctgcatcaaaacagaataagctggagcaagtagaaaaggagttgttgagagtagcacaaatcctgaaggaacccaaagtggctgcttctgttttgaatccctatgtgaagcgttccattaaagtgaaaagcctaaatgacatcacagcaaragagaggttctctcccctcactaccaayctgatcaatttgcttgctgaaaatggtcgattaagcaatacccaaggagtcgtttctgccttttytaccatgatgagtgtccatcgcggagaggtaccttgcacagtgacctctgcatctcctttagaagaagccacactctctgaattaaaaactgtcctcaagagcttcctaartcaaggccaaktattgaaattggaggctaagactgatccgtcaatcttgggtggaatgattgtgcgcattggcgagaaatatgttgacatgtctgtcaagaccaagattcagaagctgggcagggctatgcgggagattgtctaaaagtgttggttttctgccatcagtgaaaattcttaaacttggagcaacaataaaaagcttccagaacagatcatattatgttcactgtctttta

SEQ ID NO: 3144 - DNA, 957 bp, Homo sapiens
aaggagccaagatggccgaataggaacagctctggtctacagctcccagcgtgagcgacgcagaagacggtgatttctgcatttccatctgaggtaccgggttcatctctctagggagtgccagacagtgggcgcagatgcagtcgaagccctgtggctccaccccgagggtccagcccttaccactgctaagaactacaactcccagcccgagggaggtctctgcgcctgcggcctgacgccctacgcctacacttcccagagaacctagcggttacgccaacgcgcgcgtgcgcccttgcgcgtttctctcttcccactcgggtttgacctacagccgcccgggagaagatggctgccccagcagtgtccgggctctcccggcaggtgcgatgcttcagtacctctgtggtcagaccatttgccaagcttgtgaggcctcctgttcaggtatacggtattgaaggtcgctatgccacagctctttattctgctgcatcaaaacagaataagctggagcaagtagaaaaggagttgttgagagtagcaatttgcttgctgaaaatggtcgattaagcaatacccaaggagtcgtttctgccttttytaccatgatgagtgtccatcgcggagaggtaccttgcacagtgacctctgcatctcctttagaagaagccacactctctgaattaaaaactgtcctcaagagcttcctaartcaaggccaaktattgaaattggaggctaagactgatccgtcaatcttgggtggaatgattgtgcgcattggcgagaaatatgttgacatgtctgtcaagaccaagattcagaagctgggcagggctatgcgggagattgtctaaaagtgttggttttctgccatcagtgaaaattcttaaacttggagcaacaataaaaagcttccagaacagatcatattatgttcactgtctttta

SEQ ID NO: 3145 - DNA, 584 bp, Homo sapiens
ccggaatcggccctgtcgcccccgcccgcactccagagccggctgagaacggcagcggcgagggctccacgtgcagcgtctctccgggcaccttcgggtccaggactacaactcccggcagggtgcgcaaaacgaccgcccaaggcaacggaggctcacgagaatcagcatgattcttcagaggctcttcaggttctcctctgtcattcggtcagccgtctcagtccatttgcggaggaacattggtgytacagcagtggcatttaataaggaacttgatcctatacagaaactctttgtggacaagattagagaatacaaatctaagcgacagacatctggaggacctgttgatgctagttcagagtatcagcaagagctggagagggagctttttaagctcaagcaaatgtttggtaatgcagacatgaatacatttcccaccttcaaatttgaagatcccaaatttgaagtcatcgaaaaacmccaggcctgaagaaataaatttcagaataaacatgcatttcataactgtcaaatgttcttttaattctgagtccaaataaattatttggtgatgttga

SEQ ID NO: 3146 - DNA, 583 bp, Homo sapiens
tcgcagactgtctccgagacgcttcctgtccggtgagcgtcgaccgactgaaacggcggcccataatgcattgcgatggcggcatgattcttcagaggctcttcaggttctcctctgtcattcggtcagccgtctcagtccatttgcggaggaacattggtgytacagcagtggcatttaataaggaacttgatcctatacagaaactctttgtggacaagattagagaatacaaatctaagcgacagacatctggaggacctgttgatgctagttcagagtatcagcaagagctggagagggagctttttaagctcaagcaaatgtttggtaatgcagacatgaatacatttcccaccttcaaatttgaagatcccaaatttgaagtcatcgaaaaacmccaggcctgaagaaataaagtaaaattaatctggtaatttgtcacggattagttgtacaactagttagaagtttcagaataaacatgcatttcataactgtcaaatgttcttttaattctgagtccaaataaattatttggtgatgttgagtgtgttcttgatgaattgagttctgtgtgtta

SEQ ID NO: 3147 - DNA, 1192 bp, Homo sapiens
gcggccgcgggggggcccttgtgggggaaaaggccccggaacgaggccggcccgcgagggcccgcgctcccctcctccccggcggccgcactcacccactccggaatcggccctgtcgcccccgcccgcactccagagccggctgagaacggcagcggcgagggctccacgtgcagcgtctctccgggtaagacctgcagctcccgcgactagaagtgtgaggtcccagggcccttcccgcggaatcggcgctgagaagccccaacccccctcccgcctcccaggcaccttcgggtccaggactacaactcccggcagggtgcgcaaaacgaccgcccaaggcaacggaggctcacgaggtacaaggaagcacaacgccccaatccgctttgttttacacagtctcactttccctgcacctttatacacttcgataaccctaacgaacaggacgctgactcggaggggagcttgaactaggggaaaggccactcaaagagcgcatgcgtacagagcaaggtttcaaggaggggaaaaagaacgggtcaaattaggcgaagaaaagatggcggaggctgtgccaggggacccggaagcacttaccctccacttcctcctcctgtttggcttctgtctcacctagacccgtccggtcgcagactgtctccgagacgcttcctgtccgaatcagcatgattcttcagaggctcttcaggttctcctctgtcattcggtcagccgtctcagtccatttgcggaggaacattggtgytacagcagtggcatttaataaggaacttgatcctatacagaaactctttgtggacaagattagagaatacaaatctaagcgacagacatctggaggacctgttgatgctagttcagagtatcagcaagagctggagagggagctttttaagctcaagcaaatgtttggtaatgcagacatgaatacatttcccaccttcaaatttgaagatcccaaatttgaagtcatcgaaaaacmccaggcctgaagaaataaagtaaaattaatctggtaatttgtcacggattagttgtacaactagttagaagtttcagaataaacatgcatttcataactgtcaaatgttcttttaattctgagtccaaataaattatttggtgatgttgagtgtgttcttgatgaattgagttctgtgtgtta

SEQ ID NO: 3148 - DNA, 514 bp, Homo sapiens
ccggaatcggccctgtcgcccccgcccgcactccagagccggctgagaacggcagcggcgagggctccacgtgcagcgtctctccgggcaccttcgggtccaggactacaactcccggcagggtgcgcaaaacgaccgcccaaggcaacggaggctcacgagaatcagcatgattcttcagaggctcttcaggttctcctctgtcattcggtcagccgtctcagtccatttgcggaggaacattggtgytacagcagtggcatttaataaggaacttgatcctatacagaaactcagtatcagcaagagctggagagggagctttttaagctcaagcaaatgtttggtaatgcagacatgaatacatttcccaccttcaaatttgaagatcccaaatttgaagtcatcgaaaaacmccaggcctgaagaaataaatttcagaataaacatgcatttcataactgtcaaatgttcttttaattctgagtccaaataaattatttggtgatgttga

SEQ ID NO: 3149 - DNA, 2646 bp, Homo sapiens
tgcctgccagcagctgaggcgccatggcggcggcagcggtgtcagagtcttggccggagctggagctggctgagcgcgagcggcggcgggagctgctgctgacggggcccgggctggaggagcgagtgcgggcggcgggtgggcagctgccgccgcggcttttcaccctgccgctgctgcactacttggaagtgagcggctgcgggagcttgcgcgcgccggggcctggcctggcgcagggcctgccgcagctgcacagcctcgtgctgcggcgcaacgcgctggggcccggcctgagccccgagctcgggccgctgcctgcccttcgggtgctcgacctgtcgggcaacgcgctggaggcgctgccgccgggccaaggcctgggccccgccgagccgccgggccttccgcagctgcagagcctcaacctcagcggcaaccggctgcgcgagctgccagccgacctggcgcgctgcgccccgcgcctgcagagcctcaacctcaccggcaattgcctagactcctttcccgccgagctctttcgccccggcgcgctgcccctgctcagtgaactggcggctgctgacaactgcctccgagaactcagccccgacatcgcccacctggcctcgctcaagacgttggacctctcgaacaaccagctgagcgagatccctgcagagcttgcggactgccccaagctcaaggagatcaatttccgtgggaacaagctgagggacaagcgcctggagaagatggtcagcggctgccagaccagatccatcctggagtacctgcgcgtyggaggccgtggtggcgggaagggcaagggccgtgccgagggctcggagaaggaagagagccggaggaagaggagggagaggaagcagaggcgggaaggtggtgatggggaggagcaggacgtgggagatgccggccggctgctgctcagggtcctgcacgtctctgaaaaccccgtacctctgacagtcagagtgagcccygaggtccgggatgtgcggccctacattgtgggggccgtggtgcgaggcatggacctgcagccagggaatgcactcaagcgcttcctcacctcgcagaccaagctccacgaagatctctgtgagaagaggacggctgccacccttgccacccacgagctccgtgccgtcaaagggcccctgctgtactgcgcccggcccccrcaggacctcaagattgtccccttggggcggaaagaagccaaggccaaggagctggtgcggcagctgcagctggaggccgaggagcagaggaagcagaagaagcggcagagtgtgtcgggcctgcacagataccttcacttgctggatggaaatgaaaattacccgtgtcttgtggatgcagacggtgatgtgatttccttcccaccaataaccaacagtgagaagacaaaggttaagaaaacgacttctgatttgtttttggaagtaacaagtgccaccagtctgcagatttgcaaggatgtcatggatgccctcattctgaaaatggcagaaatgaaaaagtacactttagaaaataaagaggaaggatcactctcagatactgaagccgatgcagtctctggacaacttccagatcccacaacgaatcccagtgctggaaaggacgggccctcccttctggtggtggagcaggtccgggtggtggatctggaagggagcctgaaggtggtgtacccgtcyaaggccgacctggccactgcccctccccacgtgactrtcgtgcgctgacgccagggccgcctgtccgcgtttgtttggccggttttgcggaggtttctatgcggcaatgctgaattatccgttagattttcaccccagtttttttgttggtttttttttttgagatggagtctcgctctgtcgccaggctggagtgcagtggcgtgatctcgastcactgcagcctgtgtctccygggttcaagcgattctcctgcctcagcctcccaagtagctgggactacaggtgtgtgccactaagctcagctaatttttgtatttttagtagagacggggtttcaccattttgaccaggatggtcttgatctcttgacctcatgatctgtccacctctgcccctcaaagtgctgggattacgtgatccacccgcctcagcctcccaaagtgctgggattacaggcgtgagctgtgcctggcccaccccagcattttttaagatgtatgtattcgttgttctgtttttccagatgattctgtcgtaaagtgatgctatgttgtcgttamaacatcaaagtgattttacggtttttgatgggattattcaagtgtcagaattaactgttcaaaatgttctgaatcatgtagatacatggcaggtaactgttyatgggagaaaagtacagtgctgttacgtggcactgtacagtcatgtgccacgtaacagcgtctgggtcagtgacggacacttacctgacagcggatccacaatattctcgtgcagtgtgtttggaatcctggtctgggctctcgkcgttggccttgtagatcaagtaggggaagtgagtgatgttcagtcatgctgctgggacacttggttttccagatgaaaacacataaataaaactacatgcaccatcgag

SEQ ID NO: 3150 - DNA, 2005 bp, Homo sapiens
tgcctgccagcagctgaggcgccatggcggcggcagcggtgtcagagtcttggccggagctggagctggctgagcgcgagcggcggcgggagctgctgctgacggggcccgggctggaggagcgagtgcgggcggcgggtgggcagctgccgccgcggcttttcaccctgccgctgctgcactacttggaagtgagcggctgcgggagcttgcgcgcgccggggcctggcctggcgcagggcctgccgcagctgcacagcctcgtgctgcggcgcaacgcgctggggcccggcctgagccccgagctcgggccgctgcctgcccttcgggtgctcgacctgtcgggcaacgcgctggaggcgctgccgccgggccaaggcctgggccccgccgagccgccgggccttccgcagctgcagagcctcaacctcagcggcaaccggctgcgcgagctgccagccgacctggcgcgctgcgccccgcgcctgcagagcctcaacctcaccggcaattgcctagactcctttcccgccgagctctttcgccccggcgcgctgcccctgctcagtgaactggcggctgctgacaactgcctccgagaactcagccccgacatcgcccacctggcctcgctcaagacgttggacctctcgaacaaccagctgagcgagatccctgcagagcttgcggactgccccaagctcaaggagatcaatttccgtgggaacaagctgagggacaagcgcctggagaagatggtcagcggctgccagaccagatccatcctggagtacctgcgcgtyggaggccgtggtggcgggaagggcaagggccgtgccgagggctcggagaaggaagagagccggaggaagaggagggagaggaagcagaggcgggaaggtggtgatggggaggagcaggacgtgggagatgccggccggctgctgctcagggtcctgcacgtctctgaaaaccccgtacctctgacagtcagagtgagcccygaggtccgggatgtgcggccctacattgtgggggccgtggtgcgaggcatggacctgcagccagggaatgcactcaagcgcttcctcacctcgcagaccaagctccacgaagatctctgtgagaagaggacggctgccacccttgccacccacgagctccgtgccgtcaaagggcccctgctgtactgcgcccggcccccrcaggacctcaagattgtccccttggggcggaaagaagccaaggccaaggagctggtgcggcagctgcagctggaggccgaggagcagaggaagcagaagaagcggcagagtgtgtcgggcctgcacagataccttcacttgctggatggaaatgaaaattacccgtgtcttgtggatgcagacggtgatgtgatttccttcccaccaataaccaacagtgagaagacaaaggttaagaaaacgacttctgatttgtttttggaagtaacaagtgccaccagtctgcagatttgcaaggatgtcatggatgccctcattctgaaaatggcagaaatgaaaaagtacactttagaaaataaagaggaaggatcactctcagatactgaagccgatgcagtctctggacaacttccagatcccacaacgaatcccagtgctggaaaggacgggccctcccttctggtggtggagcaggtccgggtggtggatctggaagggagcctgaaggtggtgtacccgtcyaaggccgacctggccactgcccctccccacgtgactrtcgtgcgstgacgccagggccgcctgtccgcgtttgtttggccggttttgcggaggtttctatgcggcaatgctgaattatccgttagattttcaccccagtttttttgttggtttttttttttgagatggagtctcgctctgtcgccaggctggagtgcagtggcgtgatctcgaaatcacttgaacccaggaggcggaggttgcagtgagctgagatcacaccactgcactccagcctg

SEQ ID NO: 3151 - DNA, 2154 bp, Homo sapiens
ccactgaagatcctggtgtcgccatgggccgccgccccgcccgttgttaccggtattgtaagaacaagccgtacccaaagtctcgcttctgccgaggtgtccctgatgccaagattcgcatttttgacctggggcggaaaaaggcaaaagtggatgagtttccgctttgtggccacatggtgtcagatgaatatgagcagctgtcctctgaagccctggaggctgcccgaatttgtgccaataagtacatggtaaaaagttgtggcaaagatggcttccatatccgggtgcggctccaccccttccacgtcatccgcatcaacaagatgttgtcctgtgctggggctgacaggctccaaacaggcatgcgaggtgcctttggaaagccccagggcactgtggccagggttcacattggccaagttatcatgtccatccgcaccaagctgcagaacaaggagcatgtgattgaggccctgcgcagggccaagttcaagtttcctggccgccagaagatccacatctcaaagaagtggggcttcaccaagttcaatgctgatgaatttgaagacatggtggctgaaaagcggctcatcccagatggctgtggggtcaagtacatccccartcgtggccctctggacaagtggcgggccctgcactcatgagggcttccaatgtgctgcccccctcttaatactcaccaataaattctacttcctgtccacctatgtctttgtatctacattcttgacggggaaggaacttcctctgggaacctttgggtcattgccctttcacttcagaaacaggttgacaactcagccctgctcatgaggcagcaaaccctgcaaagggctgggactggtggccttatgtcagttgtctactctggagcttgacttggacctccccaggtcctaggcagtaggttgaaaaacactgaagtgcttttcatgaagcacagctgcagcaaagccttgcaatcccaggctggggtcagcctacagttgtgttgcttattacaacacatgcggaccaagaggggcttgtgggctagaggctgaccagcagcgtttatttagcaagggtaggtgtgcatcacattgggcttgttctcacccatctggtttggycattcctccttggtgggaatcatccaggtactgctgaggtcacctgcgatttgccccatttcctatctctagcaacctcctgggccccatgcccccaccccttctagaacctgcattcccagggccttcaccacctgaccaaaggtctaggctaacctttggtcatttgtaacaagacctcggaacagacacgtgtgtggcatggtttggcctggggatcttagatgtctgacctgaactattgtagaacagcgctggcttttgggggagcagcaaaaatgagaggagtgctaggtgggtggcctgagcatctgtatccagggacaggactccaaaggcttttggtcccagagctggggtatgttggccccagcccccagcctgtggctcccaaaaggcctctggttttttgtaatctcagtttacagccatttcttaggtttttaattacctttattttattttgccaaacatacctgggaataccttttattttttttttaccttggggtgatggttccaaaccataaatgtgattatagttaacacatgacccttctagcgtcccagccagtgtttttcctgacctctsttctttggagaggaggatggaagggaggggtccggcaygctgctggcattttgctgtgtcctgcagcccctttccgggacacctgggttcacacagctttttagcttacataactggtgcagattttctgtgtggagatgttgccttgaccagccttggctggacctttaccaggcatgcagaagcctgtaccaacacagactacagcacccaggaggtgcgagtgtggctgctcagcggttataacaggcctgactgcattgttcaccggattataatgagccaaaatgtttcccggtgtttgctggtttcrgggaaggagtttgatatagcagattaaccaccctccttgtagctattggggcttaatggtttcctggtgattcttaccaatccacaataaacatggcccattggcatatctgc

SEQ ID NO: 3152 - DNA, 2276 bp, Homo sapiens
gcctctttcccttcggtgtggtragtaagcgcagttgtcgtctcttgcggtgccgttgctggttctcacaccttttaggtctgttctcgtcttccgttccgactctctctttttcgttgcagccactgaagatcctggtgtcgccatgggccgccgccccgcccgttgttaccggtattgtaagaacaagccgtacccaaagtctcgcttctgccgaggtgtccctgatgccaagattcgcatttttgacctggggcggaaaaaggcaaaagtggatgagtttccgctttgtggccacatggtgtcagatgaatatgagcagctgtcctctgaagccctggaggctgcccgaatttgtgccaataagtacatggtaaaaagttgtggcaaagatggcttccatatccgggtgcggctccaccccttccacgtcatccgcatcaacaagatgttgtcctgtgctggggctgacaggctccaaacaggcatgcgaggtgcctttggaaagccccagggcactgtggccagggttcacattggccaagttatcatgtccatccgcaccaagctgcagaacaaggagcatgtgattgaggccctgcgcagggccaagttcaagtttcctggccgccagaagatccacatctcaaagaagtggggcttcaccaagttcaatgctgatgaatttgaagacatggtggctgaaaagcggctcatcccagatggctgtggggtcaagtacatccccartcgtggccctctggacaagtggcgggccctgcactcatgagggcttccaatgtgctgcccccctcttaatactcaccaataaattctacttcctgtccacctatgtctttgtatctacattcttgacggggaaggaacttcctctgggaacctttgggtcattgccctttcacttcagaaacaggttgacaactcagccctgctcatgaggcagcaaaccctgcaaagggctgggactggtggccttatgtcagttgtctactctggagcttgacttggacctccccaggtcctaggcagtaggttgaaaaacactgaagtgcttttcatgaagcacagctgcagcaaagccttgcaatcccaggctggggtcagcctacagttgtgttgcttattacaacacatgcggaccaagaggggcttgtgggctagaggctgaccagcagcgtttatttagcaagggtaggtgtgcatcacattgggcttgttctcacccatctggtttggycattcctccttggtgggaatcatccaggtactgctgaggtcacctgcgatttgccccatttcctatctctagcaacctcctgggccccatgcccccaccccttctagaacctgcattcccagggccttcaccacctgaccaaaggtctaggctaacctttggtcatttgtaacaagacctcggaacagacacgtgtgtggcatggtttggcctggggatcttagatgtctgacctgaactattgtagaacagcgctggcttttgggggagcagcaaaaatgagaggagtgctaggtgggtggcctgagcatctgtatccagggacaggactccaaaggcttttggtcccagagctggggtatgttggccccagcccccagcctgtggctcccaaaaggcctctggttttttgtaatctcagtttacagccatttcttaggtttttaattacctttattttattttgccaaacatacctgggaataccttttattttttttttaccttggggtgatggttccaaaccataaatgtgattatagttaacacatgacccttctagcgtcccagccagtgtttttcctgacctctsttctttggagaggaggatggaagggaggggtccggcaygctgctggcattttgctgtgtcctgcagcccctttccgggacacctgggttcacacagctttttagcttacataactggtgcagattttctgtgtggagatgttgccttgaccagccttggctggacctttaccaggcatgcagaagcctgtaccaacacagactacagcacccaggaggtgcgagtgtggctgctcagcggttataacaggcctgactgcattgttcaccggattataatgagccaaaatgtttcccggtgtttgctggtttcrgggaaggagtttgatatagcagattaaccaccctccttgtagctattggggcttaatggtttcctggtgattcttaccaatccacaataaacatggcccattggcatatctgc

SEQ ID NO: 3153 - DNA, 2490 bp, Homo sapiens
ctctcagaaatatacgtctgtcacagttaacggcaaagcctarggcaagagttctacgcccaagatggccagccggaagcgggcttctcgcgaccatgtggcgaagccccattcgtcagctggccgcccgcggcyctggtacccggtcacctctctgatctgcgcatgtgctgggctacgcccgggcgcaaggccaagagcggctgcgtctatggtcatgacgtctgacagagcgtccacccgtcttcgmcaggactctatggttcttacgcgcgcaracagaccgcctatataarccatgcgcaggcggaggagcgcctctttcccttcggtgtgccactgaagatcctggtgtcgccatgggccgccgccccgcccgttgttaccggtattgtaagaacaagccgtacccaaagtctcgcttctgccgaggtgtccctgatgccaagattcgcatttttgacctggggcggaaaaaggcaaaagtggatgagtttccgctttgtggccacatggtgtcagatgaatatgagcagctgtcctctgaagccctggaggctgcccgaatttgtgccaataagtacatggtaaaaagttgtggcaaagatggcttccatatccgggtgcggctccaccccttccacgtcatccgcatcaacaagatgttgtcctgtgctggggctgacaggctccaaacaggcatgcgaggtgcctttggaaagccccagggcactgtggccagggttcacattggccaagttatcatgtccatccgcaccaagctgcagaacaaggagcatgtgattgaggccctgcgcagggccaagttcaagtttcctggccgccagaagatccacatctcaaagaagtggggcttcaccaagttcaatgctgatgaatttgaagacatggtggctgaaaagcggctcatcccagatggctgtggggtcaagtacatccccartcgtggccctctggacaagtggcgggccctgcactcatgagggcttccaatgtgctgcccccctcttaatactcaccaataaattctacttcctgtccacctatgtctttgtatctacattcttgacggggaaggaacttcctctgggaacctttgggtcattgccctttcacttcagaaacaggttgacaactcagccctgctcatgaggcagcaaaccctgcaaagggctgggactggtggccttatgtcagttgtctactctggagcttgacttggacctccccaggtcctaggcagtaggttgaaaaacactgaagtgcttttcatgaagcacagctgcagcaaagccttgcaatcccaggctggggtcagcctacagttgtgttgcttattacaacacatgcggaccaagaggggcttgtgggctagaggctgaccagcagcgtttatttagcaagggtaggtgtgcatcacattgggcttgttctcacccatctggtttggycattcctccttggtgggaatcatccaggtactgctgaggtcacctgcgatttgccccatttcctatctctagcaacctcctgggccccatgcccccaccccttctagaacctgcattcccagggccttcaccacctgaccaaaggtctaggctaacctttggtcatttgtaacaagacctcggaacagacacgtgtgtggcatggtttggcctggggatcttagatgtctgacctgaactattgtagaacagcgctggcttttgggggagcagcaaaaatgagaggagtgctaggtgggtggcctgagcatctgtatccagggacaggactccaaaggcttttggtcccagagctggggtatgttggccccagcccccagcctgtggctcccaaaaggcctctggttttttgtaatctcagtttacagccatttcttaggtttttaattacctttattttattttgccaaacatacctgggaataccttttattttttttttaccttggggtgatggttccaaaccataaatgtgattatagttaacacatgacccttctagcgtcccagccagtgtttttcctgacctctsttctttggagaggaggatggaagggaggggtccggcaygctgctggcattttgctgtgtcctgcagcccctttccgggacacctgggttcacacagctttttagcttacataactggtgcagattttctgtgtggagatgttgccttgaccagccttggctggacctttaccaggcatgcagaagcctgtaccaacacagactacagcacccaggaggtgcgagtgtggctgctcagcggttataacaggcctgactgcattgttcaccggattataatgagccaaaatgtttcccggtgtttgctggtttcrgggaaggagtttgatatagcagattaaccaccctccttgtagctattggggcttaatggtttcctggtgattcttaccaatccacaataaacatggcccattggcatatctgc

SEQ ID NO: 3154 - DNA, 3219 bp, Homo sapiens
ctctcagaaatatacgtctgtcacagttaacggcaaagcctarggcaagagttctacgcccaagatggccagccggaagcgggcttctcgcgaccatgtggcgaagccccattcgtcagctggccgcccgcggcyctggtacccggtcacctctctgatctgcgcatgtgctgggctacgcccgggcgcaaggccaagagcggctgcgtctatggtcatgacgtctgacagagcgtccacccgtcttcgmcaggactctatggttcttacgcgcgcaracagaccgcctatataarccatgcgcaggcggaggagcgcctctttcccttcggtgtgccactgaagatcctggtgtcgccatgggccgccgccccgcccgttgttaccggtattgtaagaacaagccgtacccaaagtctcgcttctgccgaggtgtccctgatgccaagattcgcatttttgacctggggcggaaaaaggcaaaagtggatgagtttccgctttgtggccacatggtgtcagatgaatatgagcagctgtcctctgaaggtaaggcaggattctttgttcgtcaccccccagtccttcctccgtgctccmtcaaccccacccacatacactgcactggaattgggagttgatgaaacatgagccttacaaaactcagccaacacagttcccctgagctggagatagtcgtggtgaatgtttctctattatcttctctcactttgctgcttttcttctccctacctagccctggaggctgcccgaatttgtgccaataagtacatggtaaaaagttgtggcaaagatggcttccatatccgggtgcggctccaccccttccacgtcatccgcatcaacaagatgttgtcctgtgctggggctgacaggtgagcttggtctgggccttttaaggcagttggagtctctacattattaggcttgcattattttatcagagcatagaggtggccccagtgactcagccactatggctactagaaaagccaggctggcaagtgactttcagtggtcactcaggaccccttcctgcagatacaaacaaagcatgagtaagtcttagcaagctcttccccacaggttaggggaaacactggtgatgggagtagctcttcttgcttttagctgaatgacaaccatcttgccagcaggtagctgaagctggcagaggagcccagtggcgccttttcagtggttcttgggatctccgcagccaattaagccgactgagttcctttcctcatggggacccagtgtgcgatggctgcacacagcagcttccttggtagtgtacgcagcctgttggttgtatgggttgctctaagggaccttggagacaggcctttcaggtggatgttcatgtttctgaccttgcactaccccaatgtaggctccaaacaggcatgcgaggtgcctttggaaagccccagggcactgtggccagggttcacattggccaagttatcatgtccatccgcaccaagctgcagaacaaggagcatgtgattgaggccctgcgcagggccaagttcaagtttcctggccgccagaagatccacatctcaaagaagtggggcttcaccaagttcaatgctgatgaatttgaagacatggtggctgaaaagcggctcatcccagatggctgtggggtcaagtacatccccartcgtggccctctggacaagtggcgggccctgcactcatgagggcttccaatgtgctgcccccctcttaatactcaccaataaattctacttcctgtccacctatgtctttgtatctacattcttgacggggaaggaacttcctctgggaacctttgggtcattgccctttcacttcagaaacaggttgacaactcagccctgctcatgaggcagcaaaccctgcaaagggctgggactggtggccttatgtcagttgtctactctggagcttgacttggacctccccaggtcctaggcagtaggttgaaaaacactgaagtgcttttcatgaagcacagctgcagcaaagccttgcaatcccaggctggggtcagcctacagttgtgttgcttattacaacacatgcggaccaagaggggcttgtgggctagaggctgaccagcagcgtttatttagcaagggtaggtgtgcatcacattgggcttgttctcacccatctggtttggycattcctccttggtgggaatcatccaggtactgctgaggtcacctgcgatttgccccatttcctatctctagcaacctcctgggccccatgcccccaccccttctagaacctgcattcccagggccttcaccacctgaccaaaggtctaggctaacctttggtcatttgtaacaagacctcggaacagacacgtgtgtggcatggtttggcctggggatcttagatgtctgacctgaactattgtagaacagcgctggcttttgggggagcagcaaaaatgagaggagtgctaggtgggtggcctgagcatctgtatccagggacaggactccaaaggcttttggtcccagagctggggtatgttggccccagcccccagcctgtggctcccaaaaggcctctggttttttgtaatctcagtttacagccatttcttaggtttttaattacctttattttattttgccaaacatacctgggaataccttttattttttttttaccttggggtgatggttccaaaccataaatgtgattatagttaacacatgacccttctagcgtcccagccagtgtttttcctgacctctsttctttggagaggaggatggaagggaggggtccggcaygctgctggcattttgctgtgtcctgcagcccctttccgggacacctgggttcacacagctttttagcttacataactggtgcagattttctgtgtggagatgttgccttgaccagccttggctggacctttaccaggcatgcagaagcctgtaccaacacagactacagcacccaggaggtgcgagtgtggctgctcagcggttataacaggcctgactgcattgttcaccggattataatgagccaaaatgtttcccggtgtttgctggtttcrgggaaggagtttgatatagcagattaaccaccctccttgtagctattggggcttaatggtttcctggtgattcttaccaatccacaataaacatggcccattggcatatctgc

SEQ ID NO: 3155 - DNA, 2327 bp, Homo sapiens
ctctcagaaatatacgtctgtcacagttaacggcaaagcctarggcaagagttctacgcccaagatggccagccggaagcgggcttctcgcgaccatgtggcgaagccccattcgtcagctggccgcccgcggcyctggtacccggtcacctctctgatctgcgcatgtgctgggctacgcccgggcgcaaggccaagagcggctgcgtctatggtcatgacgtctgacagagcgtccacccgtcttcgmcaggactctatggttcttacgcgcgcaracagaccgcctatataarccatgcgcaggcggaggagcgcctctttcccttcggtgtgccactgaagatcctggtgtcgccatgggccgccgccccgcccgttgttaccggtattgtaagaacaagccgtacccaaagtctcgcttctgccgaggtgtccctgatgccaagattcgcatttttgacctggggcggaaaaaggcaaaagtggatgagtttccgctttgtggccacatggtgtcagatgaatatgagcagctgtcctctgaagccctggaggctgcccgaatttgtgccaataagtacatggtaaaaagttgtggcaaagatggcttccatatccgggtgcggctccaccccttccacgtcatccgcatcaacaagatgttgtcctgtgctggggctgacagatccacatctcaaagaagtggggcttcaccaagttcaatgctgatgaatttgaagacatggtggctgaaaagcggctcatcccagatggctgtggggtcaagtacatccccartcgtggccctctggacaagtggcgggccctgcactcatgagggcttccaatgtgctgcccccctcttaatactcaccaataaattctacttcctgtccacctatgtctttgtatctacattcttgacggggaaggaacttcctctgggaacctttgggtcattgccctttcacttcagaaacaggttgacaactcagccctgctcatgaggcagcaaaccctgcaaagggctgggactggtggccttatgtcagttgtctactctggagcttgacttggacctccccaggtcctaggcagtaggttgaaaaacactgaagtgcttttcatgaagcacagctgcagcaaagccttgcaatcccaggctggggtcagcctacagttgtgttgcttattacaacacatgcggaccaagaggggcttgtgggctagaggctgaccagcagcgtttatttagcaagggtaggtgtgcatcacattgggcttgttctcacccatctggtttggycattcctccttggtgggaatcatccaggtactgctgaggtcacctgcgatttgccccatttcctatctctagcaacctcctgggccccatgcccccaccccttctagaacctgcattcccagggccttcaccacctgaccaaaggtctaggctaacctttggtcatttgtaacaagacctcggaacagacacgtgtgtggcatggtttggcctggggatcttagatgtctgacctgaactattgtagaacagcgctggcttttgggggagcagcaaaaatgagaggagtgctaggtgggtggcctgagcatctgtatccagggacaggactccaaaggcttttggtcccagagctggggtatgttggccccagcccccagcctgtggctcccaaaaggcctctggttttttgtaatctcagtttacagccatttcttaggtttttaattacctttattttattttgccaaacatacctgggaataccttttattttttttttaccttggggtgatggttccaaaccataaatgtgattatagttaacacatgacccttctagcgtcccagccagtgtttttcctgacctctsttctttggagaggaggatggaagggaggggtccggcaygctgctggcattttgctgtgtcctgcagcccctttccgggacacctgggttcacacagctttttagcttacataactggtgcagattttctgtgtggagatgttgccttgaccagccttggctggacctttaccaggcatgcagaagcctgtaccaacacagactacagcacccaggaggtgcgagtgtggctgctcagcggttataacaggcctgactgcattgttcaccggattataatgagccaaaatgtttcccggtgtttgctggtttcrgggaaggagtttgatatagcagattaaccaccctccttgtagctattggggcttaatggtttcctggtgattcttaccaatccacaataaacatggcccattggcatatctgc

SEQ ID NO: 3156 - DNA, 3116 bp, Homo sapiens
ttcgttgcagccactgaagatcctggtgtcgccatgggccgccgccccgcccgttggtgagtctwgaatccgtgtactttcactgctgggaaacgggcggggaaagaagtgcctatggccgctgaaaacaattgtggggtggagcctcccccgtgcggcggccctgtcttgggaactgaccctatgttttacacctcccggctattttttagtctgcaatattactgtctgttccttcgttcccgtgtcggtgtggaagcgacggttccctcgtatctctgcctgtgtcctgcaagctcaccgcattttcgggcgctmgatacgctcttggggcctttgtgtgcgttctctgtcttatttccgggcgacgtgccgcgtgcgttgtcggacgtgaagggcagtccgggaaaaacgggtgcggccgcctcctgtgtcctacagggggcgccagacgcatttccactcggctyggaggtggatttagtgccacgtgcccgaaagtcttaaattgggtgacctgagctgtgcaatgataatgcggcgattttgtagtacgcagtgtcttgaagagagaatttttaactaggaaagtttgttgcaaagtgtttataggaagcgtaagacaaagtaacggaagatggtgtctgttgtttctagtcttgggtgttstctgtgttgcagcagccaactgttgctttgtagtttatttccccgaatggaaacggtttagaagtggacgtgcattccccacccttttcccgtccctcgtttgggttgttccttgaggggcaaagtgcctgttgggctttctgtgaacctcacctaacctgtgttttttcactcccctgcagttaccggtattgtaagaacaagccgtacccaaagtctcgcttctgccgaggtgtccctggtaagtagtggaagagcccctgcactggttggctctgcggactccgcgtccgtctgtgacaccccctgcacacttacccaatccttttagatgccaagattcgcatttttgacctggggcggaaaaaggcaaaagtggatgagtttccgctttgtggccacatggtgtcagatgaatatgagcagctgtcctctgaaggtaaggcaggattctttgttcgtcaccccccagtccttcctccgtgctccmtcaaccccacccacatacactgcactggaattgggagttgatgaaacatgagccttacaaaactcagccaacacagttcccctgagctggagatagtcgtggtgaatgtttctctattatcttctctcactttgctgcttttcttctccctacctagccctggaggctgcccgaatttgtgccaataagtacatggtaaaaagttgtggcaaagatggcttccatatccgggtgcggctccaccccttccacgtcatccgcatcaacaagatgttgtcctgtgctggggctgacaggtgagcttggtctgggccttttaaggcagttggagtctctacattattaggcttgcattattttatcagagcatagaggtggccccagtgactcagccactatggctactagaaaagccaggctggcaagtgactttcagtggtcactcaggaccccttcctgcagatacaaacaaagcatgagtaagtcttagcaagctcttccccacaggttaggggaaacactggtgatgggagtagctcttcttgcttttagctgaatgacaaccatcttgccagcaggtagctgaagctggcagaggagcccagtggcgccttttcagtggttcttgggatctccgcagccaattaagccgactgagttcctttcctcatggggacccagtgtgcgatggctgcacacagcagcttccttggtagtgtacgcagcctgttggttgtatgggttgctctaagggaccttggagacaggcctttcaggtggatgttcatgtttctgaccttgcactaccccaatgtaggctccaaacaggcatgcgaggtgcctttggaaagccccagggcactgtggccagggttcacattggccaagttatcatgtccatccgcaccaagctgcagaacaaggagcatgtgattgaggccctgcgcagggccaagttcaagtttcctggccgccagaaggtatgtagtgctgcagcccccttctcccacctttgccccaggcctcctgactsagttctttccattgctccttagatccacatctcaaagaagtggggcttcaccaagttcaatgctgatgaatttgaagacatggtggctgaaaagcggctcatcccagatggctgtggggtcaagtacatccccartcgtggccctctggacaagtggcgggccctgcactcatgagggcttccaatgtgctgcccccctcttaatactcaccaataaattctacttcctgtccacctatgtctttgtatctacattcttgacggggaaggaacttcctctgggaacctttgggtcattgccctttcacttcagaaacaggttgacaactcagccctgctcatgaggcagcaaaccctgcaaagggctgggactggtggccttatgtcagttgtctactctggagcttgacttggacctccccaggtcctaggcagtaggttgaaaaacactgaagtgcttttcatgaagcacagctgcagcaaagccttgcaatcccaggctggggtcagcctacagttgtgttgcttattacaacacatgcggaccaagaggggcttgtgggctagaggctgaccagcagcgtttatttagcaagggtaggtgtgcatcacattgggcttgttctcacccatctggtttggycattcctccttggtgggaatcatccaggtactgctgaggtcacctgcgatttgccccatttcctatctctagcaacctcctgggccccatgcccccaccccttctagaacctgcattcccagggccttcaccacctgaccaaaggtctaggctaacctttggtcatttgtaacaagacctcggaacagacacgtgtgtggcatggtttggcctggggatcttagatgtctgacctgaactattgtagaacagcgctggcttttgggggagcagcaaaaatg

SEQ ID NO: 3157 - DNA, 2018 bp, Homo sapiens
aacggtcacctgatctgcggctgtcgaggccgctgaggcagtggaggctgaggctatgatggcggccatggcgacggctcgagtgcggatggggccgcgrtgcgcccaggcgctctggcgcatgccgtggctgccggtgtttttgtcgttggcggcggcggcggcggcggcagcggcggagcagcaggtcccgctggtgctgtggtcgagtgaccgggacttgtgggctcctgcggccgacactcatgaaggccacatcaccagcgacttgcagctctctacctacttagatcccgccctggagctgggtcccaggaatgtgctgctgttcctgcaggacaagaatgccctggacctggccccctcctcactggtgcttcctgccgtcgactggtatgcagtcagcactctgaccacttacctgcaggagaagctcggggccagccccttgcatgtggacctggccaccctgcgggagctgaagctcaatgccagcctccctgctctgctgctcattcgcctgccctacacagccagctctggtctgatggcacccagggaagtcctcacaggcaacgatgaggtcatcgggcaggtcctgagcacactcaagtccgaagatgtcccatacacagcggccctcacagcggtccgcccttccagggtggcccgtgatgtagccgtggtggccggagggctaggtcgccagctgctacaaaaacagccagtatcacctgtgatccatcctcctgtgagttacaatgacaccgctccccggatcctgttctgggcccaaaacttctctgtggcgtacaaggaccagtgggaggacctgactcccctcacctttggggtgcaggaactcaacctgactggctccttctggaatgactcctttgccaggctctcactgacctatgaacgactctttggtaccacagtgacattcaagttcattctggccaaccgcctctacccagtgtctgcccggcactggtttaccatggagcgcctcgaagtccacagcaatggctccgtcgcctacttcaatgcttcccaggtcacagggcccagcatctactccttccactgcgagtatgtcagcagcctgagcaagaagggtagtctcctcgtggcccgcacgcagccctctccctggcagatgatgcttcaggacttccagatccaggctttcaacgtaatgggggagcagttctcctacgccagcgactgtgccagcttcttctcccccggcatctggatggggctgctcacctccctgttcatgctcttcatcttcacctatggcctgcacatgatcctcagcctcaagaccatggatcgctttgatgaccacaagggccccactatttctttgacccagattgtgtgaccctgtgccagtgggggggttgagggtgggacggtgtccgtgttgttgmtttcccaccctgcagcgcactggactgaagagcttccctcttcctrctgcagcatgaactgcaagctcccctcagcccatcttgctccctcttcagcccgctgaggagctttcttgggctgcccccatctctcccaacaaggtgtacatattctgcgtagatgctagaccaaccagcttcccagggttcgtcgctgtgaggcgtaagggacrtgaattctagggtctcctttctccttatttattcttgtggctacatcatccctggctgtggatagtgcttttgtgtagcaaatgctccctccttaaggttatagggctccctgagtttgggagtgtggaagtactacttaactgtmtgtcctgcttggctgtcgttatcgttttctggtgatgttgtgctaacaataagmagtacacgggtttatttctgtggcctgagwaggaagggacctccacgacaggtgggctgggtgcgatcgccggctgtttgrcatgttcccmccgggagtgccgggcaggagcatggggtgcttggttgtttccttcctaataaaataaacgcgggtcgccatgc

SEQ ID NO: 3158 - DNA, 2093 bp, Homo sapiens
aacggtcacctgatctgcggctgtcgaggccgctgaggcagtggaggctgaggctatgatggcggccatggcgacggctcgagtgcggatggggccgcgrtgcgcccaggcgctctggcgcatgccgtggctgccggtgtttttgtcgttggcggcggcggcggcggcggcagcggcggagcagcaggtcccgctggtgctgtggtcgagtgaccgggacttgtgggctcctgcggccgacactcatgaaggccacatcaccagcgacttgcagctctctacctacttagatcccgccctggagctgggtcccaggaatgtgctgctgttcctgcaggacaagctgagcattgaggatttcacagcatatggcggtgtgtttggaaacaagcaggacagcgccttttctaacctagagaatgccctggacctggccccctcctcactggtgcttcctgccgtcgactggtatgcagtcagcactctgaccacttacctgcaggagaagctcggggccagccccttgcatgtggacctggccaccctgcgggagctgaagctcaatgccagcctccctgctctgctgctcattcgcctgccctacacagccagctctggtctgatggcacccagggaagtcctcacaggcaacgatgaggtcatcgggcaggtcctgagcacactcaagtccgaagatgtcccatacacagcggccctcacagcggtccgcccttccagggtggcccgtgatgtagccgtggtggccggagggctaggtcgccagctgctacaaaaacagccagtatcacctgtgatccatcctcctgtgagttacaatgacaccgctccccggatcctgttctgggcccaaaacttctctgtggcgtacaaggaccagtgggaggacctgactcccctcacctttggggtgcaggaactcaacctgactggctccttctggaatgactcctttgccaggctctcactgacctatgaacgactctttggtaccacagtgacattcaagttcattctggccaaccgcctctacccagtgtctgcccggcactggtttaccatggagcgcctcgaagtccacagcaatggctccgtcgcctacttcaatgcttcccaggtcacagggcccagcatctactccttccactgcgagtatgtcagcagcctgagcaagaagggtagtctcctcgtggcccgcacgcagccctctccctggcagatgatgcttcaggacttccagatccaggctttcaacgtaatgggggagcagttctcctacgccagcgactgtgccagcttcttctcccccggcatctggatggggctgctcacctccctgttcatgctcttcatcttcacctatggcctgcacatgatcctcagcctcaagaccatggatcgctttgatgaccacaagggccccactatttctttgacccagattgtgtgaccctgtgccagtgggggggttgagggtgggacggtgtccgtgttgttgmtttcccaccctgcagcgcactggactgaagagcttccctcttcctrctgcagcatgaactgcaagctcccctcagcccatcttgctccctcttcagcccgctgaggagctttcttgggctgcccccatctctcccaacaaggtgtacatattctgcgtagatgctagaccaaccagcttcccagggttcgtcgctgtgaggcgtaagggacrtgaattctagggtctcctttctccttatttattcttgtggctacatcatccctggctgtggatagtgcttttgtgtagcaaatgctccctccttaaggttatagggctccctgagtttgggagtgtggaagtactacttaactgtmtgtcctgcttggctgtcgttatcgttttctggtgatgttgtgctaacaataagmagtacacgggtttatttctgtggcctgagwaggaagggacctccacgacaggtgggctgggtgcgatcgccggctgtttgrcatgttcccmccgggagtgccgggcaggagcatggggtgcttggttgtttccttcctaataaaataaacgcgggtcgccatgc

SEQ ID NO: 3159 - DNA, 822 bp, Homo sapiens
ttctccgcggcgctccgggcccgggcsgctggcctyaccgcccactggccccaccggaagacatgtgaggaattgcataagacagctatgcaaaatggagctggaggagctttatttgtgcacagagatactcctgagaataaccctgatactccatttgatttcacaccagaaaactataagaggatagaggcaattgtwaaaaactatccagaaggccataaagcagcagctgttcttccagtcctggatttagcccaaaggcagaatgggtggttgcccatctctgctatgaacaaggttgcagaagttttacaagtacctccaatragagtatatgaagtagcaactttttatacaatgtataatcgaaagccagtygraaagtatcacattcaggyctgcactactacaccctgcatgcttccaaactctgacagcatactggaggccattcagaaaaagcttggaataaagcttggggagastacacctgacaaacttttcactcttgtagaagtggaatgtttaggggcctgtgtgaacgcaccaatggttcaaataaatgacaattactatgargatttgacagctarggatattgaagaaattattgatgagctcaaggctggcaaaatcccaaaacctgggccaaggagtggacgcttytcttgtgagccagctggaggtcytacccctttgactgaaccacccaagggacctggatttggcatacaagcaggcctttaatttatattgaactgtaaatatgtcactagagaaataaaatatggacttccagtctacataaacaaaacaaaa

SEQ ID NO: 3160 - DNA, 953 bp, Homo sapiens
ccgggcccgggcsgctggcctyaccgcccactgggtaaggaggctcaagctgagcccggcgctgccgccgcccttctcttgctctccgtgtctcccttagttttgggcgcaggagagccctgggctctacacgggcctgcaggcggcggcaaggacactacggccttagccctcttagggaggccgctgcagccccaccggaagacatgtgaggaattgcataagacagctatgcaaaatggagctggaggagctttatttgtgcacagagatactcctgagaataaccctgatactccatttgatttcacaccagaaaactataagaggatagaggcaattgtwaaaaactatccagaaggccataaagcagcagctgttcttccagtcctggatttagcccaaaggcagaatgggtggttgcccatctctgctatgaacaaggttgcagaagttttacaagtacctccaatragagtatatgaagtagcaactttttatacaatgtataatcgaaagccagtygraaagtatcacattcaggyctgcactactacaccctgcatgcttccaaactctgacagcatactggaggccattcagaaaaagcttggaataaagcttggggagastacacctgacaaacttttcactcttgtagaagtggaatgtttaggggcctgtgtgaacgcaccaatggttcaaataaatgacaattactatgargatttgacagctarggatattgaagaaattattgatgagctcaaggctggcaaaatcccaaaacctgggccaaggagtggacgcttytcttgtgagccagctggaggtcytacccctttgactgaaccacccaagggacctggatttggcatacaagcaggcctttaatttatattgaactgtaaatatgtcactagagaaataaaatatggacttccagtctacat

SEQ ID NO: 3161 - DNA, 1893 bp, Homo sapiens
tctcccggatgcatatccctgtcgaaactgaacttggcgccacctgagagcgcctgaaagccgtgtgttaaacaccgggttgcccttcttgctcttcttcctcttcgcctttaatctcaggcacttagcaagcctgttaaggctcccaaacactgctggggactgacaacttatgcggacacggtcgcctcaagagagrcggctcctgtaatggcgcctgcgtcagacactaacatggcggacatagtcgtgcgcggcgcaaacgtcagcacctctaccccagccgctcagaaacagcagaggagagcagggccgtgctcactgattggtccctcggtggagcgggccggaccgggcattccctttggagccaatcaggaaggcgagagaccgaattggccsstgcgcctcctcccgaggcatgctgggagcctggaggactagcgaggaggagttgagagaacggagcggacgccatggcgaccaacatcgagcagatttttaggtctttcgtggtcagtaaattccgggaaattcaacaggagctttccagtggaaggaatgaaggccagctgaatggtgaaacaaatacacccattgaaggaaaccaggcgggtgatgcagctgcctctgccaggagtctaccaaatgaagaaatagtgcagaagatagaggaagtactttctggggtcttagatacagaactacgatataagccagataaggctcaattacttgaaatagccaaagctaatgcagctgccatgtgtgctaaggctggtgtccctttaccaccaaacctaaagcctgcacctccacctactatagwwgagaaagttgctaaaaagtcaggaggagctactatagaagaactaactgagaaatgtaaacagatcgcacagagtaaagaagatgatgatgtaatagtgaataaacctcatgtttcggatgaagaggaagaagaacctcctttttatcatcatccctttaaactcagtgaacccaaacctatttttttcaatctgaatattgctgcagcaaaaccaactccaccaaaaagccaggtaacattaacaaaagaattccctgtatcatctggatctcaacatcggaaaaaagaagcggatagtgtttatggagaatgrgttcctgtggagaaaaatggtgaagaaaacaaagatgatgataatgttttcagcagcaatttgccctcagagcctgtggacatctctacagcaatgagtgaacgggcacttgctcagaaaagactcagtgagaatgcatttgatcttgaagccatgagcatgttaaatagagctcaggaaaggattgatgcctgggctcagctgaactctattcctggccagttcacaggaagtacaggagtacaggttttgacacaagaacagttggccaatactggtgcccaagcctggattaaaaaggatcagttcttaagagcagccccggtaactggaggaatgggagccgttttgatgagaaaaatgggctggagagaaggagaaggattaggaaaaaacaaagaaggcaayaaggaacccatcctagttgattttaagacagaccgaaaaggtcttgttgcagtaggagaaagagcacaaaagaggtctgggaacttctctgctgcaatgaaagatctgtcaggcaaacatcctgtgtctgctttgatggagatctgccctgatcatcgcaaacattttctctttagggtattgataaatggaagcgcttaccagcccagctttgccagccctaataagaagcatgctaaagccacagcagctactgtggttcttcaagcaatgggccttgtaccaaaggacctcatggctaatgccacttgcttcaggagtgcctcacgtagatagattg

SEQ ID NO: 3162 - DNA, 8183 bp, Homo sapiens
tctcccggatgcatatccctgtcgaaactgaacttggcgccacctgagagcgcctgaaagccgtgtgttaaacaccgggttgcccttcttgctcttcttcctcttcgcctttaatctcaggcacttagcaagcctgttaaggctcccaaacactgctggggactgacaacttatgcggacacggtcgcctcaagagagrcggctcctgtaatggcgcctgcgtcagacactaacatggcggacatagtcgtgcgcggcgcaaacgtcagcacctctaccccagccgctcagaaacagcagaggagagcagggccgtgctcactgattggtccctcggtggagcgggccggaccgggcattccctttggagccaatcaggaaggcgagagaccgaattggccsstgcgcctcctcccgaggcatgctgggagcctggaggactagcgaggaggagttgagagaacggagcggacgccatggcgaccaacatcgagcagatttttaggtctttcgtggtcagtaaattccgggaaattcaacaggagctttccagtggaaggaatgaaggccagctgaatggtgaaacaaatacacccattgaaggaaaccaggcgggtgatgcagctgcctctgccaggagtctaccaaatgaagaaatagtgcagaagatagaggaagtactttctggggtcttagatacagaactacgatataagccagacttgaaagagggctccagaaaaagtagatgcgtatctgtacaaacagatcctactgatgaaattcccactaaaaagtcaaagaagcataaaaagcacaaaaacaaaaagaagaaaaagaagaaagaaaaggaaaaaaaatataaaagacagccagaagaatctgagtcaaagacgaaatctcatgatgatgggaacatagatttagaatctgattcctttttaaagtttgattctgaaccttcagctgtggcgctggagcttcctacaagagcatttggcccatctgagaccaatgaatcccctgcagttgtgctagaacctcctgtagtatcaatggaggtatcagagccacacatcttagaaactctgaagccagctacaaaaactgcagaactgtcagttgtatctacatcagtaatctcagagcagtcagagcagtctgtggcagtaatgccagaaccatccatgacaaagattctggattcctttgcagcagcaccagtgcctactacaacactggtgttgaagtcatctgagccagttgtaacaatgtcagtggagtatcagatgaagtctgtgctgaaatctgtggagagcacatctccagagccatcaaagatcatgttggtagagcccccagtagcaaaagtgttagagccttcagaaacccttgtggtatcatcagagacacctactgaggtgtaccctgagccaagcacatcaacaacaatggattttccagagtcatctgcaattgaagcgctaagattgccagagcagcctgtagacgtaccatcggagattgcagattcatccatgacaagaccgcaggagttgccggagctgcctaagaccacagcgttggagctgcaggagtcgtcggtggcctcagcgatggagttgccggggccacctgcgacctccatgccggagttgcaggggccccctgtgactccagtgctggagttacctgggccctctgctaccccggtgccagagttgccagggcccctttctaccccagtgcctgagttgccagggccccctgcgacagcagtgcctgagttgccagggccctctgkgacaccagtgccacagttgtcgcaggaattgccagggcttccagcaccatccatggggttggagccaccacaggaggtaccagagccatctgtgatggcacaggagttgccagggctgcctttggtgacagcagcagtagagttgccagagcagcctgcggtaacagtagcaatggagttgaccgaacaacctgtgacgacgacagagttggagcagcctgtggggatgacaacggtggaacatcctgggcatcctgaggtgacaacggcaacagggttgctggggcagcctgaggcaacgatggtgctggagttgccaggacagccagtggcaacgacagcgctggagttgccggggcagccttcggtgactggggtgccagagttgccagggctgccttcggcaactagggcactggagttgtcggggcagcctgtggcaactggggcactagagttgcctgggccgctcatggcagctggggcactggagttctcggggcagtctggggcagctggagcactggagcttttggggcagcctctggcaacaggggtgctggagttgccagggcagcctggggcgccagagttgcctgggcagcctgtggcaactgtggcgctggagatctctgttcagtctgtggtgacaacatcggagctgtcaacgatgaccgtgtcgcagtccctggaggtgccctcgacgacagcgctggaatcctataatacggtagcacaggagctgcctactacattagtgggggagacttctgtaacagtaggagtggatcccttgatggccccagaatcccatatattagcttctaacaccatggagacccatatattagcatccaacaccatggactcccaaatgctagcgtccaacaccatggactcccagatgctagcatccaacaccatggactcccagatgttagcgtctagcaccatggactcccagatgttagcaactagctccatggactcccagatgttagcaactagctccatggactcccagatgttagcaactagcactatggactcccagatgttagcaaccagttccatggactcccagatgttagcaaccagctccatggactcccagatgttagcaaccagctccatggactcccagatgttagcaaccagctccatggactcccagatgttagcaaccagcaccatggattctcagatgttagcaaccagcaccatggactcccagatgttagcaactagctcaatggattcccagatgttagcatctggcactatggactctcaaatgttagcttctggcaccatggatgctcagatgttagcgtctggtaccatggatgcccagatgttagcrtctagtacccaagaytctgctatgttgggttcaaaatctcctgatccctataggttagctcaggatccttacaggttagctcaggatccctataggttgggccatgacccctatagattaggtcatgatgcttacaggttaggacaagacccttatagattaggccatgatccctacagactaactcctgatccctataggatgtcacctagaccctacaggatagcacccaggtcctatagaatagcacccaggccatataggttagcacctagacccctgatgttagcatctagacgttctatgatgatgtcctatgctgcagaacgttccatgatgtcatcttacgaacgctctatgatgtcttatgagcggtctatgatgtcccctatggctgaacgctctatgatgtcagcctacgagcgctctatgatgtcagcctacgagcgctctatgatgtcccctatggctgagcgctctatgatgtcagcttatgaacgctccatgatgtcagcttatgaacgctccatgatgtccccaatggctgatcgatctatgatgtccatgggtgctgaccggtctatgatgtcgtcatactctgctgctgaccggtctatgatgtcatcgtactctgcagctgaccgatctatgatgtcatcttatactgctgatcgttcaatgatgtctatggctgctgattcttacaccgattcttacactgacacatatacagaggcatatatggtgccacctttgcctcctgaagagcccccaacaatgccaccgttgccacctgaggagccaccaatgacaccaccattgcctcctgaggaaccaccagagggtccagcattgcccactgagcagtcagcattaacagctgaaaatacttggcctacagaggtgccatcatcaccatctgaagagtctgtatcgcagcctgagcctcctgtgagtcaaagtgagatttcggagccttcagcagtgcctactgattattcagtgtcagcatcagatccctcagttttagtatcagaggctgctgtgactgttccagaaccaccaccagagccagaatcttcaattacgttaacacctgtagagtctgcagtagtagcagaagaacatgaagttgttccagagagaccagtgacttgtatggtatctgaaactcccgccatgtcagctgaaccaactgtgttagcatcagagcctcctgttatgtcagagacagcagaaacatttgattccatgagagcctcaggacatgttgcctcagaagtatctacatccttgttggttccagcagtaactactccagtgctggcagagagcattctggagccgccagccatggctgccccagagtcttcagctatggctgtcctggagtcttcggctgtgaccgtcctggagtcttcgactgtgactgtcctggagtcttcgactgtaactgtcctrgagccttcggttgtgactgtcccggagcctcctgttgtggctgagccagactatgttaccattcctgtgccagttgtttctgcgctggagccttctgtgcctgttctggaaccagcggtgtcagtccttcaaccttctatgattgtttcagaaccatctgtttctgtccaggaatcgactgtgacagtttcagagcctgctgtcacagtctcagagcagactcaagtaataccaactgaggtggctatagagtccacaccartgatactggaatctagtatcatgtcatcacatgttatgaaaggaattartctatcctctggtgatcaaaatcttgctccagagattggcatrcaggagattgcattgcattcaggtgaagaaccacatgctgaggaacayctgaaaggtgacttttacgaaagtgaacatggtataaatatagaccttaatataaataatcatttaattgctaaagagatggaacataatacagtgtgtgctgctggtactagtcctgttggggaaattggtgaagagaaaattttgcccaccagtgagactaaacagygcacagtattggatacctaccctggtgttagtgaagctgatgcaggagaaactctatcttctactggtccttttgctctggaacctgatgcaacaggaactagtaagggtattgaatttaccacagcatctactctcagtttagttaataaatatgatgttgatttatctttaactactcaagatactgaacatgacatggtaatttccaccagtcctagtggtggtagtgaagctgacattgaagggcctttgcctgctaaagatattcatcttgatttaccatctaataataaccttgttagtaaggatacagaagaaccattacctgtaaaagagagtgaccagacattagcagctctgctcagccctaaagaaagtagtggaggagaaaaagaagtacctccccctcctaaagagacactgcctgattcaggattttctgccaatattgaggatattaatgaagcagatttagtgagaccgttacttcctaaggacatggaacgtcttacaagccttagagctggcattgaaggacctttacttgcaagtgatgttggacgtgacagatctgctgccagcccggttgtaagtagtatgccagaaagagcttcagagtcttcttcagaggaaaaagatgattatgaaatttttgtaaaagttaaggacactcacgaaaaaagcaagaaaaataagaaccgtgataagggggagaaagagaagaaaagagactcttcattaagatctcgaagtaagcgttccaaatcttctgaacacaaatcacgcaagcgtaccagtgaatctcgttctagggcaagaaagagatcatctaagtccaagtctcatcgctctcagacacgttcacggtcacgttcaagacgcaggaggagaagcagcagatcaagatcaaagtctagaggaagaagatctgtatcaaaagagaagcgcaaaagatctccaaagcacagatccaagtctagggaaagaaaaagaaaaagatcaagctccagggataaccgaaagacagttagagctcgaagtcgaaccccaagtcgtcggagtcggagtcatactccaagtcgtcgacgaaggtctagatctgtgggtagaagaaggagctttagcatttccccaagccgccgcagccgcacccccagccgccgcagccgcacccccagccgccgcagccgcacccccagccgccgcagccgcacccccagccgccggagccgcacccctagccgtcggagccgcaccccaagccgccggagaagatcaaggtctgtggtaagaagacgaagcttcagtatctcaccagtcagattaaggcgatcaagaacacccttaagaagaaggtttagcagatctcccatccgtcgtaaaagatccaggtcttctgaacgaggcagatcacccaaacgtctgacagatttggataaggctcaattacttgaaatagccaaagctaatgcagctgccatgtgtgctaaggctggtgtccctttaccaccaaacctaaagcctgcacctccacctactatagwwgagaaagttgctaaaaagtcaggaggagctactatagaagaactaactgagaaatgtaaacagatcgcacagagtaaagaagatgatgatgtaatagtgaataaacctcatgtttcggatgaagaggaagaagaacctcctttttatcatcatccctttaaactcagtgaacccaaacctatttttttcaatctgaatattgctgcagcaaaaccaactccaccaaaaagccaggtaacattaacaaaagaattccctgtatcatctggatctcaacatcggaaaaaagaagcggatagtgtttatggagaatgrgttcctgtggagaaaaatggtgaagaaaacaaagatgatgataatgttttcagcagcaatttgccctcagagggccgggttaaacggcagggccgggttagacgacagatgaaacaacccgcagcttctcatttgacagtaactcgatgcaattcactttgtggaaccaagccacaaagtgaaaagcatcgaattgcagagaacagtgttatcacatccctacccaacattgggccctccctgcacttgtgggaaggtagtccaaggtacaactatttagcttcccgatttgcttcaaggctctatagctctagattttggtggtagcaaatttatcgggtggagggattgatcggagagggcagatcctcaggttcaacacaagaactggattggaaaaggtcattgtaggttgatgtgagcatcttgggtacatagcccattgcccttaatgatggtttcttactgtttctctgggttgtttgtcagatagcctttaattttaattatttttccttccctttgctaccttggcccttttaaattcttgtgtttaacctaatgctcagccttggtactccattcccttctccttcccctctttgctactattaaaagtcggagaagtggaattcaaacgttgaaatttccacggggctatagttgtatcttaataatgccaagtgtcaaaacaaccccattaaaatgccgcctgattaaataatgtgctgctaaatatagtgcacatgaaaacagcaagactgtatatatatgtaaatatatatatatatctgtatctttgtatgtatctctgtatctgtacctttgctgtatcttttaataaacagtttacttttatttaacttgttgtgcaaaatcacgcttgggggatgtgggagggtggagtcttaataggggggtgggagttttaattactatagattagttgtcatcgcctcttgcccttggtttccaaagcccagacttttgccaaggactggactaggtatctgatgcccatctggacatttttcttgcagttcttggatatgtagatcagagacacctgtactcttcactgtaggttcccttccttggcttggccatatcatcatcttccag

SEQ ID NO: 3163 - DNA, 9416 bp, Homo sapiens
tctcccggatgcatatccctgtcgaaactgaacttggcgccacctgagagcgcctgaaagccgtgtgttaaacaccgggttgcccttcttgctcttcttcctcttcgcctttaatctcaggcacttagcaagcctgttaaggctcccaaacactgctggggactgacaacttatgcggacacggtcgcctcaagagagrcggctcctgtaatggcgcctgcgtcagacactaacatggcggacatagtcgtgcgcggcgcaaacgtcagcacctctaccccagccgctcagaaacagcagaggagagcagggccgtgctcactgattggtccctcggtggagcgggccggaccgggcattccctttggagccaatcaggaaggcgagagaccgaattggccsstgcgcctcctcccgaggcatgctgggagcctggaggactagcgaggaggagttgagagaacggagcggacgccatggcgaccaacatcgagcagatttttaggtctttcgtggtcagtaaattccgggaaattcaacaggagctttccagtggaaggaatgaaggccagctgaatggtgaaacaaatacacccattgaaggaaaccaggcgggtgatgcagctgcctctgccaggagtctaccaaatgaagaaatagtgcagaagatagaggaagtactttctggggtcttagatacagaactacgatataagccagacttgaaagagggctccagaaaaagtagatgcgtatctgtacaaacagatcctactgatgaaattcccactaaaaagtcaaagaagcataaaaagcacaaaaacaaaaagaagaaaaagaagaaagaaaaggaaaaaaaatataaaagacagccagaagaatctgagtcaaagacgaaatctcatgatgatgggaacatagatttagaatctgattcctttttaaagtttgattctgaaccttcagctgtggcgctggagcttcctacaagagcatttggcccatctgagaccaatgaatcccctgcagttgtgctagaacctcctgtagtatcaatggaggtatcagagccacacatcttagaaactctgaagccagctacaaaaactgcagaactgtcagttgtatctacatcagtaatctcagagcagtcagagcagtctgtggcagtaatgccagaaccatccatgacaaagattctggattcctttgcagcagcaccagtgcctactacaacactggtgttgaagtcatctgagccagttgtaacaatgtcagtggagtatcagatgaagtctgtgctgaaatctgtggagagcacatctccagagccatcaaagatcatgttggtagagcccccagtagcaaaagtgttagagccttcagaaacccttgtggtatcatcagagacacctactgaggtgtaccctgagccaagcacatcaacaacaatggattttccagagtcatctgcaattgaagcgctaagattgccagagcagcctgtagacgtaccatcggagattgcagattcatccatgacaagaccgcaggagttgccggagctgcctaagaccacagcgttggagctgcaggagtcgtcggtggcctcagcgatggagttgccggggccacctgcgacctccatgccggagttgcaggggccccctgtgactccagtgctggagttacctgggccctctgctaccccggtgccagagttgccagggcccctttctaccccagtgcctgagttgccagggccccctgcgacagcagtgcctgagttgccagggccctctgkgacaccagtgccacagttgtcgcaggaattgccagggcttccagcaccatccatggggttggagccaccacaggaggtaccagagccatctgtgatggcacaggagttgccagggctgcctttggtgacagcagcagtagagttgccagagcagcctgcggtaacagtagcaatggagttgaccgaacaacctgtgacgacgacagagttggagcagcctgtggggatgacaacggtggaacatcctgggcatcctgaggtgacaacggcaacagggttgctggggcagcctgaggcaacgatggtgctggagttgccaggacagccagtggcaacgacagcgctggagttgccggggcagccttcggtgactggggtgccagagttgccagggctgccttcggcaactagggcactggagttgtcggggcagcctgtggcaactggggcactagagttgcctgggccgctcatggcagctggggcactggagttctcggggcagtctggggcagctggagcactggagcttttggggcagcctctggcaacaggggtgctggagttgccagggcagcctggggcgccagagttgcctgggcagcctgtggcaactgtggcgctggagatctctgttcagtctgtggtgacaacatcggagctgtcaacgatgaccgtgtcgcagtccctggaggtgccctcgacgacagcgctggaatcctataatacggtagcacaggagctgcctactacattagtgggggagacttctgtaacagtaggagtggatcccttgatggccccagaatcccatatattagcttctaacaccatggagacccatatattagcatccaacaccatggactcccaaatgctagcgtccaacaccatggactcccagatgctagcatccaacaccatggactcccagatgttagcgtctagcaccatggactcccagatgttagcaactagctccatggactcccagatgttagcaactagctccatggactcccagatgttagcaactagcactatggactcccagatgttagcaaccagttccatggactcccagatgttagcaaccagctccatggactcccagatgttagcaaccagctccatggactcccagatgttagcaaccagctccatggactcccagatgttagcaaccagcaccatggattctcagatgttagcaaccagcaccatggactcccagatgttagcaactagctcaatggattcccagatgttagcatctggcactatggactctcaaatgttagcttctggcaccatggatgctcagatgttagcgtctggtaccatggatgcccagatgttagcrtctagtacccaagaytctgctatgttgggttcaaaatctcctgatccctataggttagctcaggatccttacaggttagctcaggatccctataggttgggccatgacccctatagattaggtcatgatgcttacaggttaggacaagacccttatagattaggccatgatccctacagactaactcctgatccctataggatgtcacctagaccctacaggatagcacccaggtcctatagaatagcacccaggccatataggttagcacctagacccctgatgttagcatctagacgttctatgatgatgtcctatgctgcagaacgttccatgatgtcatcttacgaacgctctatgatgtcttatgagcggtctatgatgtcccctatggctgaacgctctatgatgtcagcctacgagcgctctatgatgtcagcctacgagcgctctatgatgtcccctatggctgagcgctctatgatgtcagcttatgaacgctccatgatgtcagcttatgaacgctccatgatgtccccaatggctgatcgatctatgatgtccatgggtgctgaccggtctatgatgtcgtcatactctgctgctgaccggtctatgatgtcatcgtactctgcagctgaccgatctatgatgtcatcttatactgctgatcgttcaatgatgtctatggctgctgattcttacaccgattcttacactgacacatatacagaggcatatatggtgccacctttgcctcctgaagagcccccaacaatgccaccgttgccacctgaggagccaccaatgacaccaccattgcctcctgaggaaccaccagagggtccagcattgcccactgagcagtcagcattaacagctgaaaatacttggcctacagaggtgccatcatcaccatctgaagagtctgtatcgcagcctgagcctcctgtgagtcaaagtgagatttcggagccttcagcagtgcctactgattattcagtgtcagcatcagatccctcagttttagtatcagaggctgctgtgactgttccagaaccaccaccagagccagaatcttcaattacgttaacacctgtagagtctgcagtagtagcagaagaacatgaagttgttccagagagaccagtgacttgtatggtatctgaaactcccgccatgtcagctgaaccaactgtgttagcatcagagcctcctgttatgtcagagacagcagaaacatttgattccatgagagcctcaggacatgttgcctcagaagtatctacatccttgttggttccagcagtaactactccagtgctggcagagagcattctggagccgccagccatggctgccccagagtcttcagctatggctgtcctggagtcttcggctgtgaccgtcctggagtcttcgactgtgactgtcctggagtcttcgactgtaactgtcctrgagccttcggttgtgactgtcccggagcctcctgttgtggctgagccagactatgttaccattcctgtgccagttgtttctgcgctggagccttctgtgcctgttctggaaccagcggtgtcagtccttcaaccttctatgattgtttcagaaccatctgtttctgtccaggaatcgactgtgacagtttcagagcctgctgtcacagtctcagagcagactcaagtaataccaactgaggtggctatagagtccacaccartgatactggaatctagtatcatgtcatcacatgttatgaaaggaattartctatcctctggtgatcaaaatcttgctccagagattggcatrcaggagattgcattgcattcaggtgaagaaccacatgctgaggaacayctgaaaggtgacttttacgaaagtgaacatggtataaatatagaccttaatataaataatcatttaattgctaaagagatggaacataatacagtgtgtgctgctggtactagtcctgttggggaaattggtgaagagaaaattttgcccaccagtgagactaaacagygcacagtattggatacctaccctggtgttagtgaagctgatgcaggagaaactctatcttctactggtccttttgctctggaacctgatgcaacaggaactagtaagggtattgaatttaccacagcatctactctcagtttagttaataaatatgatgttgatttatctttaactactcaagatactgaacatgacatggtaatttccaccagtcctagtggtggtagtgaagctgacattgaagggcctttgcctgctaaagatattcatcttgatttaccatctaataataaccttgttagtaaggatacagaagaaccattacctgtaaaagagagtgaccagacattagcagctctgctcagccctaaagaaagtagtggaggagaaaaagaagtacctccccctcctaaagagacactgcctgattcaggattttctgccaatattgaggatattaatgaagcagatttagtgagaccgttacttcctaaggacatggaacgtcttacaagccttagagctggcattgaaggacctttacttgcaagtgatgttggacgtgacagatctgctgccagcccggttgtaagtagtatgccagaaagagcttcagagtcttcttcagaggaaaaagatgattatgaaatttttgtaaaagttaaggacactcacgaaaaaagcaagaaaaataagaaccgtgataagggggagaaagagaagaaaagagactcttcattaagatctcgaagtaagcgttccaaatcttctgaacacaaatcacgcaagcgtaccagtgaatctcgttctagggcaagaaagagatcatctaagtccaagtctcatcgctctcagacacgttcacggtcacgttcaagacgcaggaggagaagcagcagatcaagatcaaagtctagaggaagaagatctgtatcaaaagagaagcgcaaaagatctccaaagcacagatccaagtctagggaaagaaaaagaaaaagatcaagctccagggataaccgaaagacagttagagctcgaagtcgaaccccaagtcgtcggagtcggagtcatactccaagtcgtcgacgaaggtctagatctgtgggtagaagaaggagctttagcatttccccaagccgccgcagccgcacccccagccgccgcagccgcacccccagccgccgcagccgcacccccagccgccgcagccgcacccccagccgccggagccgcacccctagccgtcggagccgcaccccaagccgccggagaagatcaaggtctgtggtaagaagacgaagcttcagtatctcaccagtcagattaaggcgatcaagaacacccttaagaagaaggtttagcagatctcccatccgtcgtaaaagatccaggtcttctgaacgaggcagatcacccaaacgtctgacagatttggataaggctcaattacttgaaatagccaaagctaatgcagctgccatgtgtgctaaggctggtgtccctttaccaccaaacctaaagcctgcacctccacctactatagwwgagaaagttgctaaaaagtcaggaggagctactatagaagaactaactgagaaatgtaaacagatcgcacagagtaaagaagatgatgatgtaatagtgaataaacctcatgtttcggatgaagaggaagaagaacctcctttttatcatcatccctttaaactcagtgaacccaaacctatttttttcaatctgaatattgctgcagcaaaaccaactccaccaaaaagccaggtaacattaacaaaagaattccctgtatcatctggatctcaacatcggaaaaaagaagcggatagtgtttatggagaatgrgttcctgtggagaaaaatggtgaagaaaacaaagatgatgataatgttttcagcagcaatttgccctcagagcctgtggacatctctacagcaatgagtgaacgggcacttgctcagaaaagactcagtgagaatgcatttgatcttgaagccatgagcatgttaaatagagctcaggaaaggattgatgcctgggctcagctgaactctattcctggccagttcacaggaagtacaggagtacaggttttgacacaagaacagttggccaatactggtgcccaagcctggattaaaaaggatcagttcttaagagcagccccggtaactggaggaatgggagccgttttgatgagaaaaatgggctggagagaaggagaaggattaggaaaaaacaaagaaggcaayaaggaacccatcctagttgattttaagacagaccgaaaaggtcttgttgcagtaggagaaagagcacaaaagaggtctgggaacttctctgctgcaatgaaagatctgtcaggcaaacatcctgtgtctgctttgatggagatctgtaataaaagaaggtggcaaccacctgaatttctattggtccatgatagtggccctgatcatcgcaaacattttctctttagggtattgataaatggaagcgcttaccagcccagctttgccagccctaataagaagcatgctaaagccacagcagctactgtggttcttcaagcaatgggccttgtaccaaaggacctcatggctaatgccacttgcttcaggagtgcctcacgtagatagattgaggttttataataatcatttcagaattttactctgcatcacaatgtatttcctctttaatgttgtaaatatttggcaatttaagacattgtgtaaaaagcaatctgtaaaaacatctccaggctttgatttttgtaccatggaaattgtatttaaccatacagggttttggtatgtttatattgtttaccttagtgatgtatttgtttaagtggctaacatccaaacgactgtttgaaggcatcagagtaatcttcagtgtggaatgttaaataacgcttttatactgtattttgtactatgatgtaactccccttccttatggctaggctactgtaacacttgcctgtaatcagtgaagggctgtgcaccttgtactatttcacaatgggttctgctggacagataatgggccagtgttattgaggtgatcaagatctgttccacagggctaatgccaccatctcccctcaaaattttgtagaggytctaaaaagaaagtggtatgttgtgtgatgatcagcactaagtcctgcattcctgttaaagccacttgggtcataagaagggagtaaaaaatgaagtctgactagaattctattgcagaggccagtacatttagtatggcattgagttgtgatatagttttactttgatgtgcattttgaatttcagctacacctagatagacgtaaaatgataattaaaatgctgtaaccaacttatctaataaaattggcaaccagccactattttgttgactatgagaaagttaaaagtttatgttaatttttagggtctgatagaatatttcatgtgtattacagtggtattcatatgctatgtctctaaactttattttcaaaagcttaaggcccaaatacaaacttctctggaawaaacgtggtgttttattttctgggttataaagtgaacaaatacttagatactattatttctttacccaatgcttttgatttttaagcacttttattttaaaaatgtgaattatacagtccccccctacacayacayacacayacacacacacacacacacacacacacacacacacacacacacacacacacacacacacacacacacacacacacacacacacccctataagcacattaaatactactttgccgtgacagctcagtgtacttcacaattcttaacactattctatgtggaatacaaaatgcctttttatctgaattaacatgcatttaaaaagttttagtatatgtgaaaataaaggaattataaatcagtaggaaagatattaaggtagaagcatcaccaatcaactagctcagtagatgttgtctgtatttattttctacctttatgaaacaagaacctgctaacaggtaaatcgtaaagtaacatatttttgccctgatgccattagtcacaatgccatggggtaactgctatgtgatttcccatttgcaaggaagcatattaattcagtttctgctcaatatacaattaggttgtagggatataratatctcatttgagttatctgagtttttcatctttata

SEQ ID NO: 3164 - DNA, 8455 bp, Homo sapiens
tctcccggatgcatatccctgtcgaaactgaacttggcgccacctgagagcgcctgaaagccgtgtgttaaacaccgggttgcccttcttgctcttcttcctcttcgcctttaatctcaggcacttagcaagcctgttaaggctcccaaacactgctggggactgacaacttatgcggacacggtcgcctcaagagagrcggctcctgtaatggcgcctgcgtcagacactaacatggcggacatagtcgtgcgcggcgcaaacgtcagcacctctaccccagccgctcagaaacagcagaggagagcagggccgtgctcactgattggtccctcggtggagcgggccggaccgggcattccctttggagccaatcaggaaggcgagagaccgaattggccsstgcgcctcctcccgaggcatgctgggagcctggaggactagcgaggaggagttgagagaacggagcggacgccatggcgaccaacatcgagcagatttttaggtctttcgtggtcagtaaattccgggaaattcaacaggagctttccagtggaaggaatgaaggccagctgaatggtgaaacaaatacacccattgaaggaaaccaggcgggtgatgcagctgcctctgccaggagtctaccaaatgaagaaatagtgcagaagatagaggaagtactttctggggtcttagatacagaactacgatataagccagacttgaaagagggctccagaaaaagtagatgcgtatctgtacaaacagatcctactgatgaaattcccactaaaaagtcaaagaagcataaaaagcacaaaaacaaaaagaagaaaaagaagaaagaaaaggaaaaaaaatataaaagacagccagaagaatctgagtcaaagacgaaatctcatgatgatgggaacatagatttagaatctgattcctttttaaagtttgattctgaaccttcagctgtggcgctggagcttcctacaagagcatttggcccatctgagaccaatgaatcccctgcagttgtgctagaacctcctgtagtatcaatggaggtatcagagccacacatcttagaaactctgaagccagctacaaaaactgcagaactgtcagttgtatctacatcagtaatctcagagcagtcagagcagtctgtggcagtaatgccagaaccatccatgacaaagattctggattcctttgcagcagcaccagtgcctactacaacactggtgttgaagtcatctgagccagttgtaacaatgtcagtggagtatcagatgaagtctgtgctgaaatctgtggagagcacatctccagagccatcaaagatcatgttggtagagcccccagtagcaaaagtgttagagccttcagaaacccttgtggtatcatcagagacacctactgaggtgtaccctgagccaagcacatcaacaacaatggattttccagagtcatctgcaattgaagcgctaagattgccagagcagcctgtagacgtaccatcggagattgcagattcatccatgacaagaccgcaggagttgccggagctgcctaagaccacagcgttggagctgcaggagtcgtcggtggcctcagcgatggagttgccggggccacctgcgacctccatgccggagttgcaggggccccctgtgactccagtgctggagttacctgggccctctgctaccccggtgccagagttgccagggcccctttctaccccagtgcctgagttgccagggccccctgcgacagcagtgcctgagttgccagggccctctgkgacaccagtgccacagttgtcgcaggaattgccagggcttccagcaccatccatggggttggagccaccacaggaggtaccagagccatctgtgatggcacaggagttgccagggctgcctttggtgacagcagcagtagagttgccagagcagcctgcggtaacagtagcaatggagttgaccgaacaacctgtgacgacgacagagttggagcagcctgtggggatgacaacggtggaacatcctgggcatcctgaggtgacaacggcaacagggttgctggggcagcctgaggcaacgatggtgctggagttgccaggacagccagtggcaacgacagcgctggagttgccggggcagccttcggtgactggggtgccagagttgccagggctgccttcggcaactagggcactggagttgtcggggcagcctgtggcaactggggcactagagttgcctgggccgctcatggcagctggggcactggagttctcggggcagtctggggcagctggagcactggagcttttggggcagcctctggcaacaggggtgctggagttgccagggcagcctggggcgccagagttgcctgggcagcctgtggcaactgtggcgctggagatctctgttcagtctgtggtgacaacatcggagctgtcaacgatgaccgtgtcgcagtccctggaggtgccctcgacgacagcgctggaatcctataataacgttccatgatgtcatcttacgaacgctctatgatgtcttatgagcggtctatgatgtcccctatggctgaacgctctatgatgtcagcctacgagcgctctatgatgtcagcctacgagcgctctatgatgtcccctatggctgagcgctctatgatgtcagcttatgaacgctccatgatgtcagcttatgaacgctccatgatgtccccaatggctgatcgatctatgatgtccatgggtgctgaccggtctatgatgtcgtcatactctgctgctgaccggtctatgatgtcatcgtactctgcagctgaccgatctatgatgtcatcttatactgctgatcgttcaatgatgtctatggctgctgattcttacaccgattcttacactgacacatatacagaggcatatatggtgccacctttgcctcctgaagagcccccaacaatgccaccgttgccacctgaggagccaccaatgacaccaccattgcctcctgaggaaccaccagagggtccagcattgcccactgagcagtcagcattaacagctgaaaatacttggcctacagaggtgccatcatcaccatctgaagagtctgtatcgcagcctgagcctcctgtgagtcaaagtgagatttcggagccttcagcagtgcctactgattattcagtgtcagcatcagatccctcagttttagtatcagaggctgctgtgactgttccagaaccaccaccagagccagaatcttcaattacgttaacacctgtagagtctgcagtagtagcagaagaacatgaagttgttccagagagaccagtgacttgtatggtatctgaaactcccgccatgtcagctgaaccaactgtgttagcatcagagcctcctgttatgtcagagacagcagaaacatttgattccatgagagcctcaggacatgttgcctcagaagtatctacatccttgttggttccagcagtaactactccagtgctggcagagagcattctggagccgccagccatggctgccccagagtcttcagctatggctgtcctggagtcttcggctgtgaccgtcctggagtcttcgactgtgactgtcctggagtcttcgactgtaactgtcctrgagccttcggttgtgactgtcccggagcctcctgttgtggctgagccagactatgttaccattcctgtgccagttgtttctgcgctggagccttctgtgcctgttctggaaccagcggtgtcagtccttcaaccttctatgattgtttcagaaccatctgtttctgtccaggaatcgactgtgacagtttcagagcctgctgtcacagtctcagagcagactcaagtaataccaactgaggtggctatagagtccacaccartgatactggaatctagtatcatgtcatcacatgttatgaaaggaattartctatcctctggtgatcaaaatcttgctccagagattggcatrcaggagattgcattgcattcaggtgaagaaccacatgctgaggaacayctgaaaggtgacttttacgaaagtgaacatggtataaatatagaccttaatataaataatcatttaattgctaaagagatggaacataatacagtgtgtgctgctggtactagtcctgttggggaaattggtgaagagaaaattttgcccaccagtgagactaaacagygcacagtattggatacctaccctggtgttagtgaagctgatgcaggagaaactctatcttctactggtccttttgctctggaacctgatgcaacaggaactagtaagggtattgaatttaccacagcatctactctcagtttagttaataaatatgatgttgatttatctttaactactcaagatactgaacatgacatggtaatttccaccagtcctagtggtggtagtgaagctgacattgaagggcctttgcctgctaaagatattcatcttgatttaccatctaataataaccttgttagtaaggatacagaagaaccattacctgtaaaagagagtgaccagacattagcagctctgctcagccctaaagaaagtagtggaggagaaaaagaagtacctccccctcctaaagagacactgcctgattcaggattttctgccaatattgaggatattaatgaagcagatttagtgagaccgttacttcctaaggacatggaacgtcttacaagccttagagctggcattgaaggacctttacttgcaagtgatgttggacgtgacagatctgctgccagcccggttgtaagtagtatgccagaaagagcttcagagtcttcttcagaggaaaaagatgattatgaaatttttgtaaaagttaaggacactcacgaaaaaagcaagaaaaataagaaccgtgataagggggagaaagagaagaaaagagactcttcattaagatctcgaagtaagcgttccaaatcttctgaacacaaatcacgcaagcgtaccagtgaatctcgttctagggcaagaaagagatcatctaagtccaagtctcatcgctctcagacacgttcacggtcacgttcaagacgcaggaggagaagcagcagatcaagatcaaagtctagaggaagaagatctgtatcaaaagagaagcgcaaaagatctccaaagcacagatccaagtctagggaaagaaaaagaaaaagatcaagctccagggataaccgaaagacagttagagctcgaagtcgaaccccaagtcgtcggagtcggagtcatactccaagtcgtcgacgaaggtctagatctgtgggtagaagaaggagctttagcatttccccaagccgccgcagccgcacccccagccgccgcagccgcacccccagccgccgcagccgcacccccagccgccgcagccgcacccccagccgccggagccgcacccctagccgtcggagccgcaccccaagccgccggagaagatcaaggtctgtggtaagaagacgaagcttcagtatctcaccagtcagattaaggcgatcaagaacacccttaagaagaaggtttagcagatctcccatccgtcgtaaaagatccaggtcttctgaacgaggcagatcacccaaacgtctgacagatttggataaggctcaattacttgaaatagccaaagctaatgcagctgccatgtgtgctaaggctggtgtccctttaccaccaaacctaaagcctgcacctccacctactatagwwgagaaagttgctaaaaagtcaggaggagctactatagaagaactaactgagaaatgtaaacagatcgcacagagtaaagaagatgatgatgtaatagtgaataaacctcatgtttcggatgaagaggaagaagaacctcctttttatcatcatccctttaaactcagtgaacccaaacctatttttttcaatctgaatattgctgcagcaaaaccaactccaccaaaaagccaggtaacattaacaaaagaattccctgtatcatctggatctcaacatcggaaaaaagaagcggatagtgtttatggagaatgrgttcctgtggagaaaaatggtgaagaaaacaaagatgatgataatgttttcagcagcaatttgccctcagagcctgtggacatctctacagcaatgagtgaacgggcacttgctcagaaaagactcagtgagaatgcatttgatcttgaagccatgagcatgttaaatagagctcaggaaaggattgatgcctgggctcagctgaactctattcctggccagttcacaggaagtacaggagtacaggttttgacacaagaacagttggccaatactggtgcccaagcctggattaaaaaggatcagttcttaagagcagccccggtaactggaggaatgggagccgttttgatgagaaaaatgggctggagagaaggagaaggattaggaaaaaacaaagaaggcaayaaggaacccatcctagttgattttaagacagaccgaaaaggtcttgttgcagtaggagaaagagcacaaaagaggtctgggaacttctctgctgcaatgaaagatctgtcaggcaaacatcctgtgtctgctttgatggagatctgtaataaaagaaggtggcaaccacctgaatttctattggtccatgatagtggccctgatcatcgcaaacattttctctttagggtattgataaatggaagcgcttaccagcccagctttgccagccctaataagaagcatgctaaagccacagcagctactgtggttcttcaagcaatgggccttgtaccaaaggacctcatggctaatgccacttgcttcaggagtgcctcacgtagatagattgaggttttataataatcatttcagaattttactctgcatcacaatgtatttcctctttaatgttgtaaatatttggcaatttaagacattgtgtaaaaagcaatctgtaaaaacatctccaggctttgatttttgtaccatggaaattgtatttaaccatacagggttttggtatgtttatattgtttaccttagtgatgtatttgtttaagtggctaacatccaaacgactgtttgaaggcatcagagtaatcttcagtgtggaatgttaaataacgcttttatactgtattttgtactatgatgtaactccccttccttatggctaggctactgtaacacttgcctgtaatcagtgaagggctgtgcaccttgtactatttcacaatgggttctgctggacagataatgggccagtgttattgaggtgatcaagatctgttccacagggctaatgccaccatctcccctcaaaattttgtagaggytctaaaaagaaagtggtatgttgtgtgatgatcagcactaagtcctgcattcctgttaaagccacttgggtcataagaagggagtaaaaaatgaagtctgactagaattctattgcagaggccagtacatttagtatggcattgagttgtgatatagttttactttgatgtgcattttgaatttcagctacacctagatagacgtaaaatgataattaaaatgctgtaaccaacttatctaataaaattggcaaccagccactattttgttgactatgagaaagttaaaagtttatgttaatttttagggtctgatagaatatttcatgtgtattacagtggtattcatatgctatgtctctaaactttattttcaaaagcttaaggcccaaatacaaacttctctggaawaaacgtggtgttttattttctgggttataaagtgaacaaatacttagatactattatttctttacccaatgcttttgatttttaagcacttttattttaaaaatgtgaattatacagtccccccctacacayacayacacayacacacacacacacacacacacacacacacacacacacacacacacacacacacacacacacacacacacacacacacacacccctataagcacattaaatactactttgccgtgacagctcagtgtacttcacaattcttaacactattctatgtggaatacaaaatgcctttttatctgaattaacatgcatttaaaaagttttagtatatgtgaaaataaaggaattataaatcagtaggaaagatattaaggtagaagcatcaccaatcaactagctcagtagatgttgtctgtatttattttctacctttatgaaacaagaacctgctaacaggtaaatcgtaaagtaacatatttttgccctgatgccattagtcacaatgccatggggtaactgctatgtgatttcccatttgcaaggaagcatattaattcagtttctgctcaatatacaattaggttgtagggatataratatctcatttgagttatctgagtttttcatctttata

SEQ ID NO: 3165 - DNA, 9367 bp, Homo sapiens
tctcccggatgcatatccctgtcgaaactgaacttggcgccacctgagagcgcctgaaagccgtgtgttaaacaccgggttgcccttcttgctcttcttcctcttcgcctttaatctcaggcacttagcaagcctgttaaggctcccaaacactgctggggactgacaacttatgcggacacggtcgcctcaagagagrcggctcctgtaatggcgcctgcgtcagacactaacatggcggacatagtcgtgcgcggcgcaaacgtcagcacctctaccccagccgctcagaaacagcagaggagagcagggccgtgctcactgattggtccctcggtggagcgggccggaccgggcattccctttggagccaatcaggaaggcgagagaccgaattggccsstgcgcctcctcccgaggcatgctgggagcctggaggactagcgaggaggagttgagagaacggagcggacgccatggcgaccaacatcgagcagatttttaggtctttcgtggtcagtaaattccgggaaattcaacaggagctttccagtggaaggaatgaaggccagctgaatggtgaaacaaatacacccattgaaggaaaccaggcgggtgatgcagctgcctctgccaggagtctaccaaatgaagaaatagtgcagaagatagaggaagtactttctggggtcttagatacagaactacgatataagccagacttgaaagagggctccagaaaaagtagatgcgtatctgtacaaacagatcctactgatgaaattcccactaaaaagtcaaagaagcataaaaagcacaaaaacaaaaagaagaaaaagaagaaagaaaaggaaaaaaaatataaaagacagccagaagaatctgagtcaaagacgaaatctcatgatgatgggaacatagatttagaatctgattcctttttaaagtttgattctgaaccttcagctgtggcgctggagcttcctacaagagcatttggcccatctgagaccaatgaatcccctgcagttgtgctagaacctcctgtagtatcaatggaggtatcagagccacacatcttagaaactctgaagccagctacaaaaactgcagaactgtcagttgtatctacatcagtaatctcagagcagtcagagcagtctgtggcagtaatgccagaaccatccatgacaaagattctggattcctttgcagcagcaccagtgcctactacaacactggtgttgaagtcatctgagccagttgtaacaatgtcagtggagtatcagatgaagtctgtgctgaaatctgtggagagcacatctccagagccatcaaagatcatgttggtagagcccccagtagcaaaagtgttagagccttcagaaacccttgtggtatcatcagagacacctactgaggtgtaccctgagccaagcacatcaacaacaatggattttccagagtcatctgcaattgaagcgctaagattgccagagcagcctgtagacgtaccatcggagattgcagattcatccatgacaagaccgcaggagttgccggagctgcctaagaccacagcgttggagctgcaggagtcgtcggtggcctcagcgatggagttgccggggccacctgcgacctccatgccggagttgcaggggccccctgtgactccagtgctggagttacctgggccctctgctaccccggtgccagagttgccagggcccctttctaccccagtgcctgagttgccagggccccctgcgacagcagtgcctgagttgccagggccctctgkgacaccagtgccacagttgtcgcaggaattgccagggcttccagcaccatccatggggttggagccaccacaggaggtaccagagccatctgtgatggcacaggagttgccagggctgcctttggtgacagcagcagtagagttgccagagcagcctgcggtaacagtagcaatggagttgaccgaacaacctgtgacgacgacagagttggagcagcctgtggggatgacaacggtggaacatcctgggcatcctgaggtgacaacggcaacagggttgctggggcagcctgaggcaacgatggtgctggagttgccaggacagccagtggcaacgacagcgctggagttgccggggcagccttcggtgactggggtgccagagttgccagggctgccttcggcaactagggcactggagttgtcggggcagcctgtggcaactggggcactagagttgcctgggccgctcatggcagctggggcactggagttctcggggcagtctggggcagctggagcactggagcttttggggcagcctctggcaacaggggtgctggagttgccagggcagcctggggcgccagagttgcctgggcagcctgtggcaactgtggcgctggagatctctgttcagtctgtggtgacaacatcggagctgtcaacgatgaccgtgtcgcagtccctggaggtgccctcgacgacagcgctggaatcctataatacggtagcacaggagctgcctactacattagtgggggagacttctgtaacagtaggagtggatcccttgatggccccagaatcccatatattagcttctaacaccatggagacccatatattagcatccaacaccatggactcccaaatgctagcgtccaacaccatggactcccagatgctagcatccaacaccatggactcccagatcactatggactcccagatgttagcaaccagttccatggactcccagatgttagcaaccagctccatggactcccagatgttagcaaccagctccatggactcccagatgttagcaaccagctccatggactcccagatgttagcaaccagcaccatggattctcagatgttagcaaccagcaccatggactcccagatgttagcaactagctcaatggattcccagatgttagcatctggcactatggactctcaaatgttagcttctggcaccatggatgctcagatgttagcgtctggtaccatggatgcccagatgttagcrtctagtacccaagaytctgctatgttgggttcaaaatctcctgatccctataggttagctcaggatccttacaggttagctcaggatccctataggttgggccatgacccctatagattaggtcatgatgcttacaggttaggacaagacccttatagattaggccatgatccctacagactaactcctgatccctataggatgtcacctagaccctacaggatagcacccaggtcctatagaatagcacccaggccatataggttagcacctagacccctgatgttagcatctagacgttctatgatgatgtcctatgctgcagaacgttccatgatgtcatcttacgaacgctctatgatgtcttatgagcggtctatgatgtcccctatggctgaacgctctatgatgtcagcctacgagcgctctatgatgtcagcctacgagcgctctatgatgtcccctatggctgagcgctctatgatgtcagcttatgaacgctccatgatgtcagcttatgaacgctccatgatgtccccaatggctgatcgatctatgatgtccatgggtgctgaccggtctatgatgtcgtcatactctgctgctgaccggtctatgatgtcatcgtactctgcagctgaccgatctatgatgtcatcttatactgctgatcgttcaatgatgtctatggctgctgattcttacaccgattcttacactgacacatatacagaggcatatatggtgccacctttgcctcctgaagagcccccaacaatgccaccgttgccacctgaggagccaccaatgacaccaccattgcctcctgaggaaccaccagagggtccagcattgcccactgagcagtcagcattaacagctgaaaatacttggcctacagaggtgccatcatcaccatctgaagagtctgtatcgcagcctgagcctcctgtgagtcaaagtgagatttcggagccttcagcagtgcctactgattattcagtgtcagcatcagatccctcagttttagtatcagaggctgctgtgactgttccagaaccaccaccagagccagaatcttcaattacgttaacacctgtagagtctgcagtagtagcagaagaacatgaagttgttccagagagaccagtgacttgtatggtatctgaaactcccgccatgtcagctgaaccaactgtgttagcatcagagcctcctgttatgtcagagacagcagaaacatttgattccatgagagcctcaggacatgttgcctcagaagtatctacatccttgttggttccagcagtaactactccagtgctggcagagagcattctggagccgccagccatggctgccccagagtcttcagctatggctgtcctggagtcttcggctgtgaccgtcctggagtcttcgactgtgactgtcctggagtcttcgactgtaactgtcctrgagccttcggttgtgactgtcccggagcctcctgttgtggctgagccagactatgttaccattcctgtgccagttgtttctgcgctggagccttctgtgcctgttctggaaccagcggtgtcagtccttcaaccttctatgattgtttcagaaccatctgtttctgtccaggaatcgactgtgacagtttcagagcctgctgtcacagtctcagagcagactcaagtaataccaactgaggtggctatagagtccacaccartgatactggaatctagtatcatgtcatcacatgttatgaaaggaattartctatcctctggtgatcaaaatcttgctccagagattggcatrcaggagattgcattgcattcaggtgaagaaccacatgctgaggaacayctgaaaggtgacttttacgaaagtgaacatggtataaatatagaccttaatataaataatcatttaattgctaaagagatggaacataatacagtgtgtgctgctggtactagtcctgttggggaaattggtgaagagaaaattttgcccaccagtgagactaaacagygcacagtattggatacctaccctggtgttagtgaagctgatgcaggagaaactctatcttctactggtccttttgctctggaacctgatgcaacaggaactagtaagggtattgaatttaccacagcatctactctcagtttagttaataaatatgatgttgatttatctttaactactcaagatactgaacatgacatggtaatttccaccagtcctagtggtggtagtgaagctgacattgaagggcctttgcctgctaaagatattcatcttgatttaccatctaataataaccttgttagtaaggatacagaagaaccattacctgtaaaagagagtgaccagacattagcagctctgctcagccctaaagaaagtagtggaggagaaaaagaagtacctccccctcctaaagagacactgcctgattcaggattttctgccaatattgaggatattaatgaagcagatttagtgagaccgttacttcctaaggacatggaacgtcttacaagccttagagctggcattgaaggacctttacttgcaagtgatgttggacgtgacagatctgctgccagcccggttgtaagtagtatgccagaaagagcttcagagtcttcttcagaggaaaaagatgattatgaaatttttgtaaaagttaaggacactcacgaaaaaagcaagaaaaataagaaccgtgataagggggagaaagagaagaaaagagactcttcattaagatctcgaagtaagcgttccaaatcttctgaacacaaatcacgcaagcgtaccagtgaatctcgttctagggcaagaaagagatcatctaagtccaagtctcatcgctctcagacacgttcacggtcacgttcaagacgcaggaggagaagcagcagatcaagatcaaagtctagaggaagaagatctgtatcaaaagagaagcgcaaaagatctccaaagcacagatccaagtctagggaaagaaaaagaaaaagatcaagctccagggataaccgaaagacagttagagctcgaagtcgaaccccaagtcgtcggagtcggagtcatactccaagtcgtcgacgaaggtctagatctgtgggtagaagaaggagctttagcatttccccaagccgccgcagccgcacccccagccgccgcagccgcacccccagccgccgcagccgcacccccagccgccgcagccgcacccccagccgccggagccgcacccctagccgtcggagccgcaccccaagccgccggagaagatcaaggtctgtggtaagaagacgaagcttcagtatctcaccagtcagattaaggcgatcaagaacacccttaagaagaaggtttagcagatctcccatccgtcgtaaaagatccaggtcttctgaacgaggcagatcacccaaacgtctgacagatttggataaggctcaattacttgaaatagccaaagctaatgcagctgccatgtgtgctaaggctggtgtccctttaccaccaaacctaaagcctgcacctccacctactatagwwgagaaagttgctaaaaagtcaggaggagctactatagaagaactaactgagaaatgtaaacagatcgcacagagtaaagaagatgatgatgtaatagtgaataaacctcatgtttcggatgaagaggaagaagaacctcctttttatcatcatccctttaaactcagtgaacccaaacctatttttttcaatctgaatattgctgcagcaaaaccaactccaccaaaaagccaggtaacattaacaaaagaattccctgtatcatctggatctcaacatcggaaaaaagaagcggatagtgtttatggagaatgrgttcctgtggagaaaaatggtgaagaaaacaaagatgatgataatgttttcagcagcaatttgccctcagagcctgtggacatctctacagcaatgagtgaacgggcacttgctcagaaaagactcagtgagaatgcatttgatcttgaagccatgagcatgttaaatagagctcaggaaaggattgatgcctgggctcagctgaactctattcctggccagttcacaggaagtacaggagtacaggttttgacacaagaacagttggccaatactggtgcccaagcctggattaaaaaggatcagttcttaagagcagccccggtaactggaggaatgggagccgttttgatgagaaaaatgggctggagagaaggagaaggattaggaaaaaacaaagaaggcaayaaggaacccatcctagttgattttaagacagaccgaaaaggtcttgttgcagtaggagaaagagcacaaaagaggtctgggaacttctctgctgcaatgaaagatctgtcaggcaaacatcctgtgtctgctttgatggagatctgtaataaaagaaggtggcaaccacctgaatttctattggtccatgatagtggccctgatcatcgcaaacattttctctttagggtattgagaaatggagcccttaccagacccaattgtatgtttttcttgaataggtattgataaatggaagcgcttaccagcccagctttgccagccctaataagaagcatgctaaagccacagcagctactgtggttcttcaagcaatgggccttgtaccaaaggacctcatggctaatgccacttgcttcaggagtgcctcacgtagatagattgaggttttataataatcatttcagaattttactctgcatcacaatgtatttcctctttaatgttgtaaatatttggcaatttaagacattgtgtaaaaagcaatctgtaaaaacatctccaggctttgatttttgtaccatggaaattgtatttaaccatacagggttttggtatgtttatattgtttaccttagtgatgtatttgtttaagtggctaacatccaaacgactgtttgaaggcatcagagtaatcttcagtgtggaatgttaaataacgcttttatactgtattttgtactatgatgtaactccccttccttatggctaggctactgtaacacttgcctgtaatcagtgaagggctgtgcaccttgtactatttcacaatgggttctgctggacagataatgggccagtgttattgaggtgatcaagatctgttccacagggctaatgccaccatctcccctcaaaattttgtagaggytctaaaaagaaagtggtatgttgtgtgatgatcagcactaagtcctgcattcctgttaaagccacttgggtcataagaagggagtaaaaaatgaagtctgactagaattctattgcagaggccagtacatttagtatggcattgagttgtgatatagttttactttgatgtgcattttgaatttcagctacacctagatagacgtaaaatgataattaaaatgctgtaaccaacttatctaataaaattggcaaccagccactattttgttgactatgagaaagttaaaagtttatgttaatttttagggtctgatagaatatttcatgtgtattacagtggtattcatatgctatgtctctaaactttattttcaaaagcttaaggcccaaatacaaacttctctggaawaaacgtggtgttttattttctgggttataaagtgaacaaatacttagatactattatttctttacccaatgcttttgatttttaagcacttttattttaaaaatgtgaattatacagtccccccctacacayacayacacayacacacacacacacacacacacacacacacacacacacacacacacacacacacacacacacacacacacacacacacacacccctataagcacattaaatactactttgccgtgacagctcagtgtacttcacaattcttaacactattctatgtggaatacaaaatgcctttttatctgaattaacatgcatttaaaaagttttagtatatgtgaaaataaaggaattataaatcagtaggaaagatattaaggtagaagcatcaccaatcaactagctcagtagatgttgtctgtatttattttctacctttatgaaacaagaacctgctaacaggtaaatcgtaaagtaacatatttttgccctgatgccattagtcacaatgccatggggtaactgctatgtgatttcccatttgcaaggaagcatattaattcagtttctgctcaatatacaattaggttgtagggatataratatctcatttgagttatctgagtttttcatctttata

SEQ ID NO: 3166 - DNA, 9543 bp, Homo sapiens
tctcccggatgcatatccctgtcgaaactgaacttggcgccacctgagagcgcctgaaagccgtgtgttaaacaccgggttgcccttcttgctcttcttcctcttcgcctttaatctcaggcacttagcaagcctgttaaggctcccaaacactgctggggactgacaacttatgcggacacggtcgcctcaagagagrcggctcctgtaatggcgcctgcgtcagacactaacatggcggacatagtcgtgcgcggcgcaaacgtcagcacctctaccccagccgctcagaaacagcagaggagagcagggccgtgctcactgattggtccctcggtggagcgggccggaccgggcattccctttggagccaatcaggaaggcgagagaccgaattggccsstgcgcctcctcccgaggcatgctgggagcctggaggactagcgaggaggagttgagagaacggagcggacgccatggcgaccaacatcgagcagatttttaggtctttcgtggtcagtaaattccgggaaattcaacaggagctttccagtggaaggaatgaaggccagctgaatggtgaaacaaatacacccattgaaggaaaccaggcgggtgatgcagctgcctctgccaggagtctaccaaatgaagaaatagtgcagaagatagaggaagtactttctggggtcttagatacagaactacgatataagccagacttgaaagagggctccagaaaaagtagatgcgtatctgtacaaacagatcctactgatgaaattcccactaaaaagtcaaagaagcataaaaagcacaaaaacaaaaagaagaaaaagaagaaagaaaaggaaaaaaaatataaaagacagccagaagaatctgagtcaaagacgaaatctcatgatgatgggaacatagatttagaatctgattcctttttaaagtttgattctgaaccttcagctgtggcgctggagcttcctacaagagcatttggcccatctgagaccaatgaatcccctgcagttgtgctagaacctcctgtagtatcaatggaggtatcagagccacacatcttagaaactctgaagccagctacaaaaactgcagaactgtcagttgtatctacatcagtaatctcagagcagtcagagcagtctgtggcagtaatgccagaaccatccatgacaaagattctggattcctttgcagcagcaccagtgcctactacaacactggtgttgaagtcatctgagccagttgtaacaatgtcagtggagtatcagatgaagtctgtgctgaaatctgtggagagcacatctccagagccatcaaagatcatgttggtagagcccccagtagcaaaagtgttagagccttcagaaacccttgtggtatcatcagagacacctactgaggtgtaccctgagccaagcacatcaacaacaatggattttccagagtcatctgcaattgaagcgctaagattgccagagcagcctgtagacgtaccatcggagattgcagattcatccatgacaagaccgcaggagttgccggagctgcctaagaccacagcgttggagctgcaggagtcgtcggtggcctcagcgatggagttgccggggccacctgcgacctccatgccggagttgcaggggccccctgtgactccagtgctggagttacctgggccctctgctaccccggtgccagagttgccagggcccctttctaccccagtgcctgagttgccagggccccctgcgacagcagtgcctgagttgccagggccctctgkgacaccagtgccacagttgtcgcaggaattgccagggcttccagcaccatccatggggttggagccaccacaggaggtaccagagccatctgtgatggcacaggagttgccagggctgcctttggtgacagcagcagtagagttgccagagcagcctgcggtaacagtagcaatggagttgaccgaacaacctgtgacgacgacagagttggagcagcctgtggggatgacaacggtggaacatcctgggcatcctgaggtgacaacggcaacagggttgctggggcagcctgaggcaacgatggtgctggagttgccaggacagccagtggcaacgacagcgctggagttgccggggcagccttcggtgactggggtgccagagttgccagggctgccttcggcaactagggcactggagttgtcggggcagcctgtggcaactggggcactagagttgcctgggccgctcatggcagctggggcactggagttctcggggcagtctggggcagctggagcactggagcttttggggcagcctctggcaacaggggtgctggagttgccagggcagcctggggcgccagagttgcctgggcagcctgtggcaactgtggcgctggagatctctgttcagtctgtggtgacaacatcggagctgtcaacgatgaccgtgtcgcagtccctggaggtgccctcgacgacagcgctggaatcctataatacggtagcacaggagctgcctactacattagtgggggagacttctgtaacagtaggagtggatcccttgatggccccagaatcccatatattagcttctaacaccatggagacccatatattagcatccaacaccatggactcccaaatgctagcgtccaacaccatggactcccagatgctagcatccaacaccatggactcccagatgttagcgtctagcaccatggactcccagatgttagcaactagctccatggactcccagatgttagcaactagctccatggactcccagatgttagcaactagcactatggactcccagatgttagcaaccagttccatggactcccagatgttagcaaccagctccatggactcccagatgttagcaaccagctccatggactcccagatgttagcaaccagctccatggactcccagatgttagcaaccagcaccatggattctcagatgttagcaaccagcaccatggactcccagatgttagcaactagctcaatggattcccagatgttagcatctggcactatggactctcaaatgttagcttctggcaccatggatgctcagatgttagcgtctggtaccatggatgcccagatgttagcrtctagtacccaagaytctgctatgttgggttcaaaatctcctgatccctataggttagctcaggatccttacaggttagctcaggatccctataggttgggccatgacccctatagattaggtcatgatgcttacaggttaggacaagacccttatagattaggccatgatccctacagactaactcctgatccctataggatgtcacctagaccctacaggatagcacccaggtcctatagaatagcacccaggccatataggttagcacctagacccctgatgttagcatctagacgttctatgatgatgtcctatgctgcagaacgttccatgatgtcatcttacgaacgctctatgatgtcttatgagcggtctatgatgtcccctatggctgaacgctctatgatgtcagcctacgagcgctctatgatgtcagcctacgagcgctctatgatgtcccctatggctgagcgctctatgatgtcagcttatgaacgctccatgatgtcagcttatgaacgctccatgatgtccccaatggctgatcgatctatgatgtccatgggtgctgaccggtctatgatgtcgtcatactctgctgctgaccggtctatgatgtcatcgtactctgcagctgaccgatctatgatgtcatcttatactgctgatcgttcaatgatgtctatggctgctgattcttacaccgattcttacactgacacatatacagaggcatatatggtgccacctttgcctcctgaagagcccccaacaatgccaccgttgccacctgaggagccaccaatgacaccaccattgcctcctgaggaaccaccagagggtccagcattgcccactgagcagtcagcattaacagctgaaaatacttggcctacagaggtgccatcatcaccatctgaagagtctgtatcgcagcctgagcctcctgtgagtcaaagtgagatttcggagccttcagcagtgcctactgattattcagtgtcagcatcagatccctcagttttagtatcagaggctgctgtgactgttccagaaccaccaccagagccagaatcttcaattacgttaacacctgtagagtctgcagtagtagcagaagaacatgaagttgttccagagagaccagtgacttgtatggtatctgaaactcccgccatgtcagctgaaccaactgtgttagcatcagagcctcctgttatgtcagagacagcagaaacatttgattccatgagagcctcaggacatgttgcctcagaagtatctacatccttgttggttccagcagtaactactccagtgctggcagagagcattctggagccgccagccatggctgccccagagtcttcagctatggctgtcctggagtcttcggctgtgaccgtcctggagtcttcgactgtgactgtcctggagtcttcgactgtaactgtcctrgagccttcggttgtgactgtcccggagcctcctgttgtggctgagccagactatgttaccattcctgtgccagttgtttctgcgctggagccttctgtgcctgttctggaaccagcggtgtcagtccttcaaccttctatgattgtttcagaaccatctgtttctgtccaggaatcgactgtgacagtttcagagcctgctgtcacagtctcagagcagactcaagtaataccaactgaggtggctatagagtccacaccartgatactggaatctagtatcatgtcatcacatgttatgaaaggaattartctatcctctggtgatcaaaatcttgctccagagattggcatrcaggagattgcattgcattcaggtgaagaaccacatgctgaggaacayctgaaaggtgacttttacgaaagtgaacatggtataaatatagaccttaatataaataatcatttaattgctaaagagatggaacataatacagtgtgtgctgctggtactagtcctgttggggaaattggtgaagagaaaattttgcccaccagtgagactaaacagygcacagtattggatacctaccctggtgttagtgaagctgatgcaggagaaactctatcttctactggtccttttgctctggaacctgatgcaacaggaactagtaagggtattgaatttaccacagcatctactctcagtttagttaataaatatgatgttgatttatctttaactactcaagatactgaacatgacatggtaatttccaccagtcctagtggtggtagtgaagctgacattgaagggcctttgcctgctaaagatattcatcttgatttaccatctaataataaccttgttagtaaggatacagaagaaccattacctgtaaaagagagtgaccagacattagcagctctgctcagccctaaagaaagtagtggaggagaaaaagaagtacctccccctcctaaagagacactgcctgattcaggattttctgccaatattgaggatattaatgaagcagatttagtgagaccgttacttcctaaggacatggaacgtcttacaagccttagagctggcattgaaggacctttacttgcaagtgatgttggacgtgacagatctgctgccagcccggttgtaagtagtatgccagaaagagcttcagagtcttcttcagaggaaaaagatgattatgaaatttttgtaaaagttaaggacactcacgaaaaaagcaagaaaaataagaaccgtgataagggggagaaagagaagaaaagagactcttcattaagatctcgaagtaagcgttccaaatcttctgaacacaaatcacgcaagcgtaccagtgaatctcgttctagggcaagaaagagatcatctaagtccaagtctcatcgctctcagacacgttcacggtcacgttcaagacgcaggaggagaagcagcagatcaagatcaaagtctagaggaagaagatctgtatcaaaagagaagcgcaaaagatctccaaagcacagatccaagtctagggaaagaaaaagaaaaagatcaagctccagggataaccgaaagacagttagagctcgaagtcgaaccccaagtcgtcggagtcggagtcatactccaagtcgtcgacgaaggtctagatctgtgggtagaagaaggagctttagcatttccccaagccgccgcagccgcacccccagccgccgcagccgcacccccagccgccgcagccgcacccccagccgccgcagccgcacccccagccgccggagccgcacccctagccgtcggagccgcaccccaagccgccggagaagatcaaggtctgtggtaagaagacgaagcttcagtatctcaccagtcagattaaggcgatcaagaacacccttaagaagaaggtttagcagatctcccatccgtcgtaaaagatccaggtcttctgaacgaggcagatcacccaaacgtctgacagatttggataaggctcaattacttgaaatagccaaagctaatgcagctgccatgtgtgctaaggctggtgtccctttaccaccaaacctaaagcctgcacctccacctactatagwwgagaaagttgctaaaaagtcaggaggagctactatagaagaactaactgagttttagaagccaaactgactgaggagtgggacggttcgtttgaatggaggaggtgttgagtgagcaacacgcagaagctcgcctacagtttcgtttccattcacgacgcgttcactgatcgccacgaaaatgtaaacagatcgcacagagtaaagaagatgatgatgtaatagtgaataaacctcatgtttcggatgaagaggaagaagaacctcctttttatcatcatccctttaaactcagtgaacccaaacctatttttttcaatctgaatattgctgcagcaaaaccaactccaccaaaaagccaggtaacattaacaaaagaattccctgtatcatctggatctcaacatcggaaaaaagaagcggatagtgtttatggagaatgrgttcctgtggagaaaaatggtgaagaaaacaaagatgatgataatgttttcagcagcaatttgccctcagagcctgtggacatctctacagcaatgagtgaacgggcacttgctcagaaaagactcagtgagaatgcatttgatcttgaagccatgagcatgttaaatagagctcaggaaaggattgatgcctgggctcagctgaactctattcctggccagttcacaggaagtacaggagtacaggttttgacacaagaacagttggccaatactggtgcccaagcctggattaaaaaggatcagttcttaagagcagccccggtaactggaggaatgggagccgttttgatgagaaaaatgggctggagagaaggagaaggattaggaaaaaacaaagaaggcaayaaggaacccatcctagttgattttaagacagaccgaaaaggtcttgttgcagtaggagaaagagcacaaaagaggtctgggaacttctctgctgcaatgaaagatctgtcaggcaaacatcctgtgtctgctttgatggagatctgtaataaaagaaggtggcaaccacctgaatttctattggtccatgatagtggccctgatcatcgcaaacattttctctttagggtattgataaatggaagcgcttaccagcccagctttgccagccctaataagaagcatgctaaagccacagcagctactgtggttcttcaagcaatgggccttgtaccaaaggacctcatggctaatgccacttgcttcaggagtgcctcacgtagatagattgaggttttataataatcatttcagaattttactctgcatcacaatgtatttcctctttaatgttgtaaatatttggcaatttaagacattgtgtaaaaagcaatctgtaaaaacatctccaggctttgatttttgtaccatggaaattgtatttaaccatacagggttttggtatgtttatattgtttaccttagtgatgtatttgtttaagtggctaacatccaaacgactgtttgaaggcatcagagtaatcttcagtgtggaatgttaaataacgcttttatactgtattttgtactatgatgtaactccccttccttatggctaggctactgtaacacttgcctgtaatcagtgaagggctgtgcaccttgtactatttcacaatgggttctgctggacagataatgggccagtgttattgaggtgatcaagatctgttccacagggctaatgccaccatctcccctcaaaattttgtagaggytctaaaaagaaagtggtatgttgtgtgatgatcagcactaagtcctgcattcctgttaaagccacttgggtcataagaagggagtaaaaaatgaagtctgactagaattctattgcagaggccagtacatttagtatggcattgagttgtgatatagttttactttgatgtgcattttgaatttcagctacacctagatagacgtaaaatgataattaaaatgctgtaaccaacttatctaataaaattggcaaccagccactattttgttgactatgagaaagttaaaagtttatgttaatttttagggtctgatagaatatttcatgtgtattacagtggtattcatatgctatgtctctaaactttattttcaaaagcttaaggcccaaatacaaacttctctggaawaaacgtggtgttttattttctgggttataaagtgaacaaatacttagatactattatttctttacccaatgcttttgatttttaagcacttttattttaaaaatgtgaattatacagtccccccctacacayacayacacayacacacacacacacacacacacacacacacacacacacacacacacacacacacacacacacacacacacacacacacacacccctataagcacattaaatactactttgccgtgacagctcagtgtacttcacaattcttaacactattctatgtggaatacaaaatgcctttttatctgaattaacatgcatttaaaaagttttagtatatgtgaaaataaaggaattataaatcagtaggaaagatattaaggtagaagcatcaccaatcaactagctcagtagatgttgtctgtatttattttctacctttatgaaacaagaacctgctaacaggtaaatcgtaaagtaacatatttttgccctgatgccattagtcacaatgccatggggtaactgctatgtgatttcccatttgcaaggaagcatattaattcagtttctgctcaatatacaattaggttgtagggatataratatctcatttgagttatctgagtttttcatctttata

SEQ ID NO: 3167 - DNA, 9349 bp, Homo sapiens
tctcccggatgcatatccctgtcgaaactgaacttggcgccacctgagagcgcctgaaagccgtgtgttaaacaccgggttgcccttcttgctcttcttcctcttcgcctttaatctcaggcacttagcaagcctgttaaggctcccaaacactgctggggactgacaacttatgcggacacggtcgcctcaagagagrcggctcctgtaatggcgcctgcgtcagacactaacatggcggacatagtcgtgcgcggcgcaaacgtcagcacctctaccccagccgctcagaaacagcagaggagagcagggccgtgctcactgattggtccctcggtggagcgggccggaccgggcattccctttggagccaatcaggaaggcgagagaccgaattggccsstgcgcctcctcccgaggcatgctgggagcctggaggactagcgaggaggagttgagagaacggagcggacgccatggcgaccaacatcgagcagatttttaggtctttcgtggtcagtaaattccgggaaattcaacaggagctttccagtggaaggaatgaaggccagctgaatggtgaaacaaatacacccattgaaggaaaccaggcgggtgatgcagctgcctctgccaggagtctaccaaatgaagaaatagtgcagaagatagaggaagtactttctggggtcttagatacagaactacgatataagccagacttgaaagagggctccagaaaaagtagatgcgtatctgtacaaacagatcctactgatgaaattcccactaaaaagtcaaagaagcataaaaagcacaaaaacaaaaagaagaaaaagaagaaagaaaaggaaaaaaaatataaaagacagccagaagaatctgagtcaaagacgaaatctcatgatgatgggaacatagatttagaatctgattcctttttaaagtttgattctgaaccttcagctgtggcgctggagcttcctacaagagcatttggcccatctgagaccaatgaatcccctgcagttgtgctagaacctcctgtagtatcaatggaggtatcagagccacacatcttagaaactctgaagccagctacaaaaactgcagaactgtcagttgtatctacatcagtaatctcagagcagtcagagcagtctgtggcagtaatgccagaaccatccatgacaaagattctggattcctttgcagcagcaccagtgcctactacaacactggtgttgaagtcatctgagccagttgtaacaatgtcagtggagtatcagatgaagtctgtgctgaaatctgtggagagcacatctccagagccatcaaagatcatgttggtagagcccccagtagcaaaagtgttagagccttcagaaacccttgtggtatcatcagagacacctactgaggtgtaccctgagccaagcacatcaacaacaatggattttccagagtcatctgcaattgaagcgctaagattgccagagcagcctgtagacgtaccatcggagattgcagattcatccatgacaagaccgcaggagttgccggagctgcctaagaccacagcgttggagctgcaggagtcgtcggtggcctcagcgatggagttgccggggccacctgcgacctccatgccggagttgcaggggccccctgtgactccagtgctggagttacctgggccctctgctaccccggtgccagagttgccagggcccctttctaccccagtgcctgagttgccagggccccctgcgacagcagtgcctgagttgccagggccctctgkgacaccagtgccacagttgtcgcaggaattgccagggcttccagcaccatccatggggttggagccaccacaggaggtaccagagccatctgtgatggcacaggagttgccagggctgcctttggtgacagcagcagtagagttgccagagcagcctgcggtaacagtagcaatggagttgaccgaacaacctgtgacgacgacagagttggagcagcctgtggggatgacaacggtggaacatcctgggcatcctgaggtgacaacggcaacagggttgctggggcagcctgaggcaacgatggtgctggagttgccaggacagccagtggcaacgacagcgctggagttgccggggcagccttcggtgactggggtgccagagttgccagggctgccttcggcaactagggcactggagttgtcggggcagcctgtggcaactggggcactagagttgcctgggccgctcatggcagctggggcactggagttctcggggcagtctggggcagctggagcactggagcttttggggcagcctctggcaacaggggtgctggagttgccagggcagcctggggcgccagagttgcctgggcagcctgtggcaactgtggcgctggagatctctgttcagtctgtggtgacaacatcggagctgtcaacgatgaccgtgtcgcagtccctggaggtgccctcgacgacagcgctggaatcctataatacggtagcacaggagctgcctactacattagtgggggagacttctgtaacagtaggagtggatcccttgatggccccagaatcccatatattagcttctaacaccatggagacccatatattagcatccaacaccatggactcccaaatgctagcgtccaacaccatggactcccagatgttagcaactagcactatggactcccagatgttagcaaccagttccatggactcccagatgttagcaaccagctccatggactcccagatgttagcaaccagctccatggactcccagatgttagcaaccagctccatggactcccagatgttagcaaccagcaccatggattctcagatgttagcaaccagcaccatggactcccagatgttagcaactagctcaatggattcccagatgttagcatctggcactatggactctcaaatgttagcttctggcaccatggatgctcagatgttagcgtctggtaccatggatgcccagatgttagcrtctagtacccaagaytctgctatgttgggttcaaaatctcctgatccctataggttagctcaggatccttacaggttagctcaggatccctataggttgggccatgacccctatagattaggtcatgatgcttacaggttaggacaagacccttatagattaggccatgatccctacagactaactcctgatccctataggatgtcacctagaccctacaggatagcacccaggtcctatagaatagcacccaggccatataggttagcacctagacccctgatgttagcatctagacgttctatgatgatgtcctatgctgcagaacgttccatgatgtcatcttacgaacgctctatgatgtcttatgagcggtctatgatgtcccctatggctgaacgctctatgatgtcagcctacgagcgctctatgatgtcagcctacgagcgctctatgatgtcccctatggctgagcgctctatgatgtcagcttatgaacgctccatgatgtcagcttatgaacgctccatgatgtccccaatggctgatcgatctatgatgtccatgggtgctgaccggtctatgatgtcgtcatactctgctgctgaccggtctatgatgtcatcgtactctgcagctgaccgatctatgatgtcatcttatactgctgatcgttcaatgatgtctatggctgctgattcttacaccgattcttacactgacacatatacagaggcatatatggtgccacctttgcctcctgaagagcccccaacaatgccaccgttgccacctgaggagccaccaatgacaccaccattgcctcctgaggaaccaccagagggtccagcattgcccactgagcagtcagcattaacagctgaaaatacttggcctacagaggtgccatcatcaccatctgaagagtctgtatcgcagcctgagcctcctgtgagtcaaagtgagatttcggagccttcagcagtgcctactgattattcagtgtcagcatcagatccctcagttttagtatcagaggctgctgtgactgttccagaaccaccaccagagccagaatcttcaattacgttaacacctgtagagtctgcagtagtagcagaagaacatgaagttgttccagagagaccagtgacttgtatggtatctgaaactcccgccatgtcagctgaaccaactgtgttagcatcagagcctcctgttatgtcagagacagcagaaacatttgattccatgagagcctcaggacatgttgcctcagaagtatctacatccttgttggttccagcagtaactactccagtgctggcagagagcattctggagccgccagccatggctgccccagagtcttcagctatggctgtcctggagtcttcggctgtgaccgtcctggagtcttcgactgtgactgtcctggagtcttcgactgtaactgtcctrgagccttcggttgtgactgtcccggagcctcctgttgtggctgagccagactatgttaccattcctgtgccagttgtttctgcgctggagccttctgtgcctgttctggaaccagcggtgtcagtccttcaaccttctatgattgtttcagaaccatctgtttctgtccaggaatcgactgtgacagtttcagagcctgctgtcacagtctcagagcagactcaagtaataccaactgaggtggctatagagtccacaccartgatactggaatctagtatcatgtcatcacatgttatgaaaggaattartctatcctctggtgatcaaaatcttgctccagagattggcatrcaggagattgcattgcattcaggtgaagaaccacatgctgaggaacayctgaaaggtgacttttacgaaagtgaacatggtataaatatagaccttaatataaataatcatttaattgctaaagagatggaacataatacagtgtgtgctgctggtactagtcctgttggggaaattggtgaagagaaaattttgcccaccagtgagactaaacagygcacagtattggatacctaccctggtgttagtgaagctgatgcaggagaaactctatcttctactggtccttttgctctggaacctgatgcaacaggaactagtaagggtattgaatttaccacagcatctactctcagtttagttaataaatatgatgttgatttatctttaactactcaagatactgaacatgacatggtaatttccaccagtcctagtggtggtagtgaagctgacattgaagggcctttgcctgctaaagatattcatcttgatttaccatctaataataaccttgttagtaaggatacagaagaaccattacctgtaaaagagagtgaccagacattagcagctctgctcagccctaaagaaagtagtggaggagaaaaagaagtacctccccctcctaaagagacactgcctgattcaggattttctgccaatattgaggatattaatgaagcagatttagtgagaccgttacttcctaaggacatggaacgtcttacaagccttagagctggcattgaaggacctttacttgcaagtgatgttggacgtgacagatctgctgccagcccggttgtaagtagtatgccagaaagagcttcagagtcttcttcagaggaaaaagatgattatgaaatttttgtaaaagttaaggacactcacgaaaaaagcaagaaaaataagaaccgtgataagggggagaaagagaagaaaagagactcttcattaagatctcgaagtaagcgttccaaatcttctgaacacaaatcacgcaagcgtaccagtgaatctcgttctagggcaagaaagagatcatctaagtccaagtctcatcgctctcagacacgttcacggtcacgttcaagacgcaggaggagaagcagcagatcaagatcaaagtctagaggaagaagatctgtatcaaaagagaagcgcaaaagatctccaaagcacagatccaagtctagggaaagaaaaagaaaaagatcaagctccagggataaccgaaagacagttagagctcgaagtcgaaccccaagtcgtcggagtcggagtcatactccaagtcgtcgacgaaggtctagatctgtgggtagaagaaggagctttagcatttccccaagccgccgcagccgcacccccagccgccgcagccgcacccccagccgccgcagccgcacccccagccgccgcagccgcacccccagccgccggagccgcacccctagccgtcggagccgcaccccaagccgccggagaagatcaaggtctgtggtaagaagacgaagcttcagtatctcaccagtcagattaaggcgatcaagaacacccttaagaagaaggtttagcagatctcccatccgtcgtaaaagatccaggtcttctgaacgaggcagatcacccaaacgtctgacagatttggataaggctcaattacttgaaatagccaaagctaatgcagctgccatgtgtgctaaggctggtgtccctttaccaccaaacctaaagcctgcacctccacctactatagwwgagaaagttgctaaaaagtcaggaggagctactatagaagaactaactgagaaatgtaaacagatcgcacagagtaaagaagatgatgatgtaatagtgaataaacctcatgtttcggatgaagaggaagaagaacctcctttttatcatcatccctttaaactcagtgaacccaaacctatttttttcaatctgaatattgctgcagcaaaaccaactccaccaaaaagccaggtaacattaacaaaagaattccctgtatcatctggatctcaacatcggaaaaaagaagcggatagtgtttatggagaatgrgttcctgtggagaaaaatggtgaagaaaacaaagatgatgataatgttttcagcagcaatttgccctcagagcctgtggacatctctacagcaatgagtgaacgggcacttgctcagaaaagactcagtgagaatgcatttgatcttgaagccatgagcatgttaaatagagctcaggaaaggattgatgcctgggctcagctgaactctattcctggccagttcacaggaagtacaggagtacaggttttgacacaagaacagttggccaatactggtgcccaagcctggattaaaaaggatcagttcttaagagcagccccggtaactggaggaatgggagccgttttgatgagaaaaatgggctggagagaaggagaaggattaggaaaaaacaaagaaggcaayaaggaacccatcctagttgattttaagacagaccgaaaaggtcttgttgcagtaggagaaagagcacaaaagaggtctgggaacttctctgctgcaatgaaagatctgtcaggcaaacatcctgtgtctgctttgatggagatctgtaataaaagaaggtggcaaccacctgaatttctattggtccatgatagtggccctgatcatcgcaaacattttctctttagggtattgagaaatggagcccttaccagacccaattgtatgtttttcttgaataggtattgataaatggaagcgcttaccagcccagctttgccagccctaataagaagcatgctaaagccacagcagctactgtggttcttcaagcaatgggccttgtaccaaaggacctcatggctaatgccacttgcttcaggagtgcctcacgtagatagattgaggttttataataatcatttcagaattttactctgcatcacaatgtatttcctctttaatgttgtaaatatttggcaatttaagacattgtgtaaaaagcaatctgtaaaaacatctccaggctttgatttttgtaccatggaaattgtatttaaccatacagggttttggtatgtttatattgtttaccttagtgatgtatttgtttaagtggctaacatccaaacgactgtttgaaggcatcagagtaatcttcagtgtggaatgttaaataacgcttttatactgtattttgtactatgatgtaactccccttccttatggctaggctactgtaacacttgcctgtaatcagtgaagggctgtgcaccttgtactatttcacaatgggttctgctggacagataatgggccagtgttattgaggtgatcaagatctgttccacagggctaatgccaccatctcccctcaaaattttgtagaggytctaaaaagaaagtggtatgttgtgtgatgatcagcactaagtcctgcattcctgttaaagccacttgggtcataagaagggagtaaaaaatgaagtctgactagaattctattgcagaggccagtacatttagtatggcattgagttgtgatatagttttactttgatgtgcattttgaatttcagctacacctagatagacgtaaaatgataattaaaatgctgtaaccaacttatctaataaaattggcaaccagccactattttgttgactatgagaaagttaaaagtttatgttaatttttagggtctgatagaatatttcatgtgtattacagtggtattcatatgctatgtctctaaactttattttcaaaagcttaaggcccaaatacaaacttctctggaawaaacgtggtgttttattttctgggttataaagtgaacaaatacttagatactattatttctttacccaatgcttttgatttttaagcacttttattttaaaaatgtgaattatacagtccccccctacacayacayacacayacacacacacacacacacacacacacacacacacacacacacacacacacacacacacacacacacacacacacacacacacccctataagcacattaaatactactttgccgtgacagctcagtgtacttcacaattcttaacactattctatgtggaatacaaaatgcctttttatctgaattaacatgcatttaaaaagttttagtatatgtgaaaataaaggaattataaatcagtaggaaagatattaaggtagaagcatcaccaatcaactagctcagtagatgttgtctgtatttattttctacctttatgaaacaagaacctgctaacaggtaaatcgtaaagtaacatatttttgccctgatgccattagtcacaatgccatggggtaactgctatgtgatttcccatttgcaaggaagcatattaattcagtttctgctcaatatacaattaggttgtagggatataratatctcatttgagttatctgagtttttcatctttata

SEQ ID NO: 3168 - DNA, 7391 bp, Homo sapiens
tctcccggatgcatatccctgtcgaaactgaacttggcgccacctgagagcgcctgaaagccgtgtgttaaacaccgggttgcccttcttgctcttcttcctcttcgcctttaatctcaggcacttagcaagcctgttaaggctcccaaacactgctggggactgacaacttatgcggacacggtcgcctcaagagagrcggctcctgtaatggcgcctgcgtcagacactaacatggcggacatagtcgtgcgcggcgcaaacgtcagcacctctaccccagccgctcagaaacagcagaggagagcagggccgtgctcactgattggtccctcggtggagcgggccggaccgggcattccctttggagccaatcaggaaggcgagagaccgaattggccsstgcgcctcctcccgaggcatgctgggagcctggaggactagcgaggaggagttgagagaacggagcggacgccatggcgaccaacatcgagcagatttttaggtctttcgtggtcagtaaattccgggaaattcaacaggagctttccagtggaaggaatgaaggccagctgaatggtgaaacaaatacacccattgaaggaaaccaggcgggtgatgcagctgcctctgccaggagtctaccaaatgaagaaatagtgcagaagatagaggaagtactttctggggtcttagatacagaactacgatataagccagtttcactctttttgcccagcctggagtgcaatggcgtgatctcggctcaccgcaacctccgcctcccagacttgaaagagggctccagaaaaagtagatgcgtatctgtacaaacagatcctactgatgaaattcccactaaaaagtcaaagaagcataaaaagcacaaaaacaaaaagaagaaaaagaagaaagaaaaggaaaaaaaatataaaagacagccagaagaatctgagtcaaagacgaaatctcatgatgatgggaacatagatttagaatctgattcctttttaaagtttgattctgaaccttcagctgtggcgctggagcttcctacaagagcatttggcccatctgagaccaatgaatcccctgcagttgtgctagaacctcctgtagtatcaatggaggtatcagagccacacatcttagaaactctgaagccagctacaaaaactgcagaactgtcagttgtatctacatcagtaatctcagagcagtcagagcagtctgtggcagtaatgccagaaccatccatgacaaagattctggattcctttgcagcagcaccagtgcctactacaacactggtgttgaagtcatctgagccagttgtaacaatgtcagtggagtatcagatgaagtctgtgctgaaatctgtggagagcacatctccagagccatcaaagatcatgttggtagagcccccagtagcaaaagtgttagagccttcagaaacccttgtggtatcatcagagacacctactgaggtgtaccctgagccaagcacatcaacaacaatggattttccagagtcatctgcaattgaagcgctaagattgccagagcagcctgtagacgtaccatcggagattgcagattcatccatgacaagaccgcaggagttgccggagctgcctaagaccacagcgttggagctgcaggagtcgtcggtggcctcagcgatggagttgccggggccacctgcgacctccatgccggagttgcaggggccccctgtgactccagtgctggagttacctgggccctctgctaccccggtgccagagttgccagggcccctttctaccccagtgcctgagttgccagggccccctgcgacagcagtgcctgagttgccagggccctctgkgacaccagtgccacagttgtcgcaggaattgccagggcttccagcaccatccatggggttggagccaccacaggaggtaccagagccatctgtgatggcacaggagttgccagggctgcctttggtgacagcagcagtagagttgccagagcagcctgcggtaacagtagcaatggagttgaccgaacaacctgtgacgacgacagagttggagcagcctgtggggatgacaacggtggaacatcctgggcatcctgaggtgacaacggcaacagggttgctggggcagcctgaggcaacgatggtgctggagttgccaggacagccagtggcaacgacagcgctggagttgccggggcagccttcggtgactggggtgccagagttgccagggctgccttcggcaactagggcactggagttgtcggggcagcctgtggcaactggggcactagagttgcctgggccgctcatggcagctggggcactggagttctcggggcagtctggggcagctggagcactggagcttttggggcagcctctggcaacaggggtgctggagttgccagggcagcctggggcgccagagttgcctgggcagcctgtggcaactgtggcgctggagatctctgttcagtctgtggtgacaacatcggagctgtcaacgatgaccgtgtcgcagtccctggaggtgccctcgacgacagcgctggaatcctataatacggtagcacaggagctgcctactacattagtgggggagacttctgtaacagtaggagtggatcccttgatggccccagaatcccatatattagcttctaacaccatggagacccatatattagcatccaacaccatggactcccaaatgctagcgtccaacaccatggactcccagatgctagcatccaacaccatggactcccagatgttagcgtctagcaccatggactcccagatgttagcaactagctccatggactcccagatgttagcaactagctccatggactcccagatgttagcaactagcactatggactcccagatgttagcaaccagttccatggactcccagatgttagcaaccagctccatggactcccagatgttagcaaccagctccatggactcccagatgttagcaaccagctccatggactcccagatgttagcaaccagcaccatggattctcagatgttagcaaccagcaccatggactcccagatgttagcaactagctcaatggattcccagatgttagcatctggcactatggactctcaaatgttagcttctggcaccatggatgctcagatgttagcgtctggtaccatggatgcccagatgttagcrtctagtacccaagaytctgctatgttgggttcaaaatctcctgatccctataggttagctcaggatccttacaggttagctcaggatccctataggttgggccatgacccctatagattaggtcatgatgcttacaggttaggacaagacccttatagattaggccatgatccctacagactaactcctgatccctataggatgtcacctagaccctacaggatagcacccaggtcctatagaatagcacccaggccatataggttagcacctagacccctgatgttagcatctagacgttctatgatgatgtcctatgctgcagaacgttccatgatgtcatcttacgaacgctctatgatgtcttatgagcggtctatgatgtcccctatggctgaacgctctatgatgtcagcctacgagcgctctatgatgtcagcctacgagcgctctatgatgtcccctatggctgagcgctctatgatgtcagcttatgaacgctccatgatgtcagcttatgaacgctccatgatgtccccaatggctgatcgatctatgatgtccatgggtgctgaccggtctatgatgtcgtcatactctgctgctgaccggtctatgatgtcatcgtactctgcagctgaccgatctatgatgtcatcttatactgctgatcgttcaatgatgtctatggctgctgattcttacaccgattcttacactgacacatatacagaggcatatatggtgccacctttgcctcctgaagagcccccaacaatgccaccgttgccacctgaggagccaccaatgacaccaccattgcctcctgaggaaccaccagagggtccagcattgcccactgagcagtcagcattaacagctgaaaatacttggcctacagaggtgccatcatcaccatctgaagagtctgtatcgcagcctgagcctcctgtgagtcaaagtgagatttcggagccttcagcagtgcctactgattattcagtgtcagcatcagatccctcagttttagtatcagaggctgctgtgactgttccagaaccaccaccagagccagaatcttcaattacgttaacacctgtagagtctgcagtagtagcagaagaacatgaagttgttccagagagaccagtgacttgtatggtatctgaaactcccgccatgtcagctgaaccaactgtgttagcatcagagcctcctgttatgtcagagacagcagaaacatttgattccatgagagcctcaggacatgttgcctcagaagtatctacatccttgttggttccagcagtaactactccagtgctggcagagagcattctggagccgccagccatggctgccccagagtcttcagctatggctgtcctggagtcttcggctgtgaccgtcctggagtcttcgactgtgactgtcctggagtcttcgactgtaactgtcctrgagccttcggttgtgactgtcccggagcctcctgttgtggctgagccagactatgttaccattcctgtgccagttgtttctgcgctggagccttctgtgcctgttctggaaccagcggtgtcagtccttcaaccttctatgattgtttcagaaccatctgtttctgtccaggaatcgactgtgacagtttcagagcctgctgtcacagtctcagagcagactcaagtaataccaactgaggtggctatagagtccacaccartgatactggaatctagtatcatgtcatcacatgttatgaaaggaattartctatcctctggtgatcaaaatcttgctccagagattggcatrcaggagattgcattgcattcaggtgaagaaccacatgctgaggaacayctgaaaggtgacttttacgaaagtgaacatggtataaatatagaccttaatataaataatcatttaattgctaaagagatggaacataatacagtgtgtgctgctggtactagtcctgttggggaaattggtgaagagaaaattttgcccaccagtgagactaaacagygcacagtattggatacctaccctggtgttagtgaagctgatgcaggagaaactctatcttctactggtccttttgctctggaacctgatgcaacaggaactagtaagggtattgaatttaccacagcatctactctcagtttagttaataaatatgatgttgatttatctttaactactcaagatactgaacatgacatggtaatttccaccagtcctagtggtggtagtgaagctgacattgaagggcctttgcctgctaaagatattcatcttgatttaccatctaataataaccttgttagtaaggatacagaagaaccattacctgtaaaagagagtgaccagacattagcagctctgctcagccctaaagaaagtagtggaggagaaaaagaagtacctccccctcctaaagagacactgcctgattcaggattttctgccaatattgaggatattaatgaagcagatttagtgagaccgttacttcctaaggacatggaacgtcttacaagccttagagctggcattgaaggacctttacttgcaagtgatgttggacgtgacagatctgctgccagcccggttgtaagtagtatgccagaaagagcttcagagtcttcttcagaggaaaaagatgattatgaaatttttgtaaaagttaaggacactcacgaaaaaagcaagaaaaataagaaccgtgataagggggagaaagagaagaaaagagactcttcattaagatctcgaagtaagcgttccaaatcttctgaacacaaatcacgcaagcgtaccagtgaatctcgttctagggcaagaaagagatcatctaagtccaagtctcatcgctctcagacacgttcacggtcacgttcaagacgcaggaggagaagcagcagatcaagatcaaagtctagaggaagaagatctgtatcaaaagagaagcgcaaaagatctccaaagcacagatccaagtctagggaaagaaaaagaaaaagatcaagctccagggataaccgaaagacagttagagctcgaagtcgaaccccaagtcgtcggagtcggagtcatactccaagtcgtcgacgaaggtctagatctgtgggtagaagaaggagctttagcatttccccaagccgccgcagccgcacccccagccgccgcagccgcacccccagccgccgcagccgcacccccagccgccgcagccgcacccccagccgccggagccgcacccctagccgtcggagccgcaccccaagccgccggagaagatcaaggtctgtggtaagaagacgaagcttcagtatctcaccagtcagattaaggcgatcaagaacacccttaagaagaaggtttagcagatctcccatccgtcgtaaaagatccaggtcttctgaacgaggcagatcacccaaacgtctgacagatttggataaggctcaattacttgaaatagccaaagctaatgcagctgccatgtgtgctaaggctggtgtccctttaccaccaaacctaaagcctgcacctccacctactatagwwgagaaagttgctaaaaagtcaggaggagctactatagaagaactaactgagaaatgtaaacagatcgcacagagtaaagaagatgatgatgtaatagtgaataaacctcatgtttcggatgaagaggaagaagaacctcctttttatcatcatccctttaaactcagtgaacccaaacctatttttttcaatctgaatattgctgcagcaaaaccaactccaccaaaaagccaggtaacattaacaaaagaattccctgtatcatctggatctcaacatcggaaaaaagaagcggatagtgtttatggagaatgrgttcctgtggagaaaaatggtgaagaaaacaaagatgatgataatgttttcagcagcaatttgccctcagagcctgtggacatctctacagcaatgagtgaacgggcacttgctcagaaaagactcagtgagaatgcatttgatcttgaagccatgagcatgttaaatagagctcaggaaagggtatgtagcagttttttaaaaaaaattattatttaccatcagccaactcacaccaatgtaccagttttaatgtctaaa

SEQ ID NO: 3169 - DNA, 6636 bp, Homo sapiens
tctcccggatgcatatccctgtcgaaactgaacttggcgccacctgagagcgcctgaaagccgtgtgttaaacaccgggttgcccttcttgctcttcttcctcttcgcctttaatctcaggcacttagcaagcctgttaaggctcccaaacactgctggggactgacaacttatgcggacacggtcgcctcaagagagrcggctcctgtaatggcgcctgcgtcagacactaacatggcggacatagtcgtgcgcggcgcaaacgtcagcacctctaccccagccgctcagaaacagcagaggagagcagggccgtgctcactgattggtccctcggtggagcgggccggaccgggcattccctttggagccaatcaggaaggcgagagaccgaattggccsstgcgcctcctcccgaggcatgctgggagcctggaggactagcgaggaggagttgagagaacggagcggacgccatggcgaccaacatcgagcagatttttaggtctttcgtggtcagtaaattccgggaaattcaacaggagctttccagtggaaggaatgaaggccagctgaatggtgaaacaaatacacccattgaaggaaaccaggcgggtgatgcagctgcctctgccaggagtctaccaaatgaagaaatagtgcagaagatagaggaagtactttctggggtcttagatacagaactacgatataagccagacttgaaagagggctccagaaaaagtagatgcgtatctgtacaaacagatcctactgatgaaattcccactaaaaagtcaaagaagcataaaaagcacaaaaacaaaaagaagaaaaagaagaaagaaaaggaaaaaaaatataaaagacagccagaagaatctgagtcaaagacgaaatctcatgatgatgggaacatagatttagaatctgattcctttttaaagtttgattctgaaccttcagctgtggcgctggagcttcctacaagagcatttggcccatctgagaccaatgaatcccctgcagttgtgctagaacctcctgtagtatcaatggaggtatcagagccacacatcttagaaactctgaagccagctacaaaaactgcagaactgtcagttgtatctacatcagtaatctcagagcagtcagagcagtctgtggcagtaatgccagaaccatccatgacaaagattctggattcctttgcagcagcaccagtgcctactacaacactggtgttgaagtcatctgagccagttgtaacaatgtcagtggagtatcagatgaagtctgtgctgaaatctgtggagagcacatctccagagccatcaaagatcatgttggtagagcccccagtagcaaaagtgttagagccttcagaaacccttgtggtatcatcagagacacctactgaggtgtaccctgagccaagcacatcaacaacaatggattttccagagtcatctgcaattgaagcgctaagattgccagagcagcctgtagacgtaccatcggagattgcagattcatccatgacaagaccgcaggagttgccggagctgcctaagaccacagcgttggagctgcaggagtcgtcggtggcctcagcgatggagttgccggggccacctgcgacctccatgccggagttgcaggggccccctgtgactccagtgctggagttacctgggccctctgctaccccggtgccagagttgccagggcccctttctaccccagtgcctgagttgccagggccccctgcgacagcagtgcctgagttgccagggccctctgkgacaccagtgccacagttgtcgcaggaattgccagggcttccagcaccatccatggggttggagccaccacaggaggtaccagagccatctgtgatggcacaggagttgccagggctgcctttggtgacagcagcagtagagttgccagagcagcctgcggtaacagtagcaatggagttgaccgaacaacctgtgacgacgacagagttggagcagcctgtggggatgacaacggtggaacatcctgggcatcctgaggtgacaacggcaacagggttgctggggcagcctgaggcaacgatggtgctggagttgccaggacagccagtggcaacgacagcgctggagttgccggggcagccttcggtgactggggtgccagagttgccagggctgccttcggcaactagggcactggagttgtcggggcagcctgtggcaactggggcactagagttgcctgggccgctcatggcagctggggcactggagttctcggggcagtctggggcagctggagcactggagcttttggggcagcctctggcaacaggggtgctggagttgccagggcagcctggggcgccagagttgcctgggcagcctgtggcaactgtggcgctggagatctctgttcagtctgtggtgacaacatcggagctgtcaacgatgaccgtgtcgcagtccctggaggtgccctcgacgacagcgctggaatcctataatacggtagcacaggagctgcctactacattagtgggggagacttctgtaacagtaggagtggatcccttgatggccccagaatcccatatattagcttctaacaccatggagacccatatattagcatccaacaccatggactcccaaatgctagcgtccaacaccatggactcccagatgctagcatccaacaccatggactcccagatgttagcgtctagcaccatggactcccagatgttagcaactagctccatggactcccagatgttagcaactagctccatggactcccagatgttagcaactagcactatggactcccagatgttagcaaccagttccatggactcccagatgttagcaaccagctccatggactcccagatgttagcaaccagctccatggactcccagatgttagcaaccagctccatggactcccagatgttagcaaccagcaccatggattctcagatgttagcaaccagcaccatggactcccagatgttagcaactagctcaatggattcccagatgttagcatctggcactatggactctcaaatgttagcttctggcaccatggatgctcagatgttagcgtctggtaccatggatgcccagatgttagcrtctagtacccaagaytctgctatgttgggttcaaaatctcctgatccctataggttagctcaggatccttacaggttagctcaggatccctataggttgggccatgacccctatagattaggtcatgatgcttacaggttaggacaagacccttatagattaggccatgatccctacagactaactcctgatccctataggatgtcacctagaccctacaggatagcacccaggtcctatagaatagcacccaggccatataggttagcacctagacccctgatgttagcatctagacgttctatgatgatgtcctatgctgcagaacgttccatgatgtcatcttacgaacgctctatgatgtcttatgagcggtctatgatgtcccctatggctgaacgctctatgatgtcagcctacgagcgctctatgatgtcagcctacgagcgctctatgatgtcccctatggctgagcgctctatgatgtcagcttatgaacgctccatgatgtcagcttatgaacgctccatgatgtccccaatggctgatcgatctatgatgtccatgggtgctgaccggtctatgatgtcgtcatactctgctgctgaccggtctatgatgtcatcgtactctgcagctgaccgatctatgatgtcatcttatactgctgatcgttcaatgatgtctatggctgctgattcttacaccgattcttacactgacacatatacagaggcatatatggtgccacctttgcctcctgaagagcccccaacaatgccaccgttgccacctgaggagccaccaatgacaccaccattgcctcctgaggaaccaccagagggtccagcattgcccactgagcagtcagcattaacagctgaaaatacttggcctacagaggtgccatcatcaccatctgaagagtctgtatcgcagcctgagcctcctgtgagtcaaagtgagatttcggagccttcagcagtgcctactgattattcagtgtcagcatcagatccctcagttttagtatcagaggctgctgtgactgttccagaaccaccaccagagccagaatcttcaattacgttaacacctgtagagtctgcagtagtagcagaagaacatgaagttgttccagagagaccagtgacttgtatggtatctgaaactcccgccatgtcagctgaaccaactgtgttagcatcagagcctcctgttatgtcagagacagcagaaacatttgattccatgagagcctcaggacatgttgcctcagaagtatctacatccttgttggttccagcagtaactactccagtgctggcagagagcattctggagccgccagccatggctgccccagagtcttcagctatggctgtcctggagtcttcggctgtgaccgtcctggagtcttcgactgtgactgtcctggagtcttcgactgtaactgtcctrgagccttcggttgtgactgtcccggagcctcctgttgtggctgagccagactatgttaccattcctgtgccagttgtttctgcgctggagccttctgtgcctgttctggaaccagcggtgtcagtccttcaaccttctatgattgtttcagaaccatctgtttctgtccaggaatcgactgtgacagtttcagagcctgctgtcacagtctcagagcagactcaagtaataccaactgaggtggctatagagtccacaccartgatactggaatctagtatcatgtcatcacatgttatgaaaggaattartctatcctctggtgatcaaaatcttgctccagagattggcatrcaggagattgcattgcattcaggtgaagaaccacatgctgaggaacayctgaaaggtgacttttacgaaagtgaacatggtataaatatagaccttaatataaataatcatttaattgctaaagagatggaacataatacagtgtgtgctgctggtactagtcctgttggggaaattggtgaagagaaaattttgcccaccagtgagactaaacagygcacagtattggatacctaccctggtgttagtgaagctgatgcaggagaaactctatcttctactggtccttttgctctggaacctgatgcaacaggaactagtaagggtattgaatttaccacagcatctactctcagtttagttaataaatatgatgttgatttatctttaactactcaagatactgaacatgacatggtaatttccaccagtcctagtggtggtagtgaagctgacattgaagggcctttgcctgctaaagatattcatcttgatttaccatctaataataaccttgttagtaaggatacagaagaaccattacctgtaaaagagagtgaccagacattagcagctctgctcagccctaaagaaagtagtggaggagaaaaagaagtacctccccctcctaaagagacactgcctgattcaggattttctgccaatattgaggatattaatgaagcagatttagtgagaccgttacttcctaaggacatggaacgtcttacaagccttagagctggcattgaaggacctttacttgcaagtgatgttggacgtgacagatctgctgccagcccggttgtaagtagtatgccagaaagagcttcagagtcttcttcagaggaaaaagatgattatgaaatttttgtaaaagttaaggacactcacgaaaaaagcaagaaaaataagaaccgtgataagggggagaaagagaagaaaagagactcttcattaagatctcgaagtaagcgttccaaatcttctgaacacaaatcacgcaagcgtaccagtgaatctcgttctagggcaagaaagagatcatctaagtccaagtctcatcgctctcagacacgttcacggtcacgttcaagacgcaggaggagaagcagcagatcaagatcaaagtctagaggaagaagatctgtatcaaaagagaagcgcaaaagatctccaaagcacagatccaagtctagggaaagaaaaagaaaaagatcaagctccagggataaccgaaagacagttagagctcgaagtcgaaccccaagtcgtcggagtcggagtcatactccaagtcgtcgacgaaggtctagatctgtgggtagaagaaggagctttagcatttccccaagccgccgcagccgcacccccagccgccgcagccgcacccccagccgccgcagccgcacccccagccgccgcagccgcacccccagccgccggagccgcacccctagccgtcggagccgcaccccaagccgccggagaagatcaaggtctgtggtaagaagacgaagcttcagtatctcaccagtcagattaaggcgatcaagaacacccttaagaagaaggtttagcagatctcccatccgtcgtaaaagatccaggtcttctgaacgaggcagatcacccaaacgtctgacagatttgg

SEQ ID NO: 3170 - DNA, 9469 bp, Homo sapiens
tctcccggatgcatatccctgtcgaaactgaacttggcgccacctgagagcgcctgaaagccgtgtgttaaacaccgggttgcccttcttgctcttcttcctcttcgcctttaatctcaggcacttagcaagcctgttaaggctcccaaacactgctggggactgacaacttatgcggacacggtcgcctcaagagagrcggctcctgtaatggcgcctgcgtcagacactaacatggcggacatagtcgtgcgcggcgcaaacgtcagcacctctaccccagccgctcagaaacagcagaggagagcagggccgtgctcactgattggtccctcggtggagcgggccggaccgggcattccctttggagccaatcaggaaggcgagagaccgaattggccsstgcgcctcctcccgaggcatgctgggagcctggaggactagcgaggaggagttgagagaacggagcggacgccatggcgaccaacatcgagcagatttttaggtctttcgtggtcagtaaattccgggaaattcaacaggagctttccagtggaaggaatgaaggccagctgaatggtgaaacaaatacacccattgaaggaaaccaggcgggtgatgcagctgcctctgccaggagtctaccaaatgaagaaatagtgcagaagatagaggaagtactttctggggtcttagatacagaactacgatataagccagacttgaaagagggctccagaaaaagtagatgcgtatctgtacaaacagatcctactgatgaaattcccactaaaaagtcaaagaagcataaaaagcacaaaaacaaaaagaagaaaaagaagaaagaaaaggaaaaaaaatataaaagacagccagaagaatctgagtcaaagacgaaatctcatgatgatgggaacatagatttagaatctgattcctttttaaagtttgattctgaaccttcagctgtggcgctggagcttcctacaagagcatttggcccatctgagaccaatgaatcccctgcagttgtgctagaacctcctgtagtatcaatggaggtatcagagccacacatcttagaaactctgaagccagctacaaaaactgcagaactgtcagttgtatctacatcagtaatctcagagcagtcagagcagtctgtggcagtaatgccagaaccatccatgacaaagattctggattcctttgcagcagcaccagtgcctactacaacactggtgttgaagtcatctgagccagttgtaacaatgtcagtggagtatcagatgaagtctgtgctgaaatctgtggagagcacatctccagagccatcaaagatcatgttggtagagcccccagtagcaaaagtgttagagccttcagaaacccttgtggtatcatcagagacacctactgaggtgtaccctgagccaagcacatcaacaacaatggattttccagagtcatctgcaattgaagcgctaagattgccagagcagcctgtagacgtaccatcggagattgcagattcatccatgacaagaccgcaggagttgccggagctgcctaagaccacagcgttggagctgcaggagtcgtcggtggcctcagcgatggagttgccggggccacctgcgacctccatgccggagttgcaggggccccctgtgactccagtgctggagttacctgggccctctgctaccccggtgccagagttgccagggcccctttctaccccagtgcctgagttgccagggccccctgcgacagcagtgcctgagttgccagggccctctgkgacaccagtgccacagttgtcgcaggaattgccagggcttccagcaccatccatggggttggagccaccacaggaggtaccagagccatctgtgatggcacaggagttgccagggctgcctttggtgacagcagcagtagagttgccagagcagcctgcggtaacagtagcaatggagttgaccgaacaacctgtgacgacgacagagttggagcagcctgtggggatgacaacggtggaacatcctgggcatcctgaggtgacaacggcaacagggttgctggggcagcctgaggcaacgatggtgctggagttgccaggacagccagtggcaacgacagcgctggagttgccggggcagccttcggtgactggggtgccagagttgccagggctgccttcggcaactagggcactggagttgtcggggcagcctgtggcaactggggcactagagttgcctgggccgctcatggcagctggggcactggagttctcggggcagtctggggcagctggagcactggagcttttggggcagcctctggcaacaggggtgctggagttgccagggcagcctggggcgccagagttgcctgggcagcctgtggcaactgtggcgctggagatctctgttcagtctgtggtgacaacatcggagctgtcaacgatgaccgtgtcgcagtccctggaggtgccctcgacgacagcgctggaatcctataatacggtagcacaggagctgcctactacattagtgggggagacttctgtaacagtaggagtggatcccttgatggccccagaatcccatatattagcttctaacaccatggagacccatatattagcatccaacaccatggactcccaaatgctagcgtccaacaccatggactcccagatgctagcatccaacaccatggactcccagatgttagcgtctagcaccatggactcccagatgttagcaactagctccatggactcccagatgttagcaactagctccatggactcccagatgttagcaactagcactatggactcccagatgttagcaaccagttccatggactcccagatgttagcaaccagctccatggactcccagatgttagcaaccagctccatggactcccagatgttagcaaccagctccatggactcccagatgttagcaaccagcaccatggattctcagatgttagcaaccagcaccatggactcccagatgttagcaactagctcaatggattcccagatgttagcatctggcactatggactctcaaatgttagcttctggcaccatggatgctcagatgttagcgtctggtaccatggatgcccagatgttagcrtctagtacccaagaytctgctatgttgggttcaaaatctcctgatccctataggttagctcaggatccttacaggttagctcaggatccctataggttgggccatgacccctatagattaggtcatgatgcttacaggttaggacaagacccttatagattaggccatgatccctacagactaactcctgatccctataggatgtcacctagaccctacaggatagcacccaggtcctatagaatagcacccaggccatataggttagcacctagacccctgatgttagcatctagacgttctatgatgatgtcctatgctgcagaacgttccatgatgtcatcttacgaacgctctatgatgtcttatgagcggtctatgatgtcccctatggctgaacgctctatgatgtcagcctacgagcgctctatgatgtcagcctacgagcgctctatgatgtcccctatggctgagcgctctatgatgtcagcttatgaacgctccatgatgtcagcttatgaacgctccatgatgtccccaatggctgatcgatctatgatgtccatgggtgctgaccggtctatgatgtcgtcatactctgctgctgaccggtctatgatgtcatcgtactctgcagctgaccgatctatgatgtcatcttatactgctgatcgttcaatgatgtctatggctgctgattcttacaccgattcttacactgacacatatacagaggcatatatggtgccacctttgcctcctgaagagcccccaacaatgccaccgttgccacctgaggagccaccaatgacaccaccattgcctcctgaggaaccaccagagggtccagcattgcccactgagcagtcagcattaacagctgaaaatacttggcctacagaggtgccatcatcaccatctgaagagtctgtatcgcagcctgagcctcctgtgagtcaaagtgagatttcggagccttcagcagtgcctactgattattcagtgtcagcatcagatccctcagttttagtatcagaggctgctgtgactgttccagaaccaccaccagagccagaatcttcaattacgttaacacctgtagagtctgcagtagtagcagaagaacatgaagttgttccagagagaccagtgacttgtatggtatctgaaactcccgccatgtcagctgaaccaactgtgttagcatcagagcctcctgttatgtcagagacagcagaaacatttgattccatgagagcctcaggacatgttgcctcagaagtatctacatccttgttggttccagcagtaactactccagtgctggcagagagcattctggagccgccagccatggctgccccagagtcttcagctatggctgtcctggagtcttcggctgtgaccgtcctggagtcttcgactgtgactgtcctggagtcttcgactgtaactgtcctrgagccttcggttgtgactgtcccggagcctcctgttgtggctgagccagactatgttaccattcctgtgccagttgtttctgcgctggagccttctgtgcctgttctggaaccagcggtgtcagtccttcaaccttctatgattgtttcagaaccatctgtttctgtccaggaatcgactgtgacagtttcagagcctgctgtcacagtctcagagcagactcaagtaataccaactgaggtggctatagagtccacaccartgatactggaatctagtatcatgtcatcacatgttatgaaaggaattartctatcctctggtgatcaaaatcttgctccagagattggcatrcaggagattgcattgcattcaggtgaagaaccacatgctgaggaacayctgaaaggtgacttttacgaaagtgaacatggtataaatatagaccttaatataaataatcatttaattgctaaagagatggaacataatacagtgtgtgctgctggtactagtcctgttggggaaattggtgaagagaaaattttgcccaccagtgagactaaacagygcacagtattggatacctaccctggtgttagtgaagctgatgcaggagaaactctatcttctactggtccttttgctctggaacctgatgcaacaggaactagtaagggtattgaatttaccacagcatctactctcagtttagttaataaatatgatgttgatttatctttaactactcaagatactgaacatgacatggtaatttccaccagtcctagtggtggtagtgaagctgacattgaagggcctttgcctgctaaagatattcatcttgatttaccatctaataataaccttgttagtaaggatacagaagaaccattacctgtaaaagagagtgaccagacattagcagctctgctcagccctaaagaaagtagtggaggagaaaaagaagtacctccccctcctaaagagacactgcctgattcaggattttctgccaatattgaggatattaatgaagcagatttagtgagaccgttacttcctaaggacatggaacgtcttacaagccttagagctggcattgaaggacctttacttgcaagtgatgttggacgtgacagatctgctgccagcccggttgtaagtagtatgccagaaagagcttcagagtcttcttcagaggaaaaagatgattatgaaatttttgtaaaagttaaggacactcacgaaaaaagcaagaaaaataagaaccgtgataagggggagaaagagaagaaaagagactcttcattaagatctcgaagtaagcgttccaaatcttctgaacacaaatcacgcaagcgtaccagtgaatctcgttctagggcaagaaagagatcatctaagtccaagtctcatcgctctcagacacgttcacggtcacgttcaagacgcaggaggagaagcagcagatcaagatcaaagtctagaggaagaagatctgtatcaaaagagaagcgcaaaagatctccaaagcacagatccaagtctagggaaagaaaaagaaaaagatcaagctccagggataaccgaaagacagttagagctcgaagtcgaaccccaagtcgtcggagtcggagtcatactccaagtcgtcgacgaaggtctagatctgtgggtagaagaaggagctttagcatttccccaagccgccgcagccgcacccccagccgccgcagccgcacccccagccgccgcagccgcacccccagccgccgcagccgcacccccagccgccggagccgcacccctagccgtcggagccgcaccccaagccgccggagaagatcaaggtctgtggtaagaagacgaagcttcagtatctcaccagtcagattaaggcgatcaagaacacccttaagaagaaggtttagcagatctcccatccgtcgtaaaagatccaggtcttctgaacgaggcagatcacccaaacgtctgacagatttggataaggctcaattacttgaaatagccaaagctaatgcagctgccatgtgtgctaaggctggtgtccctttaccaccaaacctaaagcctgcacctccacctactatagwwgagaaagttgctaaaaagtcaggaggagctactatagaagaactaactgagaaatgtaaacagatcgcacagagtaaagaagatgatgatgtaatagtgaataaacctcatgtttcggatgaagaggaagaagaacctcctttttatcatcatccctttaaactcagtgaacccaaacctatttttttcaatctgaatattgctgcagcaaaaccaactccaccaaaaagccaggtaacattaacaaaagaattccctgtatcatctggatctcaacatcggaaaaaagaagcggatagtgtttatggagaatgrgttcctgtggagaaaaatggtgaagaaaacaaagatgatgataatgttttcagcagcaatttgccctcagagcctgtggacatctctacagcaatgagtgaacgggcacttgctcagaaaagactcagtgagaatgcatttgatcttgaagccatgagcatgttaaatagagctcaggaaaggattgatgcctgggctcagctgaactctattcctggccagttcacaggaagtacaggagtacaggttttgacacaagaacagttggccaatactggtgcccaagcctggattaaaaaggatcagttcttaagagcagccccggtaactggaggaatgggagccgttttgatgagaaaaatgggctggagagaaggagaaggattaggaaaaaacaaagaaggcaayaaggaacccatcctagttgattttaagacagaccgaaaaggtcttgttgcagtaggagaaagagcacaaaagaggtctgggaacttctctgctgcaatgaaagatctgtcaggcaaacatcctgtgtctgctttgatggagatctgtaataaaagaaggtggcaaccacctgaatttctattggtccatgatagtggccctgatcatcgcaaacattttctctttagggtattgagaaatggagcccttaccagacccaattgtatgtttttcttgaataggtattgataaatggaagcgcttaccagcccagctttgccagccctaataagaagcatgctaaagccacagcagctactgtggttcttcaagcaatgggccttgtaccaaaggacctcatggctaatgccacttgcttcaggagtgcctcacgtagatagattgaggttttataataatcatttcagaattttactctgcatcacaatgtatttcctctttaatgttgtaaatatttggcaatttaagacattgtgtaaaaagcaatctgtaaaaacatctccaggctttgatttttgtaccatggaaattgtatttaaccatacagggttttggtatgtttatattgtttaccttagtgatgtatttgtttaagtggctaacatccaaacgactgtttgaaggcatcagagtaatcttcagtgtggaatgttaaataacgcttttatactgtattttgtactatgatgtaactccccttccttatggctaggctactgtaacacttgcctgtaatcagtgaagggctgtgcaccttgtactatttcacaatgggttctgctggacagataatgggccagtgttattgaggtgatcaagatctgttccacagggctaatgccaccatctcccctcaaaattttgtagaggytctaaaaagaaagtggtatgttgtgtgatgatcagcactaagtcctgcattcctgttaaagccacttgggtcataagaagggagtaaaaaatgaagtctgactagaattctattgcagaggccagtacatttagtatggcattgagttgtgatatagttttactttgatgtgcattttgaatttcagctacacctagatagacgtaaaatgataattaaaatgctgtaaccaacttatctaataaaattggcaaccagccactattttgttgactatgagaaagttaaaagtttatgttaatttttagggtctgatagaatatttcatgtgtattacagtggtattcatatgctatgtctctaaactttattttcaaaagcttaaggcccaaatacaaacttctctggaawaaacgtggtgttttattttctgggttataaagtgaacaaatacttagatactattatttctttacccaatgcttttgatttttaagcacttttattttaaaaatgtgaattatacagtccccccctacacayacayacacayacacacacacacacacacacacacacacacacacacacacacacacacacacacacacacacacacacacacacacacacacccctataagcacattaaatactactttgccgtgacagctcagtgtacttcacaattcttaacactattctatgtggaatacaaaatgcctttttatctgaattaacatgcatttaaaaagttttagtatatgtgaaaataaaggaattataaatcagtaggaaagatattaaggtagaagcatcaccaatcaactagctcagtagatgttgtctgtatttattttctacctttatgaaacaagaacctgctaacaggtaaatcgtaaagtaacatatttttgccctgatgccattagtcacaatgccatggggtaactgctatgtgatttcccatttgcaaggaagcatattaattcagtttctgctcaatatacaattaggttgtagggatataratatctcatttgagttatctgagtttttcatctttata

SEQ ID NO: 3171 - DNA, 7889 bp, Homo sapiens
tctcccggatgcatatccctgtcgaaactgaacttggcgccacctgagagcgcctgaaagccgtgtgttaaacaccgggttgcccttcttgctcttcttcctcttcgcctttaatctcaggcacttagcaagcctgttaaggctcccaaacactgctggggactgacaacttatgcggacacggtcgcctcaagagagrcggctcctgtaatggcgcctgcgtcagacactaacatggcggacatagtcgtgcgcggcgcaaacgtcagcacctctaccccagccgctcagaaacagcagaggagagcagggccgtgctcactgattggtccctcggtggagcgggccggaccgggcattccctttggagccaatcaggaaggcgagagaccgaattggccsstgcgcctcctcccgaggcatgctgggagcctggaggactagcgaggaggagttgagagaacggagcggacgccatggcgaccaacatcgagcagatttttaggtctttcgtggtcagtaaattccgggaaattcaacaggagctttccagtggaaggaatgaaggccagctgaatggtgaaacaaatacacccattgaaggaaaccaggcgggtgatgcagctgcctctgccaggagtctaccaaatgaagaaatagtgcagaagatagaggaagtactttctggggtcttagatacagaactacgatataagccagacttgaaagagggctccagaaaaagtagatgcgtatctgtacaaacagatcctactgatgaaattcccactaaaaagtcaaagaagcataaaaagcacaaaaacaaaaagaagaaaaagaagaaagaaaaggaaaaaaaatataaaagacagccagaagaatctgagtcaaagacgaaatctcatgatgatgggaacatagatttagaatctgattcctttttaaagtttgattctgaaccttcagctgtggcgctggagcttcctacaagagcatttggcccatctgagaccaatgaatcccctgcagttgtgctagaacctcctgtagtatcaatggaggtatcagagccacacatcttagaaactctgaagccagctacaaaaactgcagaactgtcagttgtatctacatcagtaatctcagagcagtcagagcagtctgtggcagtaatgccagaaccatccatgacaaagattctggattcctttgcagcagcaccagtgcctactacaacactggtgttgaagtcatctgagccagttgtaacaatgtcagtggagtatcagatgaagtctgtgctgaaatctgtggagagcacatctccagagccatcaaagatcatgttggtagagcccccagtagcaaaagtgttagagccttcagaaacccttgtggtatcatcagagacacctactgaggtgtaccctgagccaagcacatcaacaacaatggattttccagagtcatctgcaattgaagcgctaagattgccagagcagcctgtagacgtaccatcggagattgcagattcatccatgacaagaccgcaggagttgccggagctgcctaagaccacagcgttggagctgcaggagtcgtcggtggcctcagcgatggagttgccggggccacctgcgacctccatgccggagttgcaggggccccctgtgactccagtgctggagttacctgggccctctgctaccccggtgccagagttgccagggcccctttctaccccagtgcctgagttgccagggccccctgcgacagcagtgcctgagttgccagggccctctgkgacaccagtgccacagttgtcgcaggaattgccagggcttccagcaccatccatggggttggagccaccacaggaggtaccagagccatctgtgatggcacaggagttgccagggctgcctttggtgacagcagcagtagagttgccagagcagcctgcggtaacagtagcaatggagttgaccgaacaacctgtgacgacgacagagttggagcagcctgtggggatgacaacggtggaacatcctgggcatcctgaggtgacaacggcaacagggttgctggggcagcctgaggcaacgatggtgctggagttgccaggacagccagtggcaacgacagcgctggagttgccggggcagccttcggtgactggggtgccagagttgccagggctgccttcggcaactagggcactggagttgtcggggcagcctgtggcaactggggcactagagttgcctgggccgctcatggcagctggggcactggagttctcggggcagtctggggcagctggagcactggagcttttggggcagcctctggcaacaggggtgctggagttgccagggcagcctggggcgccagagttgcctgggcagcctgtggcaactgtggcgctggagatctctgttcagtctgtggtgacaacatcggagctgtcaacgatgaccgtgtcgcagtccctggaggtgccctcgacgacagcgctggaatcctataatacggtagcacaggagctgcctactacattagtgggggagacttctgtaacagtaggagtggatcccttgatggccccagaatcccatatattagcttctaacaccatggagacccatatattagcatccaacaccatggactcccaaatgctagcgtccaacaccatggactcccagatgctagcatccaacaccatggactcccagatgttagcgtctagcaccatggactcccagatgttagcaactagctccatggactcccagatgttagcaactagctccatggactcccagatgttagcaactagcactatggactcccagatgttagcaaccagttccatggactcccagatgttagcaaccagctccatggactcccagatgttagcaaccagctccatggactcccagatgttagcaaccagctccatggactcccagatgttagcaaccagcaccatggattctcagatgttagcaaccagcaccatggactcccagatgttagcaactagctcaatggattcccagatgttagcatctggcactatggactctcaaatgttagcttctggcaccatggatgctcagatgttagcgtctggtaccatggatgcccagatgttagcrtctagtacccaagaytctgctatgttgggttcaaaatctcctgatccctataggttagctcaggatccttacaggttagctcaggatccctataggttgggccatgacccctatagattaggtcatgatgcttacaggttaggacaagacccttatagattaggccatgatccctacagactaactcctgatccctataggatgtcacctagaccctacaggatagcacccaggtcctatagaatagcacccaggccatataggttagcacctagacccctgatgttagcatctagacgttctatgatgatgtcctatgctgcagaacgttccatgatgtcatcttacgaacgctctatgatgtcttatgagcggtctatgatgtcccctatggctgaacgctctatgatgtcagcctacgagcgctctatgatgtcagcctacgagcgctctatgatgtcccctatggctgagcgctctatgatgtcagcttatgaacgctccatgatgtcagcttatgaacgctccatgatgtccccaatggctgatcgatctatgatgtccatgggtgctgaccggtctatgatgtcgtcatactctgctgctgaccggtctatgatgtcatcgtactctgcagctgaccgatctatgatgtcatcttatactgctgatcgttcaatgatgtctatggctgctgattcttacaccgattcttacactgacacatatacagaggcatatatggtgccacctttgcctcctgaagagcccccaacaatgccaccgttgccacctgaggagccaccaatgacaccaccattgcctcctgaggaaccaccagagggtccagcattgcccactgagcagtcagcattaacagctgaaaatacttggcctacagaggtgccatcatcaccatctgaagagtctgtatcgcagcctgagcctcctgtgagtcaaagtgagatttcggagccttcagcagtgcctactgattattcagtgtcagcatcagatccctcagttttagtatcagaggctgctgtgactgttccagaaccaccaccagagccagaatcttcaattacgttaacacctgtagagtctgcagtagtagcagaagaacatgaagttgttccagagagaccagtgacttgtatggtatctgaaactcccgccatgtcagctgaaccaactgtgttagcatcagagcctcctgttatgtcagagacagcagaaacatttgattccatgagagcctcaggacatgttgcctcagaagtatctacatccttgttggttccagcagtaactactccagtgctggcagagagcattctggagccgccagccatggctgccccagagtcttcagctatggctgtcctggagtcttcggctgtgaccgtcctggagtcttcgactgtgactgtcctggagtcttcgactgtaactgtcctrgagccttcggttgtgactgtcccggagcctcctgttgtggctgagccagactatgttaccattcctgtgccagttgtttctgcgctggagccttctgtgcctgttctggaaccagcggtgtcagtccttcaaccttctatgattgtttcagaaccatctgtttctgtccaggaatcgactgtgacagtttcagagcctgctgtcacagtctcagagcagactcaagtaataccaactgaggtggctatagagtccacaccartgatactggaatctagtatcatgtcatcacatgttatgaaaggaattartctatcctctggtgatcaaaatcttgctccagagattggcatrcaggagattgcattgcattcaggtgaagaaccacatgctgaggaacayctgaaaggtgacttttacgaaagtgaacatggtataaatatagaccttaatataaataatcatttaattgctaaagagatggaacataatacagtgtgtgctgctggtactagtcctgttggggaaattggtgaagagaaaattttgcccaccagtgagactaaacagygcacagtattggatacctaccctggtgttagtgaagctgatgcaggagaaactctatcttctactggtccttttgctctggaacctgatgcaacaggaactagtaagggtattgaatttaccacagcatctactctcagtttagttaataaatatgatgttgatttatctttaactactcaagatactgaacatgacatggtaatttccaccagtcctagtggtggtagtgaagctgacattgaagggcctttgcctgctaaagatattcatcttgatttaccatctaataataaccttgttagtaaggatacagaagaaccattacctgtaaaagagagtgaccagacattagcagctctgctcagccctaaagaaagtagtggaggagaaaaagaagtacctccccctcctaaagagacactgcctgattcaggattttctgccaatattgaggatattaatgaagcagatttagtgagaccgttacttcctaaggacatggaacgtcttacaagccttagagctggcattgaaggacctttacttgcaagtgatgttggacgtgacagatctgctgccagcccggttgtaagtagtatgccagaaagagcttcagagtcttcttcagaggaaaaagatgattatgaaatttttgtaaaagttaaggacactcacgaaaaaagcaagaaaaataagaaccgtgataagggggagaaagagaagaaaagagactcttcattaagatctcgaagtaagcgttccaaatcttctgaacacaaatcacgcaagcgtaccagtgaatctcgttctagggcaagaaagagatcatctaagtccaagtctcatcgctctcagacacgttcacggtcacgttcaagacgcaggaggagaagcagcagatcaagatcaaagtctagaggaagaagatctgtatcaaaagagaagcgcaaaagatctccaaagcacagatccaagtctagggaaagaaaaagaaaaagatcaagctccagggataaccgaaagacagttagagctcgaagtcgaaccccaagtcgtcggagtcggagtcatactccaagtcgtcgacgaaggtctagatctgtgggtagaagaaggagctttagcatttccccaagccgccgcagccgcacccccagccgccgcagccgcacccccagccgccgcagccgcacccccagccgccgcagccgcacccccagccgccggagccgcacccctagccgtcggagccgcaccccaagccgccggagaagatcaaggtctgtggtaagaagacgaagcttcagtatctcaccagtcagattaaggcgatcaagaacacccttaagaagaaggtttagcagatctcccatccgtcgtaaaagatccaggtcttctgaacgaggcagatcacccaaacgtctgacagatttggataaggctcaattacttgaaatagccaaagctaatgcagctgccatgtgtgctaaggctggtgtccctttaccaccaaacctaaagcctgcacctccacctactatagwwgagaaagttgctaaaaagtcaggaggagctactatagaagaactaactgagaaatgtaaacagatcgcacagagtaaagaagatgatgatgtaatagtgaataaacctcatgtttcggatgaagaggaagaagaacctcctttttatcatcatccctttaaactcagtgaacccaaacctatttttttcaatctgaatattgctgcagcaaaaccaactccaccaaaaagccaggtaacattaacaaaagaattccctgtatcatctggatctcaacatcggaaaaaagaagcggatagtgtttatggagaatgrgttcctgtggagaaaaatggtgaagaaaacaaagatgatgataatgttttcagcagcaatttgccctcagagcctgtggacatctctacagcaatgagtgaacgggcacttgctcagaaaagactcagtgagaatgcatttgatcttgaagccatgagcatgttaaatagagctcaggaaaggattgatgcctgggctcagctgaactctattcctggccagttcacaggaagtacaggagtacaggttttgacacaagaacagttggccaatactggtgcccaagcctggattaaaaagggccaaatccttgtagctgtcttcttgccccggtcagtgccagccgtactattcacaacactgctgctaccgaggcctaggatcagttcttaagagcagccccggtaactggaggaatgggagccgttttgatgagaaaaatgggctggagagaaggagaaggattaggaaaaaacaaagaaggcaayaaggaacccatcctagttgattttaagacagaccgaaaaggtcttgttgcagtaggagaaagagcacaaaagaggtctgggaacttctctgctgcaatgaaagatctgtcaggcaaacatcctgtgtctgctttgatggagatctgccctgatcatcgcaaacattttctctttagggtattgataaatggaagcgcttaccagcccagctttgccagccctaataagaagcatgctaaagccacagcagctactgtggttcttcaagcaatgggccttgtaccaaaggacctcatggctaatgccacttgcttcaggagtgcctcacgtagatagattg

SEQ ID NO: 3172 - DNA, 1539 bp, Homo sapiens
ccccaaactccatcgctgagcaacgcgggtttgcggcggctgcgcaggcgcacaacgcaggccgggcgggaagagccaaagcgggcaggcggcggaaatatccgaagcggcggggcgcccgaggccgttgccgacctycgcgctaaagccgctgctgccgcggaagacgatcctccagtacccgcccgccgtcaccgcagctgccgtgtcctcctcccacccctagccgcaccccctcgcggagggatcagctgagcggccaaacggcacggtcgggggagccccgagtccgcagctgcagcggggcctgagaccagagttggcgagggcaaggaaggagcggccccgggcagtgggggcggggccgggcgggcccgagaacagccgaatttggccgagcgctgccgagcgagtccgaggcgctgggccaggccggagccggactacgggagccgaggcgggccgcgcggtgggcgcggagaggagcggagcggcgcggcaggccgggcgggtggcggcagcagcggaggaggccgcagctgcgggtccgaggagcggaggcgacgcgggcggcggcggggggccgggtggccggggtcccgggccccgcggcggcggcagcggcggcggcggcggcaggatgatcaagctgttctcgctgaagcagcagaagaaggaggaggagtcggcgggcggcaccaagggcagcagcaagaaggcgtcggcggcgcagctgcggatccagaaggacataaacgagctgaacctgcccaagacgtgtgatatcagcttctcagatccagacgacctcctcaacttcaagctggtcatctgtcctgatgagggcttctacaagagtgggaagtttgtgttcagttttaaggtgggccagggttacccgcatgatccccccaaggtgaagtgtgagacaatggtctatcaccccaacattgacctcgagggcaacgtctgcctcaacatcctcagagaggactggaagccagtccttacgataaactccataatttatggcctgcagtatctcttcttggagcccaacccygaggacccactgaacaaggaggccgcagaggtcctgcagaacaaccggcggctgtttgagcagaacgtgcagcgctccatgcggggtggctacatcggctccacctactttgagcgctgcctgaaatagggttggcgcatacccacccccgccacggccacaagccctggcatcccctgcaaatatttattgggggccatgggtaggggtttggggggcggccggtgggggaatcccctgccttggccttgcctccccttcctgccacgtgcccctagttatttttttttttttaacaccatgtgattaaggtcggcgctgcctcccccgacccactcagcgatgggaaatgaattggcttgtctagcccccctgctgggtgcttgttcagcaacgggcctgggtagctgggcccaggcaacccacccctccacctctggaggtcccaccaggctattaaaggggaatgttactgc

SEQ ID NO: 3173 - DNA, 1395 bp, Homo sapiens
tgggggcggggccgggcgggcccgagaacagccgaatttggccgagcgctgccgagcgagtccgaggcgctgggccaggccggagccggactacgggagccgaggcgggccgcgcggtgggcgcggagaggagcggagcggcgcggcaggccgggcgggtggcggcagcagcggaggaggccgcagctgcgggtccgaggagcggaggcgacgcgggcggcggcggggggccgggtggccggggtcccgggccccgcggcggcggcagcggcggcggcggcggcaggatgatcaagctgttctcgctgaagcagcagaagaaggaggaggagtcggcgggcggcaccaagggcagcagcaagaaggcgtcggcggcgcagctgcggatccagaaggacataaacgagctgaacctgcccaagacgtgtgatatcagcttctcagatccagacgacctcctcaacttcaagctggtcatctgtcctgatgagggcttctacaagagtgggaagtttgtgttcagttttaaggtgggccagggttacccgcatgatccccccaaggtgaagtgtgagacaatggtctatcaccccaacattgacctcgagggcaacgtctgcctcaacatcctcagagaggactggaagccagtccttacgataaactccataatttatggcctgcagtatctcttcttggagcccaacccygaggacccactgaacaaggaggccgcagaggtcctgcagaacaaccggcggctgtttgagcagaacgtgcagcgctccatgcggggtggctacatcggctccacctactttgagcgctgcctgaaatagggttggcgcatacccacccccgccacggccacaagccctggcatcccctgcaaatatttattgggggccatgggtaggggtttggggggcggccggtgggggaatcccctgccttggccttgcctccccttcctgccacgtgcccctagttatttttttttttttaacaccatgtgattaaggtcggcgctgcctcccccgacccactcagcgatgggaaatgaattggcttgtctagcccccctgctgggtgcttgttcagcccccactctgggctgtggagtgggtgggcaacgggcctgggtagctgggcccaggcaacccacccctccacctctggaggtcccaccaggctattaaaggggaatgttactgcatggcctctgcttcttacttctatggggtgggaggggcagctgaggtccattagggcctgcaaagctggggtggtggaaggtgtggtcacaggtggcattggagcaccctacaacaggctgcccagtgcctggggcagctctaaagttggtggggataccakgactgtgcctggggttgg

SEQ ID NO: 3174 - DNA, 2982 bp, Homo sapiens
aaaaaaaaaacacacacatggatgcttattctccaccctgttccacatctggcattttttgtgcatcttccaacttaagtacacagcagcaagtgctctacatctttgggtagctacacaraaccccactgtggctcactgtggacacaccattgaaaaccttgtatgtaggtcacttagtacaaggaggaacacaactgttgaagaagtacctaaaaattgaattacttgaacaaagtgtgggacatttgctgttttgatggattttaccacactgtcttcccatttatgcttaccagcaatacataggaacacttgggtccctgcagtcagggtgtggaaatggcagatgagttcagccctaaggtgcatttttcttactaggaggagatggagtgtattttatgggatataagcattagctacatttcctgtcctgttcacatcctttgcccatgtgtctatgaggttattgatctttcttactgatttattgtagctctttacttaggaggttaattagccttttgcctgtggagagttttttggtttgccatttgtccttttttaattttttttgttttttggccatttgtcttttgactcygatgtggtttttgctgatttcctttgatgtattctagtttatctgacttttctttggcgacttatggactttctctcaccactaaaagccctcactgctctctcagtcttcttgatttaacctcctccaggcttccgccttctccaggccctgattctcagttggagttgctggtgcctcctccttcacccagcgtctgacgctggagtgctcacagtgtggctgggacccacttctctcctctgtagatacccacccctgtgttgatcacttgcaggcccgggttctgtgtgccatgtgtatgccctagagcccttgctcacgtttccccacagccttcatgaagtctgtgttcctcagatgccccacagacatcacaagcaaggcacatccaaaccccagaccactatccaggagcctgcaccctctttctgttggctccacctccagcctccgagacccacccacttccctgcatttgctgagaccatcattttccacctagacaatgcccccacgcttgccctacagcccttccaaaaacgattttttccaacytaaatcagacctagaaagctttttcacatagcccagtcttcctccttgtgctgggttctgtctcattatcacctcatcagggaagtctgtacagatagaatccctacccctgcatttgtcgcctccgtctgcctctttggtcagtttcaggtccctgtagttcacactgtgtccccagggatgaagtgggtcccggcacggtgggcattctgtcatgaatgaatggtccccttgtgtatgcagggttcgcgctgcagctrggcagcatctccgcaggtccaggtagtgtaagccctcacctccacgtcccctgggacctcggcatggctggcctttctggccagatccaatcaccctcccgcgaaggtggctttgcgcatgcgcttctgctccccagcgatctgaggagtgaacaggaccccacggacgaggatccctgccgsggtgtgggccctgctctgrtcaccacccgctggcgctcccccaggggccggagccggggccgccccagcactgggggcggggtggttaggggcggccgttgcgatgtatgtggcaaggtgttcagccaacgcagcaacctgctgaggcaccagaagatccacacgggtgagcgaccattcgtgtgcagcgagtgcggccgcagcttcagccgcagctcgcacctgctgcgccaccagcttacrcacaccgaggagcggccgttcgtgtgcggcgactgtggccagggcttcgtgcgmagcgcgcgcctggaagagcatcggagagtgcacacgggcgaacagcctttccsttgcgctgagtgcggccagagcttccggcagcgctccaatctgctgcagcaccagcgcatccacggcgatcccccgggccctggcgctaagcccccggcccctcctggtgcgcccgagcctcccggcccctttccgtgcagcgagtgccgcgagagcttcgcgcggcgcgccgtgctgctggagcaccaggcggtacacacgggcgacaagtcctttggctgcgtcgagtgcggcgagcgcttcggccgccgctcagtgctrctgcagcaccggcgcgtgcacagtggcgagcggcccttcgcctgtgccgagtgcggccagagcttccggcagcgctccaacctgacgcagcaccggcgcatccacaccggggagcggcccttcgcctgcgccgagtgtggcaaggccttccgccagcggcctacgctcacgcagcatctccgcgtacacacgggcgagaaaccctttgcctgccccgagtgtggccagcgcttcagccagcgcctcaagctcacgcgtcatcagaggacacacaccggcgaaaagccctaccactgcggtgagtgcggcctgggcttcacgcaggtctcgcggctcaccgagcaccagcgcatccacacgggcgaacggcccttcgcctgccccgagtgcggccagagctttcggcagcacgccaacctcacccagcaccggcgcatccacacgggtgaacggccctacgcatgccctgagtgtggcaaggccttccgccagcggcccacgctcacgcagcatctgcgcacccaccgacgagagaagcccttcgcctgccaggactgtggccgccgcttccaccagagcaccaagctcattcagcaccagcgcgtccacagcgccgagtagctccagccgggacgcactgtgtccgccatggtcagaacacctacctcccctggttattgtgaggctggcgattacataagtataagcaggtccgcccagggcttggctactgtaggtgtccaataaacagtagatggaaac

SEQ ID NO: 3175 - DNA, 1748 bp, Homo sapiens
ccccaaactccatcgctgagcaacgcgggtttgcggcggctgcgcaggcgcacaacgcaggccgggcgggaagagccaaagcgggcaggcggcggaaatatccgaagcggcggggcgcccgaggccgttgccgacctycgcgctaaagccgctgctgccgcggaagacgatcctccagtacccgcccgccgtcaccgcagctgccgtgtcctcctcccacccctagccgcaccccctcgcggagggatcagctgagcggccaaacggcacggtcgggggagccccgagtccgcagctgcagcggggcctgagaccagagttggcgagggcaaggaaggagcggccccgggcagtgggggcggggccgggcgggcccgagaacagccgaatttggccgagcgctgccgagcgagtccgaggcgctgggccaggccggagccggactacgggagccgaggcgggccgcgcggtgggcgcggagaggagcggagcggcgcggcaggccgggcgggtggcggcagcagcggaggaggccgcagctgcgggtccgaggagcggaggcgacgcgggcggcggcggggggccgggtggccggggtcccgggccccgcggcggcggcagcggcggcggcggcggcaggatgatcaagctgttctcgctgaagcagcagaagaaggaggaggagtcggcgggcggcaccaagggcagcagcaagaaggcgtcggcggcgcagctgcggatccagaaggacataaacgagctgaacctgcccaagacgtgtgatatcagcttctcagatccagacgacctcctcaacttcaagctggtcatctgtcctgatgagggcttctacaagagtgggaagtttgtgttcagttttaaggtgggccagggttacccgcatgatccccccaaggtgaagtgtgagacaatggtctatcaccccaacattgacctcgagggcaacgtctgcctcaacatcctcagagaggactggaagccagtccttacgataaactccataatttatggcctgcagtatctcttcttggagcccaacccygaggacccactgaacaaggaggccgcagaggtcctgcagaacaaccggcggctgtttgagcagaacgtgcagcgctccatgcggggtggctacatcggctccacctactttgagcgctgcctgaaatagggttggcgcatacccacccccgccacggccacaagccctggcatcccctgcaaatatttattgggggccatgggtaggggtttggggggcggccggtgggggaatcccctgccttggccttgcctccccttcctgccacgtgcccctagttatttttttttttttaacaccatgtgattaaggtcggcgctgcctcccccgacccactcagcgatgggaaatgaattggcttgtctagcccccctgctgggtgcttgttcagcccccactctgggctgtggagtgggtgggcaacgggcctgggtagctgggcccaggcaacccacccctccacctctggaggtcccaccaggctattaaaggggaatgttactgcatggcctctgcttcttacttctatggggtgggaggggcagctgaggtccattagggcctgcaaagctggggtggtggaaggtgtggtcacaggtggcattggagcaccctacaacaggctgcccagtgcctggggcagctctaaagttggtggggataccakgactgtgcctggggttgg

SEQ ID NO: 3176 - DNA, 2722 bp, Homo sapiens
ggcccgtagagaagtgaggaaaacgtggtggggggcatgcgcgatctggtaggcggtgctgccgtctgttgtacctgagaggcttgcgcatgccgacgcacggattcgaggcggggagcatgggaagaagcgcggcccgctgagcgcagagggtttcaggttgacttggcaccttgaagagtggaggcttggcccccaggatgaggcggccctcgaaatcgatgccacccacgggggaatgattctgcggtgccatccccttcataaacgcagattccttcctaaagccgcagctgcagaaggaacagcgcgaggagggaggggcagacactggcctcagatacctgacctggtaccctctatgaggcctgcggtgctgggctccccagaccgagcacccccagaagatgaggggcctgtcatggtgaagctagaggactctgaggaggagggtgaggctgccttatgggacccaggccctgaagctgcacgcctgcgtttccggtgcttccrctatgaggaggccacagggccccaagaggccctggcccagctccgagagctgtgtcgccagtggctgcgtccagaggtacgctccaaggagcagatgctggagctgttggtgctggagcagttcctgggcgcactgccccctgagatccaggcccrtgtgcaggggcagcggccaggcagccccgaggaggctgctgccctagtagatgggctgcgccgggagccgggcggaccccrgagatgggtcacagtccaggtgcagggccaggaggtcctatcagagaagatggagccctccagtttccagcccctacctgaaactgagcctccaactccagagcctgggcccaagacacctccyaggactatgcaggaatcaccactgggcctgcaggtgaaagaggagtcagaggttacagaggactcagatttcctggagtctgggcctctagctgccacccaggagtctgtacccaccctcctgcctgaggaggmccagagatgtgggaccgtgctggaccagatctttccccacagcaagactgggcctgagggtccctcatggagggagcaccccagggccctgtggcatgaggaagctgggggcatcttctccccagggttcgcgctgcagctrggcagcatctccgcaggtccaggtagtgtaagccctcacctccacgtcccctgggacctcggcatggctggcctttctggccagatccaatcaccctcccgcgaaggtggctttgcgcatgcgcttctgctccccagcgatctgaggagtgaacaggaccccacggacgaggatccctgccgsggtgtgggccctgctctgrtcaccacccgctggcgctcccccaggggccggagccggggccgccccagcactgggggcggggtggttaggggcggccgttgcgatgtatgtggcaaggtgttcagccaacgcagcaacctgctgaggcaccagaagatccacacgggtgagcgaccattcgtgtgcagcgagtgcggccgcagcttcagccgcagctcgcacctgctgcgccaccagcttacrcacaccgaggagcggccgttcgtgtgcggcgactgtggccagggcttcgtgcgmagcgcgcgcctggaagagcatcggagagtgcacacgggcgaacagcctttccsttgcgctgagtgcggccagagcttccggcagcgctccaatctgctgcagcaccagcgcatccacggcgatcccccgggccctggcgctaagcccccggcccctcctggtgcgcccgagcctcccggcccctttccgtgcagcgagtgccgcgagagcttcgcgcggcgcgccgtgctgctggagcaccaggcggtacacacgggcgacaagtcctttggctgcgtcgagtgcggcgagcgcttcggccgccgctcagtgctrctgcagcaccggcgcgtgcacagtggcgagcggcccttcgcctgtgccgagtgcggccagagcttccggcagcgctccaacctgacgcagcaccggcgcatccacaccggggagcggcccttcgcctgcgccgagtgtggcaaggccttccgccagcggcctacgctcacgcagcatctccgcgtacacacgggcgagaaaccctttgcctgccccgagtgtggccagcgcttcagccagcgcctcaagctcacgcgtcatcagaggacacacaccggcgaaaagccctaccactgcggtgagtgcggcctgggcttcacgcaggtctcgcggctcaccgagcaccagcgcatccacacgggcgaacggcccttcgcctgccccgagtgcggccagagctttcggcagcacgccaacctcacccagcaccggcgcatccacacgggtgaacggccctacgcatgccctgagtgtggcaaggccttccgccagcggcccacgctcacgcagcatctgcgcacccaccgacgagagaagcccttcgcctgccaggactgtggccgccgcttccaccagagcaccaagctcattcagcaccagcgcgtccacagcgccgagtagctccagccgggacgcactgtgtccgccatggtcagaacacctacctcccctggttattgtgaggctggcgattacataagtataagcaggtccgcccagggcttggctactgtaggtgtccaataaacagtagatggaaactgggtctccacccac

SEQ ID NO: 3177 - DNA, 1896 bp, Homo sapiens
acgaagggcctgctgactacatctgccggaaagcatcgggccaagcctttctccattttgcggtctaggaagtagcagaggccccttcctgtagggagttgccatggagacgcggtggggcaccgacggagttctaatgacggccgtgattggtgcaggatcctgctaatctcaggaaggcccgtagagaagtgaggaaaacgtggtggggggcatgcgcgatctggtaggcggtgctgccgtctgttgtacctgagaggcttgcgcatgccgacgcacggattcgaggcggggagcatgggaagaagcggccaggagtatgacctgatcattgcgaccaccgctaggggaagggaggagagggtgtagaaacggggacgagggtgggggaagggcaaggaggcgctcgagctggtgcgcggagcatcctgggagacgtagtccagcgggagggggaagtcgaagactgcgcgtgctcaggagcgcggagcggcccgctgagcgcagaggggcagacactggcctcagatacctgacctggtaccctctatgaggcctgcggtgctgggctccccagaccgagcacccccagaagatgaggggcctgtcatggtgaagctagaggactctgaggaggagggtgaggctgccttatgggacccaggccctgaagctgcacgcctgcgtttccggtgcttccrctatgaggaggccacagggccccaagaggccctggcccagctccgagagctgtgtcgccagtggctgcgtccagaggtcacagtccaggtgcagggccaggaggtcctatcagagaagatggagccctccagtttccagcccctacctgaaactgagcctccaactccagagcctgggcccaagacacctccyaggactatgcaggaatcaccactgggcctgcaggtgaaagaggagtcagaggttacagaggactcagatttcctggagtctgggcctctagctgccacccaggagtctgtacccaccctcctgcctgaggaggmccagtgaccactgtgatttcagagatgtgggaccgtgctggaccagatctttccccacagcaagactgggcctgagggtccctcatggagggagcaccccagggccctgtggcatgaggaagctgggggcatcttctccccaggtaagtgagatggggtgtggtgggactaggccttccgcatggacagcaccatctctgccgaccccactcctggccctacgcaggcagccctcttactccagcatccccaagttcccccattccctagatcatcccctataaggttcaacctcctctagcatcttctgccctcaaaaaaagccacccaccactaccactgatcccacagcccctctactttctagaaactccccaccctagtaaaaccttttgcaagcagggcgagtattccccgtacccacattctctcccagtcctggtatcctggatggcctcctgggcttgcatcctgctggtcaggcatcaggacaggtagggctgggacctgacaaggacagcaggttagtagacagagcaggtgggcaggagggaccttgacacaggatagggatcctgcccaatcatcgaagcattacggaccagaggccccctgccatctacctctcagccaccacctttgtctggcatcatccaggctcctcctacaacccatcttctgttatgttccttcctgttcctgagacccagggtctcctctttcttagttcacacctttgttttggtggagctttgtgggtgttctggtgtggaagataaaattctgacatgtcccatatctgaaacacattgtctagccctcaacattagattgaagtttggctggaagaattytttttattagtaca

SEQ ID NO: 3178 - DNA, 3785 bp, Homo sapiens
ggcccgtagagaagtgaggaaaacgtggtggggggcatgcgcgatctggtaggcggtgctgccgtctgttgtacctgagaggcttgcgcatgccgacgcacggattcgaggcggggagcatgggaagaagcgcggcccgctgagcgcagagggtttcaggttgacttggcaccttgaagagtggaggcttggcccccaggatgaggcggccctcgaaatcgatgccacccacgggggaatgattctgcggtgccatccccttcataaacgcagattccttcctaaagccgcagctgcagaaggaacagcgcgaggagggaggggcagacactggcctcagatacctgacctggtaccctctatgaggcctgcggtgctgggctccccagaccgagcacccccagaagatgaggggcctgtcatggtgaagctagaggactctgaggaggagggtgaggctgccttatgggacccaggccctgaagctgcacgcctgcgtttccggtgcttccrctatgaggaggccacagggccccaagaggccctggcccagctccgagagctgtgtcgccagtggctgcgtccagaggtacgctccaaggagcagatgctggagctgttggtgctggagcagttcctgggcgcactgccccctgagatccaggcccrtgtgcaggggcagcggccaggcagccccgaggaggctgctgccctagtagatgggctgcgccgggagccgggcggaccccrgagatgggtcacagtccaggtgcagggccaggaggtcctatcagagaagatggagccctccagtttccagcccctacctgaaactgagcctccaactccagagcctgggcccaagacacctccyaggactatgcaggaatcaccactgggcctgcaggtgaaagaggagtcagaggttacagaggactcagatttcctggagtctgggcctctagctgccacccaggagtctgtacccaccctcctgcctgaggaggmccagagatgtgggaccgtgctggaccagatctttccccacagcaagactgggcctgagggtccctcatggagggagcaccccagggccctgtggcatgaggaagctgggggcatcttctccccagggttcgcgctgcagctrggcagcatctccgcaggtccaggtagtgtaagccctcacctccacgtcccctgggacctcggcatggctggcctttctggccagatccaatcaccctcccgcgaaggtggctttgcgcatgcgcttctgctccccagcgatctgaggagtgaacaggaccccacggacgaggatccctgccgsggtgtgggccctgctctgrtcaccacccgctggcgctcccccaggggccggagccggggccgccccagcactgggggcggggtggttaggggcggccgttgcgatgtatgtggcaaggtgttcagccaacgcagcaacctgctgaggcaccagaagatccacacgggtgagcgaccattcgtgtgcagcgagtgcggccgcagcttcagccgcagctcgcacctgctgcgccaccagcttacrcacaccgaggagcggccgttcgtgtgcggcgactgtggccagggcttcgtgcgmagcgcgcgcctggaagagcatcggagagtgcacacgggcgaacagcctttccsttgcgctgagtgcggccagagcttccggcagcgctccaatctgctgcagcaccagcgcatccacggcgatcccccgggccctggcgctaagcccccggcccctcctggtgcgcccgagcctcccggcccctttccgtgcagcgagtgccgcgagagcttcgcgcggcgcgccgtgctgctggagcaccaggcggtacacacgggcgacaagtcctttggctgcgtcgagtgcggcgagcgcttcggccgccgctcagtgctrctgcagcaccggcgcgtgcacagtggcgagcggcccttcgcctgtgccgagtgcggccagagcttccggcagcgctccaacctgacgcagcaccggcgcatccacaccggggagcggcccttcgcctgcgccgagtgtggcaaggccttccgccagcggcctacgctcacgcagcatctccgcgtacacacgggcgagaaaccctttgcctgccccgagtgtggccagcgcttcagccagcgcctcaagctcacgcgtcatcagaggacacacaccggcgaaaagccctaccactgcggtgagtgcggcctgggcttcacgcaggtctcgcggctcaccgagcaccagcgcatccacacgggcgaacggcccttcgcctgccccgagtgcggccagagctttcggcagcacgccaacctcacccagcaccggcgcatccacacggtgggggcggggccgggcgggcccgagaacagccgaatttggccgagcgctgccgagcgagtccgaggcgctgggccaggccggagccggactacgggagccgaggcgggccgcgcggtgggcgcggagaggagcggagcggcgcggcaggccgggcgggtggcggcagcagcggaggaggccgcagctgcgggtccgaggagcggaggcgacgcgggcggcggcggggggccgggtggccggggtcccgggccccgcggcggcggcagcggcggcggcggcggcaggatgatcaagctgttctcgctgaagcagcagaagaaggaggaggagtcggcgggcggcaccaagggcagcagcaagaaggcgtcggcggcgcagctgcggatccagaaggacataaacgagctgaacctgcccaagacgtgtgatatcagcttctcagatccagacgacctcctcaacttcaagctggtcatctgtcctgatgagggcttctacaagagtgggaagtttgtgttcagttttaaggtgggccagggttacccgcatgatccccccaaggtgaagtgtgagacaatggtctatcaccccaacattgacctcgagggcaacgtctgcctcaacatcctcagagaggactggaagccagtccttacgataaactccataatttatggcctgcagtatctcttcttggagcccaacccygaggacccactgaacaaggaggccgcagaggtcctgcagaacaaccggcggctgtttgagcagaacgtgcagcgctccatgcggggtggctacatcggctccacctactttgagcgctgcctgaaatagggttggcgcatacccacccccgccacggccacaagccctggcatcccctgcaaatatttattgggggccatgggtaggggtttggggggcggccggtgggggaatcccctgccttggccttgcctccccttcctgccacgtgcccctagttatttttttttttttaacaccatgtgattaaggtcggcgctgcctcccccgacccactcagcgatgggaaatgaattggcttgtctagcccccctgctgggtgcttgttcagcccccactctgggctgtggagtgggtgggcaacgggcctgggtagctgggcccaggcaacccacccctccacctctggaggtcccaccaggctattaaaggggaatgttactgcatggcctctgcttcttacttctatggggtgggaggggcagctgaggtccattagggcctgcaaagctggggtggtggaaggtgtggtcacaggtggcattggagcaccctacaacaggctgcccagtgcctggggcagctctaaagttggtggggataccakgactgtgcctggggttgg

SEQ ID NO: 3179 - DNA, 3576 bp, Homo sapiens
ggcccgtagagaagtgaggaaaacgtggtggggggcatgcgcgatctggtaggcggtgctgccgtctgttgtacctgagaggcttgcgcatgccgacgcacggattcgaggcggggagcatgggaagaagcgcggcccgctgagcgcagagggtttcaggttgacttggcaccttgaagagtggaggcttggcccccaggatgaggcggccctcgaaatcgatgccacccacgggggaatgattctgcggtgccatccccttcataaacgcagattccttcctaaagccgcagctgcagaaggaacagcgcgaggagggaggggcagacactggcctcagatacctgacctggtaccctctatgaggcctgcggtgctgggctccccagaccgagcacccccagaagatgaggggcctgtcatggtgaagctagaggactctgaggaggagggtgaggctgccttatgggacccaggccctgaagctgcacgcctgcgtttccggtgcttccrctatgaggaggccacagggccccaagaggccctggcccagctccgagagctgtgtcgccagtggctgcgtccagaggtacgctccaaggagcagatgctggagctgttggtgctggagcagttcctgggcgcactgccccctgagatccaggcccrtgtgcaggggcagcggccaggcagccccgaggaggctgctgccctagtagatgggctgcgccgggagccgggcggaccccrgagatgggtcacagtccaggtgcagggccaggaggtcctatcagagaagatggagccctccagtttccagcccctacctgaaactgagcctccaactccagagcctgggcccaagacacctccyaggactatgcaggaatcaccactgggcctgcaggtgaaagaggagtcagaggttacagaggactcagatttcctggagtctgggcctctagctgccacccaggagtctgtacccaccctcctgcctgaggaggmccagagatgtgggaccgtgctggaccagatctttccccacagcaagactgggcctgagggtccctcatggagggagcaccccagggccctgtggcatgaggaagctgggggcatcttctccccagggttcgcgctgcagctrggcagcatctccgcaggtccaggtagtgtaagccctcacctccacgtcccctgggacctcggcatggctggcctttctggccagatccaatcaccctcccgcgaaggtggctttgcgcatgcgcttctgctccccagcgatctgaggagtgaacaggaccccacggacgaggatccctgccgsggtgtgggccctgctctgrtcaccacccgctggcgctcccccaggggccggagccggggccgccccagcactgggggcggggtggttaggggcggccgttgcgatgtatgtggcaaggtgttcagccaacgcagcaacctgctgaggcaccagaagatccacacgggtgagcgaccattcgtgtgcagcgagtgcggccgcagcttcagccgcagctcgcacctgctgcgccaccagcttacrcacaccgaggagcggccgttcgtgtgcggcgactgtggccagggcttcgtgcgmagcgcgcgcctggaagagcatcggagagtgcacacgggcgaacagcctttccsttgcgctgagtgcggccagagcttccggcagcgctccaatctgctgcagcaccagcgcatccacggcgatcccccgggccctggcgctaagcccccggcccctcctggtgcgcccgagcctcccggcccctttccgtgcagcgagtgccgcgagagcttcgcgcggcgcgccgtgctgctggagcaccaggcggtacacacgggcgacaagtcctttggctgcgtcgagtgcggcgagcgcttcggccgccgctcagtgctrctgcagcaccggcgcgtgcacagtggcgagcggcccttcgcctgtgccgagtgcggccagagcttccggcagcgctccaacctgacgcagcaccggcgcatccacaccggggagcggcccttcgcctgcgccgagtgtggcaaggccttccgccagcggcctacgctcacgcagcatctccgcgtacacacgggcgagaaaccctttgcctgccccgagtgtggccagcgcttcagccagcgcctcaagctcacgcgtcatcagaggacacacaccggcgaaaagccctaccactgcggtgagtgcggcctgggcttcacgcaggtctcgcggctcaccgagcaccagcgcatccacacgggcgaacggcccttcgcctgccccgagtgcggccagagctttcggcagcacgccaacctcacccagcaccggcgcatccacacggtgggggcggggccgggcgggcccgagaacagccgaatttggccgagcgctgccgagcgagtccgaggcgctgggccaggccggagccggactacgggagccgaggcgggccgcgcggtgggcgcggagaggagcggagcggcgcggcaggccgggcgggtggcggcagcagcggaggaggccgcagctgcgggtccgaggagcggaggcgacgcgggcggcggcggggggccgggtggccggggtcccgggccccgcggcggcggcagcggcggcggcggcggcaggatgatcaagctgttctcgctgaagcagcagaagaaggaggaggagtcggcgggcggcaccaagggcagcagcaagaaggcgtcggcggcgcagctgcggatccagaaggacataaacgagctgaacctgcccaagacgtgtgatatcagcttctcagatccagacgacctcctcaacttcaagctggtcatctgtcctgatgagggcttctacaagagtgggaagtttgtgttcagttttaaggtgggccagggttacccgcatgatccccccaaggtgaagtgtgagacaatggtctatcaccccaacattgacctcgagggcaacgtctgcctcaacatcctcagagaggactggaagccagtccttacgataaactccataatttatggcctgcagtatctcttcttggagcccaacccygaggacccactgaacaaggaggccgcagaggtcctgcagaacaaccggcggctgtttgagcagaacgtgcagcgctccatgcggggtggctacatcggctccacctactttgagcgctgcctgaaatagggttggcgcatacccacccccgccacggccacaagccctggcatcccctgcaaatatttattgggggccatgggtaggggtttggggggcggccggtgggggaatcccctgccttggccttgcctccccttcctgccacgtgcccctagttatttttttttttttaacaccatgtgattaaggtcggcgctgcctcccccgacccactcagcgatgggaaatgaattggcttgtctagcccccctgctgggtgcttgttcagcaacgggcctgggtagctgggcccaggcaacccacccctccacctctggaggtcccaccaggctattaaaggggaatgttactgc

SEQ ID NO: 3180 - DNA, 2935 bp, Homo sapiens
agaagtcaagacgtctggaaagaattacccagtcctggcttcgagcagcccattgaaccagagacttgaaacagccccagccaaagacttttctcccaattctgcgcttcctgggttctgctgagtcttccacaggcttttttttttttttttttttttttaagacgaaaaagagattttctgttatcgggggcagaaagactgaagcccaaaaaaaaaaaaaaaaarraaagaaaagaaaagaaaaaagaaaagttaatttatttttaaagcawawtttttttaaraattagactgaagtgcaacggaaacataaagagaatattagtgaaattattttttaaagtggggaagaatcaaacatttaagactcccctatccttyttaaatgttgtttttaaatttcttattttttttggccggtcgtctcaaattcatctgatctcttattacctcaattttggaaactgcccgccaccgaccctccgggaccacacagacaggctgaggacgactttatgaccaagagctgaacaagttaaagttgtcatggtcatagatgggaactcagaagatgacctttacatgatggacatcttcagtgaagtcatgggcagagacaaatcagccacttatatctggaagaacaacttccacgaaaagggtcccggtgagacagatgagtcacataaagaaagctcgcaacacgtaacgcaattggtcttgtccaacaaaagtatctgcatcatgcaaaaatggggtggaaaaagagaagtcatgtacacagccttcagagcactgggacgaagtgtggattatgtacaggtttgtgattcagacactatgcttgacccagcctcatctgtggagatggtaaaagttttagaagaagatcccatggttggaggtgttgggggagatgtccagattttaaacaagtacgattcctggatctcattcctcagcagtgtaagatattggatggcttttaatatagaaagggcctgtcagtcttattttgggtgtgttcagtgcattagtggacctctgggaatgtacagaaactccttgttgcatgagtttgtggaagattggtacaatcaagaatttatgggcaaccaatgtagctttggtgatgacaggcatctcacgaaccgggtgctgagcctgggctatgcaacaaaatacacagctcgatctaagtgccttactgaaacacctatagartatctcagatggctaaaccagcagacccgttggagcaagtcctacttccgagaatggctgtacaatgcaatgtggtttcacaaacatcacttgtggatgacctacgaagcrattatcactggattctttcctttctttctcattgccacagtaatccagctcttctaccggggtaaaatttggaacattctcctcttcttgttaactgtccagctagtaggtctcataaaatcatcttttgccagctgccttagaggaaatatcgtcatggtcttcatgtctctctactcagtgttatacatgtcgagtttacttcccgccaagatgtttgcaattgcaacaataaacaaagctgggtggggcacatcaggaaggaaaaccattgttgttaatttcataggactcattccagtatcagtttggtttacaatcctcctgggtggtgtgattttcaccatttataaggagtctaaaaggccattttcagaatccaaacagacagttctaattgttggaacgttgctctatgcatgctattgggtcatgcttttgacgctgtatgtagttctcatcaataagtgtggcaggcggaagaagggacaacaatatgacatggtgcttgatgtatgatcttccatgttttgacgtttgcagtcacacacaacaccttagttcctctaggggctgtacagtattgtggcatcagataatgccaccaaaggagacatatcactgctgctgggacttgaacaaagacatttatatgggtttattttcattctgccaaagtaaaacaatacatcaacaagaagaaactcagatttaacctgttatttctatgaaaatgggatgaattctttgtttatgcactttttccttactgtgcatccgcctgaaagtgttttgscctatatacctcactagccatgctttatgtgggttatcatggaagaaaaggattttggaaactcaaggaaaagttctttcaacctatacaacctaacttatggactgttttgatagatgataattttttttttttaggaaggattttctttttaactttaccaaatgaaatgccaaaggaagttttaaaggccgttggctgtgctgtattttgatataattgtactgtgtttttaaattktgtatgccaatcttaaagacaaattttgcatattctctattttacttttctgccaaaataaacctgttcttccttttttaaaataaaataagttcttaaaaaatttatacttaaaaaatcctgcccaaaatgtgaagcttggttgactgatgttcatgatagaaagaataaaatgtttctctctctctaccttttaaaattgaatagtttatttctgtgaaagaagtatttaaactttcaatattttaactttttgtttttatttcttttagaaaaggccaatatacctatcacactttggaagtaaaaatacacactttcgtgtgtacctaaaaaaaaaatcgttgaaaatcaaggccaaaggtagtgcaattttttcattaagatttaaaaaaaagggaatgatagtctttgaaagaaaacagtaggcatccagcactggacaaaacatgggtatcaaagatgaataatctttggagattctggcagtgttttcccagaacaagtcaagtggaaagtggagaaattatctgtataattttggacacatacaatgcagtt

SEQ ID NO: 3181 - DNA, 5939 bp, Homo sapiens
cactggctgcagccgcagtcttggtggaggaggtggggaccaccaccgctcctccacctgcatccggctgcgggactgcggcggccgcgtttgccctgcagaccctgcaccccgggacgcggctcatctgtcattagcaccggcactaagctcccaccgctcagcgacttggtccgccgcaagctccgccgcaggctttgtccgctagcgctcggctgagtctgggcgggcgggaaacctgggctagggcgaggcggggcccctggacatgcctttctccacgtccgcctcctcgaccctattgtaagcggagaaacttagtgtgcgaggcaggcaggggacgtccccattttgatgtcccgtaccctccacccccttcggatcgaggtagtaaagaggctcctgtaggaaactgactgcctctatgattgcggcctcttgggggattttgcgtttagcccgaaagttggctttgccaaaagacgcacgggtaggaagggcgaaaaggaaaccctgtattyygtcgcgctgggctctccgagtccgtgcgcaaagcggcctacgagtcctggctccgcacctgcagaggacaagagccaatgcctaaaaaagaacagcggaggaaccggctggcgcggccagctggaacgctggatcgcagtgcgcccagggaaggccgggggcgcccgccggccctagccctcagtggtcctctcccacgccggcccgcgcgtgcctctgcctacaagacctggggcgtcctggccagatctggatggcaggtccctccgccacccccggcccggttccgggggcgtggcttgrcgcgggggcgggtttaagtcaccgcgggtgtctgaccactctgacaggtctccaaatttctcccagtcgcctggcgcccgcggtgcgtttcagagctccagggtggcacgcggcggcgcttccctagatccagaggcgtctctgtcgacttccacgcggcctcgggcctcccttctcctccaaaccttcgcctcatccgccaagcttcggttctcagcctcagatatccgcaccggcggcttctcttcgttctcggagctcttggctttggagccctcaccactttttccttcccccgcctctcctgatcctcctagctccgagccaaatggactccaaagaacgaaataaaggggatgagaactgtgtgctgcgacccttcgaaagcacagctgaaagcgttgacstcgtcttatagctcaggctgggaccctggrgcgagagtccccacaccccctccgggagggatgcttctggccagagccagcgctgcgctgtcagtccttgctcccgaactaggaaagagcctaggagggagcctcagcataccccttcctccaaattaactatttggtgaattgttagcgccgaggctaccacctctccaaccctgtcgcggggcgccccgccacctcaccgtgaccccctcctcctccttctttgcccccgcccccagctccgcccctgctccccatcccggcgcaatggagttctccgaagggcgatgattccagccacatctgctaacttcgcacccatcgctgccgccggtcaccgccggccaggccccctgcagccgcggagcagtgggcgtccaaagcccagtgcagcagccaggacccgcccgacgcgcagcagaagcacggcgcccaggcgcttaggcrtctcttggagagcaaaggctgcgccaaaacgctgagcctagaatcaaccaaggagcctgagcccaggaaggggctgcgtggctcacagcgctgcggctcctgaggacaaatagccactgccgctgcgtacccaagctgcgccggytggcgggagagcagcacgcaaggacgccgaggtccgccgcgatcttccaggtgccctttgcccctgggcacagtatgacccgacctacagggagccctagcgcagggctcctgcaacggggcagcctaggataaaaaggatccttgccaagctcctaccaggccgcctttgagtctttaggaacccctcctccggctgcctccccaaggttctgggcctccttccctgcggcccagagccatggagctctccgatgtgcgctgccttacaggcagcgaggaactctacaccatccacccgacgcccccggccggcgacggcaggagcgcctcccggccgcagcggctgctgtggcagacggcggtgcgacacatcacggagcagcgcttcattcacgggcaccggggaggcagcggcagcgggagtggaggctcgggcaaagcctcggaccctgcgggcggcggccccaaccaccacrcgccgcagctgtcaggcgactcggcgctgcccctctactcgctgggcccgggagagcgagcgcacagcacctgcggcaccaaagtcttcccggaacgcagcgggagcggcagtgccagcggcagcggaggcgggggcgacctgggcttcctgcaccttgactgtgcccctagcaactcggatttctttcttaatgggggctatagctaccgaggggtcattttccccaccctgcgcaactccttcaaatctcgggatttggaacgcctctaccagcgctatttcttgggccaaaggcgcaaatcggaagtggtgatgaacgtgctggacgtgctgaccaaactcactctcttggtcctacacttgagcctggcctcggcccccatggacccgctcaagggcatcctgctgggcttcttcaccggcattgaggtagtgatctgcgccctggtggtggtcaggaaggacaccacctcccacacgtacctgcagtacagcggcgtggtcacctgggtggccatgaccacccagatcctggcagcaggcctcggctacgggctcctgggcgacggcataggctacgtgctcttcacgctcttcgccacctacagtatgctgccgctgccgctcacctgggccatcctggccggcctgggcacctcgctgctgcaggtcatcctccaagtggtcataccccggctggcggtcatttccatcaaccaggttgtggcccaggcagtgytattcatgtgtatgaacacagctggaatcttcatcagttacctgtcagaccgggcccagcgccaagctttcctggagactcggaggtgtgtggaggccaggctgcgcctggagacagagaaccaaagacaggagcggctcgtgctttctgtgctcccccggtttgttgtcctggaaatgatcaacgacatgaccaatgtggaagatgagcacctgcagcaccagttccatcggatctacatccatcgctatgagaacgtcagtattctttttgcagatgttaaaggatttaccaacctctccacgaccttgtctgctcaggagctggtcaggatgctcaacgagctctttgccagatttgatcgactggcccatgagcatcactgccttcgtattaaaatcctgggggactgctactactgcgtgtctggacttcctgagccccgccaggaccatgcccactgctgtgttgaaatgggtctcagcatgatcaaaaccatcaggtatgtgcggtcaaggacaaaacacgatgttgacatgaggattggaatccactccggctcggtgctgtgcggtgttttgggactamggaagtggcagtttgatgtctggtcttgggatgtggatattgcaaacaaactcgaatctggaggaatcccygggaggattcacatttccaaagccacgctggactgtctcaacggtgactataacrtggaagagggccatggtaaagagaggaatgaattcctgaggaagcataatatcgaaacttacttaattaagcagcctgaggacagtctgctgtccttgcctgaagatatcgtcaaggagtcagtgagctcctcagaccggagaaacagtggggccacattcactgaaggatcctggagccctgaactgccctttgataatatcgtggggaaacagaatactctggctgccctaacaagaaattcaataaatctgcttccaaaccatcttgcacaagctttgcatgtccagtctgggcctgaggaaattaacaagagaatagaacataccatcgacttgcggagtggcgataaattgagaagagagcatatcaagccattctcactgatgtttaaagactccagcctggagcacaagtattctcaaatgagggatgaagtgttcaagtcaaacttggtctgtgcatttatcgttcttctatttatcacggcaatacaaagtttgcttccttcttcaagagtgatgccaatgaccatccagttctccattctgattatgctgcactcggctctggtcctcatcaccacagcagaggattataaatgtttgcccctcatcctccggaaaacttgctgttggattaatgagacctatttggcccggaacgtcatcatctttgcatccattttgattaatttcctgggtgccatcttaaatatcctgtggtgtgattttgacaagtcgatacccttgaagaacctgactttcaattcctcagctgtgtttacagatatctgctcctacccagagtactttgtcttcacgggggtgttggccatggtgacctgtgcagttttcctccggctgaactccgtcctgaagctggcagtgctgctgatcatgattgccatctatgccctgctcactgagaccgtctacgcaggcctctttctgcgttatgacaacctcaaccacagtggagaagatttcctggggaccaaggaggtatcactgctactgatggccatgttcctcctggctgtgttctaccatggacagcagctggagtacacagcccgcctggacttcctttggcgagtacaggccaaagaggagatcaatgagatgaaggagctgagggaacacaatgagaacatgctccggaatatcttacccagccatgtggcccgccatttcctagagaaggaccgagacaatgaggagctgtattctcaatcctatgatgctgttggggtgatgtttgcctccatcccaggatttgcrgacttttactctcagactgaaatgaataaccagggagtggaatgcctgcgcttgctcaatgagatcattgctgacttcgatgagttgcttggtgaagaccgatttcaagacattgaaaagattaagaccattggcagcacctacatggccgtgtcaggcctgtcacctgaaaaacagcaatgtgaagacaagtggggacatttgtgtgctctggctgacttctcactygccctgacagaaagcatacaggagatcaacaagcattcattcaacaattttgaactccggattggcatcagccacggctcagtggtagctggcgttatcggcgctaagaaaccacagtatgacatttggggcaaaactgtgaacctggcaagccgaatggacagcacgggggttagtggccggatccaagtcccagaggagacctatctcatcctgaaggaccagggctttgcctttgattaccgaggggagatctatgtgaagggtatcagtgaacaggaaggaaaaatcaaaacgtactttcttctgggaagagtccaacccaacccattcatcttgcccccaagaagactgcctgggcagtactccctggccgcggttgtcctgggacttgtccagtccctcaataggcaaaggcagaagcagctactcaatgagaacaacaacacaggaatcatcaagggtcattacaaccggcggactttgttgtcacccagcggcacagagcctggagcccaggctgaaggcaccgacaaatctgatttgccataaaagcattttctttctgttttttttttttttgtatttcttttatatataaaataaatatactaataaaaaggtttaattttttttagaac

SEQ ID NO: 3182 - DNA, 5527 bp, Homo sapiens
agccagagctgcgagcgcctggarctggatctctctccggtcgcgcacgccgaggccagtagggagagaagatggtggttctccgcagcagcttggagctgcacaaccactccgcggcctcggccacgggctccttggacctgtccagtgacttcctcagtctggagcacatcggccggaggcggctccgctcggccggcgcggcgcagaagaaacccgcggcgaccacagccaaagcgggcgatgggtcatcagttaaggaagttgaaacctaccaccggacacgtgctttaagatctttgagaaaagatgcacagaattcttcagattctagttttgagaagaatgtggaaataacggagcaacttgctaatggcaggcattttacaaggcagttggccagacagcaggctgataaaaaaaaagaagagcacagagaagacaaagtgattccagttactcggtcattgagggctagaaacatcgttcaaagtacagaacacttacatgaagataatggtgatgttgaagtgcgtcgaagttgtaggattagaagtcgttatagtggtgtaaaccagtccatgctgtttgacaaacttataactaacactgctgaagctgtacttcaaaaaatggatgacatgaagaagatgcgtagacagcgaatgagagaacttgaagacttgggagtgtttaatgaaacagaagaaagcaatcttaatatgtacacaagaggaaaacagaaagatattcaaagaactgatgaagaaacaactgataatcaagaaggcagtgtggagtcatctgaagagggtgaagaccaagaacatgaagatgatggtgaagatgaagatgatgaagatgatgatgatgatgacgatgatgatgatgatgatgatgatgaagatgatgaagatgaagaagatggagaagaagagaatcagaagcgatattatcttagacagagaaaagctactgtttactatcaggctccattggaaaaacctcgtcaccagagaaagcccaacatattttatagtggcccagcttctcctgcaagaccaagataccgattatcttccgcaggaccaagaagtccttactgtaaacgaatgaacaggcgaaggcatgcaatccacagtagtgactcgacttcatcttcctcctctgaagatgaacagcactttgagaggcggaggaaaaggagtcgtaatagggctatcaataggtgcctcccactaaattttcggaaagatgaattaaaaggcatttataaagatcgaatgaaaattggagcaagccttgccgatgttgatccaatgcaactagattcttcagtacgatttgatagtgttggtggcctgtctaatcatatagcagctctaaaagagatggtggtgtttccattactttatccagaagtctttgaaaaatttaaaattcaacccccaagaggttgtttgttttatgggccacctggaactggaaagactctggttgccagagcacttgccaatgagtgcagtcaaggggataaaagagtagcatttttcatgaggaaaggtgctgattgtctaagtaaatgggtaggagaatctgaaagacagctacgattgctgtttgatcaggcctatcagatgcgcccatcaattattttttttgacgaaattgatggtctggctccagtacggtcaagcaggcaagatcagattcacagttctattgtttccaccctgctagctcttatggatggattggacagcagaggggaaattgtggtcattggtgctacgaacaggctagattctatagatcctgctttacgaaggcctggtcgctttgatagagaattcctctttagcctgcctgataaagaggctcgaaaagagattctaaagattcacaccagggattggaatcccaaaccactggacacatttttagaagagctagcagaaaactgtgttggatactgtggagcagatattaaatcaatatgtgctgaagctgctttatgtgctttacgacgacgctacccacagatctataccactagtgagaaactgcagttggatctctcttcaattaatatctcagctaaggatttcgaggtagctatgcaaaagatgataccagcctcccaaagagctgtgacatcacctgggcaggcactgtccaccgttgtgaaaccactcctgcaaaacactgtkgacaagattttagaagccctgcagagagtatttccacatgcagaattcagaacaaataaaacattagactcagatatttcttgtcctctgctagaaagtgacttggcttacagtgatgatgatgttccatcagtttatgaaaatggactttctcagaaatcttctcataaggcaaaagacaattttaattttcttcatttgaatagaaatgcttgttaccaacctatgtcttttcgaccaagaatattgatagtaggagaaccaggatttgggcaaggttctcacttggcaccagctgtcattcatgctttggaaaagtttactgtatatacattagacattcctgttctttttggagttagtactacatcccctgaagaaacatgtgcccaggtgattcgtgaagctaagagaacagcaccaagtatagtgtatgttcctcatatccacgtgtggtgggaaatagttggaccgacacttaaagccacatttaccacattattacagaatattccttcatttgctccagttttactacttgcaacttctgacaaaccccattccgctttgccagaagaggtgcaagaattgtttatccgtgattatggagagatttttaatgtccagttaccggataaagaagaacggacaaaattttttgaagatttaattctaaaacaagctgctaagcctcctatatcaaaaaagaaagcagttttgcaggctttggaggtactcccagtagcaccaccacctgagccaagatcactgacagcagaagaagtgaaacgactagaagaacaagaagaagatacatttagagaactgaggattttcttaagaaatgttacacataggcttgctattgacaagcgattccgagtgtttactaagcctgttgaccctgatgaggttcctgattatgtcactgtaataaagcaaccaatggacctttcatctgtaatcagtaaaattgatctacacaagtatctgactgygaaagactatttgagagatattgatctaatctgtagtaatgccttagaatacaatccagatagagatcctggagatcgtcttattaggcatagagcctgtgctttaagagatactgcctatgccataattaaagaagaacttgatgaagactttgagcagctctgtgaagaaattcaggaatctagaaagaaaagaggttgtagctcctccaaatatgccccgtcttactaccatgtgatgccaaagcaaaattccactcttgtkggtgataaaagatcagacccagagcagaatgaaaagctaaagacaccgagtactcctgtggcttgcagcactcctgctcagttgaagaggaaaattcgcaaaaagtcaaactggtacttaggcaccataaaaaagcgaaggaagatttcacaggcaaaggatgatagccagaatgccatagatcacaaaattgagagtgatacagaggaaactcaagacacaagtgtagatcataatgagaccggaaacacaggagagtcttcggtggaagaaaatgaaaaacagcaaaatgcctctgaaagcaaactggaattgagaaataattcaaatacttgtaatatagagaatgagcttgaagactctaggaagactacagcatgtacagaattgagagacaagattgcttgtaatggagatgcttctagctctcagataayacatatttctgatgaaaatgaaggaaaagaaatgtgtgttctgcgaatgactcgagctagacgttcccaggtagaacagcagcagctcatcactgttgaaaaggctttggcaattctttctcagcctacaccctcacttgttgtggatcatgagcgattaaaaaatcttttgaagactgttgttaaaaaaagtcaaaactacaacatatttcagttggaaaatttgtatgcagtaatcagccaatgtatttatcggcatcgcaaggaccatgataaaacatcacttattcagaaaatggagcaagaggtagaaaacttcagttgttccagatgatgatgtcatggtatcgagtattctttatattcagttcctatttaagtcatttttgtcatgtccgcctaattgatgtagtatgaaaccctgcatctttaaggaaaagattaaaatagtaaaataaaagtatttaaactttcctgatatttatgtacatattaagataaatgtcatgtgtaagataactgataaatattggaactttgctagaacaagaccctgtagtaatagtaataatagttgaagtttggccaactcttaataaagttattttggtaactaatgttttatggcacttaagaataattagcagcgttaaattttgtttgtattaagcacttttaattttatccttcctaaaaatagtttattgtatctgacaagaaacttacttaaccattgtgtccttcccatcttttttgtcatctttgttttcttcaaatgccctcctmccatctgccttgagattccctygtcttcacttaaaagccagagtgcaagtcatgatttgcgggagggctcttgaaccacttctggctgcaccacaattctgtacttgagtatcacagtcattgtttttgagacaaacatttttataattctaatttgggttaataaagattttaaatatttcttggtttacttttgtaattatatacacaacaaatgtattaataactaccttgttaaacaccttttaatagcacaaggtttttatatttgcaagctgttgatatctttctaaaactgtttaggttatagtctattgatactttttatatacaattttataaatataaatattataattttatattaatggtaccaaaaatacatttcttaaggttaaaagcatgcacttccatgcatacttgcttttggggagagtggggagaagacattctaataatcagtttgtgaaatagcttctgttggaaaccttttgaggggaataaggaatggtcatctaaaatgagagattctggattttaatgcagttcaaagttgagctgtatttttgttgttgatttatctggattttttttaaagccttctaaaacccagtgaattcaataccttaattagtacatactatcttatgtaatgcataaagcaatgccagtcactgagaacatttaaatatatttatattcctggagatacacattctcatttttgttggtttattataaattattcttctagatgcatcttttataactaggatttcattttgtgtgtatagcttatgtaataaattttaaaggtgaaaactctcttaa

SEQ ID NO: 3183 - DNA, 3111 bp, Homo sapiens
aaatgcttgttaccaacctatgtcttttcgaccaagaatattgatagtaggagaaccaggatttgggcaaggttctcacttggcaccagctgtcattcatgctttggaaaagtttactgtatatacattagacattcctgttctttttggagttagtactacatcccctgaagaaacatgtgcccaggtgattcgtgaagctaagagaacagcaccaagtatagtgtatgttcctcatatccacgtgtggtgggaaatagttggaccgacacttaaagccacatttaccacattattacagaatattccttcatttgctccagttttactacttgcaacttctgacaaaccccattccgctttgccagaagaggtgcaagaattgtttatccgtgattatggagagatttttaatgtccagttaccggataaagaagaacggacaaaattttttgaagatttaattctaaaacaagctgctaagcctcctatatcaaaaaagaaagcagttttgcaggctttggaggtactcccagtagcaccaccacctgagccaagatcactgacagcagaagaagtgaaacgactagaagaacaagaagaagatacatttagagaactgaggattttcttaagaaatgttacacataggcttgctattgacaagcgattccgagtgtttactaagcctgttgaccctgatgaggttcctgattatgtcactgtaataaagcaaccaatggacctttcatctgtaatcagtaaaattgatctacacaagtatctgactgygaaagactatttgagagatattgatctaatctgtagtaatgccttagaatacaatccagatagagatcctggagatcgtcttattaggcatagagcctgtgctttaagagatactgcctatgccataattaaagaagaacttgatgaagactttgagcagctctgtgaagaaattcaggaatctagaaagaaaagaggttgtagctcctccaaatatgccccgtcttactaccatgtgatgccaaagcaaaattccactcttgtkggtgataaaagatcagacccagagcagaatgaaaagctaaagacaccgagtactcctgtggcttgcagcactcctgctcagttgaagaggaaaattcgcaaaaagtcaaactggtacttaggcaccataaaaaagcgaaggaagatttcacaggcaaaggatgatagccagaatgccatagatcacaaaattgagagtgatacagaggaaactcaagacacaagtgtagatcataatgagaccggaaacacaggagagtcttcggtggaagaaaatgaaaaacagcaaaatgcctctgaaagcaaactggaattgagaaataattcaaatacttgtaatatagagaatgagcttgaagactctaggaagactacagcatgtacagaattgagagacaagattgcttgtaatggagatgcttctagctctcagataayacatatttctgatgaaaatgaaggaaaagaaatgtgtgttctgcgaatgactcgagctagacgttcccaggtagaacagcagcagctcatcactgttgaaaaggctttggcaattctttctcagcctacaccctcacttgttgtggatcatgagcgattaaaaaatcttttgaagactgttgttaaaaaaagtcaaaactacaacatatttcagttggaaaatttgtatgcagtaatcagccaatgtatttatcggcatcgcaaggaccatgataaaacatcacttattcagaaaatggagcaagaggtagaaaacttcagttgttccagatgatgatgtcatggtatcgagtattctttatattcagttcctatttaagtcatttttgtcatgtccgcctaattgatgtagtatgaaaccctgcatctttaaggaaaagattaaaatagtaaaataaaagtatttaaactttcctgatatttatgtacatattaagataaatgtcatgtgtaagataactgataaatattggaactttgctagaacaagaccctgtagtaatagtaataatagttgaagtttggccaactcttaataaagttattttggtaactaatgttttatggcacttaagaataattagcagcgttaaattttgtttgtattaagcacttttaattttatccttcctaaaaatagtttattgtatctgacaagaaacttacttaaccattgtgtccttcccatcttttttgtcatctttgttttcttcaaatgccctcctmccatctgccttgagattccctygtcttcacttaaaagccagagtgcaagtcatgatttgcgggagggctcttgaaccacttctggctgcaccacaattctgtacttgagtatcacagtcattgtttttgagacaaacatttttataattctaatttgggttaataaagattttaaatatttcttggtttacttttgtaattatatacacaacaaatgtattaataactaccttgttaaacaccttttaatagcacaaggtttttatatttgcaagctgttgatatctttctaaaactgtttaggttatagtctattgatactttttatatacaattttataaatataaatattataattttatattaatggtaccaaaaatacatttcttaaggttaaaagcatgcacttccatgcatacttgcttttggggagagtggggagaagacattctaataatcagtttgtgaaatagcttctgttggaaaccttttgaggggaataaggaatggtcatctaaaatgagagattctggattttaatgcagttcaaagttgagctgtatttttgttgttgatttatctggattttttttaaagccttctaaaacccagtgaattcaataccttaattagtacatactatcttatgtaatgcataaagcaatgccagtcactgagaacatttaaatatatttatattcctggagatacacattctcatttttgttggtttattataaattattcttctagatgcatcttttataactaggatttcattttgtgtgtatagcttatgtaataaattttaaaggtgaaaactctcttaa

SEQ ID NO: 3184 - DNA, 4460 bp, Homo sapiens
agccagagctgcgagcgcctggarctggatctctctccggtcgcgcacgccgaggccagtagggagagaagatggtggttctccgcagcagcttggagctgcacaaccactccgcggcctcggccacgggctccttggacctgtccagtgacttcctcagtctggagcacatcggccggaggcggctccgctcggccggcgcggcgcagaagaaacccgcggcgaccacagccaaagcgggcgatgggtcatcagttaaggaagttgaaacctaccaccggacacgtgctttaagatctttgagaaaagatgcacagaattcttcagattctagttttgagaagaatgtggaaataacggagcaacttgctaatggcaggcattttacaaggcagttggccagacagcaggctgataaaaaaaaagaagagcacagagaagacaaagtgattccagttactcggtcattgagggctagaaacatcgttcaaagtacagaacacttacatgaagataatggtgatgttgaagtgcgtcgaagttgtaggattagaagtcgttatagtggtgtaaaccagtccatgctgtttgacaaacttataactaacactgctgaagctgtacttcaaaaaatggatgacatgaagaagatgcgtagacagcgaatgagagaacttgaagacttgggagtgtttaatgaaacagaagaaagcaatcttaatatgtacacaagaggaaaacagaaagatattcaaagaactgatgaagaaacaactgataatcaagaaggcagtgtggagtcatctgaagagggtgaagaccaagaacatgaagatgatggtgaagatgaagatgatgaagatgatgatgatgatgacgatgatgatgatgatgatgatgatgaagatgatgaagatgaagaagatggagaagaagagaatcagaagcgatattatcttagacagagaaaagctactgtttactatcaggctccattggaaaaacctcgtcaccagagaaagcccaacatattttatagtggcccagcttctcctgcaagaccaagataccgattatcttccgcaggaccaagaagtccttactgtaaacgaatgaacaggcgaaggcatgcaatccacagtagtgactcgacttcatcttcctcctctgaagatgaacagcactttgagaggcggaggaaaaggagtcgtaatagggctatcaataggtgcctcccactaaattttcggaaagatgaattaaaaggcatttataaagatcgaatgaaaattggagcaagccttgccgatgttgatccaatgcaactagattcttcagtacgatttgatagtgttggtggcctgtctaatcatatagcagctctaaaagagatggtggtgtttccattactttatccagaagtctttgaaaaatttaaaattcaacccccaagaggttgtttgttttatgggccacctggaactggaaagactctggttgccagagcacttgccaatgagtgcagtcaaggggataaaagagtagcatttttcatgaggaaaggtgctgattgtctaagtaaatgggtaggagaatctgaaagacagctacgattgctgtttgatcaggcctatcagatgcgcccatcaattattttttttgacgaaattgatggtctggctccagtacggtcaagcaggcaagatcagattcacagttctattgtttccaccctgctagctcttatggatggattggacagcagaggggaaattgtggtcattggtgctacgaacaggctagattctatagatcctgctttacgaaggcctggtcgctttgatagagaattcctctttagcctgcctgataaagaggctcgaaaagagattctaaagattcacaccagggattggaatcccaaaccactggacacatttttagaagagctagcagaaaactgtgttggatactgtggagcagatattaaatcaatatgtgctgaagctgctttatgtgctttacgacgacgctacccacagatctataccactagtgagaaactgcagttggatctctcttcaattaatatctcagctaaggatttcgaggtagctatgcaaaagatgataccagcctcccaaagagctgtgacatcacctgggcaggcactgtccaccgttgtgaaaccactcctgcaaaacactgtkgacaagattttagaagccctgcagagagtatttccacatgcagaattcagaacaaataaaacattagactcagatatttcttgtcctctgctagaaagtgacttggcttacagtgatgatgatgttccatcagtttatgaaaatggactttctcagaaatcttctcataaggcaaaagacaattttaattttcttcatttgaatagaaatgcttgttaccaacctatgtcttttcgaccaagaatattgatagtaggagaaccaggatttgggcaaggttctcacttggcaccagctgtcattcatgctttggaaaagtttactgtatatacattagacattcctgttctttttggagttagtactacatcccctgaagaaacatgtgcccaggtgattcgtgaagctaagagaacagcaccaagtatagtgtatgttcctcatatccacgtgtggtgggaaatagttggaccgacacttaaagccacatttaccacattattacagaatattccttcatttgctccagttttactacttgcaacttctgacaaaccccattccgctttgccagaagaggtgcaagaattgtttatccgtgattatggagagatttttaatgtccagttaccggataaagaagaacggacaaaattttttgaagatttaattctaaaacaagctgctaagcctcctatatcaaaaaagaaagcagttttgcaggctttggaggtactcccagtagcaccaccacctgagccaagatcactgacagcagaagaagtgaaacgactagaagaacaagaagaagatacatttagagaactgaggattttcttaagaaatgttacacataggcttgctattgacaagcgattccgagtgtttactaagcctgttgaccctgatgaggttcctgattatgtcactgtaataaagcaaccaatggacctttcatctgtaatcagtaaaattgatctacacaagtatctgactgygaaagactatttgagagatattgatctaatctgtagtaatgccttagaatacaatccagatagagatcctggagatcgtcttattaggcatagagcctgtgctttaagagatactgcctatgccataattaaagaagaacttgatgaagactttgagcagctctgtgaagaaattcaggaatctagaaagaaaagaggttgtagctcctccaaatatgccccgtcttactaccatgtgatgccaaagcaaaattccactcttgtkggtgataaaagatcagacccagagcagaatgaaaagctaaagacaccgagtactcctgtggcttgcagcactcctgctcagttgaagaggaaaattcgcaaaaagtcaaactggtacttaggcaccataaaaaagcgaaggaagatttcacaggcaaaggatgatagccagaatgccatagatcacaaaattgagagtgatacagaggaaactcaagacacaagtgtagatcataatgagaccggaaacacaggagagtcttcggtggaagaaaatgaaaaacagcaaaatgcctctgaaagcaaactggaattgagaaataattcaaatacttgtaatatagagaatgagcttgaagactctaggaagactacagcatgtacagaattgagagacaagattgcttgtaatggagatgcttctagctctcagataayacatatttctgatgaaaatgaaggaaaagaaatgtgtgttctgcgaatgactcgagctagacgttcccaggtagaacagcagcagctcatcactgttgaaaaggctttggcaattctttctcagcctacaccctcacttgttgtggatcatgagcgattaaaaaatcttttgaagactgttgttaaaaaaagtcaaaactacaacatatttcagttggaaaatttgtatgcagtaatcagccaatgtatttatcggcatcgcaaggaccatgataaaacatcacttattcagaaaatggagcaagaggtagaaaacttcagttgttccagatgatgatgtcatggtatcgagtattctttatattcagttcctatttaagtcatttttgtcatgtccgcctaattgatgtagtatgaaaccctgcaagtaatagtaataatagttgaagtttggccaactcttaataaagttattttggtaactaatgttttatggcacttaagaataattagcagcgttaaattttgtttgtattaagcacttttaatt

SEQ ID NO: 3185 - DNA, 1994 bp, Homo sapiens
agccagagctgcgagcgcctggarctggatctctctccggtcgcgcacgccgaggccagtagggagagaagatggtggttctccgcagcagcttggagctgcacaaccactccgcggcctcggccacgggctccttggacctgtccagtgacttcctcagtctggagcacatcggccggaggcggctccgctcggccggcgcggcgcagaagaaacccgcggcgaccacagccaaagcgggcgatgggtcatcagttaaggaagttgaaacctaccaccggacacgtgctttaagatctttgagaaaagatgcacagaattcttcagattctagttttgagaagaatgtggaaataacggagcaacttgctaatggcaggcattttacaaggcagttggccagacagcaggctgataaaaaaaaagaagagcacagagaagacaaagtgattccagttactcggtcattgagggctagaaacatcgttcaaagtacagaacacttacatgaagataatggtgatgttgaagtgcgtcgaagttgtaggattagaagtcgttatagtggtgtaaaccagtccatgctgtttgacaaacttataactaacactgctgaagctgtacttcaaaaaatggatgacatgaagaagatgcgtagacagcgaatgagagaacttgaagacttgggagtgtttaatgaaacagaagaaagcaatcttaatatgtacacaagaggaaaacagaaagatattcaaagaactgatgaagaaacaactgataatcaagaaggcagtgtggagtcatctgaagagggtgaagaccaagaacatgaagatgatggtgaagatgaagatgatgaagatgatgatgatgatgacgatgatgatgatgatgatgatgatgaagatgatgaagatgaagaagatggagaagaagagaatcagaagcgatattatcttagacagagaaaagctactgtttactatcaggctccattggaaaaacctcgtcaccagagaaagcccaacatattttatagtggcccagcttctcctgcaagaccaagataccgattatcttccgcaggaccaagaagtccttactgtaaacgaatgaacaggcgaaggcatgcaatccacagtagtgactcgacttcatcttcctcctctgaagatgaacagcactttgagaggcggaggaaaaggagtcgtaatagggctatcaataggtgcctcccactaaattttcggaaagatgaattaaaaggcatttataaagatcgaatgaaaattggagcaagccttgccgatgttgatccaatgcaactagattcttcagtacgatttgatagtgttggtggcctgtctaatcatatagcagctctaaaagagatggtggtgtttccattactttatccagaagtctttgaaaaatttaaaattcaacccccaagaggttgtttgttttatgggccacctggaactggaaagactctggttgccagagcacttgccaatgagtgcagtcaaggggataaaagagtagcatttttcatgaggaaaggtgctgattgtctaagtaaatgggtaggagaatctgaaagacagctacgattgctgtttgatcaggcctatcagatgcgcccatcaattattttttttgacgaaattgatggtctggctccagtacggtcaagcaggcaagatcagattcacagttctattgtttccaccctgctagctcttatggatggattggacagcagaggggaaattgtggtcattggtgctacgaacaggctagattctatagatcctgctttacgaaggcctggtcgctttgatagagaattcctctttagcctgcctgataaagaggctcgaaaagagattctaaagattcacaccagggattggaatcccaaaccactggacacatttttagaagagctagcagaaaactgtgttggtaaacattgttttaagcagttaaaa

SEQ ID NO: 3186 - DNA, 3311 bp, Homo sapiens
agccagagctgcgagcgcctggarctggatctctctccggtcgcgcacgccgaggccagtagggagagaagatggtggttctccgcagcagcttggagctgcacaaccactccgcggcctcggccacgggctccttggacctgtccagtgacttcctcagtctggagcacatcggccggaggcggctccgctcggccggcgcggcgcagaagaaacccgcggcgaccacagccaaagcgggcgatgggtcatcagttaaggaagttgaaacctaccaccggacacgtgctttaagatctttgagaaaagatgcacagaattcttcagattctagttttgagaagaatgtggaaataacggagcaacttgctaatggcaggcattttacaaggcagttggccagacagcaggctgataaaaaaaaagaagagcacagagaagacaaagtgattccagttactcggtcattgagggctagaaacatcgttcaaagtacagaacacttacatgaagataatggtgatgttgaagtgcgtcgaagttgtaggattagaagtcgttatagtggtgtaaaccagtccatgctgtttgacaaacttataactaacactgctgaagctgtacttcaaaaaatggatgacatgaagaagatgcgtagacagcgaatgagagaacttgaagacttgggagtgtttaatgaaacagaagaaagcaatcttaatatgtacacaagaggaaaacagaaagatattcaaagaactgatgaagaaacaactgataatcaagaaggcagtgtggagtcatctgaagagggtgaagaccaagaacatgaagatgatggtgaagatgaagatgatgaagatgatgatgatgatgacgatgatgatgatgatgatgatgatgaagatgatgaagatgaagaagatggagaagaagagaatcagaagcgatattatcttagacagagaaaagctactgtttactatcaggctccattggaaaaacctcgtcaccagagaaagcccaacatattttatagtggcccagcttctcctgcaagaccaagataccgattatcttccgcaggaccaagaagtccttactgtaaacgaatgaacaggcgaaggcatgcaatccacagtagtgactcgacttcatcttcctcctctgaagatgaacagcactttgagaggcggaggaaaaggagtcgtaatagggctatcaataggtgcctcccactaaattttcggaaagatgaattaaaaggcatttataaagatcgaatgaaaattggagcaagccttgccgatgttgatccaatgcaactagattcttcagtacgatttgatagtgttggtggcctgtctaatcatatagcagctctaaaagagatggtggtgtttccattactttatccagaagtctttgaaaaatttaaaattcaacccccaagaggttgtttgttttatgggccacctggaactggaaagactctggttgccagagcacttgccaatgagtgcagtcaaggggataaaagagtagcatttttcatgaggaaaggtgctgattgtctaagtaaatgggtaggagaatctgaaagacagctacgattgctgtttgatcaggcctatcagatgcgcccatcaattattttttttgacgaaattgatggtctggctccagtacggtcaagcaggcaagatcagattcacagttctattgtttccaccctgctagctcttatggatggattggacagcagaggggaaattgtggtcattggtgctacgaacaggctagattctatagatcctgctttacgaaggcctggtcgctttgatagagaattcctctttagcctgcctgataaagaggctcgaaaagagattctaaagattcacaccagggattggaatcccaaaccactggacacatttttagaagagctagcagaaaactgtgttggatactgtggagcagatattaaatcaatatgtgctgaagctgctttatgtgctttacgacgacgctacccacagatctataccactagtgagaaactgcagttggatctctcttcaattaatatctcagctaaggatttcgaggtagctatgcaaaagatgataccagcctcccaaagagctgtgacatcacctgggcaggcactgtccaccgttgtgaaaccactcctgcaaaacactgtkgacaagattttagaagccctgcagagagtatttccacatgcagaattcagaacaaataaaacattagactcagatatttcttgtcctctgctagaaagtgacttggcttacagtgatgatgatgttccatcagtttatgaaaatggactttctcagaaatcttctcataaggcaaaagacaattttaattttcttcatttgaatagaaatgcttgttaccaacctatgtcttttcgaccaagaatattgatagtaggagaaccaggatttgggcaaggttctcacttggcaccagctgtcattcatgctttggaaaagtttactgtatatacattagacattcctgttctttttggagttagtactacatcccctgaagaaacatgtgcccaggtgattcgtgaagctaagagaacagcaccaagtatagtgtatgttcctcatatccacgtgtggtgggaaatagttggaccgacacttaaagccacatttaccacattattacagaatattccttcatttgctccagttttactacttgcaacttctgacaaaccccattccgctttgccagaagaggtaatttatgtggggcggtatcattatactttcaaaaagagttgtttctaccacaataatcataacttattgaaaaaattcaaatgctgtagaagtgaataaaaggataagttttcttatcaaatataccattggtaactatttggtatatgtgctcattgggcaagatggtatatgtatatgtgtatgtatatattaaggatacataaattttttctcttgaaaaatggtattatatgccgggtgcagtggctcacgcctgtaatcccagcactttgggaggccgaggtgggtggatcatgaggtcaggagattgagaccatcctggctaacagggtgaaaccctgtccctactaaaaatacaaaaaaaattagctggacgtggtggctggcgcctgcagtcccagctactcgggagactgaagcaggagaatggcatgaaccctggaggcagagcttgcagtgagccgagtgagccactgcactccagcctgggcgacagagcgagactctgtctcaaaa

SEQ ID NO: 3187 - DNA, 4061 bp, Homo sapiens
taggaatcccagtcagaagttccagcctgccactgttctctgatgccatgccagcaccaactcaactgttttttcctctcatccgtaactgtgaactgagcaggatctatggcactgcatgttactgccaccacaaacatctctgttgttcctcatcgtacattcctcagagtcgactgagatacacacctcatccagcatatgctaccttttgcaggccaaaggagaactggtggcagtacacccaaggaaggagatatgcttccacaccacagaaattttacctcacacctccacaagtcaatagcatccttaaagctaatgaatacagtttcaaagtgccagaatttgacggcaaaaatgtcagttctatccttggatttgacagcaatcagctgcctgcaaatgcacccattgaggaccggagaagtgcagcaacctgcttgcagaccagagggatgcttttgggggtttttgatggccatgcaggttgtgcttgttcccaggcagtcagtgaaagactcttttattatattgctgtctctttgttaccccatgagactttgctagagattgaaaatgcagtggagagcggccgggcactgctacccattctccagtggcacaagcaccccaatgattactttagtaaggaggcatccaaattgtactttaacagcttgaggacttactggcaagagcttatagacctcaacactggtgagtcgactgatattgatgttaaggaggctctaattaatgccttcaagaggcttgataatgacatctccttggaggcgcaagttggtgatcctaattcttttctcaactacctggtgcttcgagtggcattttctggagccactgcttgtgtggcccatgtggatggtgttgaccttcatgtggccaatactggcgatagcagagccatgctgggtgtgcaggaagaggacggctcatggtcagcagtcacgctgtctaatgaccacaatgctcaaaatgaaagagaactagaacggctgaaattggaacatccaaagagtgaggccaagagtgtcgtgaaacaggatcggctgcttggcttgctgatgccatttagggcatttggagatgtaaagttcaaatggagcattgaccttcaaaagagagtgatagaatctggcccagaccagttgaatgacaatgaatataccaagtttattcctcctaattatcacacacctccttatctcactgctgagccagaggtaacttaccaccgattaaggccacaggataagtttctggtgttggctactgatgggttgtgggagactatgcataggcaggatgtggttaggattgtgggtgagtacctaactggcatgcatcaccaacagccaatagctgttggtggctacaaggtgactctgggacagatgcatggccttttaacagaaaggagaaccaaaatgtcctcggtatttgaggatcagaacgcagcaacccatctcattcgccacgctgtgggcaacaacgagtttgggactgttgatcatgagcgcctctctaaaatgcttagtcttcctgaagagcttgctcgaatgtacagagatgacattacaatcattgtagttcagttcaattctcatgttgtaggggcgtatcaaaaccaagaatagtgagtggctctttcactggcaattctcaaatgatayacatttaaagggcagattttttaaaaagatactactataataaacatttccagttggtcattctaagcatttacccttttgatactctagctagtcaggtactccaaattgactttgcagcagggtggcagggtcaggagagtctggtcctgcctagctcagatttcatggcacctgcacttgaagcaagtcacttctttatcacaggtgtcttgaaacattagcttcttttaccaacctgagaaaattaggatgacctggcaaataagatcttgaataggccaaaagcaagtatcttgctgtgtgtagtctcttggttaaagtgaagaaacagtactgttcacacctttcttcactgagattccagtgtacatgagaacatatatttattgcatgattttctagatacacagtctatgcattattcatatacatttattttagcctaaagtggttttcaaatccagttcttcaagccataaatgaccaagatccaagcaatctgaatttgtttttgtgattatttgactggaatgcttcttaagtggaataactatactccgttatccacccgatttcctaatgtaattgaaasattttctattttgccacacacttggagacaataagggtttttagttttatctactcttctattgaagttaaagaaagaaaaaaagatttttttatttgtattaatgaaaagctttagtttaaaataaggagatccagaataaaaagaagagactgatctcttcaattattgtcatctgtagccaccagcacatcactcttatgtaatccccaaaggcttggcatgccgtaagtgtgtggtgggtagactgctgccggggaatcgtacttcttatttagtaatgataagacttttcattatttttggaattttaaagatgacataaataagtttaaatatcaatttggggagtaaggtttaatattgccatcgggtattgagacaggaggaagtttctgtttttctccatttagacataggtcaattaaaatatttgggtttaaaatgactaaatgctttaaacatattgtagcttaagatatatgtgttaagatatatacatgagaaactttaaaaggtaactactgtgcatgcctgatgcttaatagaatacttagtggcatcaaatgtttgcagcagtctccataattatattcagtcccttctaatactgtatcaatgtaaatgaaataaatatattcaaattggctttttgatatgcatcaagtggcattttgttcctgtgtttaatagtgatctgtatacagctgtgcacatattgtcatcacttattctagcatcactgttaaggctgtgattatgtttgatattcacctggattttaatacaagccaatatcagcttcccattgtgtaataacttgggtgtttaggagtcttttcacattttttggggatatgaactagatgttcaagaactccttctggactgtggatactgaatcagtgtactattggctgcagaatttgtttcaattgaaaatagactcaggaagattgctgctcagaatatcatataatgtttattttttgaggtgtttttgtttttatttgtgtgtttttttttttttaagtcagcttggaacttttttcctgggtagtatttgggagagggaaaggctgtactatatatttatttctaaatgttttgactgggcatttttcttttaatgaaatatgtggactgctctagcaaaccctattttcagctactatttgaatattcttgaacaccaccactgaagagtttcatatacaccaaataatgtctcatctctatagtacagggaatataaaattggtttcctgtggtcatgatcaagatagtagtattattacacaagaaacttggtctgcagtctggaagcttgtctgctctatagaaatgaaaatgcagcatgaagttgacattgtggaaatgaaagtaattgggtattagaaatctgaaagtactgtcatctaaaagcaattgtgattttattgtaattggttgtcactgttgtacggtgtctagaattaaagaatacatgtaaactttcatggtatttagcctttcttaaatttttttaaaatttaaactttctaacctatgtattcaacttctgtatttatatttaatcagtggttcatgttatataatacacccttaactagttaaatggaatgttggtatggtacagagtaccatattgctaagaaaactgtcttataaaagatgtatatgtgtgaagacatgaaagtttaatgtacagaatggttggagaaatgcctatggtgaattaaagcttcatatctgctttctgaatgtcc

SEQ ID NO: 3188 - DNA, 4253 bp, Homo sapiens
cacggggctgcgtggaaagagcgccgagcggtggcgtcgttgtcgccccctcctcgtcgggaagaatcgtttggtctcctgccgtgcccggccggtgctgctgtcgctgctgctgcccgcgcgggttgtggatgttgtcggctccgtgttgtgatgacaggagaatgtgtgtgtgtcccgggcccagacgaattggaatcccagtcagaagttccagcctgccactgttctctgatgccatgccagcaccaactcaactgttttttcctctcatccgtaactgtgaactgagcaggatctatggcactgcatgttactgccaccacaaacatctctgttgttcctcatcgtacattcctcagagtcgactgagatacacacctcatccagcatatgctaccttttgcaggccaaaggagaactggtggcagtacacccaaggaaggagatatgcttccacaccacagaaattttacctcacacctccacaagtcaatagcatccttaaagctaatgaatacagtttcaaagtgccagaatttgacggcaaaaatgtcagttctatccttggatttgacagcaatcagctgcctgcaaatgcacccattgaggaccggagaagtgcagcaacctgcttgcagaccagagggatgcttttgggggtttttgatggccatgcaggttgtgcttgttcccaggcagtcagtgaaagactcttttattatattgctgtctctttgttaccccatgagactttgctagagattgaaaatgcagtggagagcggccgggcactgctacccattctccagtggcacaagcaccccaatgattactttagtaaggaggcatccaaattgtactttaacagcttgaggacttactggcaagagcttatagacctcaacactggtgagtcgactgatattgatgttaaggaggctctaattaatgccttcaagaggcttgataatgacatctccttggaggcgcaagttggtgatcctaattcttttctcaactacctggtgcttcgagtggcattttctggagccactgcttgtgtggcccatgtggatggtgttgaccttcatgtggccaatactggcgatagcagagccatgctgggtgtgcaggaagaggacggctcatggtcagcagtcacgctgtctaatgaccacaatgctcaaaatgaaagagaactagaacggctgaaattggaacatccaaagagtgaggccaagagtgtcgtgaaacaggatcggctgcttggcttgctgatgccatttagggcatttggagatgtaaagttcaaatggagcattgaccttcaaaagagagtgatagaatctggcccagaccagttgaatgacaatgaatataccaagtttattcctcctaattatcacacacctccttatctcactgctgagccagaggtaacttaccaccgattaaggccacaggataagtttctggtgttggctactgatgggttgtgggagactatgcataggcaggatgtggttaggattgtgggtgagtacctaactggcatgcatcaccaacagccaatagctgttggtggctacaaggtgactctgggacagatgcatggccttttaacagaaaggagaaccaaaatgtcctcggtatttgaggatcagaacgcagcaacccatctcattcgccacgctgtgggcaacaacgagtttgggactgttgatcatgagcgcctctctaaaatgcttagtcttcctgaagagcttgctcgaatgtacagagatgacattacaatcattgtagttcagttcaattctcatgttgtaggggcgtatcaaaaccaagaatagtgagtggctctttcactggcaattctcaaatgatayacatttaaagggcagattttttaaaaagatactactataataaacatttccagttggtcattctaagcatttacccttttgatactctagctagtcaggtactccaaattgactttgcagcagggtggcagggtcaggagagtctggtcctgcctagctcagatttcatggcacctgcacttgaagcaagtcacttctttatcacaggtgtcttgaaacattagcttcttttaccaacctgagaaaattaggatgacctggcaaataagatcttgaataggccaaaagcaagtatcttgctgtgtgtagtctcttggttaaagtgaagaaacagtactgttcacacctttcttcactgagattccagtgtacatgagaacatatatttattgcatgattttctagatacacagtctatgcattattcatatacatttattttagcctaaagtggttttcaaatccagttcttcaagccataaatgaccaagatccaagcaatctgaatttgtttttgtgattatttgactggaatgcttcttaagtggaataactatactccgttatccacccgatttcctaatgtaattgaaasattttctattttgccacacacttggagacaataagggtttttagttttatctactcttctattgaagttaaagaaagaaaaaaagatttttttatttgtattaatgaaaagctttagtttaaaataaggagatccagaataaaaagaagagactgatctcttcaattattgtcatctgtagccaccagcacatcactcttatgtaatccccaaaggcttggcatgccgtaagtgtgtggtgggtagactgctgccggggaatcgtacttcttatttagtaatgataagacttttcattatttttggaattttaaagatgacataaataagtttaaatatcaatttggggagtaaggtttaatattgccatcgggtattgagacaggaggaagtttctgtttttctccatttagacataggtcaattaaaatatttgggtttaaaatgactaaatgctttaaacatattgtagcttaagatatatgtgttaagatatatacatgagaaactttaaaaggtaactactgtgcatgcctgatgcttaatagaatacttagtggcatcaaatgtttgcagcagtctccataattatattcagtcccttctaatactgtatcaatgtaaatgaaataaatatattcaaattggctttttgatatgcatcaagtggcattttgttcctgtgtttaatagtgatctgtatacagctgtgcacatattgtcatcacttattctagcatcactgttaaggctgtgattatgtttgatattcacctggattttaatacaagccaatatcagcttcccattgtgtaataacttgggtgtttaggagtcttttcacattttttggggatatgaactagatgttcaagaactccttctggactgtggatactgaatcagtgtactattggctgcagaatttgtttcaattgaaaatagactcaggaagattgctgctcagaatatcatataatgtttattttttgaggtgtttttgtttttatttgtgtgtttttttttttttaagtcagcttggaacttttttcctgggtagtatttgggagagggaaaggctgtactatatatttatttctaaatgttttgactgggcatttttcttttaatgaaatatgtggactgctctagcaaaccctattttcagctactatttgaatattcttgaacaccaccactgaagagtttcatatacaccaaataatgtctcatctctatagtacagggaatataaaattggtttcctgtggtcatgatcaagatagtagtattattacacaagaaacttggtctgcagtctggaagcttgtctgctctatagaaatgaaaatgcagcatgaagttgacattgtggaaatgaaagtaattgggtattagaaatctgaaagtactgtcatctaaaagcaattgtgattttattgtaattggttgtcactgttgtacggtgtctagaattaaagaatacatgtaaactttcatggtatttagcctttcttaaatttttttaaaatttaaactttctaacctatgtattcaacttctgtatttatatttaatcagtggttcatgttatataatacacccttaactagttaaatggaatgttggtatggtacagagtaccatattgctaagaaaactgtcttataaaagatgtatatgtgtgaagacatgaaagtttaatgtacagaatggttggagaaatgcctatggtgaattaaagcttcatatctgctttctgaatgtcc

SEQ ID NO: 3189 - DNA, 2030 bp, Homo sapiens
gccgcgcacgcgctcccgtgtagggccggccgggcgctcaggagcgcgcggggcagcggcggcgcggcggagccatccgcgctcgtgcccgcgcgggtgcgttgcygtcctggccgcgcccctgtcccgccgcctcccgctcctcgcctggcggatgtaggttgttggcctgaggggagctacgtagccgaggtttgcgctgccgccgccaggcccggtccggttccagcctctgcccggacgctagccggcctggccatggctgaccgcgggtgcccgctggaggcggcgccgctgcctgccgaggtgcgggagagcctggctgagctggagctggagctgtcggaaggtgacatcactcaaaaaggatatgaaaagaaaagggcaaagctgcttgcacgttatataccgcttattcaaggaatagacccrtctctgcaagcagagaatagaattcctgggccctcacaaaccacggccgctgcacccaagcagcagaagtctcggcccaccgcctcgagggatgagcgcttccggtcagatgtccacactgaagccgtgcaagcagctttggccaaatacaaagagaggaagatgcctatgccttcgaagagacgttctgtccttgtgcattcgtctgtggaaacctacacccctccagacacgtcgtctgcctcagaagatgagggctctttacggcgacccgggcgactcacctccactccgctccagagccattccagcgtcgagccctggctcgaccgggtcattcagggctcgtccacctcatcctctgcatcctccacctcatctcacccgggagggagasccaccactgctcccagtgctgcagccacgccgggggccgccgctaccactgcactcgcaggcctcgaggcccacacccacatagatctgcattctgcccctcctgatgtcaccacgggcctcgtggagcattcgtactttgagcgtccacaggtggcttctgtgagaagtgttcctcgggggtgcagcgggagcatgctggaaacagcagatggtgtccctgtgaacagcagagtgtcctccaaaatccagcagcttctgaacaccctgaagaggccaaagcgccctccactgaaggagttctttgtggatgattttgaggaattgttggaagttcagcaaccagatccaaatcagccaaagcctgagggaagcgagacgagtgtgctgagaggggagcctctcactgcaggtgtcccccgaccgccgtcgctgttggccaccttgcagcgctggggcacaacacagcccaaatccccctgtctgactgccttggatacaactgggaaagccgtctacactctcacctatggtaaactttggartcggagtttaaaactagcttatactctacttaataaactgacaagtaagaatgaacctctacttaaacctggagacagagtggcgctcgtgtttccgaatagtgaccctgtgatgttcatggttgcattttatgggtgtctcctggcagagctggttcctgtccccayagaagtgccattaacaagaaaggtagcaaacccatggctcaggtcccgtgtggttcgcttctgaacttgataccagcagtatcttacttccttttcactcatgtgggcaggcagcaagcagctgttttgacagaggagagaaagctagtagtcaacaggctggccaggactcaagagaaatcagatgccgttttgcctgcctctcttcttgttaatgagaggggcactgagaaccrttttgctggtgatgctcccacaccacactcttattaggtggagctgttctatcatctacatgaatttcccaacagaaatgatagccattttttcctytaatgaatagaattatgattcaataagattttgttcaacttttcctcaaaaccatatgtttatagaaaataattattatttcttagggataaatatatcattacagtgatatagctcacttctcagtggcagttttgaataaacgagatggaaatt

SEQ ID NO: 3190 - DNA, 913 bp, Homo sapiens
gccgcgcacgcgctcccgtgtagggccggccgggcgctcaggagcgcgcggggcagcggcggcgcggcggagccatccgcgctcgtgcccgcgcgggtgcgttgcygtcctggccgcgcccctgtcccgccgcctcccgctcctcgcctggcggatgtaggttgttggcctgaggggagctacgtagccgaggtttgcgctgccgccgccaggcccggtccggttccagcctctgcccggacgctagccggcctggccatggctgaccgcgggtgcccgctggaggcggcgccgctgcctgccgaggtgcgggagagcctggctgagctggagctggagctgtcggaaggtgacatcactcaaaaaggatatgaaaagaaaagggcaaagctgcttgcacgttatataccgcttattcaaggaatagacccrtctctgcaagcagagaatagaattcctgggccctcacaaaccacggccgctgcacccaagcagcagaagtctcggcccaccgcctcgagggatgagcgcttccggtcagatgtccacactgaagccgtgcaagcagctttggccaaatacaaagagaggaagatgcctatgccttcgaagagacgttctgtccttgtgcattcgtctgtggaaacctacacccctccagacacgtcgtctgcctcagaagatgagggctctttacggcgacccgggcgactcacctccactccgctccagagccattccagcgtcgagccctggctcgaccgggtcattcagggctcgtccacctcatcctctgcatcctccacctcatctcacccgggagggagasccaccactgctcccagtgctgcagccacgccgggggccgccgctaccactgcactcgcaggcctcgaggcccacacccacatag

SEQ ID NO: 3191 - DNA, 6518 bp, Homo sapiens
gccgcgcacgcgctcccgtgtagggccggccgggcgctcaggagcgcgcggggcagcggcggcgcggcggagccatccgcgctcgtgcccgcgcgggtgcgttgcygtcctggccgcgcccctgtcccgccgcctcccgctcctcgcctggcggatgtaggttgttggcctgaggggagctacgtagccgaggtttgcgctgccgccgccaggcccggtccggttccagcctctgcccggacgctagccggcctggccatggctgaccgcgggtgcccgctggaggcggcgccgctgcctgccgaggtgcgggagagcctggctgagctggagctggagctgtcggaaggtgacatcactcaaaaaggatatgaaaagaaaagggcaaagctgcttgcacgttatataccgcttattcaaggaatagacccrtctctgcaagcagagaatagaattcctgggccctcacaaaccacggccgctgcacccaagcagcagaagtctcggcccaccgcctcgagggatgagcgcttccggtcagatgtccacactgaagccgtgcaagcagctttggccaaatacaaagagaggaagatgcctatgccttcgaagagacgttctgtccttgtgcattcgtctgtggaaacctacacccctccagacacgtcgtctgcctcagaagatgagggctctttacggcgacccgggcgactcacctccactccgctccagagccattccagcgtcgagccctggctcgaccgggtcattcagggctcgtccacctcatcctctgcatcctccacctcatctcacccgggagggagasccaccactgctcccagtgctgcagccacgccgggggccgccgctaccactgcactcgcaggcctcgaggcccacacccacatagatctgcattctgcccctcctgatgtcaccacgggcctcgtggagcattcgtactttgagcgtccacaggtggcttctgtgagaagtgttcctcgggggtgcagcgggagcatgctggaaacagcagatggtgtccctgtgaacagcagagtgtcctccaaaatccagcagcttctgaacaccctgaagaggccaaagcgccctccactgaaggagttctttgtggatgattttgaggaattgttggaagatccaaatcagccaaagcctgagggaagcgagacgagtgtgctgagaggggagcctctcactgcaggtgtcccccgaccgccgtcgctgttggccaccttgcagcgctggggcacaacacagcccaaatccccctgtctgactgccttggatacaactgggaaagccgtctacactctcacctatggcaagtgtaaactttggartcggagtttaaaactagcttatactctacttaataaactgacaagtaagaatgaacctctacttaaacctggagacagagtggcgctcgtgtttccgaatagtgaccctgtgatgttcatggttgcattttatgggtgtctcctggcagagctggttcctgtccccayagaagtgccattaacaagaaaggatgcaggcagccagcaggttgggtttctgctgggcagctgtggagtcttcttggccctgaccacagacgcttgtcagaaaggcctccccaaggcacagacaggagaggtggcagctttcaaaggttggcccccgctctcctggctagtgattgatgggaagcatctagccaagcccccaaaggactggcaccctctggcccaggacacagggactgggactgcctacattgagtataaaaccagcaaagaaggcagtacggtgggggtcacagtgtcccacgcatccctgctggcacagtgccgggctctgacccaggcgtgcgggtactcagaagctgaaacattaacaaacgtgctggatttcaaaagggatgctggtctgtggcatggcgtgttaacaagcgtcatgaacaggatgcacgtggtcagcgtcccctacgcgctgatgaaggcgaacccactctcctggatccagaaagtgtgcttctataaagctcgggccgcgctggtgaagtcgcgagacatgcactggtctctcctagctcagcggggccagagggacgtcagcctcagctcactgcgcatgctgattgtggccgatggtgccaacccgtggtcgatctcctcctgtgacgccttcctcaacgtcttccagtccagaggtctgaggccagaggtcatctgtccttgtgcaagttctcctgaggcgctgactgtcgccatccgcaggccacctgatctgggaggaccacctccaagaaaagcagtcctrtcgatgaacggtctaagttatggtgttatcagagtggatactgaagaaaagttgtcagtccttactgttcaggacgttggtcaggtgatgcctggagctaatgtatgtgttgtgaagttagaaggtaccccttatctttgtaaaactgatgaagtgggagaaatatgcgtcagttccagtgcaactggcacagcgtactatggattgcttggaatcacgaagaatgtgtttgaggtttttccggtcaccacaggaggagcacccatctttgacaggccattyaccaggacaggcctgctgggcttcatygggcctgacaacctggtcttcatcgtgggcaaactggacgggctgatggtcactggagttcgcagacacaatgcagatgacgttgtggccaccgcactggccgtggagcccatgaagtttgtctacagaggcaggatcgctgtgttctctgtgaccgtgctgcacgacgaccggattgtcctggtggctgagcagcggccggatgcctcggaggaggacagcttccagtggatgagccgtgtgytgcaggccattgatagcatccaccaggtgggcgtgtactgtctggccctggttcctgccaacaccttgcccaaggctcctctcggagggattcacatttctgaaaccaaacagcgctttctggaagggacrctgcacccgtgtaatgtgctgatgtgccctcacacctgtgttaccaacctccccaaacctcgtcagaaacaaccagaggttggaccagcctcaatgatcgtggggaacctggttgctgggaagagaatcgctcaggcttccgggagagagctcgcccacctggaggacagcgaccaggcacrgaagttcctgttcctggctgacgtgctgcagtggcgtgcccacaccactcctgaccacccgctgttcttrctgctgaacgccaagggcaccgtcacaagcactgcaacctgtgtccagctgcacaaaagggctgagagagtggccgcggctctgatggagaagggaagactgagtgttggggaccatgtggctctggtctacccaccaggggtggacctcattgccgcgttctatggctgcttgtactgtggctgcgtgcctgtcaccgtgcggcccccgcaccctcagaacctcggcaccacrctgcccaccgtcaagatgatcgtggaggtcagcaagtctgcatgcgtcctcaccacgcaggctgtcacacggctgctcaggtccaaggaggctgctgctgccgtggacatcaggacctggcccaccatcctagacacagatgacatcccaaaaaagaagatagcaagcgttttcaggcccccctcccccgatgtcctcgcatacttggacttcagcgtgtcaaccactgggatattagcgggagtgaagatgtcgcacgcggccacaagcgccttatgccgctccataaagctgcagtgtgagctgtacccctcgcggcagatcgccatctgcctcgacccctactgtggccttggttttgccctgtggtgtctgtgcagtgtctactcgggacaccaatcagtgctggtgcccccgctggagctggagagcaacgtgtccctgtggctgtcggccgtcagccagtacaaggcccgcgtcaccttctgctcctactctgtgatggagatgtgcaccaagggcctaggcgcacagacgggtgtcctcaggatgaagggggtgaacctgtcatgtgtgcgcacgtgcatggtggtcgccgaggagcggcccaggattgcgctgacccagtccttctccaagctcttcaaggacctgggcctgccggcccgcgccgtaagcaccacgttcgggtgcagggtcaacgtggccatctgcctccagggcacagctggcccggaccccacaaccgtctacgtggacatgcgggcactgcgccatgacagggttcgtttggtagaacggggttctccgcacagcctgccattgatggagtctggaaagatcctccccggcgtgaaggtcatcatcgcacacaccgagaccaaaggacccttgggagactcacacctgggagagatctgggtaagcagcccccacaatgccacygggtactacaccgtttacggggaggaggcgcttcatgcygaccacttcagtgcccggctgagttttggagacacacagaccatctgggcaaggaccggctaccttggcttccttcggcgaacagagctcactgatgccagtggagggcggcacgatgcactgtatgtggttgggtctctggatgaaactctggagctcagaggcatgcggtaccaccccatcgacattgagacctctgtcatccgagcacacaggagcatcgctgagtgtgccgtattcacctggaccaacctgctggtggtggtggtggagctggatgggctagagcaggatgccctggacctggtggccctggtgaccaacgtggtgctggaggagcactacctggtcgtgggagtrgtggtcatcgtggacccaggggtgatccctatcaactctcggggtgagaagcagcgcatgcacctgcgggacggcttcctggctgaccagctggaccccatctatgtcgcctacaacatgtgagcgcagcacacyggcccaggtgccggagatgaatgagccccagcagtccaaggtgtgatgtgggaagacaccgcagagctcactcaccgggactcgcccttcctgtgctcttacagatccctctcaacaatccccgcatctccttttagaaagcacttcctgaattatttaaagaaatattttgaatctgccaagtacatttacaaaaacacggatgctggtattttaacagatggagagacaaggaaaggaaaggaaaggcctggcatgggcattgtgaggaatcacaggcaccgaggttgttctctgctgtactgcaagtttgcactttctttaggctaaaaatatagttcctgatttttaaaattcagttatttattcccacttcaaatgacaagttcatatatagaatttacgggagaaacttgagaccatttacggggagaaayttgattctgggaagatagcagagtacaaaccagctgcctcacttctgtttcacagggaggctgatggaaaaaggaagcaagctggacccatcctccctgctcacagagggcactgtggtcacacacagtgcctcctctgccagttcctttattgaaagaggtgtgctggctggccacggtggcttacacctgtaatcccagcactttgggaggccgaggcgagcagatcacgaggtcaggagaccgagaccatcctggctaacatggtgaaaccctgtctctactaaaaatacaaaaaattagccgggtgtggtggtgggcgcctgtagtcccagctacttgggaggctgaggcaggagaatggtatgaaccagggaggyggagcttgcagtgagccgagatcacgctactgcactccagcctgggtgacagcacgagatgccgtcttaaaaaaacaaaaaagaggtgtgctgcttgtcagcatgtattgtcacggacactcaataagtgccattttggactgtcaaatttagatgctttgtttcagaaagataagccagcatttagttttaaatcactttcctggtttgtaacttgatgctgtttagttaaattgctagttttcctaacactacaatattaattcttctcgtggaagtgtactgatttattatttttattccaagtcagcagatttggaagcattgtggtaaagtctaaggttttcatatccatagtgctgtttggtgagtaccggcagtacagttgaggggagcagggaacagcattgccccgtattgaaggtggagatggttacattcttcactgctttttgcattttgagttgtgtgcctataaaatttggccaaaccattttattattttgttcaaacttgactaagctgagtgatctaaaattatacagaacctaaatcaaagaagagaatgtaaagtcctttagttacttctaagaatttgaagtcaagcacgaatctaagacatagattatttttatatagctaatgaagagtatgaaacaaccaggtttttccagaattagtctggatcagtgcctaacaaagctgttattaattctccaca

SEQ ID NO: 3192 - DNA, 3075 bp, Homo sapiens
gccgcgcacgcgctcccgtgtagggccggccgggcgctcaggagcgcgcggggcagcggcggcgcggcggagccatccgcgctcgtgcccgcgcgggtgcgttgcygtcctggccgcgcccctgtcccgccgcctcccgctcctcgcctggcggatgtaggttgttggcctgaggggagctacgtagccgaggtttgcgctgccgccgccaggcccggtccggttccagcctctgcccggacgctagccggcctggccatggctgaccgcgggtgcccgctggaggcggcgccgctgcctgccgaggtgcgggagagcctggctgagctggagctggagctgtcggaaggtgacatcactcaaaaaggatatgaaaagaaaagggcaaagctgcttgcacgttatataccgcttattcaaggaatagacccrtctctgcaagcagagaatagaattcctgggccctcacaaaccacggccgctgcacccaagcagcagaagtctcggcccaccgcctcgagggatgagcgcttccggtcagatgtccacactgaagccgtgcaagcagctttggccaaatacaaagagaggaagatgcctatgccttcgaagagacgttctgtccttgtgcattcgtctgtggaaacctacacccctccagcagatctgcattctgcccctcctgatgtcaccacgggcctcgtggagcattcgtactttgagcgtccacaggtggcttctgtgagaagtgttcctcgggggtgcagcgggagcatgctggaaacagcagatggtgtccctgtgaacagcagagtgtcctccaaaatccagcagcttctgaacaccctgaagaggccaaagcgccctccactgaaggagttctttgtggatgattttgaggaattgttggaagttcagcaaccagatccaaatcagccaaagcctgagggaagcgagacgagtgtgctgagaggggagcctctcactgcaggtgtcccccgaccgccgtcgctgttggccaccttgcagcgctggggcacaacacagcccaaatccccctgtctgactgccttggatacaactgggaaagccgtctacactctcacctatggtaaactttggartcggagtttaaaactagcttatactctacttaataaactgacaagtaagaatgaacctctacttaaacctggagacagagtggcgctcgtgtttccgaatagtgaccctgtgatgttcatggttgcattttatgggtgtctcctggcagagctggttcctgtccccayagaagtgccattaacaagaaaggatgcaggcagccagcaggttgggtttctgctgggcagctgtggagtcttcttggccctgaccacagacgcttgtcagaaaggcctccccaaggcacagacaggagaggtggcagctttcaaaggttggcccccgctctcctggctagtgattgatgggaagcatctagccaagcccccaaaggactggcaccctctggcccaggacacagggactgggactgcctacattgagtataaaaccagcaaagaaggcagtacggtgggggtcacagtgtcccacgcatccctgctggcacagtgccgggctctgacccaggcgtgcgggtactcagaagctgaaacattaacaaacgtgctggatttcaaaagggatgctggtctgtggcatggcgtgttaacaagcgtcatgaacaggatgcacgtggtcagcgtcccctacgcgctgatgaaggcgaacccactctcctggatccagaaagtgtgcttctataaagctcgggccgcgctggtgaagtcgcgagacatgcactggtctctcctagctcagcggggccagagggacgtcagcctcagctcactgcgcatgctgattgtggccgatggtgccaacccgtggtcgatctcctcctgtgacgccttcctcaacgtcttccagtccagaggtctgaggccagaggtcatctgtccttgtgcaagttctcctgaggcgctgactgtcgccatccgcaggccacctgatctgggaggaccacctccaagaaaagcagtcctrtcgatgaacggtctaagttatggtgttatcagagtggatactgaagaaaagttgtcagtccttactgttcaggacgttggtcaggtgatgcctggagctaatgtatgtgttgtgaagttagaaggtaccccttatctttgtaaaactgatgaagtgggagaaatatgcgtcagttccagtgcaactggcacagcgtactatggattgcttggaatcacgaagaatgtgtttgaggcagttccggtcaccacaggaggagcacccatctttgacaggccattyaccaggacaggcctgctgggcttcatygggcctgacaacctggtcttcatcgtgggcaaactggacgggctgatggtcactggagttcgcagacacaatgcagatgacgttgtggccaccgcactggccgtggagcccatgaagtttgtctacagaggcaggatcgctgtgttctctgtgaccgtgctgcacgacgaccggattgtcctggtggctgagcagcggccggatgcctcggaggaggacagcttccagtggatgagccgtgtgytgcaggccattgatagcatccaccaggtgggcgtgtactgtctggccctggttcctgccaacaccttgcccaaggctcctctcggagggattcacatttctgaaaccaaacagcgctttctggaagggacrctgcacccgtgtaatgtgctgatgtgccctcacacctgtgttaccaacctccccaaacctcgtcagaaacaaccagaggttggaccagcctcaatgatcgtggggaacctggttgctgggaagagaatcgctcaggcttccgggagagagctcgcccacctggaggacagcgaccaggcacrgaagttcctgttcctggctgacgtgctgcagtggcgtgcccacaccactcctgaccacccgctgttcttrctgctgaacgccaagggcaccgtcacaagcactgcaacctgtgtccagctg

SEQ ID NO: 3193 - DNA, 842 bp, Homo sapiens
ctttattttactcttaagatgtcgcacgcggccacaagcgccttatgccgctccataaagctgcagtgtgagctgtacccctcgcggcagatcgccatctgcctcgacccctactgtggccttggttttgccctgtggtgtctgtgcagtgtctactcgggacaccaatcagtgctggtgcccccgctggagctggagagcaacgtgtccctgtggctgtcggccgtcagccagtacaaggcccgcgtcaccttctgctcctactctgtgatggagatgtgcaccaagggcctaggcgcacagacgggtgtcctcaggatgaagggggtgaacctgtcatgtgtgcgcacgtgcatggtggtcgccgaggagcggcccaggattgcgctgacccagtccttctccaagctcttcaaggacctgggcctgccggcccgcgccgtaagcaccacgttcgggtgcagggtcaacgtggccatctgcctccaggtgaggtgcctggggctgcggttctcgaaagctggctgttggcagcatggagacccagtttcccagttgttaatgtgccgttttgtagccgcctgatctatttctccttctctgrgcctttgatatctcatttccatgtaacattttagcttcaagggttttatttttaaagatgttctattctagttggagaaaggcttatttggaaaaaaaacacattgtttttgaacagtgactaataactgtaagactctctaagttagatataaaacacagctaagttcttaaagcaagattgaacttactgttttaagatatctagcaatattaaattgaaacattaataaatgtgg

SEQ ID NO: 3194 - DNA, 3330 bp, Homo sapiens
gccgcgcacgcgctcccgtgtagggccggccgggcgctcaggagcgcgcggggcagcggcggcgcggcggagccatccgcgctcgtgcccgcgcgggtgcgttgcygtcctggccgcgcccctgtcccgccgcctcccgctcctcgcctggcggatgtaggttgttggcctgaggggagctacgtagccgaggtttgcgctgccgccgccaggcccggtccggttccagcctctgcccggacgctagccggcctggccatggctgaccgcgggtgcccgctggaggcggcgccgctgcctgccgaggtgcgggagagcctggctgagctggagctggagctgtcggaaggtgacatcactcaaaaaggatatgaaaagaaaagggcaaagctgcttgcacgttatataccgcttattcaaggaatagacccrtctctgcaagcagagaatagaattcctgggccctcacaaaccacggccgctgcacccaagcagcagaagtctcggcccaccgcctcgagggatgagcgcttccggtcagatgtccacactgaagccgtgcaagcagctttggccaaatacaaagagaggaagatgcctatgccttcgaagagacgttctgtccttgtgcattcgtctgtggaaacctacacccctccagacacgtcgtctgcctcagaagatgagggctctttacggcgacccgggcgactcacctccactccgctccagagccattccagcgtcgagccctggctcgaccgggtcattcagggctcgtccacctcatcctctgcatcctccacctcatctcacccgggagggagasccaccactgctcccagtgctgcagccacgccgggggccgccgctaccactgcactcgcaggcctcgaggcccacacccacatagatctgcattctgcccctcctgatgtcaccacgggcctcgtggagcattcgtactttgagcgtccacaggtggcttctgtgagaagtgttcctcgggggtgcagcgggagcatgctggaaacagcagatggtgtccctgtgaacagcagagtgtcctccaaaatccagcagcttctgaacaccctgaagaggccaaagcgccctccactgaaggagttctttgtggatgattttgaggaattgttggaagttcagcaaccagatccaaatcagccaaagcctgagggaagcgagacgagtgtgctgagaggggagcctctcactgcaggtgtcccccgaccgccgtcgctgttggccaccttgcagcgctggggcacaacacagcccaaatccccctgtctgactgccttggatacaactgggaaagccgtctacactctcacctatggcaagtgtaaactttggartcggagtttaaaactagcttatactctacttaataaactgacaagtaagaatgaacctctacttaaacctggagacagagtggcgctcgtgtttccgaatagtgaccctgtgatgttcatggttgcattttatgggtgtctcctggcagagctggttcctgtccccayagaagtgccattaacaagaaaggatgcaggcagccagcaggttgggtttctgctgggcagctgtggagtcttcttggccctgaccacagacgcttgtcagaaaggcctccccaaggcacagacaggagaggtggcagctttcaaaggttggcccccgctctcctggctagtgattgatgggaagcatctagccaagcccccaaaggactggcaccctctggcccaggacacagggactgggactgcctacattgagtataaaaccagcaaagaaggcagtacggtgggggtcacagtgtcccacgcatccctgctggcacagtgccgggctctgacccaggcgtgcgggtactcagaagctgaaacattaacaaacgtgctggatttcaaaagggatgctggtctgtggcatggcgtgttaacaagcgtcatgaacaggatgcacgtggtcagcgtcccctacgcgctgatgaaggcgaacccactctcctggatccagaaagtgtgcttctataaagctcgggccgcgctggtgaagtcgcgagacatgcactggtctctcctagctcagcggggccagagggacgtcagcctcagctcactgcgcatgctgattgtggccgatggtgccaacccgtggtcgatctcctcctgtgacgccttcctcaacgtcttccagtccagaggtctgaggccagaggtcatctgtccttgtgcaagttctcctgaggcgctgactgtcgccatccgcaggccacctgatctgggaggaccacctccaagaaaagcagtcctrtcgatgaacggtctaagttatggtgttatcagagtggatactgaagaaaagttgtcagtccttactgttcaggacgttggtcaggtgatgcctggagctaatgtatgtgttgtgaagttagaaggtaccccttatctttgtaaaactgatgaagtgggagaaatatgcgtcagttccagtgcaactggcacagcgtactatggattgcttggaatcacgaagaatgtgtttgaggtttttccggtcaccacaggaggagcacccatctttgacaggccattyaccaggacaggcctgctgggcttcatygggcctgacaacctggtcttcatcgtgggcaaactggacgggctgatggtcactggagttcgcagacacaatgcagatgacgttgtggccaccgcactggccgtggagcccatgaagtttgtctacagaggcaggatcgctgtgttctctgtgaccgtgctgcacgacgaccggattgtcctggtggctgagcagcggccggatgcctcggaggaggacagcttccagtggatgagccgtgtgytgcaggccattgatagcatccaccaggtgggcgtgtactgtctggccctggttcctgccaacaccttgcccaaggctcctctcggagggattcacatttctgaaaccaaacagcgctttctggaagggacrctgcacccgtgtaatgtgctgatgtgccctcacacctgtgttaccaacctccccaaacctcgtcagaaacaaccagaggttggaccagcctcaatgatcgtggggaacctggttgctgggaagagaatcgctcaggcttccgggagagagctcgcccacctggaggacagcgaccaggcacrgaagttcctgttcctggctgacgtgctgcagtggcgtgcccacaccactcctgaccacccgctgttcttrctgctgaacgccaagggcaccgtcacaagcactgcaacctgtgtccagctg

SEQ ID NO: 3195 - DNA, 3106 bp, Homo sapiens
ccgaggcgggatccttgagcttctccggcggcgaggggatagctggttaccagaaggacttctttgcagggccagtggtttctgtcagattttcgccggtcacgactgctgaatatgagacgatctgcagcaccaagtcagttgcaggggaattccttcaaaaaaccaaaatttatacctccaggaagaagtaatccaggtctgaatgaagagattacaaaactgaatccagatataaaattatttgagggtgttgcaattaataacacctttctcccgtcacaaaatgatcttagaatatgcagtttaaatctgcctagtgaagaaagtactagagaaatcaataacagagataattgcrgtggaaaatattgttttgaagcacctacactggcaacattasatccacctcatacagtgcaaacttggatgaggaggcacaggctggtaccagttcactacagttcattcggctcctaaagaagtagcagtgtccaaggaacaagaagagaaatctgatagcctagttaaatatttcagtgttgtttggtgtaagccttcaaagaaaaaacataaaaagtgggaaggtgatgctgttcttattgtaaaaggaaagtcatttatattaaagaatttggaaggcaaagacattggaagaggcattggttataaattcaaagagcttgaaaagattgaagagggccaaacactgatgatttgtggaaaagaaatagaagtcatgggtgtaatctctccagatgacttcagcagtggcaggtgttttcagcttggaggaggaagtactgctatctcgcattcttctcaggttgccaggaaatgtttctctaaccctttcaaaagtgtttgtaaaccaagttcaaaggaaaatagacagaatgatttccaaaaytgcaaaccacgccatgacccatatacgccaaattccctcgttatgccacgaccagataagaatcaccagtgggtattcaataagaactgtttccctcttgtggatgtagtgattgatccttaccttgtatatcatcttcgaccacatcagaaagaaggaatcatattcctttatgaatgtgtaatgggaatgagaatgaatggcagatgtggagctattcttgctgatgaaatgggtttagggaagacattgcaatgtatttcrctcatctggaccctgcagtgtcagggaccctatggaggcaagccagtaataaagaagacactaattgtcacacctggaagcttggtgaataattggaagaaagaatttcaaaaatggctaggaagtgaaaggatcaagatatttactgttgatcaggaccacaaagttgaagaattcatcaagtctatattttattctgttcttattatcagttatgaaatgttacttcgttccctggatcaaattaagaatataaaatttgatcttctaatctgtgaygaggggcatcgtttgaagaacagtgccattaagacaactacagccctcattagcctttcttgtgagaaaagaataattctaactggtactccaattcagaatgatctgcaagaattttttgcattaattgattttgtaaatccaggaatattaggctctttgtcatcttataggaaaatatatgaagaacccatcattttatcgagagaaccttctgcttctgaggaagaaaaggagttaggagaaagaagagcagctgaacttacttgcctcactggactctttatccttagaagaacccaagaaattataaataaatatctcccacctaaaatagagaatgttgtcttttgccgaccaggagcactacagattgagctttatcgaaagctgttaaattctcaggttgtcaggttctgccttcaagggttgttggaaaatagtccccatctaatatgtataggagctcttaaaaaactgtgcaatcacccctgccttttgttcaactctataaaggaaaaggaatgtagctcaacttgtgataaaaatgaagaaaagagtctatacaaaggyttgctaagtgtgtttcctgctgactacaaccctctcctgtttactgaaaaggagtcaggaaaactacaggtgttgtccaagctcttagcggttatccacgaacttcgacctactgaaaaggtggtgttggtatccaactatacacaaaccttgaacattttacaagaastatgtaagcgtcatggatatgcttatacaagacttgatggacaaacaccaatctctcaaaggcagcagattgytgatggctttaacagtcaacactcttctttttttatttttttgttaagttcaaaagctggtggtgtaggacttaacctcattggaggatctcacttaattctctatgacattgattggaatccagccactgacattcaggcaatgtctagagtatggagagatggtcagaaatatcctgtacatatttacagactcctaactacaggtacaatagaagaaaagatctatcaaaggcagatcagtaagcaaggtctttgtggggcagttgtcgacctcaccaagacatctgaacatattcagttttcagtagaagaacttaaaaatttgttcacattacatgaaagttcagattgtgttactcatgatctgcttgactgtgagtgtacaggagaagaagttcatacaggtgattcgttggaaaaattcattgtctctagagattgtcagcttggtccacatcaccagaaatctaactccctgaaacctctttctatgtcccagctgaagcaatggaaacatttttctggagatcatttaaatcttacagatccttttcttgaaagaataacagaaaatgtgtcattcatttttcagaatataaccactcaagctactggcacatagtgaaagattacttctgacattccattgctcttcttttgaaaattagtatggtaattaaatgtactttttgaaaattaatagaattatttaaattacagtatatgttgcaaaatatatcacttttgatacaatagtcaaaattgagtggtttaatgttttgtaaatattaagtgtttaaatgaaaaataaagatgtgcttatatcattgtataa

SEQ ID NO: 3196 - DNA, 3050 bp, Homo sapiens
ccgaggcgggatccttgagcttctccggcggcgaggggatagctggttaccagaaggacttctttgcagggccagtggtttctgtcagattttcgccggtcacgactgctgaatatgagacgatctgcagcaccaagtcagttgcaggggaattccttcaaaaaaccaaaatttatacctccaggaagaagtaatccaggtctgaatgaagagattacaaaactgaatccagatataaaattatttgagggtgttgcaattaataacacctttctcccgtcacaaaatgatcttagaatatgcagtttaaatctgcctagtgaagaaagtactagagaaatcaataacagagataattgcrgtggaaaatattgttttgaagcacctacactggcaacattasatccacctcatacagtgcaaacttggatgaggaggcacaggctggtaccagttcactacagttcattcggctcctaaagaagtagcagtgtccaaggaacaagaagagaaatctgatagcctagttaaatatttcagtgttgtttggtgtaagccttcaaagaaaaaacataaaaagtgggaaggtgatgctgttcttattgtaaaaggaaagtcatttatattaaagaatttggaaggcaaagacattggaagaggcattggttataaattcaaagagcttgaaaagattgaagagggccaaacactgatgatttgtggaaaagaaatagaagtcatgggtgtaatctctccagatgacttcagcagtggcaggtgttttcagcttggaggaggaagtactgctatctcgcattcttctcaggttgccaggaaatgtttctctaaccctttcaaaagtgtttgtaaaccaagttcaaaggaaaatagacagaatgatttccaaaaytgcaaaccacgccatgacccatatacgccaaattccctcgttatgccacgaccagataagaatcaccagtgggtattcaataagaactgtttccctcttgtggatgtagtgattgatccttaccttgtatatcatcttcgaccacatcagaaagaaggaatcatattcctttatgaatgtgtaatgggaatgagaatgaatggcagatgtggagctattcttgctgatgaaatgggtttagggaagacattgcaatgtatttcrctcatctggaccctgcagtgtcagggaccctatggaggcaagccagtaataaagaagacactaattgtcacacctggaagcttggtgaataattggaagaaagaatttcaaaaatggctaggaagtgaaaggatcaagatatttactgttgatcagttatgaaatgttacttcgttccctggatcaaattaagaatataaaatttgatcttctaatctgtgaygaggggcatcgtttgaagaacagtgccattaagacaactacagccctcattagcctttcttgtgagaaaagaataattctaactggtactccaattcagaatgatctgcaagaattttttgcattaattgattttgtaaatccaggaatattaggctctttgtcatcttataggaaaatatatgaagaacccatcattttatcgagagaaccttctgcttctgaggaagaaaaggagttaggagaaagaagagcagctgaacttacttgcctcactggactctttatccttagaagaacccaagaaattataaataaatatctcccacctaaaatagagaatgttgtcttttgccgaccaggagcactacagattgagctttatcgaaagctgttaaattctcaggttgtcaggttctgccttcaagggttgttggaaaatagtccccatctaatatgtataggagctcttaaaaaactgtgcaatcacccctgccttttgttcaactctataaaggaaaaggaatgtagctcaacttgtgataaaaatgaagaaaagagtctatacaaaggyttgctaagtgtgtttcctgctgactacaaccctctcctgtttactgaaaaggagtcaggaaaactacaggtgttgtccaagctcttagcggttatccacgaacttcgacctactgaaaaggtggtgttggtatccaactatacacaaaccttgaacattttacaagaastatgtaagcgtcatggatatgcttatacaagacttgatggacaaacaccaatctctcaaaggcagcagattgytgatggctttaacagtcaacactcttctttttttatttttttgttaagttcaaaagctggtggtgtaggacttaacctcattggaggatctcacttaattctctatgacattgattggaatccagccactgacattcaggcaatgtctagagtatggagagatggtcagaaatatcctgtacatatttacagactcctaactacaggtacaatagaagaaaagatctatcaaaggcagatcagtaagcaaggtctttgtggggcagttgtcgacctcaccaagacatctgaacatattcagttttcagtagaagaacttaaaaatttgttcacattacatgaaagttcagattgtgttactcatgatctgcttgactgtgagtgtacaggagaagaagttcatacaggtgattcgttggaaaaattcattgtctctagagattgtcagcttggtccacatcaccagaaatctaactccctgaaacctctttctatgtcccagctgaagcaatggaaacatttttctggagatcatttaaatcttacagatccttttcttgaaagaataacagaaaatgtgtcattcatttttcagaatataaccactcaagctactggcacatagtgaaagattacttctgacattccattgctcttcttttgaaaattagtatggtaattaaatgtactttttgaaaattaatagaattatttaaattacagtatatgttgcaaaatatatcacttttgatacaatagtcaaaattgagtggtttaatgttttgtaaatattaagtgtttaaatgaaaaataaagatgtgcttatatcattgtataa

SEQ ID NO: 3197 - DNA, 1208 bp, Homo sapiens
ggtttcagaaactgcctacytaatttgaaaagaacaatggtaggaaaggctagatcttccaattttaccttatccgaaaagcttgatttgctaaagcttgtgaagccrtatgtgaaaattctcgaagaacacactaataaacattcagtaatagtagaaaagaatagatgttgggatatcatagcagttaactataatgcaattggagtagaccgccctcctcgaacagcacagggcctacgcaccctttataaaaggctcaaagaatatgccaaacaggagctattgcagcaaaaagagacccaatcagattttaaaagcaatatttctgagccaaccaagaaagttatggagatgattccccagatttccagtttttgcctggtaagagacaggaaccacatacaaagtgcaaacttggatgaggaggcacaggctggtaccagttcactacaggtaatgttggatcaccatcctgttgctattacagtggaggtgaagcaagaagaagacattaaaccacctcctccactggttttaaattctcaacagagtgatactttagagcaaagagaagaacatgaattagtacatgttatggaaagatccttgtcgccttcactttcctctgttgatatgagaatgacatcgtctccatcttctattccaaggagagatgatttttttcggcatgagagtggtgaacactttaggtcactattagggtatgatcctcagatcctgcaaatgttgaaagaggagcatcagataattttagaaaatcaaaaaaattttggattgtatgttcaggagaagagggatggattgaaaagaaggcagcagctagaggaagagctactaagagcaaaaattgaagtggagaagctgaaagcaattcgcttacggcatgatctacctgaatataacagtctctaagtttttttttcaatcttgcaatttgataattttgattttggccaaattactttaatttgggaatatcctgaaacagaatacacgttcttgaaaaatgttgttaatctctattatggaaaaactttttagatataattttctaattattttcttttgagatattaaaatttactggttggttggcatggttatagtttttattgtcttcttttttttttccctaagtttaattgttgaccttacaaaagatattttattctgatcactaagat

SEQ ID NO: 3198 - DNA, 3060 bp, Homo sapiens
ccgaggcgggatccttgagcttctccggcggcgaggggatagctggttaccagaaggacttctttgcagggccagtggtttctgtcagattttcgccggtcacgactgctgaatatgagacgatctgcagcaccaagtcagttgcaggggaattccttcaaaaaaccaaaatttatacctccaggaagaagtaatccaggtctgaatgaagagattacaaaactgaatccagatataaaattatttgagggtgttgcaattaataacacctttctcccgtcacaaaatgatcttagaatatgcagtttaaatctgcctagtgaagaaagtactagagaaatcaataacagagataattgcrgtggaaaatattgttttgaagcacctacactggcaacattasatccacctcatacagttcattcggctcctaaagaagtagcagtgtccaaggaacaagaagagaaatctgatagcctagttaaatatttcagtgttgtttggtgtaagccttcaaagaaaaaacataaaaagtgggaaggtgatgctgttcttattgtaaaaggaaagtcatttatattaaagaatttggaaggcaaagacattggaagaggcattggttataaattcaaagagcttgaaaagattgaagagggccaaacactgatgatttgtggaaaagaaatagaagtcatgggtgtaatctctccagatgacttcagcagtggcaggtgttttcagcttggaggaggaagtactgctatctcgcattcttctcaggttgccaggaaatgtttctctaaccctttcaaaagtgtttgtaaaccaagttcaaaggaaaatagacagaatgatttccaaaaytgcaaaccacgccatgacccatatacgccaaattccctcgttatgccacgaccagataagaatcaccagtgggtattcaataagaactgtttccctcttgtggatgtagtgattgatccttaccttgtatatcatcttcgaccacatcagaaagaaggaatcatattcctttatgaatgtgtaatgggaatgagaatgaatggcagatgtggagctattcttgctgatgaaatgggtttagggaagacattgcaatgtatttcrctcatctggaccctgcagtgtcagggaccctatggaggcaagccagtaataaagaagacactaattgtcacacctggaagcttggtgaataattggaagaaagaatttcaaaaatggctaggaagtgaaaggatcaagatatttactgttgatcaggaccacaaagttgaagaattcatcaagtctatattttattctgttcttattatcagttatgaaatgttacttcgttccctggatcaaattaagaatataaaatttgatcttctaatctgtgaygaggggcatcgtttgaagaacagtgccattaagacaactacagccctcattagcctttcttgtgagaaaagaataattctaactggtactccaattcagaatgatctgcaagaattttttgcattaattgattttgtaaatccaggaatattaggctctttgtcatcttataggaaaatatatgaagaacccatcattttatcgagagaaccttctgcttctgaggaagaaaaggagttaggagaaagaagagcagctgaacttacttgcctcactggactctttatccttagaagaacccaagaaattataaataaatatctcccacctaaaatagagaatgttgtcttttgccgaccaggagcactacagattgagctttatcgaaagctgttaaattctcaggttgtcaggttctgccttcaagggttgttggaaaatagtccccatctaatatgtataggagctcttaaaaaactgtgcaatcacccctgccttttgttcaactctataaaggaaaaggaatgtagctcaacttgtgataaaaatgaagaaaagagtctatacaaaggyttgctaagtgtgtttcctgctgactacaaccctctcctgtttactgaaaaggagtcaggaaaactacaggtgttgtccaagctcttagcggttatccacgaacttcgacctactgaaaaggtggtgttggtatccaactatacacaaaccttgaacattttacaagaastatgtaagcgtcatggatatgcttatacaagacttgatggacaaacaccaatctctcaaaggcagcagattgytgatggctttaacagtcaacactcttctttttttatttttttgttaagttcaaaagctggtggtgtaggacttaacctcattggaggatctcacttaattctctatgacattgattggaatccagccactgacattcaggcaatgtctagagtatggagagatggtcagaaatatcctgtacatatttacagactcctaactacaggtacaatagaagaaaagatctatcaaaggcagatcagtaagcaaggtctttgtggggcagttgtcgacctcaccaagacatctgaacatattcagttttcagtagaagaacttaaaaatttgttcacattacatgaaagttcagattgtgttactcatgatctgcttgactgtgagtgtacaggagaagaagttcatacaggtgattcgttggaaaaattcattgtctctagagattgtcagcttggtccacatcaccagaaatctaactccctgaaacctctttctatgtcccagctgaagcaatggaaacatttttctggagatcatttaaatcttacagatccttttcttgaaagaataacagaaaatgtgtcattcatttttcagaatataaccactcaagctactggcacatagtgaaagattacttctgacattccattgctcttcttttgaaaattagtatggtaattaaatgtactttttgaaaattaatagaattatttaaattacagtatatgttgcaaaatatatcacttttgatacaatagtcaaaattgagtggtttaatgttttgtaaatattaagtgtttaaatgaaaaataaagatgtgcttatatcattgtataa

SEQ ID NO: 3199 - DNA, 2636 bp, Homo sapiens
gccgagccgagccaggcgagcccccgcggcgcccaagcgcgggccccccagccgccgccgggcgcggcatttttattcaagcgagataacggagcccggccgcgcccggtgcattgtgggaacggcccgcggcccgttttcgggaggaggcggagggcgcgaagcgagctggtggatccgtaaagaacccagccaacccccagagggaggggaggggctgagctgtgaggagagcggggcacaagaaccatgtgtacgcgggagtccttttaacccagaaagttacgaattggacaggagcttctggctaaccagattcactgaactgaagggtacaggctgcaaagtgccccaagatgtcctgcaaaaatttctggaatctttacagaagaaccacttccaagaagatgagcagtttctgggagccgttatgccaaggcttggcattggaatggatacttgtgtcattcctttgaggcacggtgggctttccttggttcaaaccatagattacgtttacccgatggtagacgacccttacatgatgggcaggatagcatgtgtcagtcaatgtcctcagtgacctctacgcaacgggggtcatggaatgcgacaatatgctgatgctcctcggagtcagtaataaaatgactgacagggaaagggataaagtgatgcctcagattatccaaggttttaaagacgcagctgaagacgcaggagcgtctgtaacaggcggccaaacagttctaaacccctggattgtcctgggaggagtcgctaccactgtctgccagcccaatgaatttatcatgcagacaatgcagtgccaggagacatgctggtgtagacaaaacccctggggacacaggtggcaatggctgtgcaccagtggctggatattcctaagaaatggaataagattaaactagtggtcacccaagaagatgtagagctggcctaccaggaggcgatgatgaacatggcaaggctcaacgggacagctgccggactcatgcacacgttcaatgcccacgcggccactgacatcaagggctttgggatctggggccacgtgcagaacctggccaagcagcagaggaacgaggtgtcatttgtaattcacaacctcccggtgctggccaagatggctgcagcgagcaaggcgtgcggaaacatgttcggcctcatgcacaggacctgcccagagacctcaggcggccttctgatctgtttaccacatcagcaagcagctcggttctgtgcagagataaagtcccccaaatatggtgaaggccaccaagcatggattattgggattgtagagaagggcaactgcacagccagaatcatagacaaaccctggatcatcgaggtcgcaccacaagtggccacccaaaatatgaatcccacacggggccacctcttaatctagacagaaatagctgtttggttttgtttttaaatagacctatttcctttatcatcacttcaattaaagactataaacaacagaaatctcattgtgtctacacatcgggtgaccttaggtcggtttgtaagtggatacaattaataaaataaaatccgtcacctttttttcctgttacattaactgaagatgcacccaatcttgaggcagcttctgagttgagaattatattgttatccaatactgttgattcattttgaatctttagacacttatctcttgctgcataggctctttttaaaggtgctttcacatagcacagacattaccagtagtcttgtcaaatagcagttggtgtcttcattttatgtatatttatcataagtctgattttttttaagcgtcttgaatggttttctggagagacagcattgataagtggcacatgacggtatctcagtcataagagggttgcatgattcctttgaatgtttgatttggaaaagcctagtcttgtctctcaagagcatctcagacccagaacattctctagtagtgcactcagttaaacagggcaagtgcttcactgcatggaaaacactttgaagagacaaaaaagaaatcttatttcttttttgtagcctttctgatatttacaatartaccactaactgttttctttatcgatagcaaagaacgatactttttgcaatgtaattagaygttctatagtgctacaaggaaatgccttccaaaaggaggctcatgtataatactcatttacaaaatatataattacgcaaataaattttaaatataatcaataataaagactgttctgtggatgttagtgtttaatacattttctattttgtacagtgatttcaggccttttgttttcttgaaatcagcagatatttagcctaattcttagcattattttgtcctttgcaccagtacttttttgtgcacrctttttgtgatctgtgttaaaaacctgcatggccaacattgcagctccaacttaaacttgttattcaaataaatatttaattttttaaattgctcttgtataatcagattccccttttagtattattttagaagcattgggagggttttgcctaaagtacaatttattgggaaaaactagattttagttttataaaacttttaagtctttcatgggacctatatttaggtg

SEQ ID NO: 3200 - DNA, 1415 bp, Homo sapiens
gccgagccgagccaggcgagcccccgcggcgcccaagcgcgggccccccagccgccgccgggcgcggcatttttattcaagcgagataacggagcccggccgcgcccggtgcattgtgggaacggcccgcggcccgttttcgggaggaggcggagggcgcgaagcgagctggtggatccgtaaagaacccagccaacccccagagggaggggaggggctgagctgtgaggagagcggggcacaagaaccatgtgtacgcgggagtccttttaacccagaaagttacgaattggacaggagcttctggctaaccagattcactgaactgaagggtacaggctgcaaagtgccccaagatgtcctgcaaaaatttctggaatctttacagaagaaccacttccaagaagatgagcagtttctgggagccgttatgccaaggcttggcattggaatggatacttgtgtcattcctttgaggcacggtgggctttccttggttcaaaccatagattacgtttacccgatggtagacgacccttacatgatgggcaggatagcatgtgtcagtcaatgtcctcagtgacctctacgcaacgggggtcatggaatgcgacaatatgctgatgctcctcggagtcagtaataaaatgactgacagggaaagggataaagtgatgcctcagattatccaaggttttaaagacgcagctgaagacgcaggagcgtctgtaacaggcggccaaacagttctaaacccctggattgtcctgggaggagtcgctaccactgtctgccagcccaatgaatttatcatgcagacaatgcagtgccaggagacatgctggtgtagacaaaacccctggggacacaggtggcaatggctgtgcaccagtggctggatattcctaagaaatggaataagattaaactagtggtcacccaagaagatgtagagctggcctaccaggaggcgatgatgaacatggcaaggctcaacgggacagctgccggactcatgcacacgttcaatgcccacgcggccactgacatcaagggctttgggatctggggccacgtgcagaacctggccaagcagcagaggaacgaggtgtcatttgtaattcacaacctcccggtgctggccaagatggctgcagcgagcaaggcgtgcggaaacatgttcggcctcatgcacaggacctgcccagagacctcaggcggccttctgatctgtttaccacatcagcaagcagctcggttctgtgcagagataaagtcccccaaatatggtgaaggccaccaagcatggattattgggattgtagagaagggcaactgcacagccagaatcatagacaaaccctggatcatcgaggtcgcaccacaagtggccacccaaaatatgaatcccacac

SEQ ID NO: 3201 - DNA, 464 bp, Homo sapiens
tttatgtataaacaggtaccagttttgattttatttaatcatttcatacattaacatacatgacacatcaaaatgagaaataaaaacctgagatacgaggcagcaactagcgacacttacaggaagggaaagaacaatgacaacacccgcccagccccacccccaaaaagctgctgttgtgaattaaggcttcaaaagaggacccacaytgtagctgataaaactcaagccaggaggatgtttgaaagccaatctgcactatcacttgttccagtgacctcctatgttcagctgccaggaccgattccatacagtgattgtaggttgaggactgaggacgcccctttgctctcgctccattttgatttgctttttccactgaagacacgccggccagcgtttccaaaaacagcttggccatggctttgcactctattcacaactgatcaaaactcaatggtctt

SEQ ID NO: 3202 - DNA, 3073 bp, Homo sapiens
ccgtcccgagcacagctcccaggtcgcggggctgcagcccaggccgcgtccgcagcgcccgggcaggaacagacgccgagactcccgcagcatgacccgccacgccgatcggatggcaaggaggagctcgttccagtcgtgtcagataatatccctgttcacttttgccgttggagtcaatatctgcttaggattcactgcacatcgaattaagagagcagaaggatgggaggaaggtcctcctacagtgctatcagactccccctggaccaacatctccggatcttgcaagggcaggtgctttgaacttcaagaggctggacctcctgattgtcgctgtgacaacttgtgtaagagctataccagttgctgccatgactttgatgagctgtgtttgaagacagcccgtggctgggagtgtactaaggacagatgtggagaagtcagaaatgaagaaaatgcctgtcactgctcagaggactgcttggccaggggagactgctgtaccaattaccaagtggtttgcaaaggagagtcgcattgggttgatgatgactgtgaggaaataaaggccgcagaatgccctgcagggtttgttcgccctccattaatcatcttctccgtggatggcttccgtgcatcatacatgaagaaaggcagcaaagtcatgcctaatattgaaaaactaaggtcttgtggcacacactctccctacatgaggccggtgtacccaactaaaacctttcctaacttatacactttggccactgggctatatccagaatcacatggaattgttggcaattcaatgtatgatcctgtatttgatgccacttttcatctgcgagggcgagagaaatttaatcatagatggtggggaggtcaaccgctatggattacagccaccaagcaaggggtgaaagctggaacattcttttggtctgttgtcatccctcacgagcggagaatattaaccatattgcagtggctcaccctgccagatcatgagaggccttcggtctatgccttctattctgagcaacctgatttctctggacacaaatatggccctttcggccctgaggagagtagttatggctcaccttttactccggctaagagacctaagaggaaagttgcccctaagaggagacaggaaagaccagttgctcctccaaagaaaagaagaagaaaaatacataggatggatcattatgctgcggaaactcgtcaggacaaaatgacaaatcctctgagggaaatcgacaaaattgtggggcaattaatggatggactgaaacaactaaaactgcatcggtgtgtcaacgtcatctttgtcggagaccatggaatggaagatgtcacatgtgatagaactgagttcttgagtaattacctaactaatgtggatgatattactttagtgcctggaactctaggaagaattcgatccaaatttagcaacaatgctaaatatgaccccaaagccattattgccaatctcacgtgtaaaaaaccagatcagcactttaagccttacttgaaacagcaccttcccaaacgtttgcactatgccaacaacaraagaattgaggatatccatttattggtggaacgcagatggcatgttgcaaggaaacctttggatgtttataagaaaccatcaggaaaatgctttttccagggagaccacggatttgataacaaggtcaacagcatgcagactgtttttgtaggttatggcycaacatttaagtacaagactaaagtgcctccatttgaaaacattgaactttacaatgttatgtgtgatctcctgggattgaagccagctcctaataatgggacccayggaagtttgaatcatctcctgcgcactaataccttcaggccaaccatgccagaggaagttaccagacccaattatccagggattatgtaccttcagtctgattttgacctgggctgcacttgtgatgataaggtagagccaaagarcaagttggatgaactcaacaaacggcttcatacaaaagggtctacagaagagagacacctcctctatgggcgacctgcagtgctttatcggactagatatgatatcttatatcacastgactttgaaagtggttatagtgaaatattcctaatgccactctggacatcatatactgtttccaaacaggctgaggtttccagcgttcctgaccatctgaccagttgcgtccggcctgatgtccgtgtttctccgagtttcagtcagaactgtttggcctacaaaaatgataagcagatgtcctacggattcctctttcctccttatctgagctcttcaccagaggctaaatatgatgcattccttgtaaccaatatggttccaatgtatcctgctttcaaacgggtctggaattatttccaaagggtattggtgaagaaatatgcttyggaaagaaatggagttaacgtgataagtggaccaatcttcgactatgactatgatggcttacatgacacagaagacaaaataaaacagtacgtggaaggcagttccattcctgttccaactcactactacagcatcatcaccagctgtctggatttyactcagcctgccgacaagtgtgacggccctctctctgtgtcctycttcatcctgcctcaccggcctgacaaygaggagagctgcaatagctcagaggacgaatcaaaatgggtagaagaactcatgaagatgcacacagctmgggtgcgtgacattgaacatctcaccagcctggacttcttccgaaagaccagcygcagctacccagaaatcctgacactcaagacatacctgcatacatatgagagcgagatttaactttctgagcatmtgcagtacagtcttatcaactggttgtatatttttatattgtttttgtatttattaatttgaaaccaggacrttaaaaattccactgtttttctctaatgcttgatttaggtagccttgtgttctgagtagagcttgtaataaatactgcagcttgagtttttagtggaagcttctaaatggtgctgcagatttgatatt

SEQ ID NO: 3203 - DNA, 2990 bp, Homo sapiens
ccgtcccgagcacagctcccaggtcgcggggctgcagcccaggccgcgtccgcagcgcccgggcaggaacagacgccgagactcccgcagcatgacccgccacgccgatcggatggcaaggaggagctcgttccagtcgtgtcagataatatccctgttcacttttgccgttggagtcaatatctgcttaggattcactgcacatcgaattaagagagcagaaggatgggaggaaggtcctcctacagcccgtggctgggagtgtactaaggacagatgtggagaagtcagaaatgaagaaaatgcctgtcactgctcagaggactgcttggccaggggagactgctgtaccaattaccaagtggtttgcaaaggagagtcgcattgggttgatgatgactgtgaggaaataaaggccgcagaatgccctgcagggtttgttcgccctccattaatcatcttctccgtggatggcttccgtgcatcatacatgaagaaaggcagcaaagtcatgcctaatattgaaaaactaaggtcttgtggcacacactctccctacatgaggccggtgtacccaactaaaacctttcctaacttatacactttggccactgggctatatccagaatcacatggaattgttggcaattcaatgtatgatcctgtatttgatgccacttttcatctgcgagggcgagagaaatttaatcatagatggtggggaggtcaaccgctatggattacagccaccaagcaaggggtgaaagctggaacattcttttggtctgttgtcatccctcacgagcggagaatattaaccatattgcagtggctcaccctgccagatcatgagaggccttcggtctatgccttctattctgagcaacctgatttctctggacacaaatatggccctttcggccctgagatgacaaatcctctgagggaaatcgacaaaattgtggggcaattaatggatggactgaaacaactaaaactgcatcggtgtgtcaacgtcatctttgtcggagaccatggaatggaagatgtcacatgtgatagaactgagttcttgagtaattacctaactaatgtggatgatattactttagtgcctggaactctaggaagaattcgatccaaatttagcaacaatgctaaatatgaccccaaagccattattgccaatctcacgtgtaaaaaaccagatcagcactttaagccttacttgaaacagcaccttcccaaacgtttgcactatgccaacaacaraagaattgaggatatccatttattggtggaacgcagatggcatgttgcaaggaaacctttggatgtttataagaaaccatcaggaaaatgctttttccagggagaccacggatttgataacaaggtcaacagcatgcagactgtttttgtaggttatggcycaacatttaagtacaagactaaagtgcctccatttgaaaacattgaactttacaatgttatgtgtgatctcctgggattgaagccagctcctaataatgggacccayggaagtttgaatcatctcctgcgcactaataccttcaggccaaccatgccagaggaagttaccagacccaattatccagggattatgtaccttcagtctgattttgacctgggctgcacttgtgatgataaggtagagccaaagarcaagttggatgaactcaacaaacggcttcatacaaaagggtctacagaagagagacacctcctctatgggcgacctgcagtgctttatcggactagatatgatatcttatatcacastgactttgaaagtggttatagtgaaatattcctaatgccactctggacatcatatactgtttccaaacaggctgaggtttccagcgttcctgaccatctgaccagttgcgtccggcctgatgtccgtgtttctccgagtttcagtcagaactgtttggcctacaaaaatgataagcagatgtcctacggattcctctttcctccttatctgagctcttcaccagaggctaaatatgatgcattccttgtaaccaatatggttccaatgtatcctgctttcaaacgggtctggaattatttccaaagggtattggtgaagaaatatgcttyggaaagaaatggagttaacgtgataagtggaccaatcttcgactatgactatgatggcttacatgacacagaagacaaaataaaacagtacgtggaaggcagttccattcctgttccaactcactactacagcatcatcaccagctgtctggatttyactcagcctgccgacaagtgtgacggccctctctctgtgtcctycttcatcctgcctcaccggcctgacaaygaggagagctgcaatagctcagaggacgaatcaaaatgggtagaagaactcatgaagatgcacacagctmgggtgcgtgacattgaacatctcaccagcctggacttcttccgaaagaccagcygcagctacccagaaatcctgacactcaagacatacctgcatacatatgagagcgagatttaactttctgagcatmtgcagtacagtcttatcaactggttgtatatttttatattgtttttgtatttattaatttgaaaccaggacrttaaaaatgttagtattttaatcctgtaccaaatctgacatattatgcctgaatgactccactgtttttctctaatgcttgatttaggtagccttgtgttctgagtagagcttgtaataaatactgcagcttgagtttttagtggaagcttctaaatggtgctgcagatttgatatttgcattgaggaaatattaattttccaatgcacagttgccacatttagtcctgtactgtatggaaacactgattttgtaaagttgcctttatttgctgttaactgttaactatgacagatatatttaagccttataaaccaatcttaaacataataaatcacacattcagttttttctggt

SEQ ID NO: 3204 - DNA, 3252 bp, Homo sapiens
agcagtgcactccgtgaaggcaaagagaacacgctgcaaaaggctttccaagaatcctcgacatggcaaggaggagctcgttccagtcgtgtcagataatatccctgttcacttttgccgttggagtcaatatctgcttaggattcactgcacatcgaattaagagagcagaaggatgggaggaaggtcctcctacagtgctatcagactccccctggaccaacatctccggatcttgcaagggcaggtgctttgaacttcaagaggctggacctcctgattgtcgctgtgacaacttgtgtaagagctataccagttgctgccatgactttgatgagctgtgtttgaagacagcccgtggctgggagtgtactaaggacagatgtggagaagtcagaaatgaagaaaatgcctgtcactgctcagaggactgcttggccaggggagactgctgtaccaattaccaagtggtttgcaaaggagagtcgcattgggttgatgatgactgtgaggaaataaaggccgcagaatgccctgcagggtttgttcgccctccattaatcatcttctccgtggatggcttccgtgcatcatacatgaagaaaggcagcaaagtcatgcctaatattgaaaaactaaggtcttgtggcacacactctccctacatgaggccggtgtacccaactaaaacctttcctaacttatacactttggccactgggctatatccagaatcacatggaattgttggcaattcaatgtatgatcctgtatttgatgccacttttcatctgcgagggcgagagaaatttaatcatagatggtggggaggtcaaccgctatggattacagccaccaagcaaggggtgaaagctggaacattcttttggtctgttgtcatccctcacgagcggagaatattaaccatattgcagtggctcaccctgccagatcatgagaggccttcggtctatgccttctattctgagcaacctgatttctctggacacaaatatggccctttcggccctgaggagagtagttatggctcaccttttactccggctaagagacctaagaggaaagttgcccctaagaggagacaggaaagaccagttgctcctccaaagaaaagaagaagaaaaatacataggatggatcattatgctgcggaaactcgtcaggacaaaatgacaaatcctctgagggaaatcgacaaaattgtggggcaattaatggatggactgaaacaactaaaactgcatcggtgtgtcaacgtcatctttgtcggagaccatggaatggaagatgtcacatgtgatagaactgagttcttgagtaattacctaactaatgtggatgatattactttagtgcctggaactctaggaagaattcgatccaaatttagcaacaatgctaaatatgaccccaaagccattattgccaatctcacgtgtaaaaaaccagatcagcactttaagccttacttgaaacagcaccttcccaaacgtttgcactatgccaacaacaraagaattgaggatatccatttattggtggaacgcagatggcatgttgcaaggaaacctttggatgtttataagaaaccatcaggaaaatgctttttccagggagaccacggatttgataacaaggtcaacagcatgcagactgtttttgtaggttatggcycaacatttaagtacaagactaaagtgcctccatttgaaaacattgaactttacaatgttatgtgtgatctcctgggattgaagccagctcctaataatgggacccayggaagtttgaatcatctcctgcgcactaataccttcaggccaaccatgccagaggaagttaccagacccaattatccagggattatgtaccttcagtctgattttgacctgggctgcacttgtgatgataaggtagagccaaagarcaagttggatgaactcaacaaacggcttcatacaaaagggtctacagaagagagacacctcctctatgggcgacctgcagtgctttatcggactagatatgatatcttatatcacastgactttgaaagtggttatagtgaaatattcctaatgccactctggacatcatatactgtttccaaacaggctgaggtttccagcgttcctgaccatctgaccagttgcgtccggcctgatgtccgtgtttctccgagtttcagtcagaactgtttggcctacaaaaatgataagcagatgtcctacggattcctctttcctccttatctgagctcttcaccagaggctaaatatgatgcattccttgtaaccaatatggttccaatgtatcctgctttcaaacgggtctggaattatttccaaagggtattggtgaagaaatatgcttyggaaagaaatggagttaacgtgataagtggaccaatcttcgactatgactatgatggcttacatgacacagaagacaaaataaaacagtacgtggaaggcagttccattcctgttccaactcactactacagcatcatcaccagctgtctggatttyactcagcctgccgacaagtgtgacggccctctctctgtgtcctycttcatcctgcctcaccggcctgacaaygaggagagctgcaatagctcagaggacgaatcaaaatgggtagaagaactcatgaagatgcacacagctmgggtgcgtgacattgaacatctcaccagcctggacttcttccgaaagaccagcygcagctacccagaaatcctgacactcaagacatacctgcatacatatgagagcgagatttaactttctgagcatmtgcagtacagtcttatcaactggttgtatatttttatattgtttttgtatttattaatttgaaaccaggacrttaaaaatgttagtattttaatcctgtaccaaatctgacatattatgcctgaatgactccactgtttttctctaatgcttgatttaggtagccttgtgttctgagtagagcttgtaataaatactgcagcttgagtttttagtggaagcttctaaatggtgctgcagatttgatatttgcattgaggaaatattaattttccaatgcacagttgccacatttagtcctgtactgtatggaaacactgattttgtaaagttgcctttatttgctgttaactgttaactatgacagatatatttaagccttataaaccaatcttaaacataataaatcacacattcagttttttctggt

SEQ ID NO: 3205 - DNA, 2917 bp, Homo sapiens
ccgtcccgagcacagctcccaggtcgcggggctgcagcccaggccgcgtccgcagcgcccgggcaggaacagacgccgagactcccgcagcatgacccgccacgccgatcggatggcaaggaggagctcgttccagtcgtgtcagataatatccctgttcacttttgccgttggagtcaatatctgcttaggattcactgcacatcgaattaagagagcagaaggatgggaggaaggtcctcctacagtgctatcagactccccctggaccaacatctccggatcttgcaagggcaggtgctttgaacttcaagaggctggacctcctgattgtcgctgtgacaacttgtgtaagagctataccagttgctgccatgactttgatgagctgtgtttgaagacagcccgtggctgggagtgtactaaggacagatgtggagaagtcagaaatgaagaaaatgcctgtcactgctcagaggactgcttggccaggggagactgctgtaccaattaccaagtggtttgcaaaggagagtcgcattgggttgatgatgactgtgaggaaataaaggccgcagaatgccctgcagggtttgttcgccctccattaatcatcttctccgtggatggcttccgtgcatcatacatgaagaaaggcagcaaagtcatgcctaatattgaaaaactaaggtcttgtggcacacactctccctacatgaggccggtgtacccaactaaaacctttcctaacttatacactttggccactgggctatatccagaatcacatggaattgttggcaattcaatgtatgatcctgtatttgatgccacttttcatctgcgagggcgagagaaatttaatcatagatggtggggaggtcaaccgctatggattacagccaccaagcaaggggtgaaagctggaacattcttttggtctgttgtcatccctcacgagcggagaatattaaccatattgcagtggctcaccctgccagatcatgagaggccttcggtctatgccttctattctgagcaacctgatttctctggacacaaatatggccctttcggccctgagatgacaaatcctctgagggaaatcgacaaaattgtggggcaattaatggatggactgaaacaactaaaactgcatcggtgtgtcaacgtcatctttgtcggagaccatggaatggaagatgtcacatgtgatagaactgagttcttgagtaattacctaactaatgtggatgatattactttagtgcctggaactctaggaagaattcgatccaaatttagcaacaatgctaaatatgaccccaaagccattattgccaatctcacgtgtaaaaaaccagatcagcactttaagccttacttgaaacagcaccttcccaaacgtttgcactatgccaacaacaraagaattgaggatatccatttattggtggaacgcagatggcatgttgcaaggaaacctttggatgtttataagaaaccatcaggaaaatgctttttccagggagaccacggatttgataacaaggtcaacagcatgcagactgtttttgtaggttatggcycaacatttaagtacaagactaaagtgcctccatttgaaaacattgaactttacaatgttatgtgtgatctcctgggattgaagccagctcctaataatgggacccayggaagtttgaatcatctcctgcgcactaataccttcaggccaaccatgccagaggaagttaccagacccaattatccagggattatgtaccttcagtctgattttgacctgggctgcacttgtgatgataaggtagagccaaagarcaagttggatgaactcaacaaacggcttcatacaaaagggtctacagaagagagacacctcctctatgggcgacctgcagtgctttatcggactagatatgatatcttatatcacastgactttgaaagtggttatagtgaaatattcctaatgccactctggacatcatatactgtttccaaacaggctgaggtttccagcgttcctgaccatctgaccagttgcgtccggcctgatgtccgtgtttctccgagtttcagtcagaactgtttggcctacaaaaatgataagcagatgtcctacggattcctctttcctccttatctgagctcttcaccagaggctaaatatgatgcattccttgtaaccaatatggttccaatgtatcctgctttcaaacgggtctggaattatttccaaagggtattggtgaagaaatatgcttyggaaagaaatggagttaacgtgataagtggaccaatcttcgactatgactatgatggcttacatgacacagaagacaaaataaaacagtacgtggaaggcagttccattcctgttccaactcactactacagcatcatcaccagctgtctggatttyactcagcctgccgacaagtgtgacggccctctctctgtgtcctycttcatcctgcctcaccggcctgacaaygaggagagctgcaatagctcagaggacgaatcaaaatgggtagaagaactcatgaagatgcacacagctmgggtgcgtgacattgaacatctcaccagcctggacttcttccgaaagaccagcygcagctacccagaaatcctgacactcaagacatacctgcatacatatgagagcgagatttaactttctgagcatmtgcagtacagtcttatcaactggttgtatatttttatattgtttttgtatttattaatttgaaaccaggacrttaaaaattccactgtttttctctaatgcttgatttaggtagccttgtgttctgagtagagcttgtaataaatactgcagcttgagtttttagtggaagcttctaaatggtgctgcagatttgatatt

SEQ ID NO: 3206 - DNA, 3096 bp, Homo sapiens
agcagtgcactccgtgaaggcaaagagaacacgctgcaaaaggctttccaagaatcctcgacatggcaaggaggagctcgttccagtcgtgtcagataatatccctgttcacttttgccgttggagtcaatatctgcttaggattcactgcacatcgaattaagagagcagaaggatgggaggaaggtcctcctacagtgctatcagactccccctggaccaacatctccggatcttgcaagggcaggtgctttgaacttcaagaggctggacctcctgattgtcgctgtgacaacttgtgtaagagctataccagttgctgccatgactttgatgagctgtgtttgaagacagcccgtggctgggagtgtactaaggacagatgtggagaagtcagaaatgaagaaaatgcctgtcactgctcagaggactgcttggccaggggagactgctgtaccaattaccaagtggtttgcaaaggagagtcgcattgggttgatgatgactgtgaggaaataaaggccgcagaatgccctgcagggtttgttcgccctccattaatcatcttctccgtggatggcttccgtgcatcatacatgaagaaaggcagcaaagtcatgcctaatattgaaaaactaaggtcttgtggcacacactctccctacatgaggccggtgtacccaactaaaacctttcctaacttatacactttggccactgggctatatccagaatcacatggaattgttggcaattcaatgtatgatcctgtatttgatgccacttttcatctgcgagggcgagagaaatttaatcatagatggtggggaggtcaaccgctatggattacagccaccaagcaaggggtgaaagctggaacattcttttggtctgttgtcatccctcacgagcggagaatattaaccatattgcagtggctcaccctgccagatcatgagaggccttcggtctatgccttctattctgagcaacctgatttctctggacacaaatatggccctttcggccctgagatgacaaatcctctgagggaaatcgacaaaattgtggggcaattaatggatggactgaaacaactaaaactgcatcggtgtgtcaacgtcatctttgtcggagaccatggaatggaagatgtcacatgtgatagaactgagttcttgagtaattacctaactaatgtggatgatattactttagtgcctggaactctaggaagaattcgatccaaatttagcaacaatgctaaatatgaccccaaagccattattgccaatctcacgtgtaaaaaaccagatcagcactttaagccttacttgaaacagcaccttcccaaacgtttgcactatgccaacaacaraagaattgaggatatccatttattggtggaacgcagatggcatgttgcaaggaaacctttggatgtttataagaaaccatcaggaaaatgctttttccagggagaccacggatttgataacaaggtcaacagcatgcagactgtttttgtaggttatggcycaacatttaagtacaagactaaagtgcctccatttgaaaacattgaactttacaatgttatgtgtgatctcctgggattgaagccagctcctaataatgggacccayggaagtttgaatcatctcctgcgcactaataccttcaggccaaccatgccagaggaagttaccagacccaattatccagggattatgtaccttcagtctgattttgacctgggctgcacttgtgatgataaggtagagccaaagarcaagttggatgaactcaacaaacggcttcatacaaaagggtctacagaagagagacacctcctctatgggcgacctgcagtgctttatcggactagatatgatatcttatatcacastgactttgaaagtggttatagtgaaatattcctaatgccactctggacatcatatactgtttccaaacaggctgaggtttccagcgttcctgaccatctgaccagttgcgtccggcctgatgtccgtgtttctccgagtttcagtcagaactgtttggcctacaaaaatgataagcagatgtcctacggattcctctttcctccttatctgagctcttcaccagaggctaaatatgatgcattccttgtaaccaatatggttccaatgtatcctgctttcaaacgggtctggaattatttccaaagggtattggtgaagaaatatgcttyggaaagaaatggagttaacgtgataagtggaccaatcttcgactatgactatgatggcttacatgacacagaagacaaaataaaacagtacgtggaaggcagttccattcctgttccaactcactactacagcatcatcaccagctgtctggatttyactcagcctgccgacaagtgtgacggccctctctctgtgtcctycttcatcctgcctcaccggcctgacaaygaggagagctgcaatagctcagaggacgaatcaaaatgggtagaagaactcatgaagatgcacacagctmgggtgcgtgacattgaacatctcaccagcctggacttcttccgaaagaccagcygcagctacccagaaatcctgacactcaagacatacctgcatacatatgagagcgagatttaactttctgagcatmtgcagtacagtcttatcaactggttgtatatttttatattgtttttgtatttattaatttgaaaccaggacrttaaaaatgttagtattttaatcctgtaccaaatctgacatattatgcctgaatgactccactgtttttctctaatgcttgatttaggtagccttgtgttctgagtagagcttgtaataaatactgcagcttgagtttttagtggaagcttctaaatggtgctgcagatttgatatttgcattgaggaaatattaattttccaatgcacagttgccacatttagtcctgtactgtatggaaacactgattttgtaaagttgcctttatttgctgttaactgttaactatgacagatatatttaagccttataaaccaatcttaaacataataaatcacacattcagttttttctggt

SEQ ID NO: 3207 - DNA, 3555 bp, Homo sapiens
actcccgagtagcggaaagatctgctcgaggcctgggtgctttggtgtcggagatccgagagtcggmgatcggagagtcggacacaggacagtcggacaccggacagtcaaacaccggagagttagacygggcttctcggtggggagaggctctgggataactactgttacagctttgaagggtcaagggaggattggccaccaaagcctgtttattagcagctgccatttgttgaaagaaatttggattattttagaaacaaatttggaaagaaaaagaatggcgtccgtttcagctctaactgaggaactggattctataaccagtgagctacatgcagtagaaattcaaattcaagaacttacggaaaggcaacaagagcttattcagaaaaaaaaagtcctgacaaagaaaataaagcagtgtttagaggattctgatgccggggcaagcaatgaatatgattcttcacctgccgcttggaataaagaagattttccatggtctggtaaagttaaagatattctgcaaaatgtctttaaactggaaaagttcagaccacttcagcttgaaactattaacrtaacaatggctggaaaggaggtatttcttgttatgcctacaggaggtggaaagagcttatgttaccagttaccagcattatgttcagatggttttacactcgtcatttgcccattgatctctcttatggaagaccaattaatggttttaaaacaattaggaatttcagcaaccatgttaaatgcttctagttctaaggagcatgttaaatgggttcatgctgaaatggtaaataaaaactccgagttaaagctgatttatgtgactccagagaaaattgcaaaaagcaaaatgtttatgtcaagactagagaaagcctatgaagcaaggagatttactcgaattgctgtggatgaagttcactgctgtagtcagtggggacatgatttcagacctgattataaggcacttggtatcttaaagcggcagttccctaacgcatcactaattgggctgactgcaactgcaacaaatcacgttttgacggatgctcagaaaattttgtgcattgaaaagtgttttacttttacagcttcttttaataggccaaatctatattatgaggttcggcagaagccctcaaacactgaagattttattgaggatattgtaaagctcattaatgggagatacaaagggcaatcaggaatcatatattgtttttctcagaaagactctgaacaagttacggttagtttgcagaatctgggaattcatgcaggtgcttaccatgccaatttggagccagaagataagaccacagttcatagaaaatggtcagccaatgaaattcaggtagtagtggcaactgttgcatttggtatgggaattgataagccagatgtgaggtttgttatccatcattcaatgagtaaatccatggaaaattattaccaagagagtggacgtgcaggtcgagatgacatgaaagcagactgtattttgtactacggctttggagatatattcagaataagttcaatggtggtgatggaaaatgtgggacagcagaagctttatgagatggtatcatactgtcaaaacataagcaaatgtcgtcgtgtgttgatggctcaacattttgatgaagtatggaactcagaagcatgtaacaaaatgtgcgataactgctgtaaagacagtgcatttgaaagaamgaacataacagagtactgcagasatctaatcaagatcctgaagcaggcagaggaactgaatgaaaaactcactccattgaaactgattgattcttggatgggaaagggtgcagcaaaactgagagtagcaggtgttgtggctcccacacttcctcgtgaagatctggagaagattattgcacactttctaatacagcagtatcttaaaraagactacagttttacagcttatgctaccatttcktatttgaaaataggacctaaagctaaycttctgaacaatgaggcacatgctattactatgcaagtgacaaagtccacrcagaactctttcagggctgaatcgtctcaaacttgtcattctgaacaaggtgataaaaagatggaggaaaaaaattcaggcaacttccagaagaaggctgcaaacatgcttcagcaatctggttctaagaatacaggagctaagaaaagaaaaatcgatgatgcctgacatgaatgttactaaattttctaattaaagatggtttatgcatgtatatgccactatttttgtagttagacaatagtttttaaaagaatttcatagatattttatatgtatggatctatattttcagagcttatctctgaagatctaaacttttgagaatgtttgaaaattagagatcacgattatataattttccagtataaaacaagggaaaaatttttatgtaaaaccctttaattgtaaaatatttgagaataagttcatataattgtcttaagttttttatgcctttatatacttagctatattttttcttttgacataactatctttttgaaagcaatattatactgacagaggctcaatgagtgatactttaagttaaatatgtagatcagggatgtccaatcttttggcttccctgagccacattggaagaagaattgtcttgggcctcacataaaatatgctaacactgatgacagctgatgagcttaaaaaaaaaattgcaagaaaaatctcatgttttaagaaagtttacaaaaaatgtaaaatatttgagaataagtccatataattgtcttaagttttttatgcctttatatacttagctatattttttcttttgacataactatctttttgaaagcaatattacactgacagaggctcactgagtgatactttaagttaaatatgtagatcagggatgtccaatcttttggcttccctgagccacattggaagaagaattgtcttgggccgcacataaaacatgctaacactgacgatagctgataagcttaaaaaaaaattgcaagaaaaatctcaagttttaagaaagtttacaaatttgtgttgggctgcattcaaagctgtcctgggctgcattcgacccgtgggctagagttggacaagcttgtagatgatttcaggttataaaaccagaagtacaattcaacaaaaaaggagtaagtcatcaatataaatattagcaaacgagatattgctacatctctatttaaagtaaaatacaaccgattttaaagttcctgaaaccacagccatattttgacatttcacaaagaatggttctaatctactagagtacatttggctaaatagataacttacctaaatttgctccaaagctaaatcacaagtaaacatatttatgtttaaaacacagaaataaataacttaagatttttatccaagtggtcagtgttgtattggaaagatatatctataaataaactttgaactgatttcaaacttagaatttatgtttttatatttttccactaatatcattatcacttctg

SEQ ID NO: 3208 - DNA, 3110 bp, Homo sapiens
actcccgagtagcggaaagatctgctcgaggcctgggtgctttggtgtcggagatccgagagtcggmgatcggagagtcggacacaggacagtcggacaccggacagtcaaacaccggagagttagacygggcttctcggtggggagaggctctgggataactactgttacagctttgaagggtcaagggaggattggccaccaaagcctgtttattagcagctgccatttgttgaaagaaatttggattattttagaaacaaatttggaaagaaaaagaatggcgtccgtttcagctctaactgaggaactggattctataaccagtgagctacatgcagtagaaattcaaattcaagaacttacggaaaggcaacaagagcttattcagaaaaaaaaagtcctgacaaagaaaataaagcagtgtttagaggattctgatgccggggcaagcaatgaatatgattcttcacctgccgcttggaataaagaagattttccatggtctggtaaagttaaagatattctgcaaaatgtctttaaactggaaaagttcagaccacttcagcttgaaactattaacrtaacaatggctggaaaggaggtatttcttgttatgcctacaggaggtggaaagagcttatgttaccagttaccagcattatgttcagatggttttacactcgtcatttgcccattgatctctcttatggaagaccaattaatggttttaaaacaattaggaatttcagcaaccatgttaaatgcttctagttctaaggagcatgttaaatgggttcatgctgaaatggtaaataaaaactccgagttaaagctgatttatgtgactccagagaaaattgcaaaaagcaaaatgtttatgtcaagactagagaaagcctatgaagcaaggagatttactcgaattgctgtggatgaagttcactgctgtagtcagtggggacatgatttcagacctgattataaggcacttggtatcttaaagcggcagttccctaacgcatcactaattgggctgactgcaactgcaacaaatcacgttttgacggatgctcagaaaattttgtgcattgaaaagtgttttacttttacagcttcttttaataggccaaatctatattatgaggttcggcagaagccctcaaacactgaagattttattgaggatattgtaaagctcattaatgggagatacaaagggcaatcaggaatcatatattgtttttctcagaaagactctgaacaagttacggttagtttgcagaatctgggaattcatgcaggtgcttaccatgccaatttggagccagaagataagaccacagttcatagaaaatggtcagccaatgaaattcaggtagtagtggcaactgttgcatttggtatgggaattgataagccagatgtgaggtttgttatccatcattcaatgagtaaatccatggaaaattattaccaagagagtggacgtgcaggtcgagatgacatgaaagcagactgtattttgtactacggctttggagatatattcagaataagttcaatggtggtgatggaaaatgtgggacagcagaagctttatgagatggtatcatactgtcaaaacataagcaaatgtcgtcgtgtgttgatggctcaacattttgatgaagtatggaactcagaagcatgtaacaaaatgtgcgataactgctgtaaagacagtgcatttgaaagaamgaacataacagagtactgcagasatctaatcaagatcctgaagcaggcagaggaactgaatgaaaaactcactccattgaaactgattgattcttggatgggaaagggtgcagcaaaactgagagtagcaggtgttgtggctcccacacttcctcgtgaagatctggagaagattattgcacactttctaatacagcagtatcttaaaraagactacagttttacagcttatgctaccatttcktatttgaaaataggacctaaagctaaycttctgaacaatgaggcacatgctattactatgcaagtgacaaagtccacrcagaactctttcagggctgaatcgtctcaaacttgtcattctgaacaaggtgataaaaagatggaggaaaaaaattcaggcaacttccagaagaaggctgcaaacatgcttcagcaatctggttctaagaatacaggagctaagaaaagaaaaatcgatgatgcctgacatgaatgttactaaattttctaattaaagatggtttatgcatgtatatgccactatttttgtagttagacaatagtttttaaaagaatttcatagatattttatatgtatggatctatattttcagagcttatctctgaagatctaaacttttgagaatgtttgaaaattagagatcacgattatataattttccagtataaaacaagggaaaaatttttatgtaaaaccctttaattgtaaaatatttgagaataagttcatataattgtcttaagttttttatgcctttatatacttagctatattttttcttttgacataactatctttttgaaagcaatattatactgacagaggctcaatgagtgatactttaagttaaatatgtagatcagggatgtccaatcttttggcttccctgagccacattggaagaagaattgtcttgggcctcacataaaatatgctaacactgatgacagctgatgagcttaaaaaaaaaattgcaagaaaaatctcatgttttaagaaagtttacaaaaaatgtaaaatatttgagaataagtccatataattgtcttaagttttttatgcctttatatacttagctatattttttcttttgacataactatctttttgaaagcaatattacactgacagaggctcactgagtgatactttaagttaaatatgtagatcagggatgtccaatcttttggcttccctgagccacattggaagaagaattgtcttgggccgcacataaaacatgctaacactgacgatagctgataagcttaaaaaaaaatgtagatgatttcaggttataaaaccagaagtacaattcaacaaaaaaggagtaagtcatcaatat

SEQ ID NO: 3209 - DNA, 3746 bp, Homo sapiens
gagtagcggaaagatctgctcgaggcctgggtgctttggtgtcggagatccgagagtcggmgatcggagagtcggacacaggacagtcggacaccggacagtcaaacaccggagagttagacygggcttctcggtggggagaggctctgggataactactgttacagctttgaagggtcaagggtgtgcgctttttgtttcatccttccctttcctgctgcagggcgaggccggtctgtagcggatcacttcctttcgcccacacattggcggaggagaaaccggaaagttaatcactgccctgctctgagaactcgggcctttaggggcacgttcgcctgctgaccggtcttctgatctccccattcttttccatgcaggaggattggccaccaaagcctgtttattagcagctgccatttgttgaaagaaatttggattattttagaaacaaatttggaaagaaaaagaatggcgtccgtttcagctctaactgaggaactggattctataaccagtgagctacatgcagtagaaattcaaattcaagaacttacggaaaggcaacaagagcttattcagaaaaaaaaagtcctgacaaagaaaataaagcagtgtttagaggattctgatgccggggcaagcaatgaatatgattcttcacctgccgcttggaataaagaagattttccatggtctggtaaagttaaagatattctgcaaaatgtctttaaactggaaaagttcagaccacttcagcttgaaactattaacrtaacaatggctggaaaggaggtatttcttgttatgcctacaggaggtggaaagagcttatgttaccagttaccagcattatgttcagatggttttacactcgtcatttgcccattgatctctcttatggaagaccaattaatggttttaaaacaattaggaatttcagcaaccatgttaaatgcttctagttctaaggagcatgttaaatgggttcatgctgaaatggtaaataaaaactccgagttaaagctgatttatgtgactccagagaaaattgcaaaaagcaaaatgtttatgtcaagactagagaaagcctatgaagcaaggagatttactcgaattgctgtggatgaagttcactgctgtagtcagtggggacatgatttcagacctgattataaggcacttggtatcttaaagcggcagttccctaacgcatcactaattgggctgactgcaactgcaacaaatcacgttttgacggatgctcagaaaattttgtgcattgaaaagtgttttacttttacagcttcttttaataggccaaatctatattatgaggttcggcagaagccctcaaacactgaagattttattgaggatattgtaaagctcattaatgggagatacaaagggcaatcaggaatcatatattgtttttctcagaaagactctgaacaagttacggttagtttgcagaatctgggaattcatgcaggtgcttaccatgccaatttggagccagaagataagaccacagttcatagaaaatggtcagccaatgaaattcaggtagtagtggcaactgttgcatttggtatgggaattgataagccagatgtgaggtttgttatccatcattcaatgagtaaatccatggaaaattattaccaagagagtggacgtgcaggtcgagatgacatgaaagcagactgtattttgtactacggctttggagatatattcagaataagttcaatggtggtgatggaaaatgtgggacagcagaagctttatgagatggtatcatactgtcaaaacataagcaaatgtcgtcgtgtgttgatggctcaacattttgatgaagtatggaactcagaagcatgtaacaaaatgtgcgataactgctgtaaagacagtgcatttgaaagaamgaacataacagagtactgcagasatctaatcaagatcctgaagcaggcagaggaactgaatgaaaaactcactccattgaaactgattgattcttggatgggaaagggtgcagcaaaactgagagtagcaggtgttgtggctcccacacttcctcgtgaagatctggagaagattattgcacactttctaatacagcagtatcttaaaraagactacagttttacagcttatgctaccatttcktatttgaaaataggacctaaagctaaycttctgaacaatgaggcacatgctattactatgcaagtgacaaagtccacrcagaactctttcagggctgaatcgtctcaaacttgtcattctgaacaaggtgataaaaagatggaggaaaaaaattcaggcaacttccagaagaaggctgcaaacatgcttcagcaatctggttctaagaatacaggagctaagaaaagaaaaatcgatgatgcctgacatgaatgttactaaattttctaattaaagatggtttatgcatgtatatgccactatttttgtagttagacaatagtttttaaaagaatttcatagatattttatatgtatggatctatattttcagagcttatctctgaagatctaaacttttgagaatgtttgaaaattagagatcacgattatataattttccagtataaaacaagggaaaaatttttatgtaaaaccctttaattgtaaaatatttgagaataagttcatataattgtcttaagttttttatgcctttatatacttagctatattttttcttttgacataactatctttttgaaagcaatattatactgacagaggctcaatgagtgatactttaagttaaatatgtagatcagggatgtccaatcttttggcttccctgagccacattggaagaagaattgtcttgggcctcacataaaatatgctaacactgatgacagctgatgagcttaaaaaaaaaattgcaagaaaaatctcatgttttaagaaagtttacaaaaaatgtaaaatatttgagaataagtccatataattgtcttaagttttttatgcctttatatacttagctatattttttcttttgacataactatctttttgaaagcaatattacactgacagaggctcactgagtgatactttaagttaaatatgtagatcagggatgtccaatcttttggcttccctgagccacattggaagaagaattgtcttgggccgcacataaaacatgctaacactgacgatagctgataagcttaaaaaaaaattgcaagaaaaatctcaagttttaagaaagtttacaaatttgtgttgggctgcattcaaagctgtcctgggctgcattcgacccgtgggctagagttggacaagcttgtagatgatttcaggttataaaaccagaagtacaattcaacaaaaaaggagtaagtcatcaatataaatattagcaaacgagatattgctacatctctatttaaagtaaaatacaaccgattttaaagttcctgaaaccacagccatattttgacatttcacaaagaatggttctaatctactagagtacatttggctaaatagataacttacctaaatttgctccaaagctaaatcacaagtaaacatatttatgtttaaaacacagaaataaataacttaagatttttatccaagtggtcagtgttgtattggaaagatatatctataaataaactttgaactgatttcaaacttagaatttatgtttttatatttttccactaatatcattatcacttctg

SEQ ID NO: 3210 - DNA, 3202 bp, Homo sapiens
aaagatctgctcgaggcctgggtgctttggtgtcggagatccgagagtcggmgatcggagagtcggacacaggacagtcggacaccggacagtcaaacaccggagagttagacygggcttctcgggcgaggccggtctgtagcggatcacttcctttcgcccacacattggcggaggagaaaccggaaagttaatcactgccctgctctgagaactcgggcctttaggggcacgttcgcctgctgaccggtcttctgatctccccattcttttccatgcaggaggattggccaccaaagcctgtttattagcagctgccatttgttgaaagaaatttggattattttagaaacaaatttggaaagaaaaagaatggcgtccgtttcagctctaactgaggaactggattctataaccagtgagctacatgcagtagaaattcaaattcaagaacttacggaaaggcaacaagagcttattcagaaaaaaaaagtcctgacaaagaaaataaagcagtgtttagaggattctgatgccggggcaagcaatgaatatgattcttcacctgccgcttggaataaagaagattttccatggtctggtaaagttaaagatattctgcaaaatgtctttaaactggaaaagttcagaccacttcagcttgaaactattaacrtaacaatggctggaaaggaggtatttcttgttatgcctacaggaggtggaaagagcttatgttaccagttaccagcattatgttcagatggttttacactcgtcatttgcccattgatctctcttatggaagaccaattaatggttttaaaacaattaggaatttcagcaaccatgttaaatgcttctagttctaaggagcatgttaaatgggttcatgctgaaatggtaaataaaaactccgagttaaagctgatttatgtgactccagagaaaattgcaaaaagcaaaatgtttatgtcaagactagagaaagcctatgaagcaaggagatttactcgaattgctgtggatgaagttcactgctgtagtcagtggggacatgatttcagacctgattataaggcacttggtatcttaaagcggcagttccctaacgcatcactaattgggctgactgcaactgcaacaaatcacgttttgacggatgctcagaaaattttgtgcattgaaaagtgttttacttttacagcttcttttaataggccaaatctatattatgaggttcggcagaagccctcaaacactgaagattttattgaggatattgtaaagctcattaatgggagatacaaagggcaatcaggaatcatatattgtttttctcagaaagactctgaacaagttacggttagtttgcagaatctgggaattcatgcaggtgcttaccatgccaatttggagccagaagataagaccacagttcatagaaaatggtcagccaatgaaattcaggtagtagtggcaactgttgcatttggtatgggaattgataagccagatgtgaggtttgttatccatcattcaatgagtaaatccatggaaaattattaccaagagagtggacgtgcaggtcgagatgacatgaaagcagactgtattttgtactacggctttggagatatattcagaataagttcaatggtggtgatggaaaatgtgggacagcagaagctttatgagatggtatcatactgtcaaaacataagcaaatgtcgtcgtgtgttgatggctcaacattttgatgaagtatggaactcagaagcatgtaacaaaatgtgcgataactgctgtaaagacagtgcatttgaaagaamgaacataacagagtactgcagasatctaatcaagatcctgaagcaggcagaggaactgaatgaaaaactcactccattgaaactgattgattcttggatgggaaagggtgcagcaaaactgagagtagcaggtgttgtggctcccacacttcctcgtgaagatctggagaagattattgcacactttctaatacagcagtatcttaaaraagactacagttttacagcttatgctaccatttcktatttgaaaataggacctaaagctaaycttctgaacaatgaggcacatgctattactatgcaagtgacaaagtccacrcagaactctttcagggctgaatcgtctcaaacttgtcattctgaacaaggtgataaaaagatggaggaaaaaaattcaggcaacttccagaagaaggctgcaaacatgcttcagcaatctggttctaagaatacaggagctaagaaaagaaaaatcgatgatgcctgacatgaatgttactaaattttctaattaaagatggtttatgcatgtatatgccactatttttgtagttagacaatagtttttaaaagaatttcatagatattttatatgtatggatctatattttcagagcttatctctgaagatctaaacttttgagaatgtttgaaaattagagatcacgattatataattttccagtataaaacaagggaaaaatttttatgtaaaaccctttaattgtaaaatatttgagaataagttcatataattgtcttaagttttttatgcctttatatacttagctatattttttcttttgacataactatctttttgaaagcaatattatactgacagaggctcaatgagtgatactttaagttaaatatgtagatcagggatgtccaatcttttggcttccctgagccacattggaagaagaattgtcttgggcctcacataaaatatgctaacactgatgacagctgatgagcttaaaaaaaaaattgcaagaaaaatctcatgttttaagaaagtttacaaaaaatgtaaaatatttgagaataagtccatataattgtcttaagttttttatgcctttatatacttagctatattttttcttttgacataactatctttttgaaagcaatattacactgacagaggctcactgagtgatactttaagttaaatatgtagatcagggatgtccaatcttttggcttccctgagccacattggaagaagaattgtcttgggccgcacataaaacatgctaacactgacgatagctgataagcttaaaaaaaaatgtagatgatttcaggttataaaaccagaagtacaattcaacaaaaaaggagtaagtcatcaatat

SEQ ID NO: 3211 - DNA, 2053 bp, Homo sapiens
ggggaagagaggcacagacacagataggagaagggcaccggctggagccacttgcaggacwgagggtttttgcaacaaaaccctascagcctgaagaactctaagccagatggggtggctggacgagagcagctcttggctcagcaaagaatgcacagtatgatcagctcagtggatgtgaagtcagaagttcctgtgggcctggagcccatctcacctttagacctaaggacagacctcaggatgatgatgcccgtggtggaccctgttgtccgtgagaagcaattgcagcaggaattacttcttatccagcagcagcaacaaatccagaagcagcttctgatagcagagtttcagaaacagcatgagaacttgacacggcagcaccaggctcagcttcaggagcatatcaaggaacttctagccataaaacagcaacaagaactcctagaaaaggagcagaaactggagcagcagaggcaagaacaggaagtagagaggcatcgcagagaacagcagcttcctcctctcagaggcaaagatagaggacgagaaagggcagtggcaagtacagaagtaaagcagaagcttcaagagttcctaytgagtaaatcagcaacgaaagacactccaactaatggaaaaaatcattccgtgagccgccatcccaagctctggtacacggctgcccaccacacatcattggatcaaagctctccaccccttagtggaacatctccatcctacaagtacacattaccaggagcacaagatgcaaaggatgatttcccccttcgaaaaactgcctctgagcccaacttgaaggtgcggtccaggttaaaacagaaagtggcagagaggagaagcagccccttactcaggcggaaggatggaaatgttgtcacttcattcaagaagcgaatgtttgaggtgacagaatcctcagtcagtagcagttctccaggctctggtcccagttcaccaaacaatgggccaactggaagtgttactgaaaatgagacttcggttttgccccctacccctcatgccgagcaaatggtttcacagcaacgcattctaattcatgaagattccatgaacctgctaagtctttatacctctccttctttgcccaacattaccttggggcttcccgcagtgccatcccagctcaatgcttcgaattcactcaaagaaaagcagaagtgtgagacgcagacgcttaggcaaggtgttcctctgcctgggcagtatggaggcagcatcccggcatcttccagccaccctcatgttactttagagggaaagccwcccaacagcagccaccaggctctcctgcagcatttattattgaaagaacaaatgcgacagcaaaagcttcttgtagctggtggagttcccttacatcctcagtctcccttggcaacaaaagagagaatttcacctggcattagaggtacccacaaattgccccgtcacagacccctgaaccgaacccagtctgcacctttgcctcagagcacgttggctcagctggtcattcaacagcaacaccagcaattcttggagaagcagaagcaataccagcagcagatccacatgaacaaacctttcctggaacccacgcacacacgtgcgctctctgtgcgccaagctccgctggctgcggttggcatggatggattagagaaacaccgtctcgtctccaggactcactcttcccctgctgcctctgttttacctcacccrgcaatggaccgccccctccagcctggctctgcaactggaattgcctatgaccccttgatgctgaaacaccagtgccgaattcaaggtcgaaaagccagcctggaggaaatacagcttgttcattctgaacatcactcactgttgtatggcaccaaccccctggacggacagaagctggaccccaggatactcctaggtggacagtgacaccatttggaatgagctacactcgtccggtgctgcacgcatggctgttggctgtgtcatcgagctggcttccaaagtggcctcaggagagctgaag

SEQ ID NO: 3212 - DNA, 4550 bp, Homo sapiens
gccgctttcgccgcggtctcctcctctagcgcccgccgcggccggtaaatctcggctggaggagcagcggcggcccccgagtcaactttcattccctttttgcttctgcctcaccattctcttctcctcctcgaaagatggctgtttggagaagggggagaagttaagaggtcgccagcgcggagcgaaggagggcgcgatagcctcagcaggagcgggcggaggtttctcctctgccaacccctcctggaccattgtcagcagttgaacgacaaaggctgtgaatctgcatcctagtcttagcagtccctctgattctcatgatgagctcacctgcacagcctggggagtacctggtaaaatgctgtggtgtatggagacagttatgagaaactggagggaggatgatagttgagagatggggtggctggacgagagcagctcttggctcagcaaagaatgcacagtatgatcagctcagagtggatgtgaagtcagaagttcctgtgggcctggagcccatctcacctttagacctaaggacagacctcaggatgatgatgcccgtggtggaccctgttgtccgtgagaagcaattgcagcaggaattacttcttatccagcagcagcaacaaatccagaagcagcttctgatagcagagtttcagaaacagcatgagaacttgacacggcagcaccaggctcagcttcaggagcatatcaaggaacttctagccataaaacagcaacaagaactcctagaaaaggagcagaaactggagcagcagaggcaagaacaggaagtagagaggcatcgcagagaacagcagcttcctcctctcagaggcaaagatagaggacgagaaagggcagtggcaagtacagaagtaaagcagaagcttcaagagttcctaytgagtaaatcagcaacgaaagacactccaactaatggaaaaaatcattccgtgagccgccatcccaagctctggtacacggctgcccaccacacatcattggatcaaagctctccaccccttagtggaacatctccatcctacaagtacacattaccaggagcacaagatgcaaaggatgatttcccccttcgaaaaactgcctctgagcccaacttgaaggtgcggtccaggttaaaacagaaagtggcagagaggagaagcagccccttactcaggcggaaggatggaaatgttgtcacttcattcaagaagcgaatgtttgaggtgacagaatcctcagtcagtagcagttctccaggctctggtcccagttcaccaaacaatgggccaactggaagtgttactgaaaatgagacttcggttttgccccctacccctcatgccgagcaaatggtttcacagcaacgcattctaattcatgaagattccatgaacctgctaagtctttatacctctccttctttgcccaacattaccttggggcttcccgcagtgccatcccagctcaatgcttcgaattcactcaaagaaaagcagaagtgtgagacgcagacgcttaggcaaggtgttcctctgcctgggcagtatggaggcagcatcccggcatcttccagccaccctcatgttactttagagggaaagccwcccaacagcagccaccaggctctcctgcagcatttattattgaaagaacaaatgcgacagcaaaagcttcttgtagctggtggagttcccttacatcctcagtctcccttggcaacaaaagagagaatttcacctggcattagaggtacccacaaattgccccgtcacagacccctgaaccgaacccagtctgcacctttgcctcagagcacgttggctcagctggtcattcaacagcaacaccagcaattcttggagaagcagaagcaataccagcagcagatccacatgaacaaactgctttcgaaatctattgaacaactgaagcaaccaggcagtcaccttgaggaagcagaggaagagcttcagggggaccaggcgatgcaggaagacagagcgccctctagtggcaacagcactaggagygacagcagtgcttgtgtggatgacacactgggacaagttggggctgtgaaggtcaaggaggaaccagtggacagtgatgaagatgctcagatccaggaaatggaatctggggagcaggctgcttttatgcaacaggtaataggcaaagatttagctccaggatttgtaattaaagtcattatctgaacatgaaatgcattgyaggtttggtaaatggatatgatttcctatcagtttatatttctctatgatttgagttcagtgtttaaggattctacctaatgcagatatatgtatatatctatatagaggtctttctatatactgatctctatatagatatcaatgtttcattgaaaatccactggtaaggaaatacctgttatactaaaattatgatacataatatctgagcagttaataggctttaaatttatcccaaagcctgctacaccaattacttctaaagaaaacaaattcactgttattttgagtttatgtgttgagatcagtgactgctggatagtctcccagtctgatcaatgaagcattcgattagtttttgattttttgcaacatctagaatttaattttcacatcactgtacataatgtatcatactatagtcttgaacactgttaaaggtagtctgccccttccttcctctctctttttttagttaagtagaaatgttctggtcaccatgccagtagtcctaggttattgtgtaggttgcaattgaacatattaggaatacaggtggttttaaatatatagatgcaaattgcagcactactttaaatattagattatgtctcacatagcactgctcattttacttttattttgtgtaatttgatgacactgtctatcaaaaaagagcaaatgaagcagatgcaaatgttagtgagaagtaatgtgcagcattatggtccaatcagatacaatattgtrtctacaattgcaaaaaacacagtaacaggatgaatattatctgatatcaagtcaaaatcagtttgaaaagaaggtgtatcatattttatattgtcactagaatctcttaagtataattccataatgacatgggcatataccgtaacattctggcaaataacaattagaaaagataggtttaacaaaaaaatttacttgtatataatgcaccttcaggaggactatgtcctttgatgctataaaatacaaacaactttgaaggcaacagaagacactgtttattcaagtcagttctttgtcaggttcctgctgttctcctacagaaaagtgattctgtgagggtgaacaggaaatgccttgtggaaacaggaagtccaagtgattcatgtactgaggaatgtaggaaaaaaaatctgaggatagtgctttactctttctgtttttaaagggcactctatgaattgatttattgtctaagaaaataacaccacaagtagggaaattgttacggaagcttttcactggaacatttccttcatattcccttttgatatgtttaccttgttttataggtttacttttgttaagctagttaaaggttcgttgtattaagacccctttaatatggataatccaaattgacctagaatctttgtgaggttttttctattaaaatatttatatttctaaatccgaggtatttcaaggtgtagtatcctatttcaaaggagatatagcagttttgccaaatgtagacattgttcaactgtatgttattggcacgtgttgtttacattttgctgtgacatttaaaaatatttctttaaaaatgttactgctaaagatacattatccttttttaaaaagtctccattcaaattaaattaacataactagaagttagaaagtttaaaagttttccayataatgaaagtccttctgataatttgacaaatagctataataggaacactccctatcaccaacatattttggttagtatattccttcatattaaaatgactttttgtcagttgttttgcattaaaaatatggcatgcctaagataaaattgtatattttttccatctcataaatattcattttcttcaaagtcttttttcaatctcataaaaaagggatagtgcatcttttaaaatacattttatttggggaggaacatgtggctgagcagacttttgtataatattacttcaaagatatgtaatcacaaacaaaaaaaactattttttataatgtcatttgagagagtttcatcagtacagttggtggacgttaattgtttgaatttgatagtctttgaatttaatcaagaaactacctggaaccagtgaaaaggaaagctggacttaaataatcttagaattaattgataaatgtctcttttaaaatctactgtatttattataatttacacccttgaaggtgatctcttgttttgtgttgtaaatatattgtttgtatgtttcccttcttgccttctgttataagtctcttcctttctcaaataaagttttttttaaaaga

SEQ ID NO: 3213 - DNA, 4195 bp, Homo sapiens
gtgggagaaccaggggaagactgtcagctacgattttctctagcctcaagaagactgagaccgagccaaactcctggccaacgtgctttgtggattcacagtgtagctygagaaaaatgtggatgtgaagtcagaagttcctgtgggcctggagcccatctcacctttagacctaaggacagacctcaggatgatgatgcccgtggtggaccctgttgtccgtgagaagcaattgcagcaggaattacttcttatccagcagcagcaacaaatccagaagcagcttctgatagcagagtttcagaaacagcatgagaacttgacacggcagcaccaggctcagcttcaggagcatatcaagttgcaacaggaacttctagccataaaacagcaacaagaactcctagaaaaggagcagaaactggagcagcagaggcaagaacaggaagtagagaggcatcgcagagaacagcagcttcctcctctcagaggcaaagatagaggacgagaaagggcagtggcaagtacagaagtaaagcagaagcttcaagagttcctaytgagtaaatcagcaacgaaagacactccaactaatggaaaaaatcattccgtgagccgccatcccaagctctggtacacggctgcccaccacacatcattggatcaaagctctccaccccttagtggaacatctccatcctacaagtacacattaccaggagcacaagatgcaaaggatgatttcccccttcgaaaaactgcctctgagcccaacttgaaggtgcggtccaggttaaaacagaaagtggcagagaggagaagcagccccttactcaggcggaaggatggaaatgttgtcacttcattcaagaagcgaatgtttgaggtgacagaatcctcagtcagtagcagttctccaggctctggtcccagttcaccaaacaatgggccaactggaagtgttactgaaaatgagacttcggttttgccccctacccctcatgccgagcaaatggtttcacagcaacgcattctaattcatgaagattccatgaacctgctaagtctttatacctctccttctttgcccaacattaccttggggcttcccgcagtgccatcccagctcaatgcttcgaattcactcaaagaaaagcagaagtgtgagacgcagacgcttaggcaaggtgttcctctgcctgggcagtatggaggcagcatcccggcatcttccagccaccctcatgttactttagagggaaagccwcccaacagcagccaccaggctctcctgcagcatttattattgaaagaacaaatgcgacagcaaaagcttcttgtagctggtggagttcccttacatcctcagtctcccttggcaacaaaagagagaatttcacctggcattagaggtacccacaaattgccccgtcacagacccctgaaccgaacccagtctgcacctttgcctcagagcacgttggctcagctggtcattcaacagcaacaccagcaattcttggagaagcagaagcaataccagcagcagatccacatgaacaaactgctttcgaaatctattgaacaactgaagcaaccaggcagtcaccttgaggaagcagaggaagagcttcagggggaccaggcgatgcaggaagacagagcgccctctagtggcaacagcactaggagygacagcagtgcttgtgtggatgacacactgggacaagttggggctgtgaaggtcaaggaggaaccagtggacagtgatgaagatgctcagatccaggaaatggaatctggggagcaggctgcttttatgcaacaggtaataggcaaagatttagctccaggatttgtaattaaagtcattatctgaacatgaaatgcattgyaggtttggtaaatggatatgatttcctatcagtttatatttctctatgatttgagttcagtgtttaaggattctacctaatgcagatatatgtatatatctatatagaggtctttctatatactgatctctatatagatatcaatgtttcattgaaaatccactggtaaggaaatacctgttatactaaaattatgatacataatatctgagcagttaataggctttaaatttatcccaaagcctgctacaccaattacttctaaagaaaacaaattcactgttattttgagtttatgtgttgagatcagtgactgctggatagtctcccagtctgatcaatgaagcattcgattagtttttgattttttgcaacatctagaatttaattttcacatcactgtacataatgtatcatactatagtcttgaacactgttaaaggtagtctgccccttccttcctctctctttttttagttaagtagaaatgttctggtcaccatgccagtagtcctaggttattgtgtaggttgcaattgaacatattaggaatacaggtggttttaaatatatagatgcaaattgcagcactactttaaatattagattatgtctcacatagcactgctcattttacttttattttgtgtaatttgatgacactgtctatcaaaaaagagcaaatgaagcagatgcaaatgttagtgagaagtaatgtgcagcattatggtccaatcagatacaatattgtrtctacaattgcaaaaaacacagtaacaggatgaatattatctgatatcaagtcaaaatcagtttgaaaagaaggtgtatcatattttatattgtcactagaatctcttaagtataattccataatgacatgggcatataccgtaacattctggcaaataacaattagaaaagataggtttaacaaaaaaatttacttgtatataatgcaccttcaggaggactatgtcctttgatgctataaaatacaaacaactttgaaggcaacagaagacactgtttattcaagtcagttctttgtcaggttcctgctgttctcctacagaaaagtgattctgtgagggtgaacaggaaatgccttgtggaaacaggaagtccaagtgattcatgtactgaggaatgtaggaaaaaaaatctgaggatagtgctttactctttctgtttttaaagggcactctatgaattgatttattgtctaagaaaataacaccacaagtagggaaattgttacggaagcttttcactggaacatttccttcatattcccttttgatatgtttaccttgttttataggtttacttttgttaagctagttaaaggttcgttgtattaagacccctttaatatggataatccaaattgacctagaatctttgtgaggttttttctattaaaatatttatatttctaaatccgaggtatttcaaggtgtagtatcctatttcaaaggagatatagcagttttgccaaatgtagacattgttcaactgtatgttattggcacgtgttgtttacattttgctgtgacatttaaaaatatttctttaaaaatgttactgctaaagatacattatccttttttaaaaagtctccattcaaattaaattaacataactagaagttagaaagtttaaaagttttccayataatgaaagtccttctgataatttgacaaatagctataataggaacactccctatcaccaacatattttggttagtatattccttcatattaaaatgactttttgtcagttgttttgcattaaaaatatggcatgcctaagataaaattgtatattttttccatctcataaatattcattttcttcaaagtcttttttcaatctcataaaaaagggatagtgcatcttttaaaatacattttatttggggaggaacatgtggctgagcagacttttgtataatattacttcaaagatatgtaatcacaaacaaaaaaaactattttttataatgtcatttgagagagtttcatcagtacagttggtggacgttaattgtttgaatttgatagtctttgaatttaatcaagaaactacctggaaccagtgaaaaggaaagctggacttaaataatcttagaattaattgataaatgtctcttttaaaatctactgtatttattataatttacacccttgaaggtgatctcttgttttgtgttgtaaatatattgtttgtatgtttcccttcttgccttctgttataagtctcttcctttctcaaataaagttttttttaaaaga

SEQ ID NO: 3214 - DNA, 4298 bp, Homo sapiens
ggggaagagaggcacagacacagataggagaagggcaccggctggagccacttgcaggacwgagggtttttgcaacaaaaccctascagcctgaagaactctaagccagatggggtggctggacgagagcagctcttggctcagcaaagaatgcacagtatgatcagctcagttgaactatgggtgttgactttcttttcatgaagataatatatctgtttaaatactaattggatgtgaagtcagaagttcctgtgggcctggagcccatctcacctttagacctaaggacagacctcaggatgatgatgcccgtggtggaccctgttgtccgtgagaagcaattgcagcaggaattacttcttatccagcagcagcaacaaatccagaagcagcttctgatagcagagtttcagaaacagcatgagaacttgacacggcagcaccaggctcagcttcaggagcatatcaaggaacttctagccataaaacagcaacaagaactcctagaaaaggagcagaaactggagcagcagaggcaagaacaggaagtagagaggcatcgcagagaacagcagcttcctcctctcagaggcaaagatagaggacgagaaagggcagtggcaagtacagaagtaaagcagaagcttcaagagttcctaytgagtaaatcagcaacgaaagacactccaactaatggaaaaaatcattccgtgagccgccatcccaagctctggtacacggctgcccaccacacatcattggatcaaagctctccaccccttagtggaacatctccatcctacaagtacacattaccaggagcacaagatgcaaaggatgatttcccccttcgaaaaactgcctctgagcccaacttgaaggtgcggtccaggttaaaacagaaagtggcagagaggagaagcagccccttactcaggcggaaggatggaaatgttgtcacttcattcaagaagcgaatgtttgaggtgacagaatcctcagtcagtagcagttctccaggctctggtcccagttcaccaaacaatgggccaactggaagtgttactgaaaatgagacttcggttttgccccctacccctcatgccgagcaaatggtttcacagcaacgcattctaattcatgaagattccatgaacctgctaagtctttatacctctccttctttgcccaacattaccttggggcttcccgcagtgccatcccagctcaatgcttcgaattcactcaaagaaaagcagaagtgtgagacgcagacgcttaggcaaggtgttcctctgcctgggcagtatggaggcagcatcccggcatcttccagccaccctcatgttactttagagggaaagccwcccaacagcagccaccaggctctcctgcagcatttattattgaaagaacaaatgcgacagcaaaagcttcttgtagctggtggagttcccttacatcctcagtctcccttggcaacaaaagagagaatttcacctggcattagaggtacccacaaattgccccgtcacagacccctgaaccgaacccagtctgcacctttgcctcagagcacgttggctcagctggtcattcaacagcaacaccagcaattcttggagaagcagaagcaataccagcagcagatccacatgaacaaactgctttcgaaatctattgaacaactgaagcaaccaggcagtcaccttgaggaagcagaggaagagcttcagggggaccaggcgatgcaggaagacagagcgccctctagtggcaacagcactaggagygacagcagtgcttgtgtggatgacacactgggacaagttggggctgtgaaggtcaaggaggaaccagtggacagtgatgaagatgctcagatccaggaaatggaatctggggagcaggctgcttttatgcaacaggtaataggcaaagatttagctccaggatttgtaattaaagtcattatctgaacatgaaatgcattgyaggtttggtaaatggatatgatttcctatcagtttatatttctctatgatttgagttcagtgtttaaggattctacctaatgcagatatatgtatatatctatatagaggtctttctatatactgatctctatatagatatcaatgtttcattgaaaatccactggtaaggaaatacctgttatactaaaattatgatacataatatctgagcagttaataggctttaaatttatcccaaagcctgctacaccaattacttctaaagaaaacaaattcactgttattttgagtttatgtgttgagatcagtgactgctggatagtctcccagtctgatcaatgaagcattcgattagtttttgattttttgcaacatctagaatttaattttcacatcactgtacataatgtatcatactatagtcttgaacactgttaaaggtagtctgccccttccttcctctctctttttttagttaagtagaaatgttctggtcaccatgccagtagtcctaggttattgtgtaggttgcaattgaacatattaggaatacaggtggttttaaatatatagatgcaaattgcagcactactttaaatattagattatgtctcacatagcactgctcattttacttttattttgtgtaatttgatgacactgtctatcaaaaaagagcaaatgaagcagatgcaaatgttagtgagaagtaatgtgcagcattatggtccaatcagatacaatattgtrtctacaattgcaaaaaacacagtaacaggatgaatattatctgatatcaagtcaaaatcagtttgaaaagaaggtgtatcatattttatattgtcactagaatctcttaagtataattccataatgacatgggcatataccgtaacattctggcaaataacaattagaaaagataggtttaacaaaaaaatttacttgtatataatgcaccttcaggaggactatgtcctttgatgctataaaatacaaacaactttgaaggcaacagaagacactgtttattcaagtcagttctttgtcaggttcctgctgttctcctacagaaaagtgattctgtgagggtgaacaggaaatgccttgtggaaacaggaagtccaagtgattcatgtactgaggaatgtaggaaaaaaaatctgaggatagtgctttactctttctgtttttaaagggcactctatgaattgatttattgtctaagaaaataacaccacaagtagggaaattgttacggaagcttttcactggaacatttccttcatattcccttttgatatgtttaccttgttttataggtttacttttgttaagctagttaaaggttcgttgtattaagacccctttaatatggataatccaaattgacctagaatctttgtgaggttttttctattaaaatatttatatttctaaatccgaggtatttcaaggtgtagtatcctatttcaaaggagatatagcagttttgccaaatgtagacattgttcaactgtatgttattggcacgtgttgtttacattttgctgtgacatttaaaaatatttctttaaaaatgttactgctaaagatacattatccttttttaaaaagtctccattcaaattaaattaacataactagaagttagaaagtttaaaagttttccayataatgaaagtccttctgataatttgacaaatagctataataggaacactccctatcaccaacatattttggttagtatattccttcatattaaaatgactttttgtcagttgttttgcattaaaaatatggcatgcctaagataaaattgtatattttttccatctcataaatattcattttcttcaaagtcttttttcaatctcataaaaaagggatagtgcatcttttaaaatacattttatttggggaggaacatgtggctgagcagacttttgtataatattacttcaaagatatgtaatcacaaacaaaaaaaactattttttataatgtcatttgagagagtttcatcagtacagttggtggacgttaattgtttgaatttgatagtctttgaatttaatcaagaaactacctggaaccagtgaaaaggaaagctggacttaaataatcttagaattaattgataaatgtctcttttaaaatctactgtatttattataatttacacccttgaaggtgatctcttgttttgtgttgtaaatatattgtttgtatgtttcccttcttgccttctgttataagtctcttcctttctcaaataaagttttttttaaaaga

SEQ ID NO: 3215 - DNA, 4248 bp, Homo sapiens
ggggaagagaggcacagacacagataggagaagggcaccggctggagccacttgcaggacwgagggtttttgcaacaaaaccctascagcctgaagaactctaagccagatggggtggctggacgagagcagctcttggctcagcaaagaatgcacagtatgatcagctcagtggatgtgaagtcagaagttcctgtgggcctggagcccatctcacctttagacctaaggacagacctcaggatgatgatgcccgtggtggaccctgttgtccgtgagaagcaattgcagcaggaattacttcttatccagcagcagcaacaaatccagaagcagcttctgatagcagagtttcagaaacagcatgagaacttgacacggcagcaccaggctcagcttcaggagcatatcaagttgcaacaggaacttctagccataaaacagcaacaagaactcctagaaaaggagcagaaactggagcagcagaggcaagaacaggaagtagagaggcatcgcagagaacagcagcttcctcctctcagaggcaaagatagaggacgagaaagggcagtggcaagtacagaagtaaagcagaagcttcaagagttcctaytgagtaaatcagcaacgaaagacactccaactaatggaaaaaatcattccgtgagccgccatcccaagctctggtacacggctgcccaccacacatcattggatcaaagctctccaccccttagtggaacatctccatcctacaagtacacattaccaggagcacaagatgcaaaggatgatttcccccttcgaaaaactgcctctgagcccaacttgaaggtgcggtccaggttaaaacagaaagtggcagagaggagaagcagccccttactcaggcggaaggatggaaatgttgtcacttcattcaagaagcgaatgtttgaggtgacagaatcctcagtcagtagcagttctccaggctctggtcccagttcaccaaacaatgggccaactggaagtgttactgaaaatgagacttcggttttgccccctacccctcatgccgagcaaatggtttcacagcaacgcattctaattcatgaagattccatgaacctgctaagtctttatacctctccttctttgcccaacattaccttggggcttcccgcagtgccatcccagctcaatgcttcgaattcactcaaagaaaagcagaagtgtgagacgcagacgcttaggcaaggtgttcctctgcctgggcagtatggaggcagcatcccggcatcttccagccaccctcatgttactttagagggaaagccwcccaacagcagccaccaggctctcctgcagcatttattattgaaagaacaaatgcgacagcaaaagcttcttgtagctggtggagttcccttacatcctcagtctcccttggcaacaaaagagagaatttcacctggcattagaggtacccacaaattgccccgtcacagacccctgaaccgaacccagtctgcacctttgcctcagagcacgttggctcagctggtcattcaacagcaacaccagcaattcttggagaagcagaagcaataccagcagcagatccacatgaacaaactgctttcgaaatctattgaacaactgaagcaaccaggcagtcaccttgaggaagcagaggaagagcttcagggggaccaggcgatgcaggaagacagagcgccctctagtggcaacagcactaggagygacagcagtgcttgtgtggatgacacactgggacaagttggggctgtgaaggtcaaggaggaaccagtggacagtgatgaagatgctcagatccaggaaatggaatctggggagcaggctgcttttatgcaacaggtaataggcaaagatttagctccaggatttgtaattaaagtcattatctgaacatgaaatgcattgyaggtttggtaaatggatatgatttcctatcagtttatatttctctatgatttgagttcagtgtttaaggattctacctaatgcagatatatgtatatatctatatagaggtctttctatatactgatctctatatagatatcaatgtttcattgaaaatccactggtaaggaaatacctgttatactaaaattatgatacataatatctgagcagttaataggctttaaatttatcccaaagcctgctacaccaattacttctaaagaaaacaaattcactgttattttgagtttatgtgttgagatcagtgactgctggatagtctcccagtctgatcaatgaagcattcgattagtttttgattttttgcaacatctagaatttaattttcacatcactgtacataatgtatcatactatagtcttgaacactgttaaaggtagtctgccccttccttcctctctctttttttagttaagtagaaatgttctggtcaccatgccagtagtcctaggttattgtgtaggttgcaattgaacatattaggaatacaggtggttttaaatatatagatgcaaattgcagcactactttaaatattagattatgtctcacatagcactgctcattttacttttattttgtgtaatttgatgacactgtctatcaaaaaagagcaaatgaagcagatgcaaatgttagtgagaagtaatgtgcagcattatggtccaatcagatacaatattgtrtctacaattgcaaaaaacacagtaacaggatgaatattatctgatatcaagtcaaaatcagtttgaaaagaaggtgtatcatattttatattgtcactagaatctcttaagtataattccataatgacatgggcatataccgtaacattctggcaaataacaattagaaaagataggtttaacaaaaaaatttacttgtatataatgcaccttcaggaggactatgtcctttgatgctataaaatacaaacaactttgaaggcaacagaagacactgtttattcaagtcagttctttgtcaggttcctgctgttctcctacagaaaagtgattctgtgagggtgaacaggaaatgccttgtggaaacaggaagtccaagtgattcatgtactgaggaatgtaggaaaaaaaatctgaggatagtgctttactctttctgtttttaaagggcactctatgaattgatttattgtctaagaaaataacaccacaagtagggaaattgttacggaagcttttcactggaacatttccttcatattcccttttgatatgtttaccttgttttataggtttacttttgttaagctagttaaaggttcgttgtattaagacccctttaatatggataatccaaattgacctagaatctttgtgaggttttttctattaaaatatttatatttctaaatccgaggtatttcaaggtgtagtatcctatttcaaaggagatatagcagttttgccaaatgtagacattgttcaactgtatgttattggcacgtgttgtttacattttgctgtgacatttaaaaatatttctttaaaaatgttactgctaaagatacattatccttttttaaaaagtctccattcaaattaaattaacataactagaagttagaaagtttaaaagttttccayataatgaaagtccttctgataatttgacaaatagctataataggaacactccctatcaccaacatattttggttagtatattccttcatattaaaatgactttttgtcagttgttttgcattaaaaatatggcatgcctaagataaaattgtatattttttccatctcataaatattcattttcttcaaagtcttttttcaatctcataaaaaagggatagtgcatcttttaaaatacattttatttggggaggaacatgtggctgagcagacttttgtataatattacttcaaagatatgtaatcacaaacaaaaaaaactattttttataatgtcatttgagagagtttcatcagtacagttggtggacgttaattgtttgaatttgatagtctttgaatttaatcaagaaactacctggaaccagtgaaaaggaaagctggacttaaataatcttagaattaattgataaatgtctcttttaaaatctactgtatttattataatttacacccttgaaggtgatctcttgttttgtgttgtaaatatattgtttgtatgtttcccttcttgccttctgttataagtctcttcctttctcaaataaagttttttttaaaaga

SEQ ID NO: 3216 - DNA, 3249 bp, Homo sapiens
ggggaagagaggcacagacacagataggagaagggcaccggctggagccacttgcaggacwgagggtttttgcaacaaaaccctascagcctgaagaactctaagccagatggggtggctggacgagagcagctcttggctcagcaaagaatgcacagtatgatcagctcagtggatgtgaagtcagaagttcctgtgggcctggagcccatctcacctttagacctaaggacagacctcaggatgatgatgcccgtggtggaccctgttgtccgtgagaagcaattgcagcaggaattacttcttatccagcagcagcaacaaatccagaagcagcttctgatagcagagtttcagaaacagcatgagaacttgacacggcagcaccaggctcagcttcaggagcatatcaaggaacttctagccataaaacagcaacaagaactcctagaaaaggagcagaaactggagcagcagaggcaagaacaggaagtagagaggcatcgcagagaacagcagcttcctcctctcagaggcaaagatagaggacgagaaagggcagtggcaagtacagaagtaaagcagaagcttcaagagttcctaytgagtaaatcagcaacgaaagacactccaactaatggaaaaaatcattccgtgagccgccatcccaagctctggtacacggctgcccaccacacatcattggatcaaagctctccaccccttagtggaacatctccatcctacaagtacacattaccaggagcacaagatgcaaaggatgatttcccccttcgaaaaactgcctctgagcccaacttgaaggtgcggtccaggttaaaacagaaagtggcagagaggagaagcagccccttactcaggcggaaggatggaaatgttgtcacttcattcaagaagcgaatgtttgaggtgacagaatcctcagtcagtagcagttctccaggctctggtcccagttcaccaaacaatgggccaactggaagtgttactgaaaatgagacttcggttttgccccctacccctcatgccgagcaaatggtttcacagcaacgcattctaattcatgaagattccatgaacctgctaagtctttatacctctccttctttgcccaacattaccttggggcttcccgcagtgccatcccagctcaatgcttcgaattcactcaaagaaaagcagaagtgtgagacgcagacgcttaggcaaggtgttcctctgcctgggcagtatggaggcagcatcccggcatcttccagccaccctcatgttactttagagggaaagccwcccaacagcagccaccaggctctcctgcagcatttattattgaaagaacaaatgcgacagcaaaagcttcttgtagctggtggagttcccttacatcctcagtctcccttggcaacaaaagagagaatttcacctggcattagaggtacccacaaattgccccgtcacagacccctgaaccgaacccagtctgcacctttgcctcagagcacgttggctcagctggtcattcaacagcaacaccagcaattcttggagaagcagaagcaataccagcagcagatccacatgaacaaactgctttcgaaatctattgaacaactgaagcaaccaggcagtcaccttgaggaagcagaggaagagcttcagggggaccaggcgatgcaggaagacagagcgccctctagtggcaacagcactaggagygacagcagtgcttgtgtggatgacacactgggacaagttggggctgtgaaggtcaaggaggaaccagtggacagtgatgaagatgctcagatccaggaaatggaatctggggagcaggctgcttttatgcaacagcctttcctggaacccacgcacacacgtgcgctctctgtgcgccaagctccgctggctgcggttggcatggatggattagagaaacaccgtctcgtctccaggactcactcttcccctgctgcctctgttttacctcacccrgcaatggaccgccccctccagcctggctctgcaactggaattgcctatgaccccttgatgctgaaacaccagtgcgtttgtggcaattccaccacccaccctgagcatgctggacgaatacagagtatctggtcacgactgcaagaaactgggctgctaaataaatgtgagcgaattcaaggtcgaaaagccagcctggaggaaatacagcttgttcattctgaacatcactcactgttgtatggcaccaaccccctggacggacagaagctggaccccaggatactcctaggtgatgactctcaaaagtttttttcctcattaccttgtggtggacttggggtggacagtgacaccatttggaatgagctacactcgtccggtgctgcacgcatggctgttggctgtgtcatcgagctggcttccaaagtggcctcaggagagctgaagaatgggtttgctgttgtgaggccccctggccatcacgctgaagaatccacagccatggggttctgcttttttaattcagttgcaattaccgccaaatacttgagagaccaactaaatataagcaagatattgattgtagatctggatgttcaccatggaaacggtacccagcaggccttttatgctgaccccagcatcctgtacatttcactccatcgctatgatgaagggaactttttccctggcagtggagccccaaatgaggttggaacaggccttggagaagggtacaatataaatattgcctggacaggtggccttgatcctcccatgggagatgttgagtaccttgaagcattcaggaccatcgtgaagcctgtggccaaagagtttgatccagacatggtcttagtatctgctggatttgatgcattggaaggccacacccctcctctaggagggtacaaagtkacggcaaaatgttttggtcatttgacgaagcaattgatgacattggctgatggacgtgtggtgttggctctagaaggaggacatgatctcacagccatctgtgatgcatcagaagcctgtgtaaatgcccttctaggaaatgagctggagccacttgcagaagatattctccaccaaagcccgaatatgaatgctgttatttctttacagaagatcattgaaattcaaagtatgtctttaaagttytcttaaaaattctaagcaggtaaaactaactaaaattatattgaaaattatagtacaaagaaacattta

SEQ ID NO: 3217 - DNA, 4239 bp, Homo sapiens
ggggaagagaggcacagacacagataggagaagggcaccggctggagccacttgcaggacwgagggtttttgcaacaaaaccctascagcctgaagaactctaagccagatggggtggctggacgagagcagctcttggctcagcaaagaatgcacagtatgatcagctcagtggatgtgaagtcagaagttcctgtgggcctggagcccatctcacctttagacctaaggacagacctcaggatgatgatgcccgtggtggaccctgttgtccgtgagaagcaattgcagcaggaattacttcttatccagcagcagcaacaaatccagaagcagcttctgatagcagagtttcagaaacagcatgagaacttgacacggcagcaccaggctcagcttcaggagcatatcaaggaacttctagccataaaacagcaacaagaactcctagaaaaggagcagaaactggagcagcagaggcaagaacaggaagtagagaggcatcgcagagaacagcagcttcctcctctcagaggcaaagatagaggacgagaaagggcagtggcaagtacagaagtaaagcagaagcttcaagagttcctaytgagtaaatcagcaacgaaagacactccaactaatggaaaaaatcattccgtgagccgccatcccaagctctggtacacggctgcccaccacacatcattggatcaaagctctccaccccttagtggaacatctccatcctacaagtacacattaccaggagcacaagatgcaaaggatgatttcccccttcgaaaaactgcctctgagcccaacttgaaggtgcggtccaggttaaaacagaaagtggcagagaggagaagcagccccttactcaggcggaaggatggaaatgttgtcacttcattcaagaagcgaatgtttgaggtgacagaatcctcagtcagtagcagttctccaggctctggtcccagttcaccaaacaatgggccaactggaagtgttactgaaaatgagacttcggttttgccccctacccctcatgccgagcaaatggtttcacagcaacgcattctaattcatgaagattccatgaacctgctaagtctttatacctctccttctttgcccaacattaccttggggcttcccgcagtgccatcccagctcaatgcttcgaattcactcaaagaaaagcagaagtgtgagacgcagacgcttaggcaaggtgttcctctgcctgggcagtatggaggcagcatcccggcatcttccagccaccctcatgttactttagagggaaagccwcccaacagcagccaccaggctctcctgcagcatttattattgaaagaacaaatgcgacagcaaaagcttcttgtagctggtggagttcccttacatcctcagtctcccttggcaacaaaagagagaatttcacctggcattagaggtacccacaaattgccccgtcacagacccctgaaccgaacccagtctgcacctttgcctcagagcacgttggctcagctggtcattcaacagcaacaccagcaattcttggagaagcagaagcaataccagcagcagatccacatgaacaaactgctttcgaaatctattgaacaactgaagcaaccaggcagtcaccttgaggaagcagaggaagagcttcagggggaccaggcgatgcaggaagacagagcgccctctagtggcaacagcactaggagygacagcagtgcttgtgtggatgacacactgggacaagttggggctgtgaaggtcaaggaggaaccagtggacagtgatgaagatgctcagatccaggaaatggaatctggggagcaggctgcttttatgcaacaggtaataggcaaagatttagctccaggatttgtaattaaagtcattatctgaacatgaaatgcattgyaggtttggtaaatggatatgatttcctatcagtttatatttctctatgatttgagttcagtgtttaaggattctacctaatgcagatatatgtatatatctatatagaggtctttctatatactgatctctatatagatatcaatgtttcattgaaaatccactggtaaggaaatacctgttatactaaaattatgatacataatatctgagcagttaataggctttaaatttatcccaaagcctgctacaccaattacttctaaagaaaacaaattcactgttattttgagtttatgtgttgagatcagtgactgctggatagtctcccagtctgatcaatgaagcattcgattagtttttgattttttgcaacatctagaatttaattttcacatcactgtacataatgtatcatactatagtcttgaacactgttaaaggtagtctgccccttccttcctctctctttttttagttaagtagaaatgttctggtcaccatgccagtagtcctaggttattgtgtaggttgcaattgaacatattaggaatacaggtggttttaaatatatagatgcaaattgcagcactactttaaatattagattatgtctcacatagcactgctcattttacttttattttgtgtaatttgatgacactgtctatcaaaaaagagcaaatgaagcagatgcaaatgttagtgagaagtaatgtgcagcattatggtccaatcagatacaatattgtrtctacaattgcaaaaaacacagtaacaggatgaatattatctgatatcaagtcaaaatcagtttgaaaagaaggtgtatcatattttatattgtcactagaatctcttaagtataattccataatgacatgggcatataccgtaacattctggcaaataacaattagaaaagataggtttaacaaaaaaatttacttgtatataatgcaccttcaggaggactatgtcctttgatgctataaaatacaaacaactttgaaggcaacagaagacactgtttattcaagtcagttctttgtcaggttcctgctgttctcctacagaaaagtgattctgtgagggtgaacaggaaatgccttgtggaaacaggaagtccaagtgattcatgtactgaggaatgtaggaaaaaaaatctgaggatagtgctttactctttctgtttttaaagggcactctatgaattgatttattgtctaagaaaataacaccacaagtagggaaattgttacggaagcttttcactggaacatttccttcatattcccttttgatatgtttaccttgttttataggtttacttttgttaagctagttaaaggttcgttgtattaagacccctttaatatggataatccaaattgacctagaatctttgtgaggttttttctattaaaatatttatatttctaaatccgaggtatttcaaggtgtagtatcctatttcaaaggagatatagcagttttgccaaatgtagacattgttcaactgtatgttattggcacgtgttgtttacattttgctgtgacatttaaaaatatttctttaaaaatgttactgctaaagatacattatccttttttaaaaagtctccattcaaattaaattaacataactagaagttagaaagtttaaaagttttccayataatgaaagtccttctgataatttgacaaatagctataataggaacactccctatcaccaacatattttggttagtatattccttcatattaaaatgactttttgtcagttgttttgcattaaaaatatggcatgcctaagataaaattgtatattttttccatctcataaatattcattttcttcaaagtcttttttcaatctcataaaaaagggatagtgcatcttttaaaatacattttatttggggaggaacatgtggctgagcagacttttgtataatattacttcaaagatatgtaatcacaaacaaaaaaaactattttttataatgtcatttgagagagtttcatcagtacagttggtggacgttaattgtttgaatttgatagtctttgaatttaatcaagaaactacctggaaccagtgaaaaggaaagctggacttaaataatcttagaattaattgataaatgtctcttttaaaatctactgtatttattataatttacacccttgaaggtgatctcttgttttgtgttgtaaatatattgtttgtatgtttcccttcttgccttctgttataagtctcttcctttctcaaataaagttttttttaaaaga

SEQ ID NO: 3218 - DNA, 3305 bp, Homo sapiens
gccgctttcgccgcggtctcctcctctagcgcccgccgcggccggtaaatctcggctggaggagcagcggcggcccccgagtcaactttcattccctttttgcttctgcctcaccattctcttctcctcctcgaaagatggctgtttggagaagggggagaagttaagaggtcgccagcgcggagcgaaggagggcgcgatagcctcagcaggagcgggcggaggtttctcctctgccaacccctcctggaccattgtcagcagttgaacgacaaaggctgtgaatctgcatcctagtcttagcagtccctctgattctcatgatgagctcacctgcacagcctggggagtacctggtaaaatgctgtggtgtatggagacagttatgagaaactggagggaggatgatagttgagagatggggtggctggacgagagcagctcttggctcagcaaagaatgcacagtatgatcagctcagagtggatgtgaagtcagaagttcctgtgggcctggagcccatctcacctttagacctaaggacagacctcaggatgatgatgcccgtggtggaccctgttgtccgtgagaagcaattgcagcaggaattacttcttatccagcagcagcaacaaatccagaagcagcttctgatagcagagtttcagaaacagcatgagaacttgacacggcagcaccaggctcagcttcaggagcatatcaagttgcaacaggaacttctagccataaaacagcaacaagaactcctagaaaaggagcagaaactggagcagcagaggcaagaacaggaagtagagaggcatcgcagagaacagcagcttcctcctctcagaggcaaagatagaggacgagaaagggcagtggcaagtacagaagtaaagcagaagcttcaagagttcctaytgagtaaatcagcaacgaaagacactccaactaatggaaaaaatcattccgtgagccgccatcccaagctctggtacacggctgcccaccacacatcattggatcaaagctctccaccccttagtggaacatctccatcctacaagtacacattaccaggagcacaagatgcaaaggatgatttcccccttcgaaaaactgcctctgagcccaacttgaaggtgcggtccaggttaaaacagaaagtggcagagaggagaagcagccccttactcaggcggaaggatggaaatgttgtcacttcattcaagaagcgaatgtttgaggtgacagaatcctcagtcagtagcagttctccaggctctggtcccagttcaccaaacaatgggccaactggaagtgttactgaaaatgagacttcggttttgccccctacccctcatgccgagcaaatggtttcacagcaacgcattctaattcatgaagattccatgaacctgctaagtctttatacctctccttctttgcccaacattaccttggggcttcccgcagtgccatcccagctcaatgcttcgaattcactcaaagaaaagcagaagtgtgagacgcagacgcttaggcaaggtgttcctctgcctgggcagtatggaggcagcatcccggcatcttccagccaccctcatgttactttagagggaaagccwcccaacagcagccaccaggctctcctgcagcatttattattgaaagaacaaatgcgacagcaaaagcttcttgtagctggtggagttcccttacatcctcagtctcccttggcaacaaaagagagaatttcacctggcattagaggtacccacaaattgccccgtcacagacccctgaaccgaacccagtctgcacctttgcctcagagcacgttggctcagctggtcattcaacagcaacaccagcaattcttggagaagcagaagcaataccagcagcagatccacatgaacaaacctttcctggaacccacgcacacacgtgcgctctctgtgcgccaagctccgctggctgcggttggcatggatggattagagaaacaccgtctcgtctccaggactcactcttcccctgctgcctctgttttacctcacccrgcaatggaccgccccctccagcctggctctgcaactggaattgcctatgaccccttgatgctgaaacaccagtgcgtttgtggcaattccaccacccaccctgagcatgctggacgaatacagagtatctggtcacgactgcaagaaactgggctgctaaataaatgtgagcgaattcaaggtcgaaaagccagcctggaggaaatacagcttgttcattctgaacatcactcactgttgtatggcaccaaccccctggacggacagaagctggaccccaggatactcctaggtgatgactctcaaaagtttttttcctcattaccttgtggtggacttggggtggacagtgacaccatttggaatgagctacactcgtccggtgctgcacgcatggctgttggctgtgtcatcgagctggcttccaaagtggcctcaggagagctgaagaatgggtttgctgttgtgaggccccctggccatcacgctgaagaatccacagccatggggttctgcttttttaattcagttgcaattaccgccaaatacttgagagaccaactaaatataagcaagatattgattgtagatctggatgttcaccatggaaacggtacccagcaggccttttatgctgaccccagcatcctgtacatttcactccatcgctatgatgaagggaactttttccctggcagtggagccccaaatgaggttggaacaggccttggagaagggtacaatataaatattgcctggacaggtggccttgatcctcccatgggagatgttgagtaccttgaagcattcaggaccatcgtgaagcctgtggccaaagagtttgatccagacatggtcttagtatctgctggatttgatgcattggaaggccacacccctcctctaggagggtacaaagtkacggcaaaatgttttggtcatttgacgaagcaattgatgacattggctgatggacgtgtggtgttggctctagaaggaggacatgatctcacagccatctgtgatgcatcagaagcctgtgtaaatgcccttctaggaaatgagctggagccacttgcagaagatattctccaccaaagcccgaatatgaatgctgttatttctttacagaagatcattgaaattcaaagtatgtctttaaagttytcttaaaaattctaagcaggtaaaactaactaaaattatattgaaaattatagtacaaagaaacattta

SEQ ID NO: 3219 - DNA, 3560 bp, Homo sapiens
gccgctttcgccgcggtctcctcctctagcgcccgccgcggccggtaaatctcggctggaggagcagcggcggcccccgagtcaactttcattccctttttgcttctgcctcaccattctcttctcctcctcgaaagatggctgtttggagaagggggagaagttaagaggtcgccagcgcggagcgaaggagggcgcgatagcctcagcaggagcgggcggaggtttctcctctgccaacccctcctggaccattgtcagcagttgaacgacaaaggctgtgaatctgcatcctagtcttagcagtccctctgattctcatgatgagctcacctgcacagcctggggagtacctggtaaaatgctgtggtgtatggagacagttatgagaaactggagggaggatgatagttgagagatggggtggctggacgagagcagctcttggctcagcaaagaatgcacagtatgatcagctcagagtggatgtgaagtcagaagttcctgtgggcctggagcccatctcacctttagacctaaggacagacctcaggatgatgatgcccgtggtggaccctgttgtccgtgagaagcaattgcagcaggaattacttcttatccagcagcagcaacaaatccagaagcagcttctgatagcagagtttcagaaacagcatgagaacttgacacggcagcaccaggctcagcttcaggagcatatcaaggaacttctagccataaaacagcaacaagaactcctagaaaaggagcagaaactggagcagcagaggcaagaacaggaagtagagaggcatcgcagagaacagcagcttcctcctctcagaggcaaagatagaggacgagaaagggcagtggcaagtacagaagtaaagcagaagcttcaagagttcctaytgagtaaatcagcaacgaaagacactccaactaatggaaaaaatcattccgtgagccgccatcccaagctctggtacacggctgcccaccacacatcattggatcaaagctctccaccccttagtggaacatctccatcctacaagtacacattaccaggagcacaagatgcaaaggatgatttcccccttcgaaaaactgcctctgagcccaacttgaaggtgcggtccaggttaaaacagaaagtggcagagaggagaagcagccccttactcaggcggaaggatggaaatgttgtcacttcattcaagaagcgaatgtttgaggtgacagaatcctcagtcagtagcagttctccaggctctggtcccagttcaccaaacaatgggccaactggaagtgttactgaaaatgagacttcggttttgccccctacccctcatgccgagcaaatggtttcacagcaacgcattctaattcatgaagattccatgaacctgctaagtctttatacctctccttctttgcccaacattaccttggggcttcccgcagtgccatcccagctcaatgcttcgaattcactcaaagaaaagcagaagtgtgagacgcagacgcttaggcaaggtgttcctctgcctgggcagtatggaggcagcatcccggcatcttccagccaccctcatgttactttagagggaaagccwcccaacagcagccaccaggctctcctgcagcatttattattgaaagaacaaatgcgacagcaaaagcttcttgtagctggtggagttcccttacatcctcagtctcccttggcaacaaaagagagaatttcacctggcattagaggtacccacaaattgccccgtcacagacccctgaaccgaacccagtctgcacctttgcctcagagcacgttggctcagctggtcattcaacagcaacaccagcaattcttggagaagcagaagcaataccagcagcagatccacatgaacaaactgctttcgaaatctattgaacaactgaagcaaccaggcagtcaccttgaggaagcagaggaagagcttcagggggaccaggcgatgcaggaagacagagcgccctctagtggcaacagcactaggagygacagcagtgcttgtgtggatgacacactgggacaagttggggctgtgaaggtcaaggaggaaccagtggacagtgatgaagatgctcagatccaggaaatggaatctggggagcaggctgcttttatgcaacagcctttcctggaacccacgcacacacgtgcgctctctgtgcgccaagctccgctggctgcggttggcatggatggattagagaaacaccgtctcgtctccaggactcactcttcccctgctgcctctgttttacctcacccrgcaatggaccgccccctccagcctggctctgcaactggaattgcctatgaccccttgatgctgaaacaccagtgcgtttgtggcaattccaccacccaccctgagcatgctggacgaatacagagtatctggtcacgactgcaagaaactgggctgctaaataaatgtgagcgaattcaaggtcgaaaagccagcctggaggaaatacagcttgttcattctgaacatcactcactgttgtatggcaccaaccccctggacggacagaagctggaccccaggatactcctaggtgatgactctcaaaagtttttttcctcattaccttgtggtggacttggggtggacagtgacaccatttggaatgagctacactcgtccggtgctgcacgcatggctgttggctgtgtcatcgagctggcttccaaagtggcctcaggagagctgaagaatgggtttgctgttgtgaggccccctggccatcacgctgaagaatccacagccatggggttctgcttttttaattcagttgcaattaccgccaaatacttgagagaccaactaaatataagcaagatattgattgtagatctggatgttcaccatggaaacggtacccagcaggccttttatgctgaccccagcatcctgtacatttcactccatcgctatgatgaagggaactttttccctggcagtggagccccaaatgaggttggaacaggccttggagaagggtacaatataaatattgcctggacaggtggccttgatcctcccatgggagatgttgagtaccttgaagcattcaggaccatcgtgaagcctgtggccaaagagtttgatccagacatggtcttagtatctgctggatttgatgcattggaaggccacacccctcctctaggagggtacaaagtkacggcaaaatgttttggtcatttgacgaagcaattgatgacattggctgatggacgtgtggtgttggctctagaaggaggacatgatctcacagccatctgtgatgcatcagaagcctgtgtaaatgcccttctaggaaatgagctggagccacttgcagaagatattctccaccaaagcccgaatatgaatgctgttatttctttacagaagatcattgaaattcaaagtatgtctttaaagttytcttaaaaattctaagcaggtaaaactaactaaaattatattgaaaattatagtacaaagaaacattta

SEQ ID NO: 3220 - DNA, 240 bp, Homo sapiens
ctggagccacttgcagaagatattctccaccaaagcccgaatatgaatgctgttatttctttacagaagatcattgaaattcaaaaactgckggtgagcctatggaagaggagccagccttgtgaagtgccaagtccccctctgatatttcctgtgtgtgacatcattgtgtatccccccaccccagtaccctcagacatgtcttgtctgctgcctgggtggcacagattcaatggaaca

SEQ ID NO: 3221 - DNA, 1543 bp, Homo sapiens
gctgtgaccgtctatgacaagccggcatctttctttaaagggacacctctggacctgcagcacaggctcttcatgaagctgggcggcatgcactctccgttcagggcccgtttagaacctgaggaaccagccacggagccgtcggccttcatggagcgggatgctgggagygggctggtgatgtgtctctgcgagtggccagccctgctggtcagcagcacaggctggacagaggacgaagacttctccatcctgctggcagctttagaaagtaggggtgtagctgtgcatgttcctgtcccgggccactgggtggggcagcctggggacagcggaggtggtggagagtttgagcaactgactcttgatggacacaaccttccttctctcgtctgtataacaggctcccaggagtggtttggagcccgcgccatgtgctctggaggctgtggcagggcagggggagtcctcgtgtcccctgtgcacaacacagacaaaaggctgggtccacccagtgggggcccgaggccagctggctgcaagtgcagggctgtgcgtcaggggtcagggtgcacacacccctgcgggtctcggggctcctgggatgcttcccgaagggcccggatggggcctgactggagctgccgaggggtggagcttctgggaaagggatccctcctagcggggagtgtcttgggcctggggccacttggtagggtcagagacgggtccatggcagtatctgctcttctctgtgaaggcaaagggcctctgacggagtattacagctgcctcatccaccagaagcatttccagcacatccaggagggctgggcctggggttggggcactgttgcccaggtgtgggagggcagtggctttgggaggtacagggacgakgtgtcaaacagcgtcgcttctcccagtgagatggttctcctttgcctccgtctctttccccgattgatttttccaaatggggagtcgtggcttggtcctgatgcgtctctagagctgcatcttccagcttcaaggtcggtggacctgggtgtctgtctgcacacgttctccagtggcctggacctgcccatgaaggtggtggacatgttcgggtgctatttgcctgcgtgtgccgtgaacttcaagtgtttaaatgagctggtgaaacatgaagaaaatggcctggtctttgaggactcagaggaactggcagctcagctgcagatgcttttctcaaactttcctgatcctgcaggcaagctaaaccagttccggaagaacctgcggtaatcgcagcagctcggatgggatgagagctgggtgcagactgtgctccctttggttatggacacataactcctgggccagaggctaaaaccccrggacccctgctgtccttcccgcagcttcttctcggagtctcagggcaaaccctttcgagcagcrcctcccagtggccagaaggtgaaatgatggcagtggtgccgcctggtgaatgaattggttctgtgacccgggaagctgtgcttggctctgatttctt

SEQ ID NO: 3222 - DNA, 992 bp, Homo sapiens
tttcattgcagggctgtgaccgtctatgacaagccggcatctttctttaaagggacacctctggacctgcagcacaggctcttcatgaagctgggcggcatgcactctccgttcagggcccgtttagaacctgaggaaccagccacggagccgtcggccttcatggagcgggatgctgggagygggctggtgatgtgtctctgcgagtggccagccctgctggtcagcagcacaggctggacaggtctgcacgacccctggaacacttgggcttgaggacgaagacttctccatcctgctggcagctttagaaaagtttgagcaactgactcttgatggacacaaccttccttctctcgtctgtataacaggcaaagggcctctgacggagtattacagctgcctcatccaccagaagcatttccagcacatccaggtcwgcaccccttggctggaggccgaggactagcccctgcttctagggtcggtggacctgggtgtctgtctgcacacgttctccagtggcctggacctgcccatgaaggtggtggacatgttcgggtgctatttgcctgcgtgtgccgtgaacttcaagtgtttaaatgagctggtgaaacatgaagaaaatggcctggtctttgaggactcagaggaactggcagctcagctgcagatgcttttctcaaactttcctgatcctgcaggcaagctaaaccagttccggaagaacctgcggtaatcgcagcagctcggatgggatgagagctgggtgcagactgtgctccctttggttatggacacataactcctgggccagaggctaaaaccccrggacccctgctgtccttcccgcagcttcttctcggagtctcagggcaaaccctttcgagcagcrcctcccagtggccagaaggtgaaatgatggcagtggtgccgcctggtgaatgaattggttctgtgacccgggaagctgtgcttggctctgatttctt

SEQ ID NO: 3223 - DNA, 1839 bp, Homo sapiens
tcgaartgaatgagtcacttcccctcctcgggcgagctcctggctttgccccagcaagcgggaactcccaggatcaggaaggtcccagagaaactccccaggggggaagccgaggccgtccagagagatccagggtacacacagtgacagtgccagctccacattcccgaccaccgggccagggctggttccacgctgtcatttctctccgctggccccagccgcggggccaccgccagacagacagaccggggatcctgcctggcggcgtgaccttgggttagtcctagagccgcttctagcccggtttcctccgccccagtggttccctcattcgagtgctccggcgcacagacccgcgccccgccgtcygcgagcctcccgagagccgtcccttcgtccggccctggagcattgcgtttgtcgccggtgtcgcagtgcgaggatggcgccgcgggtgtagcggctctctgcgcaggccgagtgggcccagagaagcgaggaactccgcagctcgtcgacacgtctcgtctcctgtcccaattcagggcttgktgaggtgactcgcggtcgcgggtgactcgccggcaggacactgcctggaacgcctggagcgcctcccactgcagacgtctgtccgyctccagccgctctcctctgacgggtcctgcctcagttggcggartggcggccaygggagccaatgcagagaaagctgaaagtcacaatgattgccccgtcagacttttaaatccaaacatagcaaaaatgaaagaagatattctctatcatttcaatctcaccactagcagacacaatttcccagccttgtttggagatgtgaagtttgtgtgtgttggtggaagcccctcccggatgaaagccttcatcaggtgcgttggtgcagagctgggccttgactgcccaggtagagactatcccaacatctgtgcgggaactgaccgctatgccatgtataaagtaggaccggtgctgtctgtcagtgtctggagcccggcactgtggtcataacagagcaggcagtggatacctgcttcaaggcagagtttgagcagattgtcctggggaagcgggtcatccggaaaacggaccttaacaagaagctggtgcaggagctgttgctgtgttctgcagagctgagcgagttcaccacagtggtggggaacaccatgtgcaccttggacttctatgaagggcaaggccgtctggatggggctctctgctcctacacggagaaggacaagcaggcgtatctggaggcagcctatgcagccggcgtccgcaatatcgagatggagtcctcggtgtttgccgccatgtgcagcgcctgcggcctccaagcggccgtggtgtgtgtcaccctcctgaaccgcctggaaggggaccagatcagcagccctcgcaatgtgctcagcgagtaccagcagaggccgcagcggctggtgagctacttcatcaagaagaaactgagcaaggcctgagcgctgccctgcacctccgcagacctgctgtgatgacttgccattaaaagcattgtccaaaatcccctgttgtgtggactttgagcacactttacacaagaatctagaaaatcagatcgcgattaagagacagagaatcttggattaaccgcatgggagatgttcttccttttgaagtttcattggagcattttcaatgatgttagcctgatttggggtttcttcaagaacattctaccaaatttttgtactatttctagggaaatttttcagactttaaaattctaatggtagtcagatttcatgtcactaaacaagaaatctgacaatagtgcca

SEQ ID NO: 3224 - DNA, 1615 bp, Homo sapiens
tgctccggcgcacagacccgcgccccgccgtcygcgagcctcccgagagccgtcccttcgtccggccctggagcattgcgtttgtcgccggtgtcgcagtgcgaggatggcgccgcgggtgtagcggctctctgcgcaggccgagtgggcccagagaagcgaggaactccgcagctcgtcgacacgtctcgtctcctgtcccaattcagggcttgktgaggtgactcgcggtcgcgggtgactcgccggcaggacactgcctggaacgcctggagcgcctcccactgcagacgtctgtccgyctccagccgctctcctctgacgggtcctgcctcagttggcggaatggcggccaygggagccaatgcagagaaagctgaaagtcacaatgattgccccgtcagacttttaaatccaaacatagcaaaaatgaaagaagatattctctatcatttcaatctcaccactagcagacacaatttcccagccttgtttggagatgtgaagtttgtgtgtgttggtggaagcccctcccggatgaaagccttcatcaggtgcgttggtgcagagctgggccttgactgcccaggtagagactatcccaacatctgtgcgggaactgaccgctatgccatgtataaagtaggaccggtgctgtctgtcagtcatggtatgggcattccttctatctcaatcatgttgcatgagctcataaagctgctgtactatgcccggtgctccaacgtcactatcatccgcattggcacttctggtgggataggtctggagcccggcactgtggtcataacagagcaggcagtggatacctgcttcaaggcagagtttgagcagattgtcctggggaagcgggtcatccggaaaacggaccttaacaagaagctggtgcaggagctgttgctgtgttctgcagagctgagcgagttcaccacagtggtggggaacaccatgtgcaccttggacttctatgaagggcaaggccgtctggatggggctctctgctcctacacggagaaggacaagcaggcgtatctggaggcagcctatgcagccggcgtccgcaatatcgagatggagtcctcggtgtttgccgccatgtgcagcgcctgcggcctccaagcggccgtggtgtgtgtcaccctcctgaaccgcctggaaggggaccagatcagcagccctcgcaatgtgctcagcgagtaccagcagaggccgcagcggctggtgagctacttcatcaagaagaaactgagcaaggcctgagcgctgccctgcacctccgcagacctgctgtgatgacttgccattaaaagcattgtccaaaatcccctgttgtgtggactttgagcacactttacacaagaatctagaaaatcagatcgcgattaagagacagagaatcttggattaaccgcatgggagatgttcttccttttgaagtttcattggagcattttcaatgatgttagcctgatttggggtttcttcaagaacattctaccaaatttttgtactatttctagggaaatttttcagactttaaaattctaatggtagtcagatttcatgtcactaaacaagaaatctgacaatagtgcca

SEQ ID NO: 3225 - DNA, 1867 bp, Homo sapiens
gcaattgcgggctgagcctcccgggaccttcgcgggagggaggagaggaggaaggcgggggaggcggggccagaggggcagaggaaggtgggggcgggcggggcttgtctgcgggatggcccaggatgcggtcagctgagttcgccggcccagggcaggcggggcccgagcctagcggtaacccccgggcagggcggggccgctcgcagactccatatgagattcacctcgcargtggttccctcattcgagtgctccggcgcacagacccgcgccccgccgtcygcgagcctcccgagagccgtcccttcgtccggccctggagcattgcgtttgtcgccggtgtcgcagtgcgaggatggcgccgcgggtgtagcggctctctgcgcaggccgagtgggcccagagaagcgaggaactccgcagctcgtcgacacgtctcgtctcctgtcccaattcagggcttgktgaggtgactcgcggtcgcgggtgactcgccggcaggacactgcctggaacgcctggagcgcctcccactgcagacgtctgtccgyctccagccgctctcctctgacgggtcctgcctcagttggcggaatggcggccaygggagccaatgcagagaaagctgaaagtcacaatgattgccccgtcagacttttaaatccaaacatagcaaaaatgaaagaagatattctctatcatttcaatctcaccactagcagacacaatttcccagccttgtttggagatgtgaagtttgtgtgtgttggtggaagcccctcccggatgaaagccttcatcaggtgcgttggtgcagagctgggccttgactgcccaggtagagactatcccaacatctgtgcgggaactgaccgctatgccatgtataaagtaggaccggtgctgtctgtcagtcatggtatgggcattccttctatctcaatcatgttgcatgagctcataaagctgctgtactatgcccggtgctccaacgtcactatcatccgcattggcacttctggtgggataggtctggagcccggcactgtggtcataacagagcaggcagtggatacctgcttcaaggcagagtttgagcagattgtcctggggaagcgggtcatccggaaaacggaccttaacaagaagctggtgcaggagctgttgctgtgttctgcagagctgagcgagttcaccacagtggtggggaacaccatgtgcaccttggacttctatgaagggcaaggccgtctggatggggctctctgctcctacacggagaaggacaagcaggcgtatctggaggcagcctatgcagccggcgtccgcaatatcgagatggagtcctcggtgtttgccgccatgtgcagcgcctgcggcctccaagcggccgtggtgtgtgtcaccctcctgaaccgcctggaaggggaccagatcagcagccctcgcaatgtgctcagcgagtaccagcagaggccgcagcggctggtgagctacttcatcaagaagaaactgagcaaggcctgagcgctgccctgcacctccgcagacctgctgtgatgacttgccattaaaagcattgtccaaaatcccctgttgtgtggactttgagcacactttacacaagaatctagaaaatcagatcgcgattaagagacagagaatcttggattaaccgcatgggagatgttcttccttttgaagtttcattggagcattttcaatgatgttagcctgatttggggtttcttcaagaacattctaccaaatttttgtactatttctagggaaatttttcagactttaaaattctaatggtagtcagatttcatgtcactaaacaagaaatctgacaatagtgcca

SEQ ID NO: 3226 - DNA, 1864 bp, Homo sapiens
tcaggaaggtcccagagaaactccccaggggggaagccgaggccgtccagagagatccagggtacacacagtgacagtgccagctccacattcccgaccaccgggccagggctggttccacgctgtcatttctctccgctggccccagccgcggggccaccgccagacagacagaccggggatcctgcctggcggcgtgaccttgggttagtcctagagccgcttctagcccggtttcctccgccccagtgctccggcgcacagacccgcgccccgccgtcygcgagcctcccgagagccgtcccttcgtccggccctggagcattgcgtttgtcgccggtgtcgcagtgcgaggatggcgccgcgggtgtagcggctctctgcgcaggccgagtgggcccagagaagcgaggaactccgcagctcgtcgacacgtctcgtctcctgtcccaattcagggcttgktgaggtgactcgcggtcgcgggtgactcgccggcaggacactgcctggaacgcctggagcgcctcccactgcagacgtctgtccgyctccagccgctctcctctgacgggtcctgcctcagttggcggaatggcggccaygggagccaatgcagagaaagctgaaagtcacaatgattgccccgtcagacttttaaatccaaacatagcaaaaatgaaagaagatattctctatcatttcaatctcaccactagcagacacaatttcccagccttgtttggagatgtgaagtttgtgtgtgttggtggaagcccctcccggatgaaagccttcatcaggtgcgttggtgcagagctgggccttgactgcccaggtagagactatcccaacatctgtgcgggaactgaccgctatgccatgtataaagtaggaccggtgctgtctgtcagtcatggtatgggcattccttctatctcaatcatgttgcatgagctcataaagctgctgtactatgcccggtgctccaacgtcactatcatccgcattggcacttctggtgggataggtctggagcccggcactgtggtcataacagagcaggcagtggatacctgcttcaaggcagagtttgagcagattgtcctggggaagcgggtcatccggaaaacggaccttaacaagaagctggtgcaggagctgttgctgtgttctgcagagctgagcgagttcaccacagtggtggggaacaccatgtgcaccttggacttctatgaagggcaaggccgtctggatggggctctctgctcctacacggagaaggacaagcaggcgtatctggaggcagcctatgcagccggcgtccgcaatatcgagatggagtcctcggtgtttgccgccatgtgcagcgcctgcggcctccaagcggccgtggtgtgtgtcaccctcctgaaccgcctggaaggggaccagatcagcagccctcgcaatgtgctcagcgagtaccagcagaggccgcagcggctggtgagctacttcatcaagaagaaactgagcaaggcctgagcgctgccctgcacctccgcagacctgctgtgatgacttgccattaaaagcattgtccaaaatcccctgttgtgtggactttgagcacactttacacaagaatctagaaaatcagatcgcgattaagagacagagaatcttggattaaccgcatgggagatgttcttccttttgaagtttcattggagcattttcaatgatgttagcctgatttggggtttcttcaagaacattctaccaaatttttgtactatttctagggaaatttttcagactttaaaattctaatggtagtcagatttcatgtcactaaacaagaaatctgacaatagtgcca

SEQ ID NO: 3227 - DNA, 1874 bp, Homo sapiens
ggaaggtcccagagaaactccccaggggggaagccgaggccgtccagagagatccagggtacacacagtgacagtgccagctccacattcccgaccaccgggccagggctggttccacgctgtcatttctctccgctggccccagccgcggggccaccgccagacagacagaccggggatcctgcctggcggcgtgaccttgggttagtcctagagccgcttctagcccggtttcctccgccccaggttaggaccacgtggggcggggccgctcgcagactccatatgagattcacctcgcargtggttccctcattcgagtgctccggcgcacagacccgcgccccgccgtcygcgagcctcccgagagccgtcccttcgtccggccctggagcattgcgtttgtcgccggtgtcgcagtgcgaggatggcgccgcgggtgtagcggctctctgcgcaggccgagtgggcttgktgaggtgactcgcggtcgcgggtgactcgccggcaggacactgcctggaacgcctggagcgcctcccactgcagacgtctgtccgyctccagccgctctcctctgacgggtcctgcctcagttggcggaatggcggccaygggagccaatgcagagaaagctgaaagtcacaatgattgccccgtcagacttttaaatccaaacatagcaaaaatgaaagaagatattctctatcatttcaatctcaccactagcagacacaatttcccagccttgtttggagatgtgaagtttgtgtgtgttggtggaagcccctcccggatgaaagccttcatcaggtgcgttggtgcagagctgggccttgactgcccaggtagagactatcccaacatctgtgcgggaactgaccgctatgccatgtataaagtaggaccggtgctgtctgtcagtcatggtatgggcattccttctatctcaatcatgttgcatgagctcataaagctgctgtactatgcccggtgctccaacgtcactatcatccgcattggcacttctggtgggataggtctggagcccggcactgtggtcataacagagcaggcagtggatacctgcttcaaggcagagtttgagcagattgtcctggggaagcgggtcatccggaaaacggaccttaacaagaagctggtgcaggagctgttgctgtgttctgcagagctgagcgagttcaccacagtggtggggaacaccatgtgcaccttggacttctatgaagggcaaggccgtctggatggggctctctgctcctacacggagaaggacaagcaggcgtatctggaggcagcctatgcagccggcgtccgcaatatcgagatggagtcctcggtgtttgccgccatgtgcagcgcctgcggcctccaagcggccgtggtgtgtgtcaccctcctgaaccgcctggaaggggaccagatcagcagccctcgcaatgtgctcagcgagtaccagcagaggccgcagcggctggtgagctacttcatcaagaagaaactgagcaaggcctgagcgctgccctgcacctccgcagacctgctgtgatgacttgccattaaaagcattgtccaaaatcccctgttgtgtggactttgagcacactttacacaagaatctagaaaatcagatcgcgattaagagacagagaatcttggattaaccgcatgggagatgttcttccttttgaagtttcattggagcattttcaatgatgttagcctgatttggggtttcttcaagaacattctaccaaatttttgtactatttctagggaaatttttcagactttaaaattctaatggtagtcagatttcatgtcactaaacaagaaatctgacaatagtgcca

SEQ ID NO: 3228 - DNA, 1799 bp, Homo sapiens
tcaggaaggtcccagagaaactccccaggggggaagccgaggccgtccagagagatccagggtacacacagtgacagtgccagctccacattcccgaccaccgggccagggctggttccacgctgtcatttctctccgctggccccagccgcggggccaccgccagacagacagaccggggatcctgcctggcggcgtgaccttgggttagtcctagagccgcttctagcccggtttcctccgccccagtgctccggcgcacagacccgcgccccgccgtcygcgagcctcccgagagccgtcccttcgtccggccctggagcattgcgtttgtcgccggtgtcgcagtgcgaggatggcgccgcgggtgtagcggctctctgcgcaggccgagtgggcccagagaagcgaggaactccgcagctcgtcgacacgtctcgtctcctgtcccaattcagggcttgktgaggtgactcgcggtcgcgggtgactcgccggcaggacactgcctggaacgcctggagcgcctcccactgcagacgtctgtccgyctccagccgctctcctctgacgtgattgccccgtcagacttttaaatccaaacatagcaaaaatgaaagaagatattctctatcatttcaatctcaccactagcagacacaatttcccagccttgtttggagatgtgaagtttgtgtgtgttggtggaagcccctcccggatgaaagccttcatcaggtgcgttggtgcagagctgggccttgactgcccaggtagagactatcccaacatctgtgcgggaactgaccgctatgccatgtataaagtaggaccggtgctgtctgtcagtcatggtatgggcattccttctatctcaatcatgttgcatgagctcataaagctgctgtactatgcccggtgctccaacgtcactatcatccgcattggcacttctggtgggataggtctggagcccggcactgtggtcataacagagcaggcagtggatacctgcttcaaggcagagtttgagcagattgtcctggggaagcgggtcatccggaaaacggaccttaacaagaagctggtgcaggagctgttgctgtgttctgcagagctgagcgagttcaccacagtggtggggaacaccatgtgcaccttggacttctatgaagggcaaggccgtctggatggggctctctgctcctacacggagaaggacaagcaggcgtatctggaggcagcctatgcagccggcgtccgcaatatcgagatggagtcctcggtgtttgccgccatgtgcagcgcctgcggcctccaagcggccgtggtgtgtgtcaccctcctgaaccgcctggaaggggaccagatcagcagccctcgcaatgtgctcagcgagtaccagcagaggccgcagcggctggtgagctacttcatcaagaagaaactgagcaaggcctgagcgctgccctgcacctccgcagacctgctgtgatgacttgccattaaaagcattgtccaaaatcccctgttgtgtggactttgagcacactttacacaagaatctagaaaatcagatcgcgattaagagacagagaatcttggattaaccgcatgggagatgttcttccttttgaagtttcattggagcattttcaatgatgttagcctgatttggggtttcttcaagaacattctaccaaatttttgtactatttctagggaaatttttcagactttaaaattctaatggtagtcagatttcatgtcactaaacaagaaatctgacaatagtgcca

SEQ ID NO: 3229 - DNA, 4160 bp, Homo sapiens
ttagagagtggggacgtccggcttcggagcgggagtgttcgttgtgccagcgactaaaaagagagggcaaaagctgttgctcttctaataaggggccagttcttttcgtgggcacatgtttcttccgtcagtcgttctgacatcctagaaggagtttcatcaatcaccttgaaaccgacctggacgggtgacctcgtggtcgccccaggagatcacagaaktaaatatgggtgatgttgagaaaggcaagaagatttttattatgaagtgttcccagtgccacaccgttgaaaagggaggcaagcacaagactgggccaaatctccatggtctctttgggcggaagacaggtcaggcccctggatactcttacacagccgccaataagaacaaaggcatcatctggggagaggatacactgatggagtatttggagaatcccaagaagtacatccctggaacaaaaatgatctttgtcggcattaagaagaaggaagaaagggcagacttaatagcttatctcaaaaaagctactaatgagtaataattggccactgccttatttattacaaaacagaaatgtctcatgacttttttatgtgtaccatcctttaatagatctcatacaccagaattcagatcatgaatgactgacagaatattttgttgggcagtcctgatttaaaactaagactggcttgtggttaaatgaatatgttcagtttttgaattttaatagtaaytccaattcagtaaatrgtatcactgtttaccccttttaaagatatgattagacttcgttagtaatgttcaacttttcacaaagatggtgagtgccatcttaaaacttactggagattggttttatatttagatttatataactggttatgtgaatatatttaaatactggggaaattgcttcactgtcttagaaccaagcaagattcacctgtgttttgtgttcatgttcatttgcctcttaaaggcaagggttgaagataaataaggtagcaatgtctatagttttggccttaactatgccaatctaattataattccctgtatttaaaatggtttcttttacttattgaaaggcattttagtgtggtttatgtgtaatattaaagattattcaacacctctcacatcttacagatctataaggtcacatgcttttaaaatagtagcaagttaaacttcactcttgaattctttacaatctaagtcaaactaagttataatttaggattgtctttaaacagccattcagaaacaaaactgtagaactgtgtatttgattgggaatggtgcttttgccaacttaaaaggattaaagtaacggagatatacacaaattttaaaattatgtgtgatcacaagactaaagataattaaaaagaaaaccacagatcatgactttttgactgtgcttgatttcatgactgatgcacaaattttaatgattaaaaagtgcaggagccctaaatgtcagtgcagcagccctaaatgtcagtgcagcagtgttaaccagtcatggtgctagattgtttacttggttttctaggactgcctcaactagaataacacttcactaattgactcttagtttctttgctcagattgagaactgcagcatttatgccagacatggacagaggaatgcctgtggtcatagttttgtgatgtgtaacagtgtataattacatactgaattatttcatgcatagtctgtgccatacacatttagagtagtccttggagattttatggagatggtgagcacaaggtaagtcataaagaataatgagaaaataaatctatgctggtgcagctgagaactgtatctttgtgggacagtgagaagactgagaagatgtgaatccatggtctcaaaggtgatagggacgattagataggtgttttaaggcctgaaagcaatttataacatatgagtcttatttttatttatagaaatgtggaaagcttgctgtaattcatatttgaagtcctagtctgagttctggtggggaatttaaaaatgcatcctggaaatcctttaaagatttcagactttgaaaggccttgtagcagaggacttggtgactgtataaagttagtggtattcagggacagtgtagcaagtagcttacaaggggacaattctggactaatgagaaagacctgaagtgaaggctagagagttgatttttttttttttttggcatcctggaaatgatacaggaaacmtattaagatagayacagaaatgtgttcaaccttccatcttggctagttgtggcgtttagtttgttttttgagacatggtcacgctgtgtcgccaaggctggagtgcagtggtgcgatctcggctggctgcaacctctatttcccaggctcaagcgattctctcacttcagcttcccaagtagctgggactacaggtgttcgccaccatgcccagctaatttttttgtagagatggagttttgccatgtggtcccaggctggtctcaaactcctgagctcaagcaatccgtccacttgccttggctccccaaagtgctgggattacaggcgtgagccaccaggccctgcctggttttcaaattcagaaatcttattatttaacccagaagtaatcagcccagtagtaacttaggtttaattttttttcaggtttaaaatttttctcatttattttttctgagacggagtttcgcccttttcgcccaggctgagtacagtggtgcaatctcactgcaacctccgccttccagttgcaagtgattctcctgcctcagcctcctgagtagctgggattacaggcacccgccaccacgcctggctaatttttgtatttttagtggagatggtgtttcaccatgttggccagactggtcttggactcctgacctcgtgatccacccaccttggcctcccaaagttctaggattacaggtgtgagccaccacgtccggccaatttttctcatttctatgcctcctatattaaggtctgtgttggcacagatgagtaactgccatgttctaggtcagttatacccaagcacttctggtggtttaaaatgtgattctgtaacttttttatttttatttttttgagataatttcactcttgttgcccaggctggagtgcaatggcgtgatcgctgctcaccgcaacctccgccttccaggttcaagcgattctcctgactcagcctctcaagtagctgggattacaagcatgcgccaccatgcccagcttattttgtgtttttagtagagacagggtttctccatgctggacaggctggtcttgaactcccgacgtcaggtgatctacctgcctcggcctcccaaagtgctgggattacaggcgtgagccaccacgcctggccaattatgtaattttttaaaaaggacatttctatcagggatatataccttcagaaataaggaaataggggaaaaaaagagcactataaaccacatgttttcatttctagtgcttcgctgtaagtggctaggttggtagaatcaaaaacaagggccagatgtatttaaggggtattcagatgccacctacatgcttattttgtctagaacagtgctgtctaatagaactttctgtgacgatggatattttgtagacttttgctgtccagtgtggtagccactaaccacatgtggctgttaagcccttgaaatatagctagtgtgactagaaagtattttattttaaatttacataggcacaagtggctagtggctactgtattgacattctgggtctaggactagaaccagtggtctgtaacaaaagtactttctctttactctattaaatctagaattrgccgggcatggtcgctcrtgcctgtrrtcccagcactttgggaggccaaggcaggcagatcacttgaggtcaggcgtttgagaccagcctggtcaacatggcgaaaccctgtctctacaaaaaacataaaaattagccaggtgtggtggtgggcacctgtaatctcagctacttgggaggctgaggcacaagaatcacttgaacttgggaggtggaggttgcagtgagccaagattgtgccactgcactcaagcctgggtgacgagtgaaactgtctccaaaaaaaaaaaaaaatctag

SEQ ID NO: 3230 - DNA, 4052 bp, Homo sapiens
cgagtttggttgcacttacaccggtacttaagcgcggaccggcgtgtccttggacttagagagtggggacgtccggcttcggagcgggagtgttcgttgtgccagcgactaaaaagagatgggtgatgttgagaaaggcaagaagatttttattatgaagtgttcccagtgccacaccgttgaaaagggaggcaagcacaagactgggccaaatctccatggtctctttgggcggaagacaggtcaggcccctggatactcttacacagccgccaataagaacaaaggcatcatctggggagaggatacactgatggagtatttggagaatcccaagaagtacatccctggaacaaaaatgatctttgtcggcattaagaagaaggaagaaagggcagacttaatagcttatctcaaaaaagctactaatgagtaataattggccactgccttatttattacaaaacagaaatgtctcatgacttttttatgtgtaccatcctttaatagatctcayacaccagaattcagarcatgaatgactgacagaatattttgttgggcagtcctgatttaaaactaagactggcttgtggttaaatgaatatgttcagtttttgaattttaatagtaactccaattcagtaaatggtatcactgtttaccccttttaaagatatgattagacttcgttagtaatgttcaacttttcacaaagatggtgagtgccatcttaaaacttactggagattggttttatatttagatttatataactggttatgtgaatatatttaaatactggggaaattgcttcactgtcttagaaccaagcaagattcacctgtgttttgtgttcatgttcatttgcctcttaaaggcaagggttgaagataaataaggtagcaatgtctatagttttggccttaactatgccaatctaattataattccctgtatttaaaatggtttcttttacttattgaaaggcattttagtgtggtttatgtgtaatattaaagattattcaacacctctcacatcttacagatctataaggtcacatgcttttaaaatagtagcaagttaaacttcactcttgaattctttacaatctaagtcaaactaagttataatttaggattgtctttaaacagccattcagaaacaaaactgtagaactgtgtatttgattgggaatggtgcttttgccaacttaaaaggattaaagtaacggagatatacacaaattttaaaattatgtgtgatcacaagactaaagataattaaaaagaaaaccacagatcatgactttttgactgtgcttgatttcatgactgatgcacaaattttaatgattaaaaagtgcaggagccctaaatgtcagtgcagcagccctaaatgtcagtgcagcagtgttaaccagtcatggtgctagattgtttacttggttttctaggactgcctcaactagaataacacttcactaattgactcttagtttctttgctcagattgagaactgcagcatttatgccagacatggacagaggaatgcctgtggtcatagttttgtgatgtgtaacagtgtataattacatactgaattatttcatgcatagtctgtgccatacacatttagagtagtccttggagattttatggagatggtgagcacaaggtaagtcataaagaataatgagaaaataaatctatgctggtgcagctgagaactgtatctttgtgggacagtgagaagactgagaagatgtgaatccatggtctcaaaggtgatagggacgattagataggtgttttaaggcctgaaagcaatttataacatatgagtcttatttttatttatagaaatgtggaaagcttgctgtaattcatatttgaagtcctagtctgagttctggtggggaatttaaaaatgcatcctggaaatcctttaaagatttcagactttgaaaggccttgtagcagaggacttggttactgtataaagttagtggtattcaggmacagtgtagcaaytagcttacaaggggacaattctggactaatgagaaagacctgaagtgaaggctagagagttgatttttttttttttttggcatcctggaaatgatacaggaaacatattaagatagatacagaaatgtgttcaaccttccatcttggctagttgtggcgtttagtttgttttttgagacatggtcacgctgtgtcgccaaggctggagtgcagtggtgcgatctcggctggctgcaacctctatttcccaggctcaagcgattctctcacttcagcttcccaagtagctgggactacaggtgttcgccaccatgcccagctaatttttttgtagagatggagttttgccatgtggtcccaggctggtctcaaactcctgagctcaagcaatccgtccacttgccttggctccccaaagtgctgggattacaggcgtgagccaccaggccctgcctggttttcaaattcagaaatcttattatttaacccagaagtaatcagcccagtagtaacttaggtttaattttttttcaggtttaaaatttttctcatttattttttctgagacggagtttcgcccttttcgcccaggctgagtacagtggtgcaatctcactgcaacctccgccttccagttgcaagtgattctcctgcctcagcctcctgagtagctgggattacaggcacccgccaccacgcctggctaatttttgtatttttagtggagatggtgtttcaccatgttggccagactggtcttggactcctgacctcgtgatccacccaccttggcctcccaaagttctaggattacaggtgtgagccaccacgtccggccaatttttctcatttctatgcctcctatattaaggtctgtgttggcacagatgagtaactgccatgttctaggtcagttatacccaagcacttctggtggtttaaaatgtgattctgtaacttttttatttttatttttttgagataatttcactcttgttgcccaggctggagtgcaatggcgtgatcgctgctcaccgcaacctccgccttccaggttcaagcgattctcctgactcagcctctcaagtagctgggattacaagcatgcgccaccatgcccagcttattttgtgtttttagtagagacagggtttctccatgctggacaggctggtcttgaactcccgacgtcaggtgatctacctgcctcggcctcccaaagtgctgggattacaggcgtgagccaccacgcctggccaattatgtaattttttaaaaaggacatttctatcagggatatataccttcagaaataaggaaataggggaaaaaaagagcactataaaccacatgttttcatttctagtgcttcgctgtaagtggctaggttggtagaatcaaaaacaagggccagatgtatttaaggggtattcagatgccacctacatgcttattttgtctagaacagtgctgtctaatagaactttctgtgacgatggatattttgtagacttttgctgtccagtgtggtagccactaaccacatgtggctgttaagcccttgaaatatagctagtgtgactagaaagtattttatrttaaatttacataggcaraagtggcrrgtggctactgtattgacattctgggtctaggactagaaccagtggtctgtaacaaaagtactttctctttactctattaaatctagaattagccgggcatggtcgctcatgcctgtaatcccagcactttgggaggccaaggcaggcagatcacttgaggtcaggcgtttgagaccagcctggtcaacatggcgaaaccctgtctctacaaaaaacataaaaattagccaggtgtggtggtgggcacctgtaatctcagctacttgggaggctgaggcacaagaatcacttgaacttgggaggtggaggttgcagtgagccaagattgtgccactgcactcaagcctgggtgacgagtgaaactgtctccaaaaaaaaaaaaaaatctag

SEQ ID NO: 3231 - DNA, 4085 bp, Homo sapiens
cacgtcagggcgcgggagcgcggagcgagtttggttgcacttacaccggtacttaagcgcggaccggcgtgyccttggacttagagagtggggacgtccggcttcggagcgggagtgttcgttgtgccagcgactaaaaagagaaktaaatatgggtgatgttgagaaaggcaagaagatttttattatgaagtgttcccagtgccacaccgttgaaaagggaggcaagcacaagactgggccaaatctccatggtctctttgggcggaagacaggtcaggcccctggatactcttacacagccgccaataagaacaaaggcatcatctggggagaggatacactgatggagtatttggagaatcccaagaagtacatccctggaacaaaaatgatctttgtcggcattaagaagaaggaagaaagggcagacttaatagcttatctcaaaaaagctactaatgagtaataattggccactgccttatttattacaaaacagaaatgtctcatgacttttttatgtgtaccatcctttaatagatctcatacaccagaattcagatcatgaatgactgacagaatattttgttgggcagtcctgatttaaaactaagactggcttgtggttaaatgaatatgttcagtttttgaattttaatagtaaytccaattcagtaaatrgtatcactgtttaccccttttaaagatatgattagacttcgttagtaatgttcaacttttcacaaagatggtgagtgccatcttaaaacttactggagattggttttatatttagatttatataactggttatgtgaatatatttaaatactggggaaattgcttcactgtcttagaaccaagcaagattcacctgtgttttgtgttcatgttcatttgcctcttaaaggcaagggttgaagataaataaggtagcaatgtctatagttttggccttaactatgccaatctaattataattccctgtatttaaaatggtttcttttacttattgaaaggcattttagtgtggtttatgtgtaatattaaagattattcaacacctctcacatcttacagatctataaggtcacatgcttttaaaatagtagcaagttaaacttcactcttgaattctttacaatctaagtcaaactaagttataatttaggattgtctttaaacagccattcagaaacaaaactgtagaactgtgtatttgattgggaatggtgcttttgccaacttaaaaggattaaagtaacggagatatacacaaattttaaaattatgtgtgatcacaagactaaagataattaaaaagaaaaccacagatcatgactttttgactgtgcttgatttcatgactgatgcacaaattttaatgattaaaaagtgcaggagccctaaatgtcagtgcagcagccctaaatgtcagtgcagcagtgttaaccagtcatggtgctagattgtttacttggttttctaggactgcctcaactagaataacacttcactaattgactcttagtttctttgctcagattgagaactgcagcatttatgccagacatggacagaggaatgcctgtggtcatagttttgtgatgtgtaacagtgtataattacatactgaattatttcatgcatagtctgtgccatacacatttagagtagtccttggagattttatggagatggtgagcacaaggtaagtcataaagaataatgagaaaataaatctatgctggtgcagctgagaactgtatctttgtgggacagtgagaagactgagaagatgtgaatccatggtctcaaaggtgatagggacgattagataggtgttttaaggcctgaaagcaatttataacatatgagtcttatttttatttatagaaatgtggaaagcttgctgtaattcatatttgaagtcctagtctgagttctggtggggaatttaaaaatgcatcctggaaatcctttaaagatttcagactttgaaaggccttgtagcagaggacttggtgactgtataaagttagtggtattcagggacagtgtagcaagtagcttacaaggggacaattctggactaatgagaaagacctgaagtgaaggctagagagttgatttttttttttttttggcatcctggaaatgatacaggaaacmtattaagatagayacagaaatgtgttcaaccttccatcttggctagttgtggcgtttagtttgttttttgagacatggtcacgctgtgtcgccaaggctggagtgcagtggtgcgatctcggctggctgcaacctctatttcccaggctcaagcgattctctcacttcagcttcccaagtagctgggactacaggtgttcgccaccatgcccagctaatttttttgtagagatggagttttgccatgtggtcccaggctggtctcaaactcctgagctcaagcaatccgtccacttgccttggctccccaaagtgctgggattacaggcgtgagccaccaggccctgcctggttttcaaattcagaaatcttattatttaacccagaagtaatcagcccagtagtaacttaggtttaattttttttcaggtttaaaatttttctcatttattttttctgagacggagtttcgcccttttcgcccaggctgagtacagtggtgcaatctcactgcaacctccgccttccagttgcaagtgattctcctgcctcagcctcctgagtagctgggattacaggcacccgccaccacgcctggctaatttttgtatttttagtggagatggtgtttcaccatgttggccagactggtcttggactcctgacctcgtgatccacccaccttggcctcccaaagttctaggattacaggtgtgagccaccacgtccggccaatttttctcatttctatgcctcctatattaaggtctgtgttggcacagatgagtaactgccatgttctaggtcagttatacccaagcacttctggtggtttaaaatgtgattctgtaacttttttatttttatttttttgagataatttcactcttgttgcccaggctggagtgcaatggcgtgatcgctgctcaccgcaacctccgccttccaggttcaagcgattctcctgactcagcctctcaagtagctgggattacaagcatgcgccaccatgcccagcttattttgtgtttttagtagagacagggtttctccatgctggacaggctggtcttgaactcccgacgtcaggtgatctacctgcctcggcctcccaaagtgctgggattacaggcgtgagccaccacgcctggccaattatgtaattttttaaaaaggacatttctatcagggatatataccttcagaaataaggaaataggggaaaaaaagagcactataaaccacatgttttcatttctagtgcttcgctgtaagtggctaggttggtagaatcaaaaacaagggccagatgtatttaaggggtattcagatgccacctacatgcttattttgtctagaacagtgctgtctaatagaactttctgtgacgatggatattttgtagacttttgctgtccagtgtggtagccactaaccacatgtggctgttaagcccttgaaatatagctagtgtgactagaaagtattttattttaaatttacataggcacaagtggctagtggctactgtattgacattctgggtctaggactagaaccagtggtctgtaacaaaagtactttctctttactctattaaatctagaattrgccgggcatggtcgctcrtgcctgtrrtcccagcactttgggaggccaaggcaggcagatcacttgaggtcaggcgtttgagaccagcctggtcaacatggcgaaaccctgtctctacaaaaaacataaaaattagccaggtgtggtggtgggcacctgtaatctcagctacttgggaggctgaggcacaagaatcacttgaacttgggaggtggaggttgcagtgagccaagattgtgccactgcactcaagcctgggtgacgagtgaaactgtctccaaaaaaaaaaaaaaatctag

SEQ ID NO: 3232 - DNA, 1204 bp, Homo sapiens
cctagcagccccacacaatacgctcatgtcctgtccccaaactctgccatcctgaaacacatgtcctctgtttccaggcaggccaggatcagatgggaagtggaacctcgtcatgaccagaaactatttccctacgaagagcacttggagatggcaatgctgaacctcacactgtaggattcacacacgactccaacgggattgtgagaatcaagtcactcttgtgggaagagtttttatatgggaaagcagataaaactttcattggactggaatgtttggagaatgttaatttccaaatcaggaaccacaaactgccctctaataagacatcagctatctaagcgtgtgggtgctccctttctgccagcagttctggttctkaagaaaatcgccatcaatcagacatgaaaactctggctccaaaaacagcattttctytgtgcaaataaaaagtgtgtatcaagtatgatgttcccccaactggacacactcggttcttcacaaagccaagcccgctgcagctgccacatccctgggcttacggtgcagcaggtgcttttttcaagacaggaatcaaaatgttaggaacacggcagaaagatgacacctggagaccaaacgcaggatgaggagtactgcagaagtcacagaacagtaatacgctagcaggggcatggggcatgaagaacagaagaagagaggaagtgtttctgagcctccagaaaagaaatcagagccaagcacagcttcccgggtcacagaaccaattcattcaccaggcggcaccactgccatcatttcaccttctggccactgggaggygctgctcgaaagggtttgccctgagactccgagaagaagctgcgggaaggacagcaggggtccyggggttttagcctctggcccaggagttatgtgtccataaccaaagggagcacagtctgcacccagctctcatcccatccgagctgctgcgattaccgcaggttcttccggaactggtttagcttgcctgcaggatcaggaaagtttgagaaaagcatctgcaaaaaaataaagagcagagcttaactcatttcctgtccccaccccatcccaggtcaccacctggctgaccccatgtccccaacccaacaacaacccctcccaagttcttaactccctcacttggactcgagactcttcacaccccagcagcgct

SEQ ID NO: 3233 - DNA, 1243 bp, Homo sapiens
cctagcagccccacacaatacgctcatgtcctgtccccaaactctgccatcctgaaacacatgtcctctgtttccaggcaggccaggatcagatgggaagtggaacctcgtcatgaccagaaactatttccctacgaagagcacttggagatggcaatgctgaacctcacactgtaggattcacacacgactccaacgggattgtgagaatcaagtcactcttgtgggaagagtttttatatgggaaagcagataaaactttcattggactggaatgtttggagaatgttaatttccaaatcaggaaccacaaactgccctctaataagacatcagctatctaagcgtgtgggtgctccctttctgccagcagttctggttctkaagaaaatcgccatcaatcagacatgaaaactctggctccaaaaacagcattttctytgtgcaaataaaaagtgtgtatcaagtatgatgacacactcggttcctcacaaagccaagcccgctgcagctgccacatccgtggacacactcggttcttcacaaagccaagcccgctgcagctgccacatccctgggcttacggtgcagcaggtgcttttttcaagacaggaatcaaaatgttaggaacacggcagaaagatgacacctggagaccaaacgcaggatgaggagtactgcagaagtcacagaacagtaatacgctagcaggggcatggggcatgaagaacagaagaagagaggaagtgtttctgagcctccagaaaagaaatcagagccaagcacagcttcccgggtcacagaaccaattcattcaccaggcggcaccactgccatcatttcaccttctggccactgggaggygctgctcgaaagggtttgccctgagactccgagaagaagctgcgggaaggacagcaggggtccyggggttttagcctctggcccaggagttatgtgtccataaccaaagggagcacagtctgcacccagctctcatcccatccgagctgctgcgattaccgcaggttcttccggaactggtttagcttgcctgcaggatcaggaaagtttgagaaaagcatctgcaaaaaaataaagagcagagcttaactcatttcctgtccccaccccatcccaggtcaccacctggctgaccccatgtccccaacccaacaacaacccctcccaagttcttaactccctcacttggactcgagactcttcacaccccagcagcgct

SEQ ID NO: 3234 - DNA, 2371 bp, Homo sapiens
gatacaggatggattttattttttacttatttatttttttgagacagagtctcactgtgttgcccaggctggattacygtggcacacctggggaacagagctcaaaaaaaataagataaaacatagatacagaaaaccacaaaggaaaaacatagcatattraatcatcacaaggcagccaccccttcatagccacacccggcccctggccaccactgacctgtgctctatcaccagaattccgttgtctcaggaatgttcaatgaatggaatcctgtgtggcctgagatgagtgtctttcatgccacatgacacccttgaggcccgtgcaagctgttggcatgtcaacagttagttgcttctcattgctgagtggcgattggtcctgtcatggtttattcagccatgtggtggatggctacttgtcttctaagccacttgccttctgatcgctggactgactctctcgccctctcttggtgcagccctcgggaggctcrgtcacactctctgagagcacagccatcatctcccacggcatcacaggcctggtcacatgagatgctgccctctaccttgcagaatgggccattgagaacccggcagccttctctcataggtgacctyggggtgcatggcagggcaccgaggcaggcttaccctggtgcagtcgcagacatggtcccctttcctcccgccaggactgtcctagagcttggcagtggcgccggcctcacaggcctggccatctgcaagatgtgcctcccccgggcatatatcttcagcgactgtcacagccgggtcctcaagaagctccgagggaatatccttctcaatggcctctcattagaggcagacatctctgccaacttagacaaccccagggtgacagtggcccagctggactgggatgtcgcgacagtccgtcagctctctgccatccagccagatgttgtcactgcagcagacgtgccgtattgcccagaagccaytgtgtcgctggtcggggtcctgcggaggctggctgcctaccgggagcaccaacgggctyctcaagtctatgtggcccttaccgtccgcaaccaagagacgtgccagctgttcaccaccgagctagctgagccaggatcagatgggaagtggaacctcgtcatgaccagaaactatttccctacgaagagcacttggagatggcaatgctgaacctcacactgtaggattcacacacgactccaacgggattgtgagaatcaagtcactcttgtgggaagagtttttatatgggaaagcagataaaactttcattggactggaatgtttggagaatgttaatttccaaatcaggaaccacaaactgccctctaataagacatcagctatctaagcgtgtgggtgctccctttctgccagcagttctggttctkaagaaaatcgccatcaatcagacatgaaaactctggctccaaaaacagcattttctytgtgcaaataaaaagtgtgtatcaagtatgattggacacactckgttccccacaaagccaagcccgctgcagctgccacatccctggacacactcggttcctcacaaagccaagcccgctgcagctgccacatccgtggacacactcggttcttcacaaagccaagcccgctgcagctgccacatccctgggcttacggtgcagcaggtgcttttttcaagacaggaatcaaaatgttaggaacacggcagaaagatgacacctggagaccaaacgcaggatgaggagtactgcagaagtcacagaacagtaatacgctagcaggggcatggggcatgaagaacagaagaagagaggaagtgtttctgagcctccagaaaagaaatcagagccaagcacagcttcccgggtcacagaaccaattcattcaccaggcggcaccactgccatcatttcaccttctggccactgggaggygctgctcgaaagggtttgccctgagactccgagaagaagctgcgggaaggacagcaggggtccyggggttttagcctctggcccaggagttatgtgtccataaccaaagggagcacagtctgcacccagctctcatcccatccgagctgctgcgattaccgcaggttcttccggaactggtttagcttgcctgcaggatcaggaaagtttgagaaaagcatctctgagctgccagttcctctgagtcctcaaagaccaggccattttcttcatgtttcaccagctcatttaaacacttgaagttcacggcacacgcaggcaaatagcacccgaacatgtccaccaccttcatgggcaggtccaggccactggagaacgtgtgcagacagacacccaggtccaccgaccctgct

SEQ ID NO: 3235 - DNA, 1756 bp, Homo sapiens
tttgcggtagactgtgaagcatcctgtgtgtgtgaagcaccggccgtcagtcaagtatgcccggtkctttctctcagaactcatcaaaaagacgtgccgtattgcccagaagccaytgtgtcgctggtcggggtcctgcggaggctggctgcctaccgggagcaccaacgggctyctcaagtctatgtggcccttaccgtccgcaaccaagagacgtgccagctgttcaccaccgagctagcaggccaggatcagatgggaagtggaacctcgtcatgaccagaaactatttccctacgaagagcacttggagatggcaatgctgaacctcacactgtaggattcacacacgactccaacgggattgtgagaatcaagtcactcttgtgggaagagtttttatatgggaaagcagataaaactttcattggactggaatgtttggagaatgttaatttccaaatcaggaaccacaaactgccctctaataagacatcagctatctaagcgtgtgggtgctccctttctgccagcagttctggttctkaagaaaatcgccatcaatcagacatgaaaactctggctccaaaaacagcattttctytgtgcaaataaaaagtgtgtatcaagtatgattggacacactckgttccccacaaagccaagcccgctgcagctgccacatccctggacacactcggttcctcacaaagccaagcccgctgcagctgccacatccgtggacacactcggttcttcacaaagccaagcccgctgcagctgccacatccctgggcttacggtgcagcaggtgcttttttcaagacaggaatcaaaatgttaggaacacggcagaaagatgacacctggagaccaaacgcaggatgaggagtactgcagaagtcacagaacagtaatacgctagcaggggcatggggcatgaagaacagaagaagagaggaagtgtttctgagcctccagaaaagaaatcagagccaagcacagcttcccgggtcacagaaccaattcattcaccaggcggcaccactgccatcatttcaccttctggccactgggaggygctgctcgaaagggtttgccctgagactccgagaagaagctgcgggaaggacagcaggggtccyggggttttagcctctggcccaggagttatgtgtccataaccaaagggagcacagtctgcacccagctctcatcccatccgagctgctgcgattaccgcaggttcttccggaactggtttagcttgcctgcaggatcaggaaagtttgagaaaagcatctgcaaaaaaataaagagcagagcttaactcatttcctgtccccaccccatcccaggtcaccacctggctgaccccatgtccccaacccaacaacaacccctcccaagttcttaactccctcacttggactcgagactcttcacaccccagcagcgctctgcctccaacttgacatcacgctttctggaaacttccccgtgtgtcccactttcccacacttggtgccctggagtacctcccggcctctacatgctgtatgttcccctgcaagcaccctccttttggcctctggccatgtcccacccatctgtgggtaacaagggggtgtctgtgttctttgcagccttgctaaactgtctgaatcaaggatcacaaactacagcctgcaggccaaatccagcccacagcctgtgtttgtaaataaagttttatttgaacagagccacacccctt

SEQ ID NO: 3236 - DNA, 4392 bp, Homo sapiens
tggcgcgtggacggggtgggggtggggggagggtcgggtgtcggcgagctccgcgtgcgggttccgagtggctgctggcggcctgggctgccggggccgacgcctgggtggctgctgccgccgcgcctgctgcgagatggcgatcttgggcgcggaagggtgagggcgcccgccgcaaggaggaggtgccgctgccgtggccgcccgcgctgccgggagccgacagcttcgcgccggggttgtctcctcacagactatgagctccttgaaagagggaatcgtgtcttactcatctttgtatccccagtgtctagcagttcctgatacatagttttagctgaattttgggacatggccactgcttcaccaaggtctgatactagtaataaccacagtggaaggttgcagttacaggtaactgtttctagtgccaaacttaaaagaaaaaagaactggttcggaacagcaatatatacagaagtagttgtagatggagaaattacgaaaacagcaaaatccagtagttcttctaatccaaaatgggatgaacagctaactgtaaatgttacgccacagactacattggaatttcaagtttggagccatcgcactttaaaagcagatgctttattaggaaaagcaacgatagatttgaaacaagctctgttgatacacaatagaaaattggaaagagtgaaagaacaattaaaactttccttggaaaacaagaatggcatagcacaaactggtgaattgacagttgtgcttgatggattggtgattgagcaagaaaatataacaaactgcagctcatctccaaccatagaaatacaggaaaatggtgatgccttacatgaaaatggagagccttcagcaaggacaactgccaggttggctgttgaaggcacgaatggaatagataatcatgtacctacaagcactctagtccaaaactcatgctgctcgtatgtagttaatggagacaacacaccttcatctccgtctcaggttgctgccagacccaaaaatacaccagctccaaaaccactcgcatctgagcctgccgatgacactgttaatggagaatcatcctcatttgcaccaactgataatgcgtctgtcacgggtactccagtagtgtctgaagaaaatgccttgtctccaaattgcactagtactactgttgaagatcctccagttcaagaaatactgacttcctcagaaaacaatgaatgtattccttctaccagtgcagaattggaatctgaagctagaagtatattagagcctgacacctctaattctagaagtagttctgcttttgaagcagccaaatcaagacagccagatgggtgtatggatcctgtacggcagcagtctgggaatgccaacacagaaaccttgccatcagggtgggaacaaagaaaagatcctcatggtagaacctattatgtggatcataatactcgaactaccacatgggagagaccacaacctttacctccaggttgggaaagaagagttgatgatcgtagaagagtttattatgtggatcataacaccagaacaacaacgtggcagcggcctaccatggaatctgtccgaaattttgaacagtggcaatctcagcggaaccaattgcagggagctatgcaacagtttaaccaacgatacctctattcggcttcaatgttagctgcagaaaatgacccttatggacctttgccaccaggctgggaaaaaagagtggattcaacagacagggtttactttgtgaatcataacacaaaaacaacccagtgggaagatccaagaactcaaggcttacagaatgaagaacccctgccagaaggctgggaaattagatatactcgtgaaggtgtaaggtactttgttgatcataacacaagaacaacaacattcaaagatcctcgcaatgggaagtcatctgtaactaaaggtggtccacaaattgcttatgaacgcggctttaggtggaagcttgctcacttccgttatttgtgccagtctaatgcactacctagtcatgtaaagatcaatgtgtcccggcagacattgtttgaagattccttccaacagattatggcattaaaaccctatgacttgaggaggcgcttatatgtaatatttagaggagaagaaggacttgattatggtggcctagcgagagaatggtttttcttgctttcacatgaagttttgaacccaatgtattgcttatttgagtatgcgggcaagaacaactattgtctgcagataaatccagcatcaaccattaatccagaccatctttcatacttctgtttcattggtcgttttattgccatggcactatttcatggaaagtttatcgatactggtttctctttaccattctacaagcgtatgttaagtaaaaaacttactattaaggatttggaatctattgatactgaattttataactcccttatctggataagagataacaacattgaagaatgtggcttagaaatgtacttttctgttgacatggagattttgggaaaagttacttcacatgacctgaagttgggaggttccaatattctggtgactgaggagaacaaagatgaatatattggtttaatgacagaatggcgtttttctcgaggagtacaagaacagaccaaagctttccttgatggttttaatgaagttgttcctcttcagtggctacagtacttcgatgaaaaagaattagaggttacagtttgtgaaagagacagacaatgaagtaagaatgcgactattgcagttcgtcactggaacctgccgtttacctctaggaggatttgctgagctcatgggaagtaatgggcctcaaaagttttgcattgaaaaagttggcaaagacacttggttaccaagaagccatacatgttttaatcgcttggatctaccaccatataagagttatgaacaactaaaggaaaaacttctttttgcaatagaagagacagagggatttggacaagaatgaatgtggcttcttattttggaggagctcttgcatttaaataccccagccaagaaaaattgcacagatagtgtatataagctgttcattctgtacagtgaattttccgaacctctcaaagtatgttttccgttcttccacagaaatatgcaaaacagttcatccttttctactttatttattgttcccttgaaatgactgaccaggaaaaagatcatccttaaattttgaagcaagtgagagactttattaaaaatacatatatatctatataaacatatatgatagtggctctagttttatagagctccaagtgtattaaacatgacagccattcattcataaagatctggatttgctttaccttgttaatattatctaggggaaaaagtgcaaattgctccatgttcttctctcccttatgtaacatctcctgagggtgtttagttgcatggctgttcagaaaggtattaagggcttaggccaaatcttactttgagtatgttaaaaaaaaaaaaatgctgctggcttttctgaagacaggtgcttgaacttgtcagtttgttttaaataaatacaatagttgaaaatttttctctgttacatcagtaatattgttaaagtaatggatagaaccataacttacacatgaaagtcatatactagatccaatactatttagtttattatygaaattggaaggattcattgagcagcatagaagtttgtttacatgttactttgagatgctaggtatttgtggaattaaaaagaatcaggctcttttgtactttgtttttaaatctgtgatgcttttcaaatttaattcataataaattgatgcaatttcatacttaggaacatacaaaaggtaatgtaaactctgccacttttttgtgttcaaaattttggtttttatgaagccagatggattgaagagttacataagcatttgaatgctctaatataaggctaatrattttctgttagtgtttgaatatcttcattcctctcaaattcataacagttctatttaactgaattaaataaccatatgaaaaatcttttgggtctccccctttttacacagataattatttttgtcataacactttttaattgtttttcatcataggggcctttgctgaactacaaaaatgtgtaacaaattaaaatctgatgtgaatgatattaatgctacttttagcaaactgggcttcctaatacaaaattttaaatttccatttgtatcatgcttttaatatgcactgtaaatttcattaacttaaacattttttaatagccatggaactgacttcttaaaatctgttgcctataaatatttcactgctaagtacatacagaaaaacagt

SEQ ID NO: 3237 - DNA, 4320 bp, Homo sapiens
tggcgcgtggacggggtgggggtggggggagggtcgggtgtcggcgagctccgcgtgcgggttccgagtggctgctggcggcctgggctgccggggccgacgcctgggtggctgctgccgccgcgcctgctgcgagatggcgatcttgggcgcggaagggtgagggcgcccgccgcaaggaggaggtgccgctgccgtggccgcccgcgctgccgggagccgacagcttcgcgccggggttgtctcctcacagactatgagctccttgaaagagggaatcgtgtcttactcatctttgtatccccagtgtctagcagttcctgatacatagttttagctgaattttgggacatggccactgcttcaccaaggtctgatactagtaataaccacagtggaaggttgcagttacaggtaactgtttctagtgccaaacttaaaagaaaaaagaactggttcggaacagcaatatatacagaagtagttgtagatggagaaattacgaaaacagcaaaatccagtagttcttctaatccaaaatgggatgaacagctaactgtaaatgttacgccacagactacattggaatttcaagtttggagccatcgcactttaaaagcagatgctttattaggaaaagcaacgatagatttgaaacaagctctgttgatacacaatagaaaattggaaagagtgaaagaacaattaaaactttccttggaaaacaagaatggcatagcacaaactggtgaattgacagttgtgcttgatggattggtgattgagcaagaaaatataacaaactgcagctcatctccaaccatagaaatacaggaaaatggtgatgccttacatgaaaatggagagccttcagcaaggacaactgccaggttggctgttgaaggcacgaatggaatagataatcatgtacctacaagcactctagtccaaaactcatgctgctcgtatgtagttaatggagacaacacaccttcatctccgtctcaggttgctgccagacccaaaaatacaccagctccaaaaccactcgcatctgagcctgccgatgacactgttaatggagaatcatcctcatttgcaccaactgataatgcgtctgtcacgggtactccagtagtgtctgaagaaaatgccttgtctccaaattgcactagtactactgttgaagatcctccagttcaagaaatactgacttcctcagaaaacaatgaatgtattccttctaccagtgcagaattggaatctgaagctagaagtatattagagcctgacacctctaattctagaagtagttctgcttttgaagcagccaaatcaagacagccagatgggtgtatggatcctgtacggcagcagtctgggaatgccaacacagaaaccttgccatcagggtgggaacaaagaaaagatcctcatggtagaacctattatgtggatcataatactcgaactaccacatgggagagaccacaacctttacctccaggttgggaaagaagagttgatgatcgtagaagagtttattatgtggatcataacaccagaacaacaacgtggcagcggcctaccatggaatctgtccgaaattttgaacagtggcaatctcagcggaaccaattgcagggagctatgcaacagtttaaccaacgatacctctattcggcttcaatgttagctgcagaaaatgacccttatggacctttgccaccaggctgggaaaaaagagtggattcaacagacagggtttactttgtgaatcataacacaaaaacaacccagtgggaagatccaagaactcaaggcttacagaatgaagaacccctgccagaaggctgggaaattagatatactcgtgaaggtgtaaggtactttgttgatcataacacaagaacaacaacattcaaagatcctcgcaatgggaagtcatctgtaactaaaggtggtccacaaattgcttatgaacgcggctttaggtggaagcttgctcacttccgttatttgtgccagattatggcattaaaaccctatgacttgaggaggcgcttatatgtaatatttagaggagaagaaggacttgattatggtggcctagcgagagaatggtttttcttgctttcacatgaagttttgaacccaatgtattgcttatttgagtatgcgggcaagaacaactattgtctgcagataaatccagcatcaaccattaatccagaccatctttcatacttctgtttcattggtcgttttattgccatggcactatttcatggaaagtttatcgatactggtttctctttaccattctacaagcgtatgttaagtaaaaaacttactattaaggatttggaatctattgatactgaattttataactcccttatctggataagagataacaacattgaagaatgtggcttagaaatgtacttttctgttgacatggagattttgggaaaagttacttcacatgacctgaagttgggaggttccaatattctggtgactgaggagaacaaagatgaatatattggtttaatgacagaatggcgtttttctcgaggagtacaagaacagaccaaagctttccttgatggttttaatgaagttgttcctcttcagtggctacagtacttcgatgaaaaagaattagaggttacagtttgtgaaagagacagacaatgaagtaagaatgcgactattgcagttcgtcactggaacctgccgtttacctctaggaggatttgctgagctcatgggaagtaatgggcctcaaaagttttgcattgaaaaagttggcaaagacacttggttaccaagaagccatacatgttttaatcgcttggatctaccaccatataagagttatgaacaactaaaggaaaaacttctttttgcaatagaagagacagagggatttggacaagaatgaatgtggcttcttattttggaggagctcttgcatttaaataccccagccaagaaaaattgcacagatagtgtatataagctgttcattctgtacagtgaattttccgaacctctcaaagtatgttttccgttcttccacagaaatatgcaaaacagttcatccttttctactttatttattgttcccttgaaatgactgaccaggaaaaagatcatccttaaattttgaagcaagtgagagactttattaaaaatacatatatatctatataaacatatatgatagtggctctagttttatagagctccaagtgtattaaacatgacagccattcattcataaagatctggatttgctttaccttgttaatattatctaggggaaaaagtgcaaattgctccatgttcttctctcccttatgtaacatctcctgagggtgtttagttgcatggctgttcagaaaggtattaagggcttaggccaaatcttactttgagtatgttaaaaaaaaaaaaatgctgctggcttttctgaagacaggtgcttgaacttgtcagtttgttttaaataaatacaatagttgaaaatttttctctgttacatcagtaatattgttaaagtaatggatagaaccataacttacacatgaaagtcatatactagatccaatactatttagtttattatygaaattggaaggattcattgagcagcatagaagtttgtttacatgttactttgagatgctaggtatttgtggaattaaaaagaatcaggctcttttgtactttgtttttaaatctgtgatgcttttcaaatttaattcataataaattgatgcaatttcatacttaggaacatacaaaaggtaatgtaaactctgccacttttttgtgttcaaaattttggtttttatgaagccagatggattgaagagttacataagcatttgaatgctctaatataaggctaatrattttctgttagtgtttgaatatcttcattcctctcaaattcataacagttctatttaactgaattaaataaccatatgaaaaatcttttgggtctccccctttttacacagataattatttttgtcataacactttttaattgtttttcatcataggggcctttgctgaactacaaaaatgtgtaacaaattaaaatctgatgtgaatgatattaatgctacttttagcaaactgggcttcctaatacaaaattttaaatttccatttgtatcatgcttttaatatgcactgtaaatttcattaacttaaacattttttaatagccatggaactgacttcttaaaatctgttgcctataaatatttcactgctaagtacatacagaaaaacagt

SEQ ID NO: 3238 - DNA, 3975 bp, Homo sapiens
tggcgcgtggacggggtgggggtggggggagggtcgggtgtcggcgagctccgcgtgcgggttccgagtggctgctggcggcctgggctgccggggccgacgcctgggtggctgctgccgccgcgcctgctgcgagatggcgatcttgggcgcggaagggtgagggcgcccgccgcaaggaggaggtgccgctgccgtggccgcccgcgctgccgggagccgacagcttcgcgccggggttgtctcctcacagactatgagctccttgaaagagggaatcgtgtcttactcatctttgtatccccagtgtctagcagttcctgatacatagttttagctgaattttgggacatggccactgcttcaccaaggtctgatactagtaataaccacagtggaaggttgcagttacaggtaactgtttctagtgccaaacttaaaagaaaaaagaactggttcggaacagcaatatatacagaagtagttgtagatggagaaattacgaaaacagcaaaatccagtagttcttctaatccaaaatgggatgaacagctaactgtaaatgttacgccacagactacattggaatttcaagtttggagccatcgcactttaaaagcagatgctttattaggaaaagcaacgatagatttgaaacaagctctgttgatacacaatagaaaattggaaagagtgaaagaacaattaaaactttccttggaaaacaagaatggcatagcacaaactggtgaattgacagttgtgcttgatggattggtgattgagcaagaaaatataacaaactgcagctcatctccaaccatagaaatacaggaaaatggtgatgccttacatgaaaatggagagccttcagcaaggacaactgccaggttggctgttgaaggcacgaatggaatagataatcatgtacctacaagcactctagtccaaaactcatgctgctcgtatgtagttaatggagacaacacaccttcatctccgtctcaggttgctgccagacccaaaaatacaccagctccaaaaccactcgcatctgagcctgccgatgacactgttaatggagaatcatcctcatttgcaccaactgataatgcgtctgtcacgggtactccagtagtgtctgaagaaaatgccttgtctccaaattgcactagtactactgttgaagatcctccagttcaagaaatactgacttcctcagaaaacaatgaatgtattccttctaccagtgcagaattggaatctgaagctagaagtatattagagcctgacacctctaattctagaagtagttctgcttttgaagcagccaaatcaagacagccagatgggtgtatggatcctgtacggcagcagtctgggaatgccaacacagaaaccttgccatcagggtgggaacaaagaaaagatcctcatggtagaacctattatgtggatcataatactcgaactaccacatgggagagaccacaacctttacctccaggttgggaaagaagagttgatgatcgtagaagagtttattatgtggatcataacaccagaacaacaacgtggcagcggcctaccatggaatctgtccgaaattttgaacagtggcaatctcagcggaaccaattgcagggagctatgcaacagtttaaccaacgatacctctattcggcttcaatgttagctgcagaaaatgacccttatggacctttgccaccaggctgggaaaaaagagtggattcaacagacagggtttactttgtgaatcataacacaaaaacaacccagtgggaagatccaagaactcaaggcttacagaatgaagaacccctgccagaaggctgggaaattagatatactcgtgaaggtgtaaggtactttgttgatcataacacaagaacaacaacattcaaagatcctcgcaatgggaagtcatctgtaactaaaggtggtccacaaattgcttatgaacgcggctttaggtggaagcttgctcacttccgttatttgtgccagtctaatgcactacctagtcatgtaaagatcaatgtgtcccggcagacattgtttgaagattccttccaacagattatggcattaaaaccctatgacttgaggaggcgcttatatgtaatatttagaggagaagaaggacttgattatggtggcctagcgagagaatggtttttcttgctttcacatgaagttttgaacccaatgtattgcttatttgagtatgcgggcaagaacaactattgtctgcagataaatccagcatcaaccattaatccagaccatctttcatacttctgtttcattggtcgttttattgccatggcactatttcatggaaagtttatcgatactggtttctctttaccattctacaagcgtatgttaagtaaaaaacttactattaaggatttggaatctattgatactgaattttataactcccttatctggataagagataacaacattgaagaatgtggcttagaaatgtacttttctgttgacatggagattttgggaaaagttacttcacatgacctgaagttgggaggttccaatattctggtgactgaggagaacaaagatgaatatattggtttaatgacagaatggcgtttttctcgaggagtacaagaacagaccaaagctttccttgatggttttaatgaagttgttcctcttcagtggctacagtacttcgatgaaaaagaattagaggttcagtttgtgaaagagacagacaatgaagtaagaatgcgactattgcagttcgtcactggaacctgccgtttacctctaggaggatttgctgagctcatgggaagtaatgggcctcaaaagttttgcattgaaaaagttggcaaagacacttggttaccaagaagccatacatgttttaatcgcttggatctaccaccatataagagttatgaacaactaaaggaaaaacttctttttgcaatagaagagacagagggatttggacaagaatgaatgtggcttcttattttggaggagctcttgcatttaaataccccagccaagaaaaattgcacagatagtgtatataagctgttcattctgtacagtgaattttccgaacctctcaaagtatgttttccgttcttccacagaaatatgcaaaacagttcatccttttctactttatttattgttcccttgaaatgactgaccaggaaaaagatcatccttaaattttgaagcaagtgagagactttattaaaaatacatatatatctatataaacatatatgatagtggctctagttttatagagctccaagtgtattaaacatgacagccattcattcataaagatctggatttgctttaccttgttaatattatctaggggaaaaagtgcaaattgctccatgttcttctctcccttatgtaacatctcctgagggtgtttagttgcatggctgttcagaaaggtattaagggcttaggccaaatcttactttgagtatgttaaaaaaaaaaaaatgctgctggcttttctgaagacaggtgcttgaacttgtcagtttgttttaaataaatacaatagttgaaaatttttctctgttacatcagtaatattgttaaagtaatggatagaaccataacttacacatgaaagtcatatactagatccaatactatttagtttattatygaaattggaaggattcattgagcagcatagaagtttgtttacatgttactttgagatgctaggtatttgtggaattaaaaagaatcaggctcttttgtactttgtttttaaatctgtgatgcttttcaaatttaattcataataaattgatgcaatttcatacttaggaacatacaaaaggtaatgtaaactctgccacttttttttgaatgctctaatataaggctaatrattttctgttagtgtttgaatatcttcattcctct

SEQ ID NO: 3239 - DNA, 4155 bp, Homo sapiens
ggttgtctcctcacagactatgagctccttgaaagagggaatcgtgtcttactcatctttgtatccccagtgtctagcagttcctgatacatagttttagctgaattttgggacatggccactgcttcaccaaggtctgatactagtaataaccacagtggaaggttgcagttacaggtaactgtttctagtgccaaacttaaaagaaaaaagaactggttcggaacagcaatatatacagaagtagttgtagatggagaaattacgaaaacagcaaaatccagtagttcttctaatccaaaatgggatgaacagctaactgtaaatgttacgccacagactacattggaatttcaagtttggagccatcgcactttaaaagcagatgctttattaggaaaagcaacgatagatttgaaacaagctctgttgatacacaatagaaaattggaaagagtgaaagaacaattaaaactttccttggaaaacaagaatggcatagcacaaactggtgaattgacagttgtgcttgatggattggtgattgagcaagaaaatataacaaactgcagctcatctccaaccatagaaatacaggaaaatggtgatgccttacatgaaaatggagagccttcagcaaggacaactgccaggttggctgttgaaggcacgaatggaatagataatcatgtacctacaagcactctagtccaaaactcatgctgctcgtatgtagttaatggagacaacacaccttcatctccgtctcaggttgctgccagacccaaaaatacaccagctccaaaaccactcgcatctgagcctgccgatgacactgttaatggagaatcatcctcatttgcaccaactgataatgcgtctgtcacgggtactccagtagtgtctgaagaaaatgccttgtctccaaattgcactagtactactgttgaagatcctccagttcaagaaatactgacttcctcagaaaacaatgaatgtattccttctaccagtgcagaattggaatctgaagctagaagtatattagagcctgacacctctaattctagaagtagttctgcttttgaagcagccaaatcaagacagccagatgggtgtatggatcctgtacggcagcagtctgggaatgccaacacagaaaccttgccatcagggtgggaacaaagaaaagatcctcatggtagaacctattatgtggatcataatactcgaactaccacatgggagagaccacaacctttacctccaggttgggaaagaagagttgatgatcgtagaagagtttattatgtggatcataacaccagaacaacaacgtggcagcggcctaccatggaatctgtccgaaattttgaacagtggcaatctcagcggaaccaattgcagggagctatgcaacagtttaaccaacgatacctctattcggcttcaatgttagctgcagaaaatgacccttatggacctttgccaccaggctgggaaaaaagagtggattcaacagacagggtttactttgtgaatcataacacaaaaacaacccagtgggaagatccaagaactcaaggcttacagaatgaagaacccctgccagaaggctgggaaattagatatactcgtgaaggtgtaaggtactttgttgatcataacacaagaacaacaacattcaaagatcctcgcaatgggaagtcatctgtaactaaaggtggtccacaaattgcttatgaacgcggctttaggtggaagcttgctcacttccgttatttgtgccagtctaatgcactacctagtcatgtaaagatcaatgtgtcccggcagacattgtttgaagattccttccaacagattatggcattaaaaccctatgacttgaggaggcgcttatatgtaatatttagaggagaagaaggacttgattatggtggcctagcgagagaatggtttttcttgctttcacatgaagttttgaacccaatgtattgcttatttgagtatgcgggcaagaacaactattgtctgcagataaatccagcatcaaccattaatccagaccatctttcatacttctgtttcattggtcgttttattgccatggcactatttcatggaaagtttatcgatactggtttctctttaccattctacaagcgtatgttaagtaaaaaacttactattaaggatttggaatctattgatactgaattttataactcccttatctggataagagataacaacattgaagaatgtggcttagaaatgtacttttctgttgacatggagattttgggaaaagttacttcacatgacctgaagttgggaggttccaatattctggtgactgaggagaacaaagatgaatatattggtttaatgacagaatggcgtttttctcgaggagtacaagaacagaccaaagctttccttgatggttttaatgaagttgttcctcttcagtggctacagtacttcgatgaaaaagaattagaggttacagtttgtgaaagagacagacaatgaagtaagaatgcgactattgcagttcgtcactggaacctgccgtttacctctaggaggatttgctgagctcatgggaagtaatgggcctcaaaagttttgcattgaaaaagttggcaaagacacttggttaccaagaagccatacatgttttaatcgcttggatctaccaccatataagagttatgaacaactaaaggaaaaacttctttttgcaatagaagagacagagggatttggacaagaatgaatgtggcttcttattttggaggagctcttgcatttaaataccccagccaagaaaaattgcacagatagtgtatataagctgttcattctgtacagtgaattttccgaacctctcaaagtatgttttccgttcttccacagaaatatgcaaaacagttcatccttttctactttatttattgttcccttgaaatgactgaccaggaaaaagatcatccttaaattttgaagcaagtgagagactttattaaaaatacatatatatctatataaacatatatgatagtggctctagttttatagagctccaagtgtattaaacatgacagccattcattcataaagatctggatttgctttaccttgttaatattatctaggggaaaaagtgcaaattgctccatgttcttctctcccttatgtaacatctcctgagggtgtttagttgcatggctgttcagaaaggtattaagggcttaggccaaatcttactttgagtatgttaaaaaaaaaaaaatgctgctggcttttctgaagacaggtgcttgaacttgtcagtttgttttaaataaatacaatagttgaaaatttttctctgttacatcagtaatattgttaaagtaatggatagaaccataacttacacatgaaagtcatatactagatccaatactatttagtttattatygaaattggaaggattcattgagcagcatagaagtttgtttacatgttactttgagatgctaggtatttgtggaattaaaaagaatcaggctcttttgtactttgtttttaaatctgtgatgcttttcaaatttaattcataataaattgatgcaatttcatacttaggaacatacaaaaggtaatgtaaactctgccacttttttgtgttcaaaattttggtttttatgaagccagatggattgaagagttacataagcatttgaatgctctaatataaggctaatrattttctgttagtgtttgaatatcttcattcctctcaaattcataacagttctatttaactgaattaaataaccatatgaaaaatcttttgggtctccccctttttacacagataattatttttgtcataacactttttaattgtttttcatcataggggcctttgctgaactacaaaaatgtgtaacaaattaaaatctgatgtgaatgatattaatgctacttttagcaaactgggcttcctaatacaaaattttaaatttccatttgtatcatgcttttaatatgcactgtaaatttcattaacttaaacattttttaatagccatggaactgacttcttaaaatctgttgcctataaatatttcactgctaagtacatacagaaaaacagt

SEQ ID NO: 3240 - DNA, 4044 bp, Homo sapiens
attttgggacatggccactgcttcaccaaggtctgatactagtaataaccacagtggaaggttgcagttacagtttctagtgccaaacttaaaagaaaaaagaactggttcggaacagcaatatatacagaagtagttgtagatggagaaattacgaaaacagcaaaatccagtagttcttctaatccaaaatgggatgaacagctaactgtaaatgttacgccacagactacattggaatttcaagtttggagccatcgcactttaaaagcagatgctttattaggaaaagcaacgatagatttgaaacaagctctgttgatacacaatagaaaattggaaagagtgaaagaacaattaaaactttccttggaaaacaagaatggcatagcacaaactggtgaattgacagttgtgcttgatggattggtgattgagcaagaaaatataacaaactgcagctcatctccaaccatagaaatacaggaaaatggtgatgccttacatgaaaatggagagccttcagcaaggacaactgccaggttggctgttgaaggcacgaatggaatagataatcatgtacctacaagcactctagtccaaaactcatgctgctcgtatgtagttaatggagacaacacaccttcatctccgtctcaggttgctgccagacccaaaaatacaccagctccaaaaccactcgcatctgagcctgccgatgacactgttaatggagaatcatcctcatttgcaccaactgataatgcgtctgtcacgggtactccagtagtgtctgaagaaaatgccttgtctccaaattgcactagtactactgttgaagatcctccagttcaagaaatactgacttcctcagaaaacaatgaatgtattccttctaccagtgcagaattggaatctgaagctagaagtatattagagcctgacacctctaattctagaagtagttctgcttttgaagcagccaaatcaagacagccagatgggtgtatggatcctgtacggcagcagtctgggaatgccaacacagaaaccttgccatcagggtgggaacaaagaaaagatcctcatggtagaacctattatgtggatcataatactcgaactaccacatgggagagaccacaacctttacctccaggttgggaaagaagagttgatgatcgtagaagagtttattatgtggatcataacaccagaacaacaacgtggcagcggcctaccatggaatctgtccgaaattttgaacagtggcaatctcagcggaaccaattgcagggagctatgcaacagtttaaccaacgatacctctattcggcttcaatgttagctgcagaaaatgacccttatggacctttgccaccaggctgggaaaaaagagtggattcaacagacagggtttactttgtgaatcataacacaaaaacaacccagtgggaagatccaagaactcaaggcttacagaatgaagaacccctgccagaaggctgggaaattagatatactcgtgaaggtgtaaggtactttgttgatcataacacaagaacaacaacattcaaagatcctcgcaatgggaagtcatctgtaactaaaggtggtccacaaattgcttatgaacgcggctttaggtggaagcttgctcacttccgttatttgtgccagtctaatgcactacctagtcatgtaaagatcaatgtgtcccggcagacattgtttgaagattccttccaacagattatggcattaaaaccctatgacttgaggaggcgcttatatgtaatatttagaggagaagaaggacttgattatggtggcctagcgagagaatggtttttcttgctttcacatgaagttttgaacccaatgtattgcttatttgagtatgcgggcaagaacaactattgtctgcagataaatccagcatcaaccattaatccagaccatctttcatacttctgtttcattggtcgttttattgccatggcactatttcatggaaagtttatcgatactggtttctctttaccattctacaagcgtatgttaagtaaaaaacttactattaaggatttggaatctattgatactgaattttataactcccttatctggataagagataacaacattgaagaatgtggcttagaaatgtacttttctgttgacatggagattttgggaaaagttacttcacatgacctgaagttgggaggttccaatattctggtgactgaggagaacaaagatgaatatattggtttaatgacagaatggcgtttttctcgaggagtacaagaacagaccaaagctttccttgatggttttaatgaagttgttcctcttcagtggctacagtacttcgatgaaaaagaattagaggttacagtttgtgaaagagacagacaatgaagtaagaatgcgactattgcagttcgtcactggaacctgccgtttacctctaggaggatttgctgagctcatgggaagtaatgggcctcaaaagttttgcattgaaaaagttggcaaagacacttggttaccaagaagccatacatgttttaatcgcttggatctaccaccatataagagttatgaacaactaaaggaaaaacttctttttgcaatagaagagacagagggatttggacaagaatgaatgtggcttcttattttggaggagctcttgcatttaaataccccagccaagaaaaattgcacagatagtgtatataagctgttcattctgtacagtgaattttccgaacctctcaaagtatgttttccgttcttccacagaaatatgcaaaacagttcatccttttctactttatttattgttcccttgaaatgactgaccaggaaaaagatcatccttaaattttgaagcaagtgagagactttattaaaaatacatatatatctatataaacatatatgatagtggctctagttttatagagctccaagtgtattaaacatgacagccattcattcataaagatctggatttgctttaccttgttaatattatctaggggaaaaagtgcaaattgctccatgttcttctctcccttatgtaacatctcctgagggtgtttagttgcatggctgttcagaaaggtattaagggcttaggccaaatcttactttgagtatgttaaaaaaaaaaaaatgctgctggcttttctgaagacaggtgcttgaacttgtcagtttgttttaaataaatacaatagttgaaaatttttctctgttacatcagtaatattgttaaagtaatggatagaaccataacttacacatgaaagtcatatactagatccaatactatttagtttattatygaaattggaaggattcattgagcagcatagaagtttgtttacatgttactttgagatgctaggtatttgtggaattaaaaagaatcaggctcttttgtactttgtttttaaatctgtgatgcttttcaaatttaattcataataaattgatgcaatttcatacttaggaacatacaaaaggtaatgtaaactctgccacttttttgtgttcaaaattttggtttttatgaagccagatggattgaagagttacataagcatttgaatgctctaatataaggctaatrattttctgttagtgtttgaatatcttcattcctctcaaattcataacagttctatttaactgaattaaataaccatatgaaaaatcttttgggtctccccctttttacacagataattatttttgtcataacactttttaattgtttttcatcataggggcctttgctgaactacaaaaatgtgtaacaaattaaaatctgatgtgaatgatattaatgctacttttagcaaactgggcttcctaatacaaaattttaaatttccatttgtatcatgcttttaatatgcactgtaaatttcattaacttaaacattttttaatagccatggaactgacttcttaaaatctgttgcctataaatatttcactgctaagtacatacagaaaaacagt

SEQ ID NO: 3241 - DNA, 738 bp, Homo sapiens
atgtatggagccccagagggaactcaaaatcatgtccgagacagtgctagagttcagccagggaactttactagatcagttgttatggctaggagggttggtgacaaaagaagggagcttgaactggggatggatgaagacaaaaagaagaagaagaaatatgtgggaggaacgactgagaaatgccatgagtgggggactgtgtggctggtggctgggctttcagtgttctcgggggcatgtactacgtttgagacagaaccatataagggatccaggacagatgagatcaccccattaaattcacctggcattatttatcctcccctgcagcctgagcttcctttgttaaaggaagctgcaaactgctgcatgcaagacracacaagcagtttggatggacaccccaagggagggtctaagtcacagaactgtctgtggaactccctcatcgatgggctcacagggaatgtcaaggagaagccaaggccaacaattgtccatgaccctcgacccccagaggaratcctagctgatgaattgccacagctggatagcycagaagtcttggtgaagacatccttcaggtttggtggattgcaactcartgtgttccttcttattygcttgtggagttgtttcaatccagttagatgcatagtcagtgtggccagcaaattacttcatttctttgcactgartaaattaaaattgatgaaggagggttggaatcaatgc

SEQ ID NO: 3242 - DNA, 3570 bp, Homo sapiens
cgagcgagagagcccctttagcaagaaaacatcaagagtttttgagtgtggtgtgtggttcccttcgtccccatcagtcgcttcaatatttcaaaatggatccggttctgtggcgggtgcgagagtgaggctgtgggggacctccaggcccaacctccgcgaagcctcgcggcttctgcgtgccctggccccgggaggataaggatttcccttccctcctacttgcgcgcggagccgagctcttgttgaggtgagggttccggaagcccacgcagctccgcaggtcggtggtggccgcggctgccctgcgggggtgagtgtgcccggccggggtcggagcccagcgtgtgcccggcagacggcggtgcccgcgcgcccctccctccgcgcccgcggtgacagcccagacaccagcccgggcgctgacagacgacttttctcacttgtcagttttctcgcttgtcagcagagctgctgctatggagtcgccaaccaaggagattgaagaatttgagagcaactctctgaaatacctgcaaccggaacagatcgagaaaatctggcttcggctccgcgggctgaggaaatataagaaaacgtcccagagagattacggtctttggtcaaacaattagagagaggggaagcttcagtggtagatcttaagaagaatttggaatatgcagcyacagtgcttgaatctgtgtatattgatgaaacaaggagactcctggatacagaggatgagctcagtgacattcagtcagatgctgtgccttctgaggtccgagactggctggcctccaccttcacgcggcagatgggkatgatgctcaggaggagcgacgagaagccccggttcaagagcatcgttcacgcagtgcaggctgggatatttgtggagagaatgtatagacggacatcaaacatggttggactgagctatccaccagctgttattgaggcattaaaggatgtggacaagtggtcctttgacgtcttttccctcaatgaggccagtggggatcatgcactgaaatttattttctatgaactactcacacgttatgatctgatcagccgtttcaagatccccatttctgcacttgtctcatttgtggaggccctggaagtgggatacagcaagcacaaaaatccttaccataacttaatgcaygctgccgatgtyacacagacagtgcattacctcctctataagacaggagtggcgaactggctgacggagctggagatctttgctataatcttctcagctgccatccatgactacgagcataccggaaccaccaacaatttccacattcagactcggtctgatccagctattctgtataatgacagatctgtactggagaatcaccatttaagtgcagcttatcgccttctgcaagatgacgaggaaatgaatattttgattaacctctcaaaggatgactggagggagtttcgaaccttggtaattgaaatggtgatggccacagatatgtcttgtcacttccaacaaatcaaagcaatgaagactgctctgcagcagccagaagccattgaaaagccaaaagccttatcccttatgctgcatacagcagatattagccatccagcaaaagcatgggacctccatcatcgctggacaatgtcactcctggaggagttcttcagacagggtgacagagaagcagagctggggctgcctttttctcctctgtgtgaccgaaagtccactatggttgctcagtcacaagtaggtttcattgatttcatcgtggaacccaccttcactgtgcttacggacatgaccgagaagattgtgagtccattaatcgatgaaacctctcaaactggtgggacaggacagaggcgttcgagtttgaatagcatcagctcgtcagatgccaagcgatcaggtgtcaagacctctggttcagagggaagtgccccgatcaacaattctgtcatctccgttgactataagrgctttaaagctacttggacggaagtggtgcacatcaatcgggagagatggagggccaaggtacccaaagaggagaaggccaagaaggaagcagaggaaaaggctcgcctggccgcagaggagcagcaaaaggaaatggaagccaaaagccaggctgaagaaggcgcatctggcaaagctgagaaaaagacgtctggagaaactaagaatcaastcaatggaacacgggcaaacaaaagtgacaaccctcgtgggaaaaaytccaaagcygagaagtcatcaggagaacagcaacagaatggtgacttcaaagatggyaaaaataagacagacaagaaggatcactctaacatcggaaatgattcaaagaaaacagatgattcacaagagtaaaaaagacctcatagacaataaaagaggctgccagtgtcttgcatcattctagctgagcttcttcattctccttcttctccttcttccacaaagacccatatctggagaaggtgtacaactttcaaacacaagccccccaccccctgacccttggccttccctcacaccatctccttccaggggatgaatctttgggggttggtttgaggtcttagaactctgggggatattcccctgagcaaaacaaacaacgtgagatttttactcaaacagaaacaaaacatgaaggggcatcctcaaaatcctttgctaatgacctggctttcaaggcatctgtctggcctgatgagaatggacatcctggatatgctgggagaggcctgaaaaaagccacacacacagtaattgccattttatgactgtcaatgccgttactttaaatgttgtcatttttgcactggctactgatgatacagccatgctgacattcatcaccgcaaagatgatgattccagtctctggttcctttcctgagtcaggaacatttgttttctccaatttcctttcagacttaaaattgttcttatgctttttttcccacttctgtaatacagaattctgtttgttttctaaaaaagattattctryaggaatctttatttgatggctaatttattttctctgtgcattcattagtataaacctgaatgttcagctggtgactgtactgttgagtgggaacccattgtttccactggtagcatygataactaagtggttactgaaatttttaccactggctggacatcttcttttggatatctgtggttttatttcatcactcttctttttattcagtaaagtgctaagggaattagtatcagggagatatggcagataattctttgcattttagtgagtttttaaaaatacaagatagaagtggattaatagcacgaataaaaaataagaatagtagatgtagcatggaaagagaataacattgcagcccccttgagaccaaattacaggtgggatctaagggagtgcaagtaaagtgggattttatgagtctaaatgatgtgatttagataaaagtgattcttaaaatgtggttattggtcacacaggaatctctgagtccttcccaagagtgaagcacatgaatatgctgatgatgaagt

SEQ ID NO: 3243 - DNA, 4429 bp, Homo sapiens
ttgcaaatgaagctggagacaagaatgccagaccactggcccgcttctctcggtctaagtcacagaactgtctgtggaactccctcatcgatgggctcacagggaatgtcaaggagaagccaaggccaacaattgtccatgaccctcgacccccagaggaratcctagctgatgaattgccacagctggatagcycagaagtcttggtgaagacatccttcagattacggtctttggtcaaacaattagagagaggggaagcttcagtggtagatcttaagaagaatttggaatatgcagcyacagtgcttgaatctgtgtatattgatgaaacaaggagactcctggatacagaggatgagctcagtgacattcagtcagatgctgtgccttctgaggtccgagactggctggcctccaccttcacgcggcagatgggkatgatgctcaggaggagcgacgagaagccccggttcaagagcatcgttcacgcagtgcaggctgggatatttgtggagagaatgtatagacggacatcaaacatggttggactgagctatccaccagctgttattgaggcattaaaggatgtggacaagtggtcctttgacgtcttttccctcaatgaggccagtggggatcatgcactgaaatttattttctatgaactactcacacgttatgatctgatcagccgtttcaagatccccatttctgcacttgtctcatttgtggaggccctggaagtgggatacagcaagcacaaaaatccttaccataacttaatgcaygctgccgatgtyacacagacagtgcattacctcctctataagacaggagtggcgaactggctgacggagctggagatctttgctataatcttctcagctgccatccatgactacgagcataccggaaccaccaacaatttccacattcagactcggtctgatccagctattctgtataatgacagatctgtactggagaatcaccatttaagtgcagcttatcgccttctgcaagatgacgaggaaatgaatattttgattaacctctcaaaggatgactggagggagtttcgaaccttggtaattgaaatggtgatggccacagatatgtcttgtcacttccaacaaatcaaagcaatgaagactgctctgcagcagccagaagccattgaaaagccaaaagccttatcccttatgctgcatacagcagatattagccatccagcaaaagcatgggacctccatcatcgctggacaatgtcactcctggaggagttcttcagacagggtgacagagaagcagagctggggctgcctttttctcctctgtgtgaccgaaagtccactatggttgctcagtcacaagtaggtttcattgatttcatcgtggaacccaccttcactgtgcttacggacatgaccgagaagattgtgagtccattaatcgatgaaacctctcaaactggtgggacaggacagaggcgttcgagtttgaatagcatcagctcgtcagatgccaagcgatcaggtgtcaagacctctggttcagagggaagtgccccgatcaacaattctgtcatctccgttgactataagrgctttaaagctacttggacggaagtggtgcacatcaatcgggagagatggagggccaaggtacccaaagaggagaaggccaagaaggaagcagaggaaaaggctcgcctggccgcagaggagcagcaaaaggaaatggaagccaaaagccaggctgaagaaggcgcatctggcaaagctgagaaaaagacgtctggagaaactaagaatcaastcaatggaacacgggcaaacaaaagtgacaaccctcgtgggaaaaaytccaaagcygagaagtcatcaggagaacagcaacagaatggtgacttcaaagatggyaaaaataagacagacaagaaggatcactctaacatcggaaatgattcaaagaaaacagatggcacaaaacagcgttctcacggctcaccagccccaagcaccagctccacgtgtcgccttacgttgccagtcatcaagcctcctttgcgtcattttaaacgccctgcttacgcatctagctcctatgcaccttcagtctcaaagaaaactgatgagcatcctgcaaggtacaagatgctggatcagaggatcaaaatgaaaaagattcagaacatctcacataactggaacagaaaataggccgaggggaagaagagagggagtgaaggagggtctacctatctgcttctcagcacccactggccacagcaggacacacctccaagacccttggaggctgttggagcaggtactatcctggttgactccaccaaggtgaaatgaaagttgtatgtgattttcctctttgttgttcttgtatagacttttcaattgctgtatgtgggatcagcccagacgccagcaacaaactagcaagaggggtgtttttatggtataagtctctaaaagtctaaattggaccaaaattaaaatgacacaaacttaaaaaaaaataaaattcctctcattgccacttttttcaatctctaaaagttacttgcccccaaaagaatattggtttaataatcatcatatttaagaaatgcactgataaaaacatattttccaattttaaatacacctatttaaaatgtaaatacacttatttaaaattcaagtaaatatgtaactatcaaagtaaatgtattcaaaacagaagttgtgcttctgaatgtaaaaatattaaaaggaagagaagacggatgaattgttgtattcatggacatttcagaattcatgcttataaagcaaatccaagttaaaaaacaaaaaaagatttttgtgcctcatgaagattgtgcctcatgcccaataacctcatgtactttgaaggatgtgaaggtttgcaagagatgcatttggcttcattttcctctaatcttttacttctacccacagtagatgatacaaaaaatcttgccttaaagactgcaggtttaagagtcattgcaaaagatgtcagtttgattttgtggtcctaggccaagagggtgtaaaattctgagcctagtttaaattctttattttcagattgttctggactgaaaataaagaatttaaactaggctagagatgcctttaagttacatttcagatcctcttcacagcacgctacatatctaaagcccttgagatcctgattgttctcacagttgttggtggaatccatagttttataactcacctctttttatggtggcattgttagcccttctgtgtctctccctaggatttttaattcaggactaaaatcacagaagtagcaaggaaaggctcaagactagagatagctttcaatctcttcagaaatagcctggtgcagtgagaaaactaggtttgttttcaggccagtctgatcttcatcctattctgtctataactagttgcaggtccttgctcggatggcataattttttgatgcctccatttgcttaactagaaactaggattcatatacacactctgcactttgtattgaagattaatgataatgtaggttttggttgctgtggctgagcctggccagtaataggtgcataacagaagtagctaagagcatttcataatcaggatgaactctccaggacagccctacaaagaaggagctgtttgttcccggatggcctcgaccttccaggcttgattgtaaagagtttagtgtcctctccttctctcattccctgcagttcatttccaataaactgcagttattcaagttgagcaagttccggaatttagtgcctaccatgctattgggcagtttatttataatgtgctttatgatgatacttcagagaaatttaattgctatacaaaaagacgaatcattgtgacttttcgttaaggaggcgattgcaattctttgctccctgcctggtgtctgggttagaaggcccttctgcaggctggtagtgtctgttccacctggattaggttaactcaacaggtaattcctatctgtttatacacagatgctttagcgcttgctgtacaaagtcatttggctacacactgaggaggcccatgggagtagtagcctcctcaaataatgttccctacctatctgtcaataccttccatcttaggtattgagaatttaatgaggctgtgttttcttggctgtgcttcttgatgttggaagccatgttcctggggaacaaatctgtattcttttctcctaagatgtgagtttttttcaacctttgctaatattttaatggagcaaatgtacagatgttgagattttgcactgcttataaaatgcctaccatgttttttgcataatggattgtatagaaatgcagattatattcttacagcaaataaaaagatgcttttaacar

SEQ ID NO: 3244 - DNA, 223 bp, Homo sapiens
ttgcaaatgaagctggagacaagaatgccagaccactggcccgcttctctrggtctaagtcacagaactgtctgtggaactccctcatcgatgggctcacagggaatgtcaaggagaagccaaggccaacaattgtccatgaccctcgacccccagaggaratcctagctgatgaattgccacagctggatagcycagaagtcttggtgaagacatccttcag

SEQ ID NO: 3245 - DNA, 4815 bp, Homo sapiens
cgagcgagagagcccctttagcaagaaaacatcaagagtttttgagtgtggtgtgtggttcccttcgtccccatcagtcgcttcaatatttcaaaatggatccggttctgtggcgggtgcgagagtgaggctgtgggggacctccaggcccaacctccgcgaagcctcgcggcttctgcgtgccctggccccgggaggataaggatttcccttccctcctacttgcgcgcggagccgagctcttgttgaggtgagggttccggaagcccacgcagctccgcaggtcggtggtggccgcggctgccctgcgggggtgagtgtgcccggccggggtcggagcccagcgtgtgcccggcagacggcggtgcccgcgcgcccctccctccgcgcccgcggtgacagcccagacaccagcccgggcgctgacagacgacttttctcacttgtcagttttctcgcttgtcagcagagctgctgctatggagtcgccaaccaaggagattgaagaatttgagagcaactctctgaaatacctgcaaccggaacagatcgagaaaatctggcttcggctccgcgggctgaggaaatataagaaaacgtcccagagagattacggtctttggtcaaacaattagagagaggggaagcttcagtggtagatcttaagaagaatttggaatatgcagcyacagtgcttgaatctgtgtatattgatgaaacaaggagactcctggatacagaggatgagctcagtgacattcagtcagatgctgtgccttctgaggtccgagactggctggcctccaccttcacgcggcagatgggkatgatgctcaggaggagcgacgagaagccccggttcaagagcatcgttcacgcagtgcaggctgggatatttgtggagagaatgtatagacggacatcaaacatggttggactgagctatccaccagctgttattgaggcattaaaggatgtggacaagtggtcctttgacgtcttttccctcaatgaggccagtggggatcatgcactgaaatttattttctatgaactactcacacgttatgatctgatcagccgtttcaagatccccatttctgcacttgtctcatttgtggaggccctggaagtgggatacagcaagcacaaaaatccttaccataacttaatgcaygctgccgatgtyacacagacagtgcattacctcctctataagacaggagtggcgaactggctgacggagctggagatctttgctataatcttctcagctgccatccatgactacgagcataccggaaccaccaacaatttccacattcagactcggtctgatccagctattctgtataatgacagatctgtactggagaatcaccatttaagtgcagcttatcgccttctgcaagatgacgaggaaatgaatattttgattaacctctcaaaggatgactggagggagtttcgaaccttggtaattgaaatggtgatggccacagatatgtcttgtcacttccaacaaatcaaagcaatgaagactgctctgcagcagccagaagccattgaaaagccaaaagccttatcccttatgctgcatacagcagatattagccatccagcaaaagcatgggacctccatcatcgctggacaatgtcactcctggaggagttcttcagacagggtgacagagaagcagagctggggctgcctttttctcctctgtgtgaccgaaagtccactatggttgctcagtcacaagtaggtttcattgatttcatcgtggaacccaccttcactgtgcttacggacatgaccgagaagattgtgagtccattaatcgatgaaacctctcaaactggtgggacaggacagaggcgttcgagtttgaatagcatcagctcgtcagatgccaagcgatcaggtgtcaagacctctggttcagagggaagtgccccgatcaacaattctgtcatctccgttgactataagrgctttaaagctacttggacggaagtggtgcacatcaatcgggagagatggagggccaaggtacccaaagaggagaaggccaagaaggaagcagaggaaaaggctcgcctggccgcagaggagcagcaaaaggaaatggaagccaaaagccaggctgaagaaggcgcatctggcaaagctgagaaaaagacgtctggagaaactaagaatcaastcaatggaacacgggcaaacaaaagtgacaaccctcgtgggaaaaaytccaaagcygagaagtcatcaggagaacagcaacagaatggtgacttcaaagatggyaaaaataagacagacaagaaggatcactctaacatcggaaatgattcaaagaaaacagatggcacaaaacagcgttctcacggctcaccagccccaagcaccagctccacgtgtcgccttacgttgccagtcatcaagcctcctttgcgtcattttaaacgccctgcttacgcatctagctcctatgcaccttcagtctcaaagaaaactgatgagcatcctgcaaggtacaagatgctggatcagaggatcaaaatgaaaaagattcagaacatctcacataactggaacagaaaataggccgaggggaagaagagagggagtgaaggagggtctacctatctgcttctcagcacccactggccacagcaggacacacctccaagacccttggaggctgttggagcaggtactatcctggttgactccaccaaggtgaaatgaaagttgtatgtgattttcctctttgttgttcttgtatagacttttcaattgctgtatgtgggatcagcccagacgccagcaacaaactagcaagaggggtgtttttatggtataagtctctaaaagtctaaattggaccaaaattaaaatgacacaaacttaaaaaaaaataaaattcctctcattgccacttttttcaatctctaaaagttacttgcccccaaaagaatattggtttaataatcatcatatttaagaaatgcactgataaaaacatattttccaattttaaatacacctatttaaaatgtaaatacacttatttaaaattcaagtaaatatgtaactatcaaagtaaatgtattcaaaacagaagttgtgcttctgaatgtaaaaatattaaaaggaagagaagacggatgaattgttgtattcatggacatttcagaattcatgcttataaagcaaatccaagttaaaaaacaaaaaaagatttttgtgcctcatgaagattgtgcctcatgcccaataacctcatgtactttgaaggatgtgaaggtttgcaagagatgcatttggcttcattttcctctaatcttttacttctacccacagtagatgatacaaaaaatcttgccttaaagactgcaggtttaagagtcattgcaaaagatgtcagtttgattttgtggtcctaggccaagagggtgtaaaattctgagcctagtttaaattctttattttcagattgttctggactgaaaataaagaatttaaactaggctagagatgcctttaagttacatttcagatcctcttcacagcacgctacatatctaaagcccttgagatcctgattgttctcacagttgttggtggaatccatagttttataactcacctctttttatggtggcattgttagcccttctgtgtctctccctaggatttttaattcaggactaaaatcacagaagtagcaaggaaaggctcaagactagagatagctttcaatctcttcagaaatagcctggtgcagtgagaaaactaggtttgttttcaggccagtctgatcttcatcctattctgtctataactagttgcaggtccttgctcggatggcataattttttgatgcctccatttgcttaactagaaactaggattcatatacacactctgcactttgtattgaagattaatgataatgtaggttttggttgctgtggctgagcctggccagtaataggtgcataacagaagtagctaagagcatttcataatcaggatgaactctccaggacagccctacaaagaaggagctgtttgttcccggatggcctcgaccttccaggcttgattgtaaagagtttagtgtcctctccttctctcattccctgcagttcatttccaataaactgcagttattcaagttgagcaagttccggaatttagtgcctaccatgctattgggcagtttatttataatgtgctttatgatgatacttcagagaaatttaattgctatacaaaaagacgaatcattgtgacttttcgttaaggaggcgattgcaattctttgctccctgcctggtgtctgggttagaaggcccttctgcaggctggtagtgtctgttccacctggattaggttaactcaacaggtaattcctatctgtttatacacagatgctttagcgcttgctgtacaaagtcatttggctacacactgaggaggcccatgggagtagtagcctcctcaaataatgttccctacctatctgtcaataccttccatcttaggtattgagaatttaatgaggctgtgttttcttggctgtgcttcttgatgttggaagccatgttcctggggaacaaatctgtattcttttctcctaagatgtgagtttttttcaacctttgctaatattttaatggagcaaatgtacagatgttgagattttgcactgcttataaaatgcctaccatgttttttgcataatggattgtatagaaatgcagattatattcttacagcaaataaaaagatgcttttaacag

SEQ ID NO: 3246 - DNA, 360 bp, Homo sapiens
atgtggtacagagcaggaacgatggctctgtgcgatagcagcagacaaaggttgccatggcaagcctgctcaggagcatgccacatagaccgatgcccacaagtccacctggctccaagccacagacaaggtcccttgtgcataggtaccgtgtccccaccccgggatcccaccacagccaggaccccttcccgaggtgcatccggaccctcacccaggagaagccgatgcagccaatggccccgcacagcatgtccgcaagcatggccgggtacgagctggcagtggggaagtargcgaagaagtaggggctgtgccagtgygtcacctgcatgggaggacagagcagctgctgaggag

SEQ ID NO: 3247 - DNA, 4302 bp, Homo sapiens
cgggggacggaggagggagcgggagtcgagcgagagcctgtggaggagtccgcctgctgtagcgtgcgtaagcaaggcagctacgccgggcggctacgctgcggaatcggcgtaggcgcctttggagaatcggcgggctgcgctccgctggggctggtcgcggagggggggaggggatgtcggtcagtgcgagatccgctgctgctgaggagaggagcgtcaacagcagcaccatggtggatttcttctgttggaatctggaacactggaatgatggaaatgtgttctttacaaagtagctcaacagaagaaccttgaaggctatgtgggatttgccaatctcccaaatcaagtatacagaaaatcggtgaagagaggttttgaattcacgcttatggtagtgggtgaatctggattgggaaagtcgacattaatcaactcattattcctcacagatttgtattctccagagtatccaggtccttctcatagaattaaaaagactgtacaggtggaacaatccaaagttttaatcaaagaaggtggtgttcagttgctgctcacaatagttgataccccaggatttggagatgcagtggataatagtaattgctggcagcctgttatcgactacattgatagtaaatttgaggactacctaaatgcagaatcacgagtgaacagacgtcagatgcctgataacagggtgcagtgttgtttatacttcattgctccttcaggacatggacttaaaccattggatattgagtttatgaagcgtttgcatgaaaaagtgaatatcatcccacttattgccaaagcagacacactcacaccagaggaatgccaacagtttaaaaaacagataatgaaagaaatccaagaacataaaattaaaatatacgaatttccagaaacagatgatgaagaagaaaataaacttgttaaaaagataaaggaccgtttacctcttgctgtggtaggtagtaatactatcattgaagttaatggcaaaagggtcagaggaaggcagtatccttggggtgttgctgaagttgaaaatggtgaacattgtgattttacaatcctaagaaatatgttgataagaacacacatgcaggacttgaaagatgttactaataatgtccactatgagaactacagaagcagaaaacttgcagctgtgacttataatggagttgataacaacaagaataaagggcagctgactaagagccctctggcacaaatggaagaagaaagaagggagcatgtagctaaaatgaagaagatggagatggagatggagcaggtgtttgagatgaaggtcaaagaaaaagttcaaaaactgaaggactctgaagctgagctccagcggcgccatgagcaaatgaaaaagaatttggaagcacagcacaaagaattggaggaaaaacgtcgtcagttcgaggatgagaaagcaaactgggaagctcaacaacgtattttagaacaacagaactcttcaagaaccttggaaaagaacaagaagaaagggaagatcttttaaactctctattgaccaccagttaacgtattagttgccaatatgccagcttggacatcagtgtttgttggatccgtttgaccaatttgcaccagttttatccataatgatggatttaacagcatgacaaaaattatttttttttttgttcttgatggagattaagatgccttgaattgtctagggtgttctgtacttagaaagtaagagctctaagtacctttcctacattttctttwtttattaaacagatatcttcagtttaatgcaagagaacattttactgttgtacaatcatgttctggtggtttgattgtttacaggatattccaaaataaaaggactctggaagattttcattgaggataaattgccataatatgatgcaaactgtgcttctctatgataattacaatacaaaggttccattcagtgcagcatatacaataatgtaatttagtctaacacagttgaccctattttttgacacttccattgtttaaaaatacacatggaaaatttgtttgttttggattctttaaatatatattattctcatttagtgccctctttagccagaatctcattactgcttcatttttgtaataacatttaatttagatatttyccatatattggcactgctaaaatagaatatagcatctttcatatggtaggaaccaacaaggaaactttcctttaactccctttttacactttatggtaagtagcagggggggaaatgcatttatagatcatttctaggcaaaattgtgaagctaatgaccaacctgtttctacctatatgcagtctctttattttactagaaatgggaatcatggcctcttgaagagaaaaaagtcaccattctgcatttagctgtattcatatattgcatttctgtattttttgtttgtattgtaaaaaattcacataataaacgatgttgtgatgtaatattgtgtgaggtcttaaatatcctacagtcgatgtacaagagtagagtatgtttgggaagaaacttttcagcttaagtttgcctcctctacaatgacatcttttatatgcttgtctcatttagaatgcatatgtgctgattttctaatttaagagataccatatctctctattcatttctatctctcatttgtatgcttatttttctgagaacattttttttttcccccagacagggtcttgcttcattgcccaggctggagtgcggtggcacaaacacgactygactgcagcctcaaccctctgggctcaagcagtcctcctgcctcagccccctgagtatctgggattgcaggcgtgcaccaccacgcctggctaatttttgtattttttgcagcctcccaaagttctgggattacaggcatgagccgtcatgcctggcctctgagaacagtttctgactcattcagattaggtatactctcaagtccctgraaactgaaattttttttaactgtaaagagggtagtgtcatttcttttcttaaggtcaagtgacatagattttaatgtaatgcataatttaggtaagaaattaattaatgtagcctagtttattatcttgaaatgttttaccctatttactttttaaaattaatgacctaagcggagggaataattataagtcaatagcagagagattgttgtttgggtgtttatttttttcagtttttgttttgagagattgggttaacacctctagccaaaattgtttggttttagggaggctaacaataacctactgaatttggaaaatgcaaaggtaaaaaatgtatatagactgcctgctgaactggttaagtactactgcttctgggaaatactatttcaaaattctatgtattataataataaatttgtaagacattcattattstaccatcctaatgaaaactttcagaagtctttctttatccatggcatgcccagggttttacctgaatctgatacaggatctatataactttactaggacttttgattgttgactccaggcttaggtatatcagaaggttctttttgccatttggcctgtggatgtctragaagatcattcacaatacatgtaaaattcaggtaggcctaaggaaaggccagcctgtagaaagcaaaatggcagtgtctgttctccactgttggaggcattatgtaatttaagtatcctgttagccactgtctttctgctaattaagtggggctgaacaagtaagcactaataataccagtgaaccacttgggcaccttgtgggtagagttttgctgccacctagtggaatgggatatcattgcttccatatcaggttcacaagcaagttaagtgggcacagtttatttctgtgtagctcaggctgtaatcttgaaagctgaggagatacccatgcctctcagactcattagctgggtgtcacattaccacctgcacattytgacccaccgcatcttaatatgttttgtcctcttggagaaactaggagtagaagtcaggatatggtaggtaagggggaaaaaggaaagacggcttgatagctatgaatgcatgaggagcgaaatgttgactcagttatctagatcatggtctccaaacctgatgctatttccttacaaaaatatttgttgagcatgtgtccataattatatgtattgaacaatgaaaatatgtgtcaacaaatgtactgctacactaatgtgaacattatggaacaaaatttgaaagagtgaaataaaaggtttacactttc

SEQ ID NO: 3248 - DNA, 4296 bp, Homo sapiens
cgggggacggaggagggagcgggagtcgagcgagagcctgtggaggagtccgcctgctgtagcgtgcgtaagcaaggcagctacgccgggcggctacgctgcggaatcggcgtaggcgcctttggagaatcggcgggctgcgctccgctggggctggtcgcggagggggggaggggatgtcggtcagtgcgagatccgctgctgctgaggagaggagcgtcaacagcagcaccatggcaacagaagaaccttgaaggctatgtgggatttgccaatctcccaaatcaagtatacagaaaatcggtgaagagaggttttgaattcacgcttatggtagtgggtgaatctggattgggaaagtcgacattaatcaactcattattcctcacagatttgtattctccagagtatccaggtccttctcatagaattaaaaagactgtacaggtggaacaatccaaagttttaatcaaagaaggtggtgttcagttgctgctcacaatagttgataccccaggatttggagatgcagtggataatagtaattgctggcagcctgttatcgactacattgatagtaaatttgaggactacctaaatgcagaatcacgagtgaacagacgtcagatgcctgataacagggtgcagtgttgtttatacttcattgctccttcaggacatggacttaaaccattggatattgagtttatgaagcgtttgcatgaaaaagtgaatatcatcccacttattgccaaagcagacacactcacaccagaggaatgccaacagtttaaaaaacagataatgaaagaaatccaagaacataaaattaaaatatacgaatttccagaaacagatgatgaagaagaaaataaacttgttaaaaagataaaggaccgtttacctcttgctgtggtaggtagtaatactatcattgaagttaatggcaaaagggtcagaggaaggcagtatccttggggtgttgctgaagttgaaaatggtgaacattgtgattttacaatcctaagaaatatgttgataagaacacacatgcaggacttgaaagatgttactaataatgtccactatgagaactacagaagcagaaaacttgcagctgtgacttataatggagttgataacaacaagaataaagggcagctgactaagagccctctggcacaaatggaagaagaaagaagggagcatgtagctaaaatgaagaagatggagatggagatggagcaggtgtttgagatgaaggtcaaagaaaaagttcaaaaactgaaggactctgaagctgagctccagcggcgccatgagcaaatgaaaaagaatttggaagcacagcacaaagaattggaggaaaaacgtcgtcagttcgaggatgagaaagcaaactgggaagctcaacaacgtattttagaacaacagaactcttcaagaaccttggaaaagaacaagaagaaagggaagatcttttaaactctctattgaccaccagttaacgtattagttgccaatatgccagcttggacatcagtgtttgttggatccgtttgaccaatttgcaccagttttatccataatgatggatttaacagcatgacaaaaattatttttttttttgttcttgatggagattaagatgccttgaattgtctagggtgttctgtacttagaaagtaagagctctaagtacctttcctacattttctttwtttattaaacagatatcttcagtttaatgcaagagaacattttactgttgtacaatcatgttctggtggtttgattgtttacaggatattccaaaataaaaggactctggaagattttcattgaggataaattgccataatatgatgcaaactgtgcttctctatgataattacaatacaaaggttccattcagtgcagcatatacaataatgtaatttagtctaacacagttgaccctattttttgacacttccattgtttaaaaatacacatggaaaaaaaaaaaccctatatgcttactgtgcacctagagcttttttataacaacgtctttttgtttgtttgttttggattctttaaatatatattattctcatttagtgccctctttagccagaatctcattactgcttcatttttgtaataacatttaatttagatatttyccatatattggcactgctaaaatagaatatagcatctttcatatggtaggaaccaacaaggaaactttcctttaactccctttttacactttatggtaagtagcagggggggaaatgcatttatagatcatttctaggcaaaattgtgaagctaatgaccaacctgtttctacctatatgcagtctctttattttactagaaatgggaatcatggcctcttgaagagaaaaaagtcaccattctgcatttagctgtattcatatattgcatttctgtattttttgtttgtattgtaaaaaattcacataataaacgatgttgtgatgtaatattgtgtgaggtcttaaatatcctacagtcgatgtacaagagtagagtatgtttgggaagaaacttttcagcttaagtttgcctcctctacaatgacatcttttatatgcttgtctcatttagaatgcatatgtgctgattttctaatttaagagataccatatctctctattcatttctatctctcatttgtatgcttatttttctgagaacattttttttttcccccagacagggtcttgcttcattgcccaggctggagtgcggtggcacaaacacgactygactgcagcctcaaccctctgggctcaagcagtcctcctgcctcagccccctgagtatctgggattgcaggcgtgcaccaccacgcctggctaatttttgtattttttgcagcctcccaaagttctgggattacaggcatgagccgtcatgcctggcctctgagaacagtttctgactcattcagattaggtatactctcaagtccctgraaactgaaattttttttaactgtaaagagggtagtgtcatttcttttcttaaggtcaagtgacatagattttaatgtaatgcataatttaggtaagaaattaattaatgtagcctagtttattatcttgaaatgttttaccctatttactttttaaaattaatgacctaagcggagggaataattataagtcaatagcagagagattgttgtttgggtgtttatttttttcagtttttgttttgagagattgggttaacacctctagccaaaattgtttggttttagggaggctaacaataacctactgaatttggaaaatgcaaaggtaaaaaatgtatatagactgcctgctgaactggttaagtactactgcttctgggaaatactatttcaaaattctatgtattataataataaatttgtaagacattcattattstaccatcctaatgaaaactttcagaagtctttctttatccatggcatgcccagggttttacctgaatctgatacaggatctatataactttactaggacttttgattgttgactccaggcttaggtatatcagaaggttctttttgccatttggcctgtggatgtctragaagatcattcacaatacatgtaaaattcaggtaggcctaaggaaaggccagcctgtagaaagcaaaatggcagtgtctgttctccactgttggaggcattatgtaatttaagtatcctgttagccactgtctttctgctaattaagtggggctgaacaagtaagcactaataataccagtgaaccacttgggcaccttgtgggtagagttttgctgccacctagtggaatgggatatcattgcttccatatcaggttcacaagcaagttaagtgggcacagtttatttctgtgtagctcaggctgtaatcttgaaagctgaggagatacccatgcctctcagactcattagctgggtgtcacattaccacctgcacattytgacccaccgcatcttaatatgttttgtcctcttggagaaactaggagtagaagtcaggatatggtaggtaagggggaaaaaggaaagacggcttgatagctatgaatgcatgaggagcgaaatgttgactcagttatctagatcatggtctccaaacctgatgctatttccttacaaaaatatttgttgagcatgtgtccataattatatgtattgaacaatgaaaatatgtgtcaacaaatgtactgctacactaatgtgaacattatggaacaaaatttgaaagagtgaaataaaaggtttacactttc

SEQ ID NO: 3249 - DNA, 2607 bp, Homo sapiens
cgggggacggaggagggagcgggagtcgagcgagagcctgtggaggagtccgcctgctgtagcgtgcgtaagcaaggcagctacgccgggcggctacgctgcggaatcggcgtaggcgcctttggagaatcggcgggctgcgctccgctggggctggtcgcggagggggggaggggatgtcggtcagtgcgagatccgctgctgctgaggagaggagcgtcaacagcagcaccatggcaacagaagaaccttgaaggctatgtgggatttgccaatctcccaaatcaagtatacagaaaatcggtgaagagaggttttgaattcacgcttatggtagtggaggtgatgtttcaccatgttgcccgtggctaatcttgaactcctgggctcaagcgatccatccgccttggcctcccaaagtgctaggattacaggtgaatctggattgggaaagtcgacattaatcaactcattattcctcacagatttgtattctccagagtatccaggtccttctcatagaattaaaaagactgtacaggtggaacaatccaaagttttaatcaaagaaggtggtgttcagttgctgctcacaatagttgataccccaggatttggagatgcagtggataatagtaattgctggcagcctgttatcgactacattgatagtaaatttgaggactacctaaatgcagaatcacgagtgaacagacgtcagatgcctgataacagggtgcagtgttgtttatacttcattgctccttcaggacatggagacttaaaccattggatattgagtttatgaagcgtttgcatgaaaaagtgaatatcatcccacttattgccaaagcagacacactcacaccagaggaatgccaacagtttaaaaaacagataatgaaagaaatccaagaacataaaattaaaatatacgaatttccagaaacagatgatgaagaagaaaataaacttgttaaaaagataaaggaccgtttacctcttgctgtggtaggtagtaatactatcattgaagttaatggcaaaagggtcagaggaaggcagtatccttggggtgttgctgaagttgaaaatggtgaacattgtgattttacaatcctaagaaatatgttgataagaacacacatgcaggacttgaaagatgttactaataatgtccactatgagaactacagaagcagaaaacttgcagctgtgacttataatggagttgataacaacaagaataaagggcagctgactaagagccctctggcacaaatggaagaagaaagaagggagcaagtagctaaaattaagaagatggagatggagatggagcaggtgtttgaaatgaaggtcaaagaaaaagttcaaaaactgaaggactctgaagctgagctccagcggcgccatgagcaaatgaaaaagaatttggaagcacagcacaaagaattggaggaaaaacgtmgtcagtttgaggatgagaaagcaaactgggaagctcaacaacgtattttagaacaacagaactcttcaagaaccttggaaaagaacaagaagaaagggcagatcttttaaaccctctattgaccaccagttacgtattagttgccaatatgccagcttggacatcagcgttggatccgtttgaccagtttgcactagttttatccataatgatggatttaacagcatgacaaaaattatttttgttgttgttgttcttgatggagattaagatgcctcgaattgtctagggtgttctgtacttagaaagtaacagctctaagtagctttcctacattttcttttttttttttattaaacagatatctttggtttaatgcaaaagaacattttacagttgtacaatcatgttctggtggtttgattttttacaagatattccaaaaaaaaggactctggaaggttttcattgaggataaattgccataatatgatgcaaactgtgcttctctatgataactataatacaaaggttccattcaatgcagcatatacaataatataatttagtctaacacagttgaccctattttttgacatttccattgtttataaatacacatggggaaaaaaaaaccctatatgcttacagtgcacctagaggtttttttttttataacagtctctttttgtttgtttgttttggattctttaaatatatattattctcatttagtgccctccttagccagagtctcattactgcttcatttttgtaataacatttaatttagatattttccatatattggccctgctaaaatagaatacagcatctttcatatggtaggaaccaacaagaaaactttgcattaactccctttttacactttatggtaagtagcagggggaaaatgcatttatagatcatttctaggcaaaatcatttctaggcaaagctaatgaccaacctgtttctacctatatgcagtctctttattttactagaaatgggaatcatggcctcttgaagagaaaaaaagtcaccattctgcgtttagctgtattcatatattgcatttctgtatgttttgtttgtattgtaaaaaattcacataataagccatgtagtgatgt

SEQ ID NO: 3250 - DNA, 4238 bp, Homo sapiens
cgggggacggaggagggagcgggagtcgagcgagagcctgtggaggagtccgcctgctgtagcgtgcgtaagcaaggcagctacgccgggcggctacgctgcggaatcggcgtaggcgcctttggagaatcggcgggctgcgctccgctggggctggtcgcggagggggggaggggatgtcggtcagtgcgagatccgctgctgctgaggagaggagcgtcaacagcagcaccatggcaacagaagaaccttgaaggctatgtgggatttgccaatctcccaaatcaagtatacagaaaatcggtgaagagaggttttgaattcacgcttatggtagtgggtgaatctggattgggaaagtcgacattaatcaactcattattcctcacagatttgtattctccagagtatccaggtccttctcatagaattaaaaagactgtacaggtggaacaatccaaagttttaatcaaagaaggtggtgttcagttgctgctcacaatagttgataccccaggatttggagatgcagtggataatagtaattgctggcagcctgttatcgactacattgatagtaaatttgaggactacctaaatgcagaatcacgagtgaacagacgtcagatgcctgataacagggtgcagtgttgtttatacttcattgctccttcaggacatggacttaaaccattggatattgagtttatgaagcgtttgcatgaaaaagtgaatatcatcccacttattgccaaagcagacacactcacaccagaggaatgccaacagtttaaaaaacagataatgaaagaaatccaagaacataaaattaaaatatacgaatttccagaaacagatgatgaagaagaaaataaacttgttaaaaagataaaggaccgtttacctcttgctgtggtaggtagtaatactatcattgaagttaatggcaaaagggtcagaggaaggcagtatccttggggtgttgctgaagttgaaaatggtgaacattgtgattttacaatcctaagaaatatgttgataagaacacacatgcaggacttgaaagatgttactaataatgtccactatgagaactacagaagcagaaaacttgcagctgtgacttataatggagttgataacaacaagaataaagggcagctgactaagagccctctggcacaaatggaagaagaaagaagggagcatgtagctaaaatgaagaagatggagatggagatggagcaggtgtttgagatgaaggtcaaagaaaaagttcaaaaactgaaggactctgaagctgagctccagcggcgccatgagcaaatgaaaaagaatttggaagcacagcacaaagaattggaggaaaaacgtcgtcagttcgaggatgagaaagcaaactgggaagctcaacaacgtattttagaacaacagaactcttcaagaaccttggaaaagaacaagaagaaagggaagatcttttaaactctctattgaccaccagttaacgtattagttgccaatatgccagcttggacatcagtgtttgttggatccgtttgaccaatttgcaccagttttatccataatgatggatttaacagcatgacaaaaattatttttttttttgttcttgatggagattaagatgccttgaattgtctagggtgttctgtacttagaaagtaagagctctaagtacctttcctacattttctttwtttattaaacagatatcttcagtttaatgcaagagaacattttactgttgtacaatcatgttctggtggtttgattgtttacaggatattccaaaataaaaggactctggaagattttcattgaggataaattgccataatatgatgcaaactgtgcttctctatgataattacaatacaaaggttccattcagtgcagcatatacaataatgtaatttagtctaacacagttgaccctattttttgacacttccattgtttaaaaatacacatggaaaatttgtttgttttggattctttaaatatatattattctcatttagtgccctctttagccagaatctcattactgcttcatttttgtaataacatttaatttagatatttyccatatattggcactgctaaaatagaatatagcatctttcatatggtaggaaccaacaaggaaactttcctttaactccctttttacactttatggtaagtagcagggggggaaatgcatttatagatcatttctaggcaaaattgtgaagctaatgaccaacctgtttctacctatatgcagtctctttattttactagaaatgggaatcatggcctcttgaagagaaaaaagtcaccattctgcatttagctgtattcatatattgcatttctgtattttttgtttgtattgtaaaaaattcacataataaacgatgttgtgatgtaatattgtgtgaggtcttaaatatcctacagtcgatgtacaagagtagagtatgtttgggaagaaacttttcagcttaagtttgcctcctctacaatgacatcttttatatgcttgtctcatttagaatgcatatgtgctgattttctaatttaagagataccatatctctctattcatttctatctctcatttgtatgcttatttttctgagaacattttttttttcccccagacagggtcttgcttcattgcccaggctggagtgcggtggcacaaacacgactygactgcagcctcaaccctctgggctcaagcagtcctcctgcctcagccccctgagtatctgggattgcaggcgtgcaccaccacgcctggctaatttttgtattttttgcagcctcccaaagttctgggattacaggcatgagccgtcatgcctggcctctgagaacagtttctgactcattcagattaggtatactctcaagtccctgraaactgaaattttttttaactgtaaagagggtagtgtcatttcttttcttaaggtcaagtgacatagattttaatgtaatgcataatttaggtaagaaattaattaatgtagcctagtttattatcttgaaatgttttaccctatttactttttaaaattaatgacctaagcggagggaataattataagtcaatagcagagagattgttgtttgggtgtttatttttttcagtttttgttttgagagattgggttaacacctctagccaaaattgtttggttttagggaggctaacaataacctactgaatttggaaaatgcaaaggtaaaaaatgtatatagactgcctgctgaactggttaagtactactgcttctgggaaatactatttcaaaattctatgtattataataataaatttgtaagacattcattattstaccatcctaatgaaaactttcagaagtctttctttatccatggcatgcccagggttttacctgaatctgatacaggatctatataactttactaggacttttgattgttgactccaggcttaggtatatcagaaggttctttttgccatttggcctgtggatgtctragaagatcattcacaatacatgtaaaattcaggtaggcctaaggaaaggccagcctgtagaaagcaaaatggcagtgtctgttctccactgttggaggcattatgtaatttaagtatcctgttagccactgtctttctgctaattaagtggggctgaacaagtaagcactaataataccagtgaaccacttgggcaccttgtgggtagagttttgctgccacctagtggaatgggatatcattgcttccatatcaggttcacaagcaagttaagtgggcacagtttatttctgtgtagctcaggctgtaatcttgaaagctgaggagatacccatgcctctcagactcattagctgggtgtcacattaccacctgcacattytgacccaccgcatcttaatatgttttgtcctcttggagaaactaggagtagaagtcaggatatggtaggtaagggggaaaaaggaaagacggcttgatagctatgaatgcatgaggagcgaaatgttgactcagttatctagatcatggtctccaaacctgatgctatttccttacaaaaatatttgttgagcatgtgtccataattatatgtattgaacaatgaaaatatgtgtcaacaaatgtactgctacactaatgtgaacattatggaacaaaatttgaaagagtgaaataaaaggtttacactttc

SEQ ID NO: 3251 - DNA, 1608 bp, Homo sapiens
agttcgccgcttgcaccgggaccgatgccatctgagacgcacgcgatgctggcgacgctggcgagggtggcagctctgcgcagaacctgcctcttctccggccggggcggcgggagggggctgtggactggccgcccgcagtcagatatgaacaatataaagccattggaaggggtaaaaattctggatctaacaagagtcctggcgggaccttttgctactatgaatttaggagatcttggagcagaagttataaaagtggagagaccaggagctggtgatgatacacgaacttgggggccaccttttgttgggacagaaagtacatattatctcagtgttaaccgaaataaaaaaagtattgctgttaatatcaaggatccaaaaggggtgaaaatcatctattgttccatcacagggtatggtcagacaggtccaatttctcagcgagctggttatgatgctgttgcctcggctgtttctggtctgatgcacatcacagggcctgagaatggagatccagttcgcccaggagtagctatgactgatcttgccactggcctrtatgcatatggagctattatggctggattgatacaaaaatacaaaactgggaaaggactgttcattgattgtaacctrctgtcatcccaggtggcgtgtttgtctcacatagctgcaaattatcttattggtcaaaaggaagcaaaacgttggggtacagctcatggcagtatcgttccttaccaggcttttaaaaccaaggatggctatattgtagttggagcaggaaataaccagcagtttgccaccgtctgcaagatcttggatttgcctgagttgattgataattccaagtataaaactaaccaccttcgggtacacaatagaaaagagcttattaaaatattatctgaacggtttgaagaagaactgaccagcaagtggttatatctttttgaaggcagtggagtcccgtatggcccaatcaacaacatgaagaatgtatttgcagaacctcagaacgctgtctctggcttccaaagcctgctgcattccttggcccatggccccttccttcatcttcaaggatcagcaagggtattacacaatggcctcgttatggagatggagcatccaactgtggggaagatttccgtcccaggcccagctgtgagatacagtaagttcaagatgtcagaggccaggccgcccccsctgctcgggcagcacacaacrcacatcctgaaggaggtcctgagataygatgacagggccatcggggagctgctcagcgctggagtggtggaccaacatgaaactcactgacaaaggaaaagggctcttcctcataacctcgatccgaatacactggcaaaggcaacactttgcttggacccttctccccagttctgataccactaaraagaagatttagagtaactccagatttcttacatggcatctccagaatggctctrgtattaatgaatctagtgccttttaaatgtatcccacgttttgttccctaccatcttttttttcagatgatgatttcattatggatttgtgggatttttaaaaataaagwtttaatttttttcctgg

SEQ ID NO: 3252 - DNA, 867 bp, Homo sapiens
atggggaaatactrtgggagttggcagctagaaacacaagttaggaaaggaaagagtgggaaattcagagaaagtgaagaatcacctaagctctgcaatgacagtggtcaagctgctacttcaaaatccatgcctggattcttatgtggaatgtgccctctgtctacctgcatttctttagagcttaaatccaaacattgcctgttcggtgaaggctctgaaataaaaataaaagakcactttcaccttctcctcattgcttacrcctgctgtggcctcagaggagcaatagccttcatgggccacccagaagttggatataagaaaacagctctaaacccatcacgggaaggggagtactcaggtgagtgggtgcaggaaccagggcaaatcaacactggaaccagccagttgctcctctctggcccagctgtgagatacagtaagttcaagatgtcagaggccaggccgcccccsctgctcgggcagcacacaacrcacatcctgaaggaggtcctgagataygatgacagggccatcggggagctgctcagcgctggagtggtggaccaacatgaaactcactgacaaaggaaaagggctcttcctcataacctcgatccgaatacactggcaaaggcaacactttgcttggacccttctccccagttctgataccactaaraagaagatttagagtaactccagatttcttacatggcatctccagaatggctctrgtattaatgaatctagtgccttttaaatgtatcccacgttttgttccctaccatcttttttttcagatgatgatttcattatggatttgtgggatttttaaaaataaagwtttaatttttttcctgg

SEQ ID NO: 3253 - DNA, 1120 bp, Homo sapiens
agttcgccgcttgcaccgggaccgatgccatctgagacgcacgcgatgctggcgacgctggcgagggtggcagctctgcgcagaacctgcctcttctccggccggggcggcgggagggggctgtggactggccgcccgcagtcagatatgaacaatataaagccattggaaggggtaaaaattctggatctaacaagagtcctggcgggaccttttgctactatgaatttaggagatcttggagcagaagttataaaagtggagagaccaggagctggtgatgatacacgaacttgggggccaccttttgttgggacagaaagtacatattatctcagtgttaaccgaaataaaaaaagtattgctgttaatatcaaggatccaaaaggggtgaaaatcatcaaagagcttgcagctgtttgtgatgtgtttgtggaaaactatgtccctggcaaactgtctgcaatgggcctgggatatgaagatatagacgagattgctcctcacatcatctattgttccatcacagggtatggtcagacaggtccaatttctcagcgagctggttatgatgctgttgcctcggctgtttctggtctgatgcacatcacagggcctgagaatggagatccagttcgcccaggagtagctatgactgatcttgccactggcctrtatgcatatggagctattatggctggattgatacaaaaatacaaaactgggaaaggactgttcattgattgtaacctrctgtcatcccaggtggcgtgtttgtctcacatagctgcaaattatcttattggtcaaaaggaagcaaaacgttggggtacagctcatggcagtatcgttccttaccagatgaggaagagagtttgttacttccctgaggaaacacagcctgtaagcggatgagttggaatcggatgcaagtttggaaggaagtatcctctccccaaatgtggggcagagagacgcytgggctgacctaattgttaaagcctcagtcagtgttatgctgaatttgtcgcttacatgtctgcacattactttcaattgaaagtagaaaaatgaaatagagatctaataaacattaccacaatgttaagactgaaaaaat

SEQ ID NO: 3254 - DNA, 1566 bp, Homo sapiens
atgctgtctgtgtgtgtctccgcggccgtagcccgtgacctcactcgtaaggaaggaggtatagtgaagaggacaggaaccattgtggacgttccagtcggtgaggagctgttgggtcgtgtagttgatgcccttggtaatgctattgatggaaagggtccaatgggttccaagacccataaaatcattcctcgaacttcagtgtgggaacccatgccgactggcattaaggctgtggatagcttggtgccaattggtcgtggtcagcatgagctcattattggtgaccgaaggactgggaaaacctcaattgctrttgacacaatcattaaccagaaacatttcaatgatagatctgaagaaaagaagaagctgtactgtatctatgttgctattggtcgaaagagatccactgttgctcagttggtgaagagacttacagatgcagatgccgtgaagtacaccactgtggtgtcagctatggcctcagatgctgccctacttcagtacctggctccttactctgactgttccatgggagagtattttagagacgatggcmaatatactttgrtcatctatgacgacttatccaaacaggctgtcgcttactgtcagatgtctctgttgctccaccgamccccctggtcgactatgaagcaggcggcaggtaccatgaagctggaattggctcaggatcgtgaggttgctgcttttgcccagtttggttctgacctcaatgctcccactcaacaactattgagtcgcggtgtgcgtctaactgagttgctgaagcaaggacagtatcctcccatggttactgaacaacaagtggctgttatctgtgcgggtggagagaatatagaggacrttccaaaggaagtgctgacagactgcgcccaccttgtgaaggccaatagcactcaaggctgcaagaacaacgttaatgtggtaaatactccacggtctaacctgaagaaaacagctgacgtggatgtgaggcagataggctttcacaggcagaaggatgtaaaaattgtgacaatggagaagaaaagaggattcctagctcatatttggaacaaggaagttcaagatctcatccgggactatctggaagaaggaaagaagtggtggattgggcaaaatgtaatgccattgaaaaagcatcaagacaacaaatacccagcagacgttgcagccaacgggcccccaaagcccctcagctgcacctacctgtccagaaacttcattcggatctcatccaaaggggacaagtgcttactgaaatactatttcatttgccagactggtgactttttggacggagatgcccattatgaaagaaatggaaataattcccatttgtaccagagacacaagaagacaaaaagaggagttgcaatagcaagagacaaaatgcccccagactttcaggatcatgtgattcctggccaagaaataaaagcaaaatcattttattccccagtggattcggatgaaaccggtgataaaatcaggtacaactccaagaggagacattggagaacaggcatgctgggtctg

SEQ ID NO: 3255 - DNA, 6130 bp, Homo sapiens
acaggaagtggcggcggcggcgcggccgagggcggagggcggagggcggcgggatgggggccgggggcggcgggcgccgcactcgctgaggccccgacgcagggccgggccgggcccagggccgaggagcgcggcggccagagcggggccgcggaggcgacgccggggacgcccgcgcgacgagcaggtggcggcggctgcaggctttgcaggacggctgtcctcagygaggggccgtgcacccgctcctgagcagcgccatgggcctgctggccttcctgaagacccagttcgtgctgcacctgctgrtcggctttgtcttcgtggtgagtggtctggtcatcaacttcgtccagctgtgcacgctggcgctctggccggtcagcaagcagctctaccgccgcctcaactgccgcctcgcctactcactctggagccaactggtcatgctgctggagtggtggtcctgcacggagtgtacactgttcacggaccaggccacggtagagcgctttgggaaggagcacgcagtcatcatcctcaaccacaacttcgagatcgacttcctctgtgggtggaccatgtgtgagcgcttcggagtgctggggagctccaaggtcctcgctaagaaggagctgctctaygtgcccctcatcggctggacgtggtactttctggagattgtgttctgcaagcggaagtgggaggaggaccgggacaccgtggtmgaagggctgaggcgcctgtcggactaccccgagtacatgtggtttctcctgtactgcgaggggacgcgcttcacggagaccaagcaccgygttagcatggaggtggcggctgctaaggggcttcctgtcctcaagtaccacctgctgccgcggaccaagggcttcaccaccgcagtcaagtgcctccgggggacagtcgcagctgtctatgatgtaaccctgaacttcagaggaaacaagaacccgtccctgctggggatcctctacgggaagaagtacgaggcggacatgtgcgtgaggagatttcctctggaagacatcccgctggatgaaaaggaagcagctcagtggcttcataaactgtaccaggagaaggacgcgctccaggagatatataatcagaagggcatgtttccaggggagcagtttaagcctgcccggaggccgtggaccctcctgaacttcctgtcctgggccaccattctcctgtctcccctcttcagttttgtcttgggcgtctttgccagcggatcacctctcctgatcctgactttcttggggtttgtgggagcagcttcctttggagttcgcagactgataggagtaactgagatagaaaaaggctccagctacggaaaccaagagtttaagaaaaaggaataattaatggctgtgactgaacacacgcggccctgacggtggtatccagttaactcaaaaccaacacacagagtgcaggaaaagacaattagaaactatttttcttattaactggtgactaatattaacaaaacttgagccaagagtaaagaattcagaaggcctgtcaggtgaagtcttcagcctcccacagcgcagggtcccagcatctccacgcgcgcccgtgggaggtgggtccggccggagaggcctcccrcggacgccgtctctccagaactccgcttccaagagggagcctttggctgctttctctccttaaacttagatcaaattttttggtttttaatcagttatcttgggaacttaacctggcccctcacctcttctgcaccccccgcccccgaaactgtctcgtaatgaatttctgctgtcctcctgggagtggacggccgggtcccgtccyccgggagcatcgctcggctcagcaccttggctcccagtgggggccccgtggagggcgcccgtagtgataagcacaccggcaygaacrtcaggtccattcctcgaagtcggagccctcactctgccctgtcctggggctggctgagggcgaacgccccacctcactttctagagccctgtctgtcctagctcctatctgaccttgtgtgtaaatacgtacatctgtttttaaagtggatgggcccctgagaactcagtgaaatgcagagttctccatgcacctaaagctcctttgtcgctctcatggctgtcagatcctggtccctccacactgggtgctggggagggaggaccctcggggctaccgcgcgcccccccatcccacagatcaggagccaaggagggagaacagggcagcctgtgggactctaggatgcttcagaagaagcgacggcaccgtcaaccctctgttttttaaaggtggttggagactgttaacrctgagctcattgacttctagagattttatttttactggttgatctcttggtggttttcaacttcctgctggaaactagaggtggggcaccccccaccccccagcctcgcactgtgtccttggggaaggcccgcccccatcctggccggtgtcactgtggcccggccacccctgagcgcccagctccctacctcctggacgtctctgagagtccaggcagagcagagggcagcgctcggccggtcatgctggctcccttggccttgcagcgagcccctggcccacgccgagcgagggatgcttctccctacagcatgtccactcccccggcatggccaggtggggcccctggggcaatggcagtggtagaacgctcaacttggttgcggtaccatcagcccacctgcatttggctttcgacttgcttgttctaagtcacagcgccctcatctttttagcaaggtaaaaaaaccaaaatgggtgttatctctgatatcttgaaaccagcgttctgaatagaggtaggttgagttttctaggggaaaacaaatggagaaaagaggcatgaagaaaagtaaaccgagaacataattaggcatcgggcctaagtgtcctggggagattggaggggacggcagcgttctgcatgatggaggcgctgccgggccccgggtctgtgggggccgtgctctcagggcgtgtgcgggacgccacctgtgcacacctgctcagagcacggctcctcgcaggggtgaaggggcagaccaacgaaaccagatgagaccaacgacaccatgcgagacacgcttgcagacactgttgttttggaaatgtgcttccctccatctgaaatctcatccctccacccgcccactcgggcagctgtgcygtgggcagggcatgcgctcccctggctgagcaccccagagattctcctgcaccttcctcatgccgcacgctgctcatccgtctccatgtgtgtttagatccatgccattcactgactcactaacacctgcaaaatctttaaggaaaaaagctgaagggtacgaccatgcacatatgtgacctggaaaatgcaaatttagatcttttatgatttaattrttattgtttcccatagaagttccctccctttgaaattaatatataatgtataaattctgcactgagccatggcggagctgggcagcccctaggttagagtggagacggaggcccaggcgcaggggtcacacctcatctggtttccttcccatctcacagcttagcttgtgcttctcaacaccaagtctttaagagcaataaaaactacaccatgaatgtttgaattttttttttttggsggggggagggtggattttgcttttcatccagaaggaaaaggggaggagagctcctttacattttttaaattaaattcataaatcccagaacagtcttttttttttctttttcctttacaccctacttctgagcttaattcagttgatgttatgtccaaattcaggctgagtgctcaggctgaagcaactctgtagcccacagtccgtgctggccactgtcggggtgaggcacattctaggcctggcatcgctgatgccctctgcacccrgtccttgagycaggccraggacaggaagggcattgctggcctgtagctcctgttacccacccagagccaggcgccacactggaggctcccaggcgggagggcccaggcccacccacgggcgtctggcmggtcaagctcccagcctgggccgtggtctcctggggacgccgctggcctcccagcttaggcccaggtgccaggtgtcatggggwctcctgcccatcttcccaaggatgccattgctgtcttcatcgtcttcccccgtgtgagacactggttgtctggtactcggcgacagtgtaccagacgcgcaccctatgtgaggtgctttaaggtccctgtcctcaggaagcgcagtctggtggaagagatgagcgctgaacaaatcactaaataacacaaaacaacaatgtaagcagcactttcttgtgtaaaaaaaaaaaaaaagcacgtcctgtcgatgaattttgagtctctctgccttgcctgtcccgactccctttcgcgcaccgtggcatgagaatctttcctcacgctgttcgttgcggtattgctgagcattgatgttgatttgaaggaaaagccgtggttggacccagctgtgtgtttcactcacgtgcaattgagtagctgttgccaggctgtccatgcctgttgtgactaccggttggggtcagatttggggtgaagaatgagtaastttctgcatgctttgtctctacctgagacacttctacaacaagccaagtataatctctccagccctgcagattttcacctgacttgttcagccccatgcgtagactcccgctgcaggcctctggcctgtggctcactgcatgcagcccctggcgtgcaatactagtgctccacggcgcgatgtgcttctagcccttgcactgcacctaggctcagggttcaaacggccagcccgaaaagcctgcctgccttctttytggaaacagcacgtccccggccgtgtgcctgcccctttctctactgagctagtccccaaaccaaaggcaagccccctcgggcctcgggggatggggccggccacacccctgactccgccctggctctgccccatacccctgccgtggggccgacctgggggatgcagacatccggctccgtattcctgcctatcggggccaggatgcaaaaacaatttttgcgtaaaagatgtcacactgatctgctggagtggggtggacacatgaattcagttttatcatgaacactcgcsactggctgcttgttaattcagggataatggtggcattcttacaaactgctcgggaaatagaatgacgggaacacttttagggagcccaggaagttaccagggacattggtgtcgccggcccaggcaacagcagcgtacgcttttcaaagatcattgagttgtcttagaatttgaagctgtgtaatgacaatgtcacctggagttcgtctccatttcttaactttttgttgcacaagtatttggacagaagtcgaactgtgaatgagatactgaaatgcactaaattgtattacattaaactggagttacttgatacaatgaaraaatgcatctgatctacttgtatttattgtctcagaattgtacgttgtgacaatcraatgttacttgcctaaatgccaggaaattcaactggccttttaatcagcaagatcgccagcaagtactgtaactgtaaaggaaaatctctctctctggagaacccacacaaaccattgacctgagtgcgcatgacagccactggcttctttttctatgattgaaaatctgccatcgctgactgttggccagtttcaaagggacccattgtatacagggtgcaaatgtattatacggatgtttccttttgtacacttcatttttacaagttttgctactcacaagctttatgtagtggaggatagaggtatttttggtctttagaagmttgtcggggtgagggctgctaacttacacttcagaggcctgtgtcccaaaggcctggctgcgtttgccgtgctgtgcgaggacctgtgtacacaggcaggtgtgcgcctgcccgagcgcgagtagctcttgtgtagtggtgaaatgctgcaggcatctgtttattaaaattgctgctgtgaaagacagggataaaatatccacaatataag

SEQ ID NO: 3256 - DNA, 5030 bp, Homo sapiens
ccctcacccctgcctgagcagaccacggtctgagagggctgtctccccgcgggccacacctactcactgacagcagaggccactgggtgcggggcagagggacagggtctggggcagaggaaggaagccccagtaacacgttttacagcaaaaaggcaaagtcatccgtctcacctcttctctctctctcctgtcttgaaagcttcctttggagttcgcagactgataggagtaactgagatagaaaaaggctccagctacggaaaccaagagtttaagaaaaaggaataattaatggctgtgactgaacacacgcggccctgacggtggtatccagttaactcaaaaccaacacacagagtgcaggaaaagacaattagaaactatttttcttattaactggtgactaatattaacaaaacttgagccaagagtaaagaattcagaaggcctgtcaggtgaagtcttcagcctcccacagcgcagggtcccagcatctccacgcgcgcccgtgggaggtgggtccggccggagaggcctcccrcggacgccgtctctccagaactccgcttccaagagggagcctttggctgctttctctccttaaacttagatcaaattttttggtttttaatcagttatcttgggaacttaacctggcccctcacctcttctgcaccccccgcccccgaaactgtctcgtaatgaatttctgctgtcctcctgggagtggacggccgggtcccgtccyccgggagcatcgctcggctcagcaccttggctcccagtgggggccccgtggagggcgcccgtagtgataagcacaccggcaygaacrtcaggtccattcctcgaagtcggagccctcactctgccctgtcctggggctggctgagggcgaacgccccacctcactttctagagccctgtctgtcctagctcctatctgaccttgtgtgtaaatacgtacatctgtttttaaagtggatgggcccctgagaactcagtgaaatgcagagttctccatgcacctaaagctcctttgtcgctctcatggctgtcagatcctggtccctccacactgggtgctggggagggaggaccctcggggctaccgcgcgcccccccatcccacagatcaggagccaaggagggagaacagggcagcctgtgggactctaggatgcttcagaagaagcgacggcaccgtcaaccctctgttttttaaaggtggttggagactgttaacrctgagctcattgacttctagagattttatttttactggttgatctcttggtggttttcaacttcctgctggaaactagaggtggggcaccccccaccccccagcctcgcactgtgtccttggggaaggcccgcccccatcctggccggtgtcactgtggcccggccacccctgagcgcccagctccctacctcctggacgtctctgagagtccaggcagagcagagggcagcgctcggccggtcatgctggctcccttggccttgcagcgagcccctggcccacgccgagcgagggatgcttctccctacagcatgtccactcccccggcatggccaggtggggcccctggggcaatggcagtggtagaacgctcaacttggttgcggtaccatcagcccacctgcatttggctttcgacttgcttgttctaagtcacagcgccctcatctttttagcaaggtaaaaaaaccaaaatgggtgttatctctgatatcttgaaaccagcgttctgaatagaggtaggttgagttttctaggggaaaacaaatggagaaaagaggcatgaagaaaagtaaaccgagaacataattaggcatcgggcctaagtgtcctggggagattggaggggacggcagcgttctgcatgatggaggcgctgccgggccccgggtctgtgggggccgtgctctcagggcgtgtgcgggacgccacctgtgcacacctgctcagagcacggctcctcgcaggggtgaaggggcagaccaacgaaaccagatgagaccaacgacaccatgcgagacacgcttgcagacactgttgttttggaaatgtgcttccctccatctgaaatctcatccctccacccgcccactcgggcagctgtgcygtgggcagggcatgcgctcccctggctgagcaccccagagattctcctgcaccttcctcatgccgcacgctgctcatccgtctccatgtgtgtttagatccatgccattcactgactcactaacacctgcaaaatctttaaggaaaaaagctgaagggtacgaccatgcacatatgtgacctggaaaatgcaaatttagatcttttatgatttaattrttattgtttcccatagaagttccctccctttgaaattaatatataatgtataaattctgcactgagccatggcggagctgggcagcccctaggttagagtggagacggaggcccaggcgcaggggtcacacctcatctggtttccttcccatctcacagcttagcttgtgcttctcaacaccaagtctttaagagcaataaaaactacaccatgaatgtttgaattttttttttttggsggggggagggtggattttgcttttcatccagaaggaaaaggggaggagagctcctttacattttttaaattaaattcataaatcccagaacagtcttttttttttctttttcctttacaccctacttctgagcttaattcagttgatgttatgtccaaattcaggctgagtgctcaggctgaagcaactctgtagcccacagtccgtgctggccactgtcggggtgaggcacattctaggcctggcatcgctgatgccctctgcacccrgtccttgagycaggccraggacaggaagggcattgctggcctgtagctcctgttacccacccagagccaggcgccacactggaggctcccaggcgggagggcccaggcccacccacgggcgtctggcmggtcaagctcccagcctgggccgtggtctcctggggacgccgctggcctcccagcttaggcccaggtgccaggtgtcatggggwctcctgcccatcttcccaaggatgccattgctgtcttcatcgtcttcccccgtgtgagacactggttgtctggtactcggcgacagtgtaccagacgcgcaccctatgtgaggtgctttaaggtccctgtcctcaggaagcgcagtctggtggaagagatgagcgctgaacaaatcactaaataacacaaaacaacaatgtaagcagcactttcttgtgtaaaaaaaaaaaaaaagcacgtcctgtcgatgaattttgagtctctctgccttgcctgtcccgactccctttcgcgcaccgtggcatgagaatctttcctcacgctgttcgttgcggtattgctgagcattgatgttgatttgaaggaaaagccgtggttggacccagctgtgtgtttcactcacgtgcaattgagtagctgttgccaggctgtccatgcctgttgtgactaccggttggggtcagatttggggtgaagaatgagtaastttctgcatgctttgtctctacctgagacacttctacaacaagccaagtataatctctccagccctgcagattttcacctgacttgttcagccccatgcgtagactcccgctgcaggcctctggcctgtggctcactgcatgcagcccctggcgtgcaatactagtgctccacggcgcgatgtgcttctagcccttgcactgcacctaggctcagggttcaaacggccagcccgaaaagcctgcctgccttctttytggaaacagcacgtccccggccgtgtgcctgcccctttctctactgagctagtccccaaaccaaaggcaagccccctcgggcctcgggggatggggccggccacacccctgactccgccctggctctgccccatacccctgccgtggggccgacctgggggatgcagacatccggctccgtattcctgcctatcggggccaggatgcaaaaacaatttttgcgtaaaagatgtcacactgatctgctggagtggggtggacacatgaattcagttttatcatgaacactcgcsactggctgcttgttaattcagggataatggtggcattcttacaaactgctcgggaaatagaatgacgggaacacttttagggagcccaggaagttaccagggacattggtgtcgccggcccaggcaacagcagcgtacgcttttcaaagatcattgagttgtcttagaatttgaagctgtgtaatgacaatgtcacctggagttcgtctccatttcttaactttttgttgcacaagtatttggacagaagtcgaactgtgaatgagatactgaaatgcactaaattgtattacattaaactggagttacttgatacaatgaaraaatgcatctgatctacttgtatttattgtctcagaattgtacgttgtgacaatcraatgttacttgcctaaatgccaggaaattcaactggccttttaatcagcaagatcgccagcaagtactgtaactgtaaaggaaaatctctctctctggagaacccacacaaaccattgacctgagtgcgcatgacagccactggcttctttttctatgattgaaaatctgccatcgctgactgttggccagtttcaaagggacccattgtatacagggtgcaaatgtattatacggatgtttccttttgtacacttcatttttacaagttttgctactcacaagctttatgtagtggaggatagaggtatttttggtctttagaagmttgtcggggtgagggctgctaacttacacttcagaggcctgtgtcccaaaggcctggctgcgtttgccgtgctgtgcgaggacctgtgtacacaggcaggtgtgcgcctgcccgagcgcgagtagctcttgtgtagtggtgaaatgctgcaggcatctgtttattaaaattgctgctgtgaaagacagggataaaatatccacaatataag

SEQ ID NO: 3257 - DNA, 2697 bp, Homo sapiens
cccgacgcagggccgggccgggcccagggccgaggagcgcggcggccagagcggggccgcggaggcgacgccggggacgcccgcgcgacgagcaggtggcggcggctgcaggctttgcaggacggctgtcctcagygaggggccgtgcacccgctcctgagcagcgccatgggcctgctggccttcctgaagacccagttcgtgctgcacctgctgrtcggctttgtcttcgtggtgagtggtctggtcatcaacttcgtccagctgtgcacgctggcgctctggccggtcagcaagcagctctaccgccgcctcaactgccgcctcgcctactcactctggagccaactggtcatgctgctggagtggtggtcctgcacggagtgtacactgttcacggaccaggccacggtagagcgctttgggaaggagcacgcagtcatcatcctcaaccacaacttcgagatcgacttcctctgtgggtggaccatgtgtgagcgcttcggagtgctggggagctccaaggtcctcgctaagaaggagctgctctaygtgcccctcatcggctggacgtggtactttctggagattgtgttctgcaagcggaagtgggaggaggaccgggacaccgtggtmgaagggctgaggcgcctgtcggactaccccgagtacatgtggtttctcctgtactgcgaggggacgcgcttcacggagaccaagcaccgygttagcatggaggtggcggctgctaaggggcttcctgtcctcaagtaccacctgctgccgcggaccaagggcttcaccaccgcagtcaagtgcctccgggggacagtcgcagctgtctatgatgtaaccctgaacttcagaggaaacaagaacccgtccctgctggggatcctctacgggaagaagtacgaggcggacatgtgcgtgaggagatttcctctggaagacatcccgctggatgaaaaggaagcagctcagtggcttcataaactgtaccaggagaaggacgcgctccaggagatatataatcagaagggcatgtttccaggggagcagtttaagcctgcccggaggccgtggaccctcctgaacttcctgtcctgggccaccattctcctgtctcccctcttcagttttgtcttgggcgtctttgccagcggatcacctctcctgatcctgactttcttggggtttgtgggagcagcttcctttggagttcgcagactgataggagtaactgagatagaaaaaggctccagctacggaaaccaagagtttaagaaaaaggaataattaatggctgtgactgaacacacgcggccctgacggtggtatccagttaactcaaaaccaacacacagagtgcaggaaaagacaattagaaactatttttcttattaactggtgactaatattaacaaaacttgagccaagagtaaagaattcagaaggcctgtcaggtgaagtcttcagcctcccacagcgcagggtcccagcatctccacgcgcgcccgtgggaggtgggtccggccggagaggcctcccrcggacgccgtctctccagaactccgcttccaagagggagcctttggctgctttctctccttaaacttagatcaaattttttggtttttaatcagttatcttgggaacttaacctggcccctcacctcttctgcaccccccgcccccgaaactgtctcgtaatgaatttctgctgtcctcctgggagtggacggccgggtcccgtccyccgggagcatcgctcggctcagcaccttggctcccagtgggggccccgtggagggcgcccgtagtgataagcacaccggcaygaacrtcaggtccattcctcgaagtcggagccctcactctgccctgtcctggggctggctgagggcgaacgccccacctcactttctagagccctgtctgtcctagctcctatctgaccttgtgtgtaaatacgtacatctgtttttaaagtggatgggcccctgagaactcagtgaaatgcagagttctccatgcacctaaagctcctttgtcgctctcatggctgtcagatcctggtccctccacactgggtgctggggagggaggaccctcggggctaccgcgcgcccccccatcccacagatcaggagccaaggagggagaacagggcagcctgtgggactctaggatgcttcagaagaagcgacggcaccgtcaaccctctgttttttaaaggtggttggagactgttaacrctgagctcattgacttctagagattttatttttactggttgatctcttggtggttttcaacttcctgctggaaactagaggtggggcaccccccaccccccagcctcgcactgtgtccttggggaaggcccgcccccatcctggccggtgtcactgtggcccggccacccctgagcgcccagctccctacctcctggacgtctctgagagtccaggcagagcagagggcagcgctcggccggtcatgctggctcccttggccttgcagcgagcccctggcccacgccgagcgagggatgcttctccctacagcatgtccactcccccggcatggccaggcgcaggggtcacacctcatctggtttccttcccatctcacagcttagcttgtgcttctcaacaccaagtctttaagagcaataaaaactacaccatgaat

SEQ ID NO: 3258 - DNA, 6053 bp, Homo sapiens
tctatgaaaccaacatacatggcgtttgcatcacagttggagtcagatgtgagcccggagggcaggtgtctggcttgtccagccggaagccctgagggcagctgttcccactggctctgctgaccttgtgccttggacggctgtcctcagygaggggccgtgcacccgctcctgagcagcgccatgggcctgctggccttcctgaagacccagttcgtgctgcacctgctgrtcggctttgtcttcgtggtgagtggtctggtcatcaacttcgtccagctgtgcacgctggcgctctggccggtcagcaagcagctctaccgccgcctcaactgccgcctcgcctactcactctggagccaactggtcatgctgctggagtggtggtcctgcacggagtgtacactgttcacggaccaggccacggtagagcgctttgggaaggagcacgcagtcatcatcctcaaccacaacttcgagatcgacttcctctgtgggtggaccatgtgtgagcgcttcggagtgctggggagctccaaggtcctcgctaagaaggagctgctctaygtgcccctcatcggctggacgtggtactttctggagattgtgttctgcaagcggaagtgggaggaggaccgggacaccgtggtmgaagggctgaggcgcctgtcggactaccccgagtacatgtggtttctcctgtactgcgaggggacgcgcttcacggagaccaagcaccgygttagcatggaggtggcggctgctaaggggcttcctgtcctcaagtaccacctgctgccgcggaccaagggcttcaccaccgcagtcaagtgcctccgggggacagtcgcagctgtctatgatgtaaccctgaacttcagaggaaacaagaacccgtccctgctggggatcctctacgggaagaagtacgaggcggacatgtgcgtgaggagatttcctctggaagacatcccgctggatgaaaaggaagcagctcagtggcttcataaactgtaccaggagaaggacgcgctccaggagatatataatcagaagggcatgtttccaggggagcagtttaagcctgcccggaggccgtggaccctcctgaacttcctgtcctgggccaccattctcctgtctcccctcttcagttttgtcttgggcgtctttgccagcggatcacctctcctgatcctgactttcttggggtttgtgggagcagcttcctttggagttcgcagactgataggagtaactgagatagaaaaaggctccagctacggaaaccaagagtttaagaaaaaggaataattaatggctgtgactgaacacacgcggccctgacggtggtatccagttaactcaaaaccaacacacagagtgcaggaaaagacaattagaaactatttttcttattaactggtgactaatattaacaaaacttgagccaagagtaaagaattcagaaggcctgtcaggtgaagtcttcagcctcccacagcgcagggtcccagcatctccacgcgcgcccgtgggaggtgggtccggccggagaggcctcccrcggacgccgtctctccagaactccgcttccaagagggagcctttggctgctttctctccttaaacttagatcaaattttttggtttttaatcagttatcttgggaacttaacctggcccctcacctcttctgcaccccccgcccccgaaactgtctcgtaatgaatttctgctgtcctcctgggagtggacggccgggtcccgtccyccgggagcatcgctcggctcagcaccttggctcccagtgggggccccgtggagggcgcccgtagtgataagcacaccggcaygaacrtcaggtccattcctcgaagtcggagccctcactctgccctgtcctggggctggctgagggcgaacgccccacctcactttctagagccctgtctgtcctagctcctatctgaccttgtgtgtaaatacgtacatctgtttttaaagtggatgggcccctgagaactcagtgaaatgcagagttctccatgcacctaaagctcctttgtcgctctcatggctgtcagatcctggtccctccacactgggtgctggggagggaggaccctcggggctaccgcgcgcccccccatcccacagatcaggagccaaggagggagaacagggcagcctgtgggactctaggatgcttcagaagaagcgacggcaccgtcaaccctctgttttttaaaggtggttggagactgttaacrctgagctcattgacttctagagattttatttttactggttgatctcttggtggttttcaacttcctgctggaaactagaggtggggcaccccccaccccccagcctcgcactgtgtccttggggaaggcccgcccccatcctggccggtgtcactgtggcccggccacccctgagcgcccagctccctacctcctggacgtctctgagagtccaggcagagcagagggcagcgctcggccggtcatgctggctcccttggccttgcagcgagcccctggcccacgccgagcgagggatgcttctccctacagcatgtccactcccccggcatggccaggtggggcccctggggcaatggcagtggtagaacgctcaacttggttgcggtaccatcagcccacctgcatttggctttcgacttgcttgttctaagtcacagcgccctcatctttttagcaaggtaaaaaaaccaaaatgggtgttatctctgatatcttgaaaccagcgttctgaatagaggtaggttgagttttctaggggaaaacaaatggagaaaagaggcatgaagaaaagtaaaccgagaacataattaggcatcgggcctaagtgtcctggggagattggaggggacggcagcgttctgcatgatggaggcgctgccgggccccgggtctgtgggggccgtgctctcagggcgtgtgcgggacgccacctgtgcacacctgctcagagcacggctcctcgcaggggtgaaggggcagaccaacgaaaccagatgagaccaacgacaccatgcgagacacgcttgcagacactgttgttttggaaatgtgcttccctccatctgaaatctcatccctccacccgcccactcgggcagctgtgcygtgggcagggcatgcgctcccctggctgagcaccccagagattctcctgcaccttcctcatgccgcacgctgctcatccgtctccatgtgtgtttagatccatgccattcactgactcactaacacctgcaaaatctttaaggaaaaaagctgaagggtacgaccatgcacatatgtgacctggaaaatgcaaatttagatcttttatgatttaattrttattgtttcccatagaagttccctccctttgaaattaatatataatgtataaattctgcactgagccatggcggagctgggcagcccctaggttagagtggagacggaggcccaggcgcaggggtcacacctcatctggtttccttcccatctcacagcttagcttgtgcttctcaacaccaagtctttaagagcaataaaaactacaccatgaatgtttgaattttttttttttggsggggggagggtggattttgcttttcatccagaaggaaaaggggaggagagctcctttacattttttaaattaaattcataaatcccagaacagtcttttttttttctttttcctttacaccctacttctgagcttaattcagttgatgttatgtccaaattcaggctgagtgctcaggctgaagcaactctgtagcccacagtccgtgctggccactgtcggggtgaggcacattctaggcctggcatcgctgatgccctctgcacccrgtccttgagycaggccraggacaggaagggcattgctggcctgtagctcctgttacccacccagagccaggcgccacactggaggctcccaggcgggagggcccaggcccacccacgggcgtctggcmggtcaagctcccagcctgggccgtggtctcctggggacgccgctggcctcccagcttaggcccaggtgccaggtgtcatggggwctcctgcccatcttcccaaggatgccattgctgtcttcatcgtcttcccccgtgtgagacactggttgtctggtactcggcgacagtgtaccagacgcgcaccctatgtgaggtgctttaaggtccctgtcctcaggaagcgcagtctggtggaagagatgagcgctgaacaaatcactaaataacacaaaacaacaatgtaagcagcactttcttgtgtaaaaaaaaaaaaaaagcacgtcctgtcgatgaattttgagtctctctgccttgcctgtcccgactccctttcgcgcaccgtggcatgagaatctttcctcacgctgttcgttgcggtattgctgagcattgatgttgatttgaaggaaaagccgtggttggacccagctgtgtgtttcactcacgtgcaattgagtagctgttgccaggctgtccatgcctgttgtgactaccggttggggtcagatttggggtgaagaatgagtaastttctgcatgctttgtctctacctgagacacttctacaacaagccaagtataatctctccagccctgcagattttcacctgacttgttcagccccatgcgtagactcccgctgcaggcctctggcctgtggctcactgcatgcagcccctggcgtgcaatactagtgctccacggcgcgatgtgcttctagcccttgcactgcacctaggctcagggttcaaacggccagcccgaaaagcctgcctgccttctttytggaaacagcacgtccccggccgtgtgcctgcccctttctctactgagctagtccccaaaccaaaggcaagccccctcgggcctcgggggatggggccggccacacccctgactccgccctggctctgccccatacccctgccgtggggccgacctgggggatgcagacatccggctccgtattcctgcctatcggggccaggatgcaaaaacaatttttgcgtaaaagatgtcacactgatctgctggagtggggtggacacatgaattcagttttatcatgaacactcgcsactggctgcttgttaattcagggataatggtggcattcttacaaactgctcgggaaatagaatgacgggaacacttttagggagcccaggaagttaccagggacattggtgtcgccggcccaggcaacagcagcgtacgcttttcaaagatcattgagttgtcttagaatttgaagctgtgtaatgacaatgtcacctggagttcgtctccatttcttaactttttgttgcacaagtatttggacagaagtcgaactgtgaatgagatactgaaatgcactaaattgtattacattaaactggagttacttgatacaatgaaraaatgcatctgatctacttgtatttattgtctcagaattgtacgttgtgacaatcraatgttacttgcctaaatgccaggaaattcaactggccttttaatcagcaagatcgccagcaagtactgtaactgtaaaggaaaatctctctctctggagaacccacacaaaccattgacctgagtgcgcatgacagccactggcttctttttctatgattgaaaatctgccatcgctgactgttggccagtttcaaagggacccattgtatacagggtgcaaatgtattatacggatgtttccttttgtacacttcatttttacaagttttgctactcacaagctttatgtagtggaggatagaggtatttttggtctttagaagmttgtcggggtgagggctgctaacttacacttcagaggcctgtgtcccaaaggcctggctgcgtttgccgtgctgtgcgaggacctgtgtacacaggcaggtgtgcgcctgcccgagcgcgagtagctcttgtgtagtggtgaaatgctgcaggcatctgtttattaaaattgctgctgtgaaagacagggataaaatatccacaatataag

SEQ ID NO: 3259 - DNA, 4424 bp, Homo sapiens
gagggcgggcccgcgcgagactggcgtctagaggcgcgcgaagcgctgaggcgggcgtggaccgcgcgggagttaagaagcaggtcccggatcgccgtataccgccgggttttctcccaacgtcaggcccgatggctcggcttccccagttagaaggggaagataaaagactttgattcatgaagaatctgctcactgagaagtgtatatcaagccacaatttccatcaaaaagtgattaagcagagaatggagaagaaggttgattccaggtattttaaggatggtgcagttaagaaaccttattctgcaaagacactgtccaacaagaagtcttctgcatcctttgggatccggagggagttacctagtaccagtcatctagtgcagtatcgtggcacacatacttgtacccgacagggccggttaagagaactgcgcatcagatgcgtggccagaaagttcttatatttatggattcgaatgacttttggaagagtatttccctctaaagccagattttactatgagcagcgattactacggaaggtcttcgaagaatggaaagaggagtggtgggttttccagcacgagtggaaactctgtgttcgagctgactgtcactacaggtattacctgtacaacctgatgttccagacgtggaagacctatgtgcgtcagcagcaggaratgaggaacaagtacattagagccgaggttcatgatgcaaagcaaaagatgcgacaggcctggaagtcctggttgatctacgtggttgttcgtaggaccaaacttcagatgcagactacagctctggagtttaggcaacggattatcttacgggtgtggtggagcacgtggaggcagcgactaggacaggtccgtgtgagccgtgccctccatgcctctgctttgaagcacagggccctgagcctccaggtgcaggcttggtcacagtggcgggaacagctcctgtatgtccagaaggagaaacaaaaggttgtctctgcagtgaaacatcatcagcactggcaaaaacggagatttctaaaggcctggcttgaatacctgcaagtccgcagagtgaagagacagcagaatgagatggctgagcgattccatcatgtcactgtgctccagatayacttctgtgactggcagcaggccygggagcggagggagagcttgtacgctcaccatgcccaggtggagaaactggccaggaagatggccctgcggcgcgcctttactcactggaaacactacatgctgctgtgtgcagaagaagctgcccagtttgagatggcagaagagcaccacaggcacagccagctgtatttttgctttagagccctaaaagacaatgtgacccacgctcatctccagcaaataagaaggaatcttgctcaccagcagcatggkgtcacgctgctgcacaggttctggaacctctggcggtctcagattgagcagaaaaaggaaagagagctgctccccttactgcatgctgcctgggaccactacagaatagcactgctgtgcaaatgtatcgaattgtggctacagtatactcagaagaggcggtacaagcagctgctacaggccagagcggatggtcatttccagcagagagccctgcctgctgccttccacacatggaacagactctggcgatggcgccaccaggaaaatgtcctcagtgcaagagcaacacgtttccacagggagacattagagaagcaagtattttctctctggaggcagaagatgtttcagcatcgagaaaaccgcctggcagagagaatggccatccttcacgcagagcracagcttctgtataggtcttggttcatgtggcaccagcaggcagcagcacgtcaccaggagcaggagtggcaaacagtggcctgtgcccaccaccgccacgggcggctcaaraaagctttctgcctytggagggaaagtgcccaagggctcagaacagagaggacgggcagggtgcgggcagcagaattccacatggcccagctcctgcgttgggcctggagccagtggagggagtgcctggccctgcggggagcggagcggcagaagctgatgcgagcagacctgcaccaccagcacagcgtgctscacagggcgctgcaggcatgggtgacttaccagggcagggtrcgaagcatcctccgggaggtggcagccagggagagccagcacaacaggcagctgctgygcggggcattacgtcgctggaaagagaacaccatggccsgagtggatgaagccaaaaaaacctttcaagcaagtactcattacagaaggaccatatgttccaaggtcctggtscagtggcgggaagctgtgtcagtgcagatgtattaccgacagcaggaggactgtgccatctgggaggcccagaaggtgctggacaggggctgtctgcggacctggtttcagcrctggtgggactgcagccggaggtcagcccagcagagactgcagctggagagggcagtgcaacaccaccaccggcagctgctgctggaggggctggcccggtggaagacgcwccatctgcagtgtgtcaggaagaggctcctgcacaggcagagcacccaactgctggcacagagactcagccggacctgcttccgccagtggagacaacagctggcagccaggaggcaggagcagcgggcgacagtgcgggccctgtggttctgggccttctcgctgcaggcaaaggtgtgggccacgtggctggcctttgtactggaaaggaggagaaagaaggcgcggctgcagtgggcgctccaggcctaccaggggcagctcctccaggagggtgccacgcggctcctgcgctttgcagccagcatgaaggcctcccggcagcagctgcaggcccagcagcaggtccaggcggctcacagtctccatcgtgccgtccgccgctgtgccacgctctggaaacagaaagtgctgggccggggcgggaagcctcagcccctggcagccatcgcacccagcaggaaagtgacgtttgagggtccccttctcaaccgcattgctgctggggctggggatggcacccttgagaccaagaggccacaggcttctcggcctctgggagctctgggccgcctggctgctgaggagccccacgccctggagctgcctcagaagccacaggaacatggcctaggcatggctcagccagcagccccctccctgacgcggcccttcctggcagaggccccgacagcactggtcccacacagccccctgcctggggccctgtcaagcgcccctggcccgaagcagcccccgacrgcaagcacaggcccggagctgctgctgctgcctcyttcctccttcatgccctgcggggcggctgcaccagccagggtgtcagcacagcgggctactcctagggataagcccccggtcccctcatccctggccagtgtccctgacccccatctactccttcctggggacttctcagccaccagggctgggcctggactttcaactgcaggcagcctggaccttgaggctgaacttgaggagatccagcagcaactactgcactaccagaccaccaagcagaacctctggtcctgtcggcggcaagcgagcagcctgcgcaggtggctggagctgaacagagaggagccrgggcctgaggaccaggaagtagagcagcaggtgcagaaagagctggaacaggtggaaatgcagatccagctgctggcagaggagctccaggctcagcgccagcccattggcgcctgcgttgcccgcatccaggccctgcggcaggccctgtgctagcgtgttcgcaccaggaacgcaggtgctgggctgtcggggaggcctcaggccacctccaggaacagaacacagttttaagtttgattttttttatttcaaaatgctttgcaattaaatgaattactgttcagaagtctcccacttttcatacaaaaatactrtgctactgatacagttgaaaaaattcaatgatgtctctcctgcaggagaaattcacagcatccccagggtcaacatgaaatctggccctgtccccgccactgggggctccccaggcctgcgttcctgataaactgggacaggttttccaggcaytgaccaactatccaccaagggtcctctgcctccaagacagaccctgaatcaatagcagcaactttcccatatttcatgtagggatatgtggagggggacaggaactctcccatttccccagctgggcctactacctgcctgccctgttcactctggtgccatgaggcaggttcagtgattgattggtcttgcctgctgcagagtctgtatcattaatcartgtcatcagtgtcctcasaagacactagcagagtccagggtgatgcgttcagc

SEQ ID NO: 3260 - DNA, 4549 bp, Homo sapiens
gagggcgggcccgcgcgagactggcgtctagaggcgcgcgaagcgctgaggcgggcgtggaccgcgcgggagttaagaagcaggtcccggatcgccgtataccgccgggttttctcccaacgtcaggcccgatggctcggcttccccagttagaaggggaagataaaagactttgattcatgaagaatctgctcactgagaagtgtatatcaagccacaatttccatcaaaaagtgattaagcagagaatggagaagaaggttgattccaggtattttaaggatggtgcagttaagaaaccttattctgcaaagacactgtccaacaagaagtcttctgcatcctttgggatccggagggagttacctagtaccagtcatctagtgcagtatcgtggcacacatacttgtacccgacagggccggttaagagaactgcgcatcagatgcgtggccagaaagttcttatatttatggattcgaatgacttttggaagagtatttccctctaaagccagattttactatgagcagcgattactacggaaggtcttcgaagaatggaaagaggagtggtgggttttccagcacgagtggaaactctgtgttcgagctgactgtcactacaggtattacctgtacaacctgatgttccagacgtggaagacctatgtgcgtcagcagcaggaratgaggaacaagtacattagagccgaggttcatgatgcaaagcaaaagatgcgacaggcctggaagtcctggttgatctacgtggttgttcgtaggaccaaacttcagatgcagactacagctctggagtttaggcaacggattatcttacgggtgtggtggagcacgtggaggcagcgactaggacaggtccgtgtgagccgtgccctccatgcctctgctttgaagcacagggccctgagcctccaggtgcaggcttggtcacagtggcgggaacagctcctgtatgtccagaaggagaaacaaaaggttgtctctgcagtgaaacatcatcagcactggcaaaaacggagatttctaaaggcctggcttgaatacctgcaagtccgcagagtgaagagacagcagaatgagatggctgagcgattccatcatgtcactgtgctccagatayacttctgtgactggcagcaggccygggagcggagggagagcttgtacgctcaccatgcccaggtggagaaactggccaggaagatggccctgcggcgcgcctttactcactggaaacactacatgctgctgtgtgcagaagaagctgcccagtttgagatggcagaagagcaccacaggcacagccagctgctgctgcacaggttctggaacctctggcggtctcagattgagcagaaaaaggaaagagagctgctccccttactgcatgctgcctgggaccactacagaatagcactgctgtgcaaatgtatcgaattgtggctacagtatactcagaagaggcggtacaagcagctgctacaggccagagcggatggtcatttccagcagagagccctgcctgctgccttccacacatggaacagactctggcgatggcgccaccaggaaaatgtcctcagtgcaagagcaacacgtttccacagggagacattagagaagcaagtattttctctctggaggcagaagatgtttcagcatcgagaaaaccgcctggcagagagaatggccatccttcacgcagagcracagcttctgtataggtcttggttcatgtggcaccagcaggcagcagcacgtcaccaggagcaggagtggcaaacagtggcctgtgcccaccaccgccacgggcggctcaaraaagctttctgcctytggagggaaagtgcccaagggctcagaacagagaggacgggcagggtgcgggcagcagaattccacatggcccagctcctgcgttgggcctggagccagtggagggagtgcctggccctgcggggagcggagcggcagaagctgatgcgagcagacctgcaccaccagcacagcgtgctscacagggcgctgcaggcatgggtgacttaccagggcagggtrcgaagcatcctccgggaggtggcagccagggagagccagcacaacaggcagctgctgygcggggcattacgtcgctggaaagagaacaccatggccsgagtggatgaagccaaaaaaacctttcaagcaagtactcattacagaaggaccatatgttccaaggtcctggtscagtggcgggaagctgtgtcagtgcagatgtattaccgacagcaggaggactgtgccatctgggaggcccagaaggtgctggacaggggctgtctgcggacctggtttcagcrctggtgggactgcagccggaggtcagcccagcagagactgcagctggagagggcagtgcaacaccaccaccggcagctgctgctggaggggctggcccggtggaagacgcwccatctgcagtgtgtcaggaagaggctcctgcacaggcagagcacccaactgctggcacagagactcagccggacctgcttccgccagtggagacaacagctggcagccaggaggcaggagcagcgggcgacagtgcgggccctgtggttctgggccttctcgctgcaggcaaaggtgtgggccacgtggctggcctttgtactggaaaggaggagaaagaaggcgcggctgcagtgggcgctccaggcctaccaggggcagctcctccaggagggtgccacgcggctcctgcgctttgcagccagcatgaaggcctcccggcagcagctgcaggcccagcagcaggtccaggcggctcacagtctccatcgtgccgtccgccgctgtgccacgctctggaaacagaaagtgctgggccggggcgggaagcctcagcccctggcagccatcgcacccagcaggaaagtgacgtttgagggtccccttctcaaccgcattgctgctggggctggggatggcacccttgagaccaagaggccacaggcttctcggcctctgggagctctgggccgcctggctgctgaggagccccacgccctggagctcaacactgcccactcagcgaggaagcagccgcgacgcccacacttcctgttggagcctgcgcagagccagaggcctcagaagccacaggaacatggcctaggcatggctcagccagcagccccctccctgacgcggcccttcctggcagaggccccgacagcactggtcccacacagccccctgcctggggccctgtcaagcgcccctggcccgaagcagcccccgacrgcaagcacaggcccggagctgctgctgctgcctcyttcctccttcatgccctgcggggcggctgcaccagccagggtgtcagcacagcgggctactcctagggataagcccccggtcccctcatccctggccagtgtccctgacccccatctactccttcctggggacttctcagccaccagggctgggcctggactttcaactgcaggcagcctggaccttgaggctgaacttgaggagatccagcagcaactactgcactaccagaccaccaagcagaacctctggtcctgtcggcggcaagcgagcagcctgcgcaggtggctggagctgaacagagaggagccrgggcctgaggaccaggaagtagagcagcaggtgcagaaagagctggaacaggtggaaatgcagatccagctgctggcagaggagctccaggctcagcgccagcccattggcgcctgcgttgcccgcatccaggccctgcggcaggccctgtgctagcgtgttcgcaccaggaacgcaggtgctgggctgtcggggaggcctcaggccacctccaggaacagaacacagttttaagtttgattttttttatttcaaaatgctttgcaattaaatgaattactgttcagaagtctcccacttttcatacaaaaatactrtgctactgatacagttgaaaaaattcaatgatgtctctcctgcaggagaaattcacagcatccccagggtcaacatgaaatctggccctgtccccgccactgggggctccccaggcctgcgttcctgataaactgggacaggttttccaggcaytgaccaactatccaccaagggtcctctgcctccaagacagaccctgaatcaatagcagcaactttcccatatttcatgtagggatatgtggagggggacaggaactctcccatttccccagctgggcctactacctgcctgccctgttcactctggtgccatgaggcaggttcagtgattgattggtcttgcctgctgcagaggacctggccagctccagaagggtcactcatcaggtcctgcaaaggtctgtatcattaatcartgtcatcagtgtcctcasaagacactagcagagtccagggtgatgcgttcagccacaagcacaaaractgctttttctaaagagcaggatgaggtgaatgtgggaacggaaagcagttgtcacgaaggctgtgtggctctgctgggggagaggc

SEQ ID NO: 3261 - DNA, 4403 bp, Homo sapiens
gagggcgggcccgcgcgagactggcgtctagaggcgcgcgaagcgctgaggcgggcgtggaccgcgcgggagttaagaagcaggtcccggatcgccgtataccgccgggttttctcccaacgtcaggcccgatggctcggcttccccagttagaaggggaagataaaagactttgattcatgaagaatctgctcactgagaagtgtatatcaagccacaatttccatcaaaaagtgattaagcagagaatggagaagaaggttgattccaggtattttaaggatggtgcagttaagaaaccttattctgcaaagacactgtccaacaagaagtcttctgcatcctttgggatccggagggagttacctagtaccagtcatctagtgcagtatcgtggcacacatacttgtacccgacagggccggttaagagaactgcgcatcagatgcgtggccagaaagttcttatatttatggattcgaatgacttttggaagagtatttccctctaaagccagattttactatgagcagcgattactacggaaggtcttcgaagaatggaaagaggagtggtgggttttccagcacgagtggaaactctgtgttcgagctgactgtcactacaggtattacctgtacaacctgatgttccagacgtggaagacctatgtgcgtcagcagcaggaratgaggaacaagtacattagagccgaggttcatgatgcaaagcaaaagatgcgacaggcctggaagtcctggttgatctacgtggttgttcgtaggaccaaacttcagatgcagactacagctctggagtttaggcaacggattatcttacgggtgtggtggagcacgtggaggcagcgactaggacaggtccgtgtgagccgtgccctccatgcctctgctttgaagcacagggccctgagcctccaggtgcaggcttggtcacagtggcgggaacagctcctgtatgtccagaaggagaaacaaaaggttgtctctgcagtgaaacatcatcagcactggcaaaaacggagatttctaaaggcctggcttgaatacctgcaagtccgcagagtgaagagacagcagaatgagatggctgagcgattccatcatgtcactgtgctccagatayacttctgtgactggcagcaggccygggagcggagggagagcttgtacgctcaccatgcccaggtggagaaactggccaggaagatggccctgcggcgcgcctttactcactggaaacactacatgctgctgtgtgcagaagaagctgcccagtttgagatggcagaagagcaccacaggcacagccagctgctgctgcacaggttctggaacctctggcggtctcagattgagcagaaaaaggaaagagagctgctccccttactgcatgctgcctgggaccactacagaatagcactgctgtgcaaatgtatcgaattgtggctacagtatactcagaagaggcggtacaagcagctgctacaggccagagcggatggtcatttccagcagagagccctgcctgctgccttccacacatggaacagactctggcgatggcgccaccaggaaaatgtcctcagtgcaagagcaacacgtttccacagggagacattagagaagcaagtattttctctctggaggcagaagatgtttcagcatcgagaaaaccgcctggcagagagaatggccatccttcacgcagagcracagcttctgtataggtcttggttcatgtggcaccagcaggcagcagcacgtcaccaggagcaggagtggcaaacagtggcctgtgcccaccaccgccacgggcggctcaaraaagctttctgcctytggagggaaagtgcccaagggctcagaacagagaggacgggcagggtgcgggcagcagaattccacatggcccagctcctgcgttgggcctggagccagtggagggagtgcctggccctgcggggagcggagcggcagaagctgatgcgagcagacctgcaccaccagcacagcgtgctscacagggcgctgcaggcatgggtgacttaccagggcagggtrcgaagcatcctccgggaggtggcagccagggagagccagcacaacaggcagctgctgygcggggcattacgtcgctggaaagagaacaccatggccsgagtggatgaagccaaaaaaacctttcaagcaagtactcattacagaaggaccatatgttccaaggtcctggtscagtggcgggaagctgtgtcagtgcagatgtattaccgacagcaggaggactgtgccatctgggaggcccagaaggtgctggacaggggctgtctgcggacctggtttcagcrctggtgggactgcagccggaggtcagcccagcagagactgcagctggagagggcagtgcaacaccaccaccggcagctgctgctggaggggctggcccggtggaagacgcwccatctgcagtgtgtcaggaagaggctcctgcacaggcagagcacccaactgctggcacagagactcagccggacctgcttccgccagtggagacaacagctggcagccaggaggcaggagcagcgggcgacagtgcgggccctgtggttctgggccttctcgctgcaggcaaaggtgtgggccacgtggctggcctttgtactggaaaggaggagaaagaaggcgcggctgcagtgggcgctccaggcctaccaggggcagctcctccaggagggtgccacgcggctcctgcgctttgcagccagcatgaaggcctcccggcagcagctgcaggcccagcagcaggtccaggcggctcacagtctccatcgtgccgtccgccgctgtgccacgctctggaaacagaaagtgctgggccggggcgggaagcctcagcccctggcagccatcgcacccagcaggaaagtgacgtttgagggtccccttctcaaccgcattgctgctggggctggggatggcacccttgagaccaagaggccacaggcttctcggcctctgggagctctgggccgcctggctgctgaggagccccacgccctggagctcaacactgcccactcagcgaggaagcagccgcgacgcccacacttcctgttggagcctgcgcagagccagaggcctcagaagccacaggaacatggcctaggcatggctcagccagcagccccctccctgacgcggcccttcctggcagaggccccgacagcactggtcccacacagccccctgcctggggccctgtcaagcgcccctggcccgaagcagcccccgacrgcaagcacaggcccggagctgctgctgctgcctcyttcctccttcatgccctgcggggcggctgcaccagccagggtgtcagcacagcgggctactcctagggataagcccccggtcccctcatccctggccagtgtccctgacccccatctactccttcctggggacttctcagccaccagggctgggcctggactttcaactgcaggcagcctggaccttgaggctgaacttgaggagatccagcagcaactactgcactaccagaccaccaagcagaacctctggtcctgtcggcggcaagcgagcagcctgcgcaggtggctggagctgaacagagaggagccrgggcctgaggaccaggaagtagagcagcaggtgcagaaagagctggaacaggtggaaatgcagatccagctgctggcagaggagctccaggctcagcgccagcccattggcgcctgcgttgcccgcatccaggccctgcggcaggccctgtgctagcgtgttcgcaccaggaacgcaggtgctgggctgtcggggaggcctcaggccacctccaggaacagaacacagttttaagtttgattttttttatttcaaaatgctttgcaattaaatgaattactgttcagaagtctcccacttttcatacaaaaatactrtgctactgatacagttgaaaaaattcaatgatgtctctcctgcaggagaaattcacagcatccccagggtcaacatgaaatctggccctgtccccgccactgggggctccccaggcctgcgttcctgataaactgggacaggttttccaggcaytgaccaactatccaccaagggtcctctgcctccaagacagaccctgaatcaatagcagcaactttcccatatttcatgtagggatatgtggagggggacaggaactctcccatttccccagctgggcctactacctgcctgccctgttcactctggtgccatgaggcaggttcagtgattgattggtcttgcctgctgcagagtctgtatcattaatcartgtcatcagtgtcctcasaagacactagcagagtccagggtgatgcgttcagc

SEQ ID NO: 3262 - DNA, 2592 bp, Homo sapiens
tcttcttggccaacaagcgtttctccctcttccctgttctccccacttccccacttcatcccccttcatccccccttcctcgcccctccacagacccagggcatttggtggacacttttgcttgcagttaggtcaagtggagccctgaccctctattctgcaccctgtgagccaccgagactgaaccaaacccaggaagcggcgccaccaaccagcctcgcagaggcagaggccctggagcagtgacagcacaggagatctgctggctcgggggaaggggaggaaagaggaaaacaaagggagtgatcragtgagcctcgccccgccctccctgcgccggcccatgatgtgtcagtcagaggcgcggcaaggaccagagctccgcgcggcgaaatggttgcacttcccccagctggccctgaggcrgaggctggggcagctgagctgcatgtccagacccgctctgaaactgcgctcctggcccttgaccgtcctctactacctcctgcccttcggcgccctcagaccgctcagccgggtgggatggaggcccgtaagcagggtggctttgtacaagtcagtgccaacgcgcttgctgtcacgggcctggggtcgcctcaatcaggtggagctgccacactggctgcgcaggcccgtctacagcctgtacatctggacgtttggggtgaacatgaaagaggccgctgtggaggacctgcatcactaccgcaacctcagcgagttcttccggcgcaagctgaagccgcaggcccggcctgtctgtggcctgcacagcgtgattagcccatcggatggaaggatcctcaactttgggcaggtgaagaactgtgaggtggagcaggtaaagggggtcacctactccctggagtcgttcctgggcccgcgtatgtgcacagaggacctgcccttcccaccagccgcgtcgtgtgactccttcaagaaccagctggtcacccgggaagggaatgagctctatcactgtgtcatctacctggcccctggggactaccactgcttccactcccccaccgactggactgtgtcccaccggcgccacttcccaggctccctgatgtcagtgaaccctggcatggctcgctggatcaaagagctcttctgccataacgagcgggtggtcctgaygggggactggaaacatggcttcttctcactgacagctgtgggggccaccaacgtgggctccattcgcatctactttgaccgggacctgcacacaaacagcccaaggcacagcaagggctcctacaatgacttcagcttystgacgcacaccaatagagagggcgtccccatgcgtaagggcgagcacctgggcgagttcaacctgggctccaccatcgtgctcatcttcgaggcccccaaggacttcaatttccagctgaaaacaggacagaaaatccgctttggggaagccctgggctcgctctagagtctctttcctgattatggctgctaagggatcttttcyaaacagagtgagggtcttttcaagagggaggcccatgaggccatccaggtaagggcctgcctcagcgtggttgggagtctgaccaggtaggacttgaatgattcggctmccacctgttccagaggtgcagacaagaggtggcgagagcccccrtcatgcccctcaacctatcccgttccttctgcctacaaataaaaagtgcaggctggaatgatctcagtcacatttggatctttttaaacactgtatagacggaagagcctgcattcctgaccgaaccttcagttggtctcggttgtcgttttttcttgctgctcctccccccatcacctgagctgttttctgttggccccttttgttttttggccttaacgctcctgctgcacagggtgaggtrcctccttggcacagactgtggatgcctctcccccagcagagccacacagccttcgtgacaactgctttccgttcccacattcacctcatcctgctctttagaaaaagcagtytttgtgcttgtggctgaacgcatcaccctggactctgctagtgtcttstgaggacactgatgacaytgattaatgatacagacctttgcaggacctgatgagtgacccttctggagctggccaggtcctctgcagcaggcaagaccaatcaatcactgaacctgcctcatggcaccagagtgaacagggcaggcaggtagtaggcccagctggggaaatgggagagttcctgtccccctccacatatccctacatgaaatatgggaaagttgctgctattgattcagggtctgtcttggaggcagaggacccttggtggatagttggtcartgcctggaaaacctgtcccagtttatcaggaacgcaggcctggggagcccccagtggcggggacagggccagatttcatgttgaccctggggatgctgtgaatttctcctgcaggagagacatcattgaattttttcaactgtatcagtagcayagtatttttgtatgaaaagtgggagacttctgaacagtaattcatttaattgcaaagcattttgaaataaaaaaaatcaaacttaaaa

SEQ ID NO: 3263 - DNA, 2572 bp, Homo sapiens
ccagcgtgtgaagggggcgtggcacgctgagaaggagcagacaagatggcgacgtccgtggggcaccgatgtctgggattactgcacggggtcgcgccgtggcggagcagcctccatccctgtgagatcactgccctgagccaatccctacagcccttacggaagctgccttttagagcctttcgcacagatgccagaaaaatccacactgcccctgcccgaaccatgttcctgctgcgtcccctgcccattctgttggtgacaggcggcgggtatgcagggtaccrgcagtatgagaagtacagggagcgagagctggagaagctgggattggagattccacccaaacttgctggtcactgggaggtggctttgtacaagtcagtgccaacgcgcttgctgtcacgggcctggggtcgcctcaatcaggtggagctgccacactggctgcgcaggcccgtctacagcctgtacatctggacgtttggggtgaacatgaaagaggccgctgtggaggacctgcatcactaccgcaacctcagcgagttcttccggcgcaagctgaagccgcaggcccggcctgtctgtggcctgcacagcgtggtgaggcctgaccctttcctcctgcaggaaacaggactttttcctgcctccccagcacagcccccctggtctccagcgtatctggaaggggcaggatgacaaggggaggtgggggctgtctcctggggggaggagaccctgctctccctggcagcaagcctctcctgcccttccagattagcccatcggatggaaggatcctcaactttgggcaggtgaagaactgtgaggtggagcaggtaaagggggtcacctactccctggagtcgttcctgggcccgcgtatgtgcacagaggacctgcccttcccaccagccgcgtcgtgtgactccttcaagaaccagctggtcacccgggaagggaatgagctctatcactgtgtcatctacctggcccctggggactaccactgcttccactcccccaccgactggactgtgtcccaccggcgccacttcccaggctccctgatgtcagtgaaccctggcatggctcgctggatcaaagagctcttctgccataacgagcgggtggtcctgaygggggactggaaacatggcttcttctcactgacagctgtgggggccaccaacgtgggctccattcgcatctactttgaccgggacctgcacacaaacagcccaaggcacagcaagggctcctacaatgacttcagcttystgacgcacaccaatagagagggcgtccccatgcgtaagggcgagcacctgggcgagttcaacctgggctccaccatcgtgctcatcttcgaggcccccaaggacttcaatttccagctgaaaacaggacagaaaatccgctttggggaagccctgggctcgctctagagtctctttcctgattatggctgctaagggatcttttcyaaacagagtgagggtcttttcaagagggaggcccatgaggccatccaggtaagggcctgcctcagcgtggttgggagtctgaccaggtaggacttgaatgattcggctmccacctgttccagaggtgcagacaagaggtggcgagagcccccrtcatgcccctcaacctatcccgttccttctgcctacaaataaaaagtgcaggctggaatgatctcagtcacatttggatctttttaaacactgtatagacggaagagcctgcattcctgaccgaaccttcagttggtctcggttgtcgttttttcttgctgctcctccccccatcacctgagctgttttctgttggccccttttgttttttggccttaacgctcctgctgcacagggtgaggtrcctccttggcacagactgtggatgcctctcccccagcagagccacacagccttcgtgacaactgctttccgttcccacattcacctcatcctgctctttagaaaaagcagtytttgtgcttgtggctgaacgcatcaccctggactctgctagtgtcttstgaggacactgatgacaytgattaatgatacagacctttgcaggacctgatgagtgacccttctggagctggccaggtcctctgcagcaggcaagaccaatcaatcactgaacctgcctcatggcaccagagtgaacagggcaggcaggtagtaggcccagctggggaaatgggagagttcctgtccccctccacatatccctacatgaaatatgggaaagttgctgctattgattcagggtctgtcttggaggcagaggacccttggtggatagttggtcartgcctggaaaacctgtcccagtttatcaggaacgcaggcctggggagcccccagtggcggggacagggccagatttcatgttgaccctggggatgctgtgaatttctcctgcaggagagacatcattgaattttttcaactgtatcagtagcayagtatttttgtatgaaaagtgggagacttctgaacagtaattcatttaattgcaaagcattttgaaataaaaaaaatcaaacttaaaa

SEQ ID NO: 3264 - DNA, 2877 bp, Homo sapiens
caagctcctcatycagggcctgaggctcccacctcgtgtcacctcaagacagccagagaggatgaaatctttggcttgggcttccagggctgtcataggcagagggcaagccaggatttgaaatagggaggccagaaacactgctggccaaggaagtggcttggccttgggaagcaagaaggcagcaacctctaggcgccccttctctccatcctgcagctctgagagggacagacggtgctcagcctgtgtcctggggcaaagctggattcattttcctccctggcgatcttctggggcccacagctggtgatatggaggcactgacaccctggtctcggcgcttgttttagaagaggcagaacagtgataaagacaaggatctaaatgggcaaggacgccctgccctcactgggctcactggcagccctgaccctctattctgcaccctgtgagccaccgagactgaaccaaacccaggaagcggcgccaccaaccagcctcgcagaggcagaggccctggagcagtgacagcacaggagatctgctggctcgggggaaggggaggaaagaggaaaacaaagggagtgatcragtgagcctcgccccgccctccctgcgccggcccatgatgtgtcagtcagaggcgcggcaaggaccagagctccgcgcggcgaaatggttgcacttcccccagctggccctgaggcrgaggctggggcagctgagctgcatgtccagacccgctctgaaactgcgctcctggcccttgaccgtcctctactacctcctgcccttcggcgccctcagaccgctcagccgggtgggatggaggcccgtaagcagggtggctttgtacaagtcagtgccaacgcgcttgctgtcacgggcctggggtcgcctcaatcaggtggagctgccacactggctgcgcaggcccgtctacagcctgtacatctggacgtttggggtgaacatgaaagaggccgctgtggaggacctgcatcactaccgcaacctcagcgagttcttccggcgcaagctgaagccgcaggcccggcctgtctgtggcctgcacagcgtgattagcccatcggatggaaggatcctcaactttgggcaggtgaagaactgtgaggtggagcaggtaaagggggtcacctactccctggagtcgttcctgggcccgcgtatgtgcacagaggacctgcccttcccaccagccgcgtcgtgtgactccttcaagaaccagctggtcacccgggaagggaatgagctctatcactgtgtcatctacctggcccctggggactaccactgcttccactcccccaccgactggactgtgtcccaccggcgccacttcccaggctccctgatgtcagtgaaccctggcatggctcgctggatcaaagagctcttctgccataacgagcgggtggtcctgaygggggactggaaacatggcttcttctcactgacagctgtgggggccaccaacgtgggctccattcgcatctactttgaccgggacctgcacacaaacagcccaaggcacagcaagggctcctacaatgacttcagcttystgacgcacaccaatagagagggcgtccccatgcgtaagggcgagcacctgggcgagttcaacctgggctccaccatcgtgctcatcttcgaggcccccaaggacttcaatttccagctgaaaacaggacagaaaatccgctttggggaagccctgggctcgctctagagtctctttcctgattatggctgctaagggatcttttcyaaacagagtgagggtcttttcaagagggaggcccatgaggccatccaggtaagggcctgcctcagcgtggttgggagtctgaccaggtaggacttgaatgattcggctmccacctgttccagaggtgcagacaagaggtggcgagagcccccrtcatgcccctcaacctatcccgttccttctgcctacaaataaaaagtgcaggctggaatgatctcagtcacatttggatctttttaaacactgtatagacggaagagcctgcattcctgaccgaaccttcagttggtctcggttgtcgttttttcttgctgctcctccccccatcacctgagctgttttctgttggccccttttgttttttggccttaacgctcctgctgcacagggtgaggtrcctccttggcacagactgtggatgcctctcccccagcagagccacacagccttcgtgacaactgctttccgttcccacattcacctcatcctgctctttagaaaaagcagtytttgtgcttgtggctgaacgcatcaccctggactctgctagtgtcttstgaggacactgatgacaytgattaatgatacagacctttgcaggacctgatgagtgacccttctggagctggccaggtcctctgcagcaggcaagaccaatcaatcactgaacctgcctcatggcaccagagtgaacagggcaggcaggtagtaggcccagctggggaaatgggagagttcctgtccccctccacatatccctacatgaaatatgggaaagttgctgctattgattcagggtctgtcttggaggcagaggacccttggtggatagttggtcartgcctggaaaacctgtcccagtttatcaggaacgcaggcctggggagcccccagtggcggggacagggccagatttcatgttgaccctggggatgctgtgaatttctcctgcaggagagacatcattgaattttttcaactgtatcagtagcayagtatttttgtatgaaaagtgggagacttctgaacagtaattcatttaattgcaaagcattttgaaataaaaaaaatcaaacttaaaa

SEQ ID NO: 3265 - DNA, 2791 bp, Homo sapiens
cgctgagaaggagcagacaagatggcgacgtccgtggggcaccgatgtctgggattactgcacggggtcgcgcccttggttatagcctccatccctgtgagatcactgccctgagccaatccctacagcccttacggaagctgccttttagagcctttcgcacagatgccagaaaaatccacactgcccctgcccgaaccatgttcctgctgcgtcccctgcccattctgttggtgacaggcggcgggtatgcagggtaccrgcagtatgagaagtacagggagcgagagctggagaagctgggattggagattccacccaaacttgctggtcactgggagccctgaccctctattctgcaccctgtgagccaccgagactgaaccaaacccaggaagcggcgccaccaaccagcctcgcagaggcagaggccctggagcagtgacagcacaggagatctgctggctcgggggaaggggaggaaagaggaaaacaaagggagtgatcragtgagcctcgccccgccctccctgcgccggcccatgatgtgtcagtcagaggcgcggcaaggaccagagctccgcgcggcgaaatggttgcacttcccccagctggccctgaggcrgaggctggggcagctgagctgcatgtccagacccgctctgaaactgcgctcctggcccttgaccgtcctctactacctcctgcccttcggcgccctcagaccgctcagccgggtgggatggaggcccgtaagcagggtggctttgtacaagtcagtgccaacgcgcttgctgtcacgggcctggggtcgcctcaatcaggtggagctgccacactggctgcgcaggcccgtctacagcctgtacatctggacgtttggggtgaacatgaaagaggccgctgtggaggacctgcatcactaccgcaacctcagcgagttcttccggcgcaagctgaagccgcaggcccggcctgtctgtggcctgcacagcgtgattagcccatcggatggaaggatcctcaactttgggcaggtgaagaactgtgaggtggagcaggtaaagggggtcacctactccctggagtcgttcctgggcccgcgtatgtgcacagaggacctgcccttcccaccagccgcgtcgtgtgactccttcaagaaccagctggtcacccgggaagggaatgagctctatcactgtgtcatctacctggcccctggggactaccactgcttccactcccccaccgactggactgtgtcccaccggcgccacttcccaggctccctgatgtcagtgaaccctggcatggctcgctggatcaaagagctcttctgccataacgagcgggtggtcctgaygggggactggaaacatggcttcttctcactgacagctgtgggggccaccaacgtgggctccattcgcatctactttgaccgggacctgcacacaaacagcccaaggcacagcaagggctcctacaatgacttcagcttystgacgcacaccaatagagagggcgtccccatgcgtaagggcgagcacctgggcgagttcaacctgggctccaccatcgtgctcatcttcgaggcccccaaggacttcaatttccagctgaaaacaggacagaaaatccgctttggggaagccctgggctcgctctagagtctctttcctgattatggctgctaagggatcttttcyaaacagagtgagggtcttttcaagagggaggcccatgaggccatccaggtaagggcctgcctcagcgtggttgggagtctgaccaggtaggacttgaatgattcggctmccacctgttccagaggtgcagacaagaggtggcgagagcccccrtcatgcccctcaacctatcccgttccttctgcctacaaataaaaagtgcaggctggaatgatctcagtcacatttggatctttttaaacactgtatagacggaagagcctgcattcctgaccgaaccttcagttggtctcggttgtcgttttttcttgctgctcctccccccatcacctgagctgttttctgttggccccttttgttttttggccttaacgctcctgctgcacagggtgaggtrcctccttggcacagactgtggatgcctctcccccagcagagccacacagccttcgtgacaactgctttccgttcccacattcacctcatcctgctctttagaaaaagcagtytttgtgcttgtggctgaacgcatcaccctggactctgctagtgtcttstgaggacactgatgacaytgattaatgatacagacctttgcaggacctgatgagtgacccttctggagctggccaggtcctctgcagcaggcaagaccaatcaatcactgaacctgcctcatggcaccagagtgaacagggcaggcaggtagtaggcccagctggggaaatgggagagttcctgtccccctccacatatccctacatgaaatatgggaaagttgctgctattgattcagggtctgtcttggaggcagaggacccttggtggatagttggtcartgcctggaaaacctgtcccagtttatcaggaacgcaggcctggggagcccccagtggcggggacagggccagatttcatgttgaccctggggatgctgtgaatttctcctgcaggagagacatcattgaattttttcaactgtatcagtagcayagtatttttgtatgaaaagtgggagacttctgaacagtaattcatttaattgcaaagcattttgaaataaaaaaaatcaaacttaaaa

SEQ ID NO: 3266 - DNA, 2639 bp, Homo sapiens
ccttcatccccccttcctcgcccctccacagacccagggcatttggtggacacttttgcttgcagttaggtcaagtggaggtatggaagaacatggaaatccatggaggaggaccctatctgtcttcttccccctgccgcatcccagggctgtggcttgtcatgtggcacttgcttgggctggatccagccctgaccctctattctgcaccctgtgagccaccgagactgaaccaaacccaggaagcggcgccaccaaccagcctcgcagaggcagaggccctggagcagtgacagcacaggagatctgctggctcgggggaaggggaggaaagaggaaaacaaagggagtgatcragtgagcctcgccccgccctccctgcgccggcccatgatgtgtcagtcagaggcgcggcaaggaccagagctccgcgcggcgaaatggttgcacttcccccagctggccctgaggcrgaggctggggcagctgagctgcatgtccagacccgctctgaaactgcgctcctggcccttgaccgtcctctactacctcctgcccttcggcgccctcagaccgctcagccgggtgggatggaggcccgtaagcagggtggctttgtacaagtcagtgccaacgcgcttgctgtcacgggcctggggtcgcctcaatcaggtggagctgccacactggctgcgcaggcccgtctacagcctgtacatctggacgtttggggtgaacatgaaagaggccgctgtggaggacctgcatcactaccgcaacctcagcgagttcttccggcgcaagctgaagccgcaggcccggcctgtctgtggcctgcacagcgtgattagcccatcggatggaaggatcctcaactttgggcaggtgaagaactgtgaggtggagcaggtaaagggggtcacctactccctggagtcgttcctgggcccgcgtatgtgcacagaggacctgcccttcccaccagccgcgtcgtgtgactccttcaagaaccagctggtcacccgggaagggaatgagctctatcactgtgtcatctacctggcccctggggactaccactgcttccactcccccaccgactggactgtgtcccaccggcgccacttcccaggctccctgatgtcagtgaaccctggcatggctcgctggatcaaagagctcttctgccataacgagcgggtggtcctgaygggggactggaaacatggcttcttctcactgacagctgtgggggccaccaacgtgggctccattcgcatctactttgaccgggacctgcacacaaacagcccaaggcacagcaagggctcctacaatgacttcagcttystgacgcacaccaatagagagggcgtccccatgcgtaagggcgagcacctgggcgagttcaacctgggctccaccatcgtgctcatcttcgaggcccccaaggacttcaatttccagctgaaaacaggacagaaaatccgctttggggaagccctgggctcgctctagagtctctttcctgattatggctgctaagggatcttttcyaaacagagtgagggtcttttcaagagggaggcccatgaggccatccaggtaagggcctgcctcagcgtggttgggagtctgaccaggtaggacttgaatgattcggctmccacctgttccagaggtgcagacaagaggtggcgagagcccccrtcatgcccctcaacctatcccgttccttctgcctacaaataaaaagtgcaggctggaatgatctcagtcacatttggatctttttaaacactgtatagacggaagagcctgcattcctgaccgaaccttcagttggtctcggttgtcgttttttcttgctgctcctccccccatcacctgagctgttttctgttggccccttttgttttttggccttaacgctcctgctgcacagggtgaggtrcctccttggcacagactgtggatgcctctcccccagcagagccacacagccttcgtgacaactgctttccgttcccacattcacctcatcctgctctttagaaaaagcagtytttgtgcttgtggctgaacgcatcaccctggactctgctagtgtcttstgaggacactgatgacaytgattaatgatacagacctttgcaggacctgatgagtgacccttctggagctggccaggtcctctgcagcaggcaagaccaatcaatcactgaacctgcctcatggcaccagagtgaacagggcaggcaggtagtaggcccagctggggaaatgggagagttcctgtccccctccacatatccctacatgaaatatgggaaagttgctgctattgattcagggtctgtcttggaggcagaggacccttggtggatagttggtcartgcctggaaaacctgtcccagtttatcaggaacgcaggcctggggagcccccagtggcggggacagggccagatttcatgttgaccctggggatgctgtgaatttctcctgcaggagagacatcattgaattttttcaactgtatcagtagcayagtatttttgtatgaaaagtgggagacttctgaacagtaattcatttaattgcaaagcattttgaaataaaaaaaatcaaacttaaaa

SEQ ID NO: 3267 - DNA, 2619 bp, Homo sapiens
gagtgagcggagccggcgccccggccctgccgggagccccaggtgacttctcagggaggcgccccaccctgcccgctcagagggccagtgccgggtgggggtgcccttctagggccttcggtcgcaggtgggctctcccagctgtgacgacgcggccccggcctgaggagccccgcggacaaggttgagcgagtcgtgggctttttttccgtccccacgtgggcacggcccgggctgcgtgagctcacttcctccacatcttatctcctgccgggcgcgggcgcttcccatcagacagcaggagccagttctcagggtccttggctgaacacacaagctgcaaagctacatatactccggcagagctggctgcgggctgcagactgcagggccggtcactccgcgcaagtttgggttcctgttttagaactgccacctaagcccctcttatttcatctttcctgtggtggaaacccctgcccccaccggagtgtgaggttgactttttggaaagagagccctgaccctctattctgcaccctgtgagccaccgagactgaaccaaacccaggaagcggcgccaccaaccagcctcgcagaggcagaggccctggagcagtgacagcacaggagatctgctggctcgggggaaggggaggaaagaggaaaacaaagggagtgatcragtgagcctcgccccgccctccctgcgccggcccatgatgtgtcagtcagaggcgcggcaaggaccagagctccgcgcggcgaaatggttgcacttcccccagctggccctgaggcrgaggctggggcagctgagctgcatgtccagacccgctctgaaactgcgctcctggcccttgaccgtcctctactacctcctgcccttcggcgccctcagaccgctcagccgggtgggatggaggcccgtaagcagggtggctttgtacaagtcagtgccaacgcgcttgctgtcacgggcctggggtcgcctcaatcaggtggagctgccacactggctgcgcaggcccgtctacagcctgtacatctggacgtttggggtgaacatgaaagaggccgctgtggaggacctgcatcactaccgcaacctcagcgagttcttccggcgcaagctgaagccgcaggcccggcctgtctgtggcctgcacagcgtgattagcccatcggatggaaggatcctcaactttgggcaggtgaagaactgtgaggtggagcaggtaaagggggtcacctactccctggagtcgttcctgggcccgcgtatgtgcacagaggacctgcccttcccaccagccgcgtcgtgtgactccttcaagaaccagctggtcacccgggaagggaatgagctctatcactgtgtcatctacctggcccctggggactaccactgcttccactcccccaccgactggactgtgtcccaccggcgccacttcccaggctccctgatgtcagtgaaccctggcatggctcgctggatcaaagagctcttctgccataacgagcgggtggtcctgaygggggactggaaacatggcttcttctcactgacagctgtgggggccaccaacgtgggctccattcgcatctactttgaccgggacctgcacacaaacagcccaaggacttcaatttccagctgaaaacaggacagaaaatccgctttggggaagccctgggctcgctctagagtctctttcctgattatggctgctaagggatcttttcyaaacagagtgagggtcttttcaagagggaggcccatgaggccatccaggtaagggcctgcctcagcgtggttgggagtctgaccaggtaggacttgaatgattcggctmccacctgttccagaggtgcagacaagaggtggcgagagcccccrtcatgcccctcaacctatcccgttccttctgcctacaaataaaaagtgcaggctggaatgatctcagtcacatttggatctttttaaacactgtatagacggaagagcctgcattcctgaccgaaccttcagttggtctcggttgtcgttttttcttgctgctcctccccccatcacctgagctgttttctgttggccccttttgttttttggccttaacgctcctgctgcacagggtgaggtrcctccttggcacagactgtggatgcctctcccccagcagagccacacagccttcgtgacaactgctttccgttcccacattcacctcatcctgctctttagaaaaagcagtytttgtgcttgtggctgaacgcatcaccctggactctgctagtgtcttstgaggacactgatgacaytgattaatgatacagacctttgcaggacctgatgagtgacccttctggagctggccaggtcctctgcagcaggcaagaccaatcaatcactgaacctgcctcatggcaccagagtgaacagggcaggcaggtagtaggcccagctggggaaatgggagagttcctgtccccctccacatatccctacatgaaatatgggaaagttgctgctattgattcagggtctgtcttggaggcagaggacccttggtggatagttggtcartgcctggaaaacctgtcccagtttatcag

SEQ ID NO: 3268 - DNA, 2968 bp, Homo sapiens
gagtgagcggagccggcgccccggccctgccgggagccccaggtgacttctcagggaggcgccccaccctgcccgctcagagggccagtgccgggtgggggtgcccttctagggccttcggtcgcaggtgggctctcccagctgtgacgacgcggccccggcctgaggagccccgcggacaaggttgagcgagtcgtgggctttttttccgtccccacgtgggcacggcccgggctgcgtgagctcacttcctccacatcttatctcctgccgggcgcgggcgcttcccatcagacagcaggagccagttctcagggtccttggctgaacacacaagctgcaaagctacatatactccggcagagctggctgcgggctgcagactgcagggccggtcactccgcgcaagtttgggttcctgttttagaactgccacctaagcccctcttatttcatctttcctgtggtggaaacccctgcccccaccggagtgtgaggttgactttttggaaagagagccctgaccctctattctgcaccctgtgagccaccgagactgaaccaaacccaggaagcggcgccaccaaccagcctcgcagaggcagaggccctggagcagtgacagcacaggagatctgctggctcgggggaaggggaggaaagaggaaaacaaagggagtgatcragtgagcctcgccccgccctccctgcgccggcccatgatgtgtcagtcagaggcgcggcaaggaccagagctccgcgcggcgaaatggttgcacttcccccagctggccctgaggcrgaggctggggcagctgagctgcatgtccagacccgctctgaaactgcgctcctggcccttgaccgtcctctactacctcctgcccttcggcgccctcagaccgctcagccgggtgggatggaggcccgtaagcagggtggctttgtacaagtcagtgccaacgcgcttgctgtcacgggcctggggtcgcctcaatcaggtggagctgccacactggctgcgcaggcccgtctacagcctgtacatctggacgtttggggtgaacatgaaagaggccgctgtggaggacctgcatcactaccgcaacctcagcgagttcttccggcgcaagctgaagccgcaggcccggcctgtctgtggcctgcacagcgtgattagcccatcggatggaaggatcctcaactttgggcaggtgaagaactgtgaggtggagcaggtaaagggggtcacctactccctggagtcgttcctgggcccgcgtatgtgcacagaggacctgcccttcccaccagccgcgtcgtgtgactccttcaagaaccagctggtcacccgggaagggaatgagctctatcactgtgtcatctacctggcccctggggactaccactgcttccactcccccaccgactggactgtgtcccaccggcgccacttcccaggctccctgatgtcagtgaaccctggcatggctcgctggatcaaagagctcttctgccataacgagcgggtggtcctgaygggggactggaaacatggcttcttctcactgacagctgtgggggccaccaacgtgggctccattcgcatctactttgaccgggacctgcacacaaacagcccaaggcacagcaagggctcctacaatgacttcagcttystgacgcacaccaatagagagggcgtccccatgcgtaagggcgagcacctgggcgagttcaacctgggctccaccatcgtgctcatcttcgaggcccccaaggacttcaatttccagctgaaaacaggacagaaaatccgctttggggaagccctgggctcgctctagagtctctttcctgattatggctgctaagggatcttttcyaaacagagtgagggtcttttcaagagggaggcccatgaggccatccaggtaagggcctgcctcagcgtggttgggagtctgaccaggtaggacttgaatgattcggctmccacctgttccagaggtgcagacaagaggtggcgagagcccccrtcatgcccctcaacctatcccgttccttctgcctacaaataaaaagtgcaggctggaatgatctcagtcacatttggatctttttaaacactgtatagacggaagagcctgcattcctgaccgaaccttcagttggtctcggttgtcgttttttcttgctgctcctccccccatcacctgagctgttttctgttggccccttttgttttttggccttaacgctcctgctgcacagggtgaggtrcctccttggcacagactgtggatgcctctcccccagcagagccacacagccttcgtgacaactgctttccgttcccacattcacctcatcctgctctttagaaaaagcagtytttgtgcttgtggctgaacgcatcaccctggactctgctagtgtcttstgaggacactgatgacaytgattaatgatacagacctttgcaggacctgatgagtgacccttctggagctggccaggtcctctgcagcaggcaagaccaatcaatcactgaacctgcctcatggcaccagagtgaacagggcaggcaggtagtaggcccagctggggaaatgggagagttcctgtccccctccacatatccctacatgaaatatgggaaagttgctgctattgattcagggtctgtcttggaggcagaggacccttggtggatagttggtcartgcctggaaaacctgtcccagtttatcaggaacgcaggcctggggagcccccagtggcggggacagggccagatttcatgttgaccctggggatgctgtgaatttctcctgcaggagagacatcattgaattttttcaactgtatcagtagcayagtatttttgtatgaaaagtgggagacttctgaacagtaattcatttaattgcaaagcattttgaaataaaaaaaatcaaacttaaaa

SEQ ID NO: 3269 - DNA, 3432 bp, Homo sapiens
gtgtaagccctgatcccgcccagtgcatccccgaggccccaagcaactctcctccaactgtctttagggataaccctgagcgggcagccgctctactctatacctaactttatccgtaccagatayctagcctcactcagggccccccttacctggcggtgccgggatcaacaaatgaaattgtgacgggaagtcctggcccttggcccaacctcctgctgtccccggtctgagggcccaagccccgcgtctccgccttgccgtccagcctgtccttggtgtggggtgcttggaagtgtgagcaccctctctggctctttgccggccccaagggtcgttgcggcggcccccgggcccagtcatcagccctcttttccggtgccggaactatcgtactggtgccctagtttcccagccggcaggcggagtgaggaggaagcggaggcgagaccgcgctcaacactggggaaaggaaggaggcgggccctgcgcgcagcattttgggaaagagtggaattctgggtgttaggcccgccattcgcttgactcacgccttcgccgtagcatctttcgcagcggaccgaagagaagaaaagtaggccagagccgaactctcttcctgccaagatgtctattggtgtgccgattaaagtactgcatgaggccgagggccacattgtgacatgtgagacgaacaccggtgaggtatatcgggggaagctcattgaagcagaggacaacatgaactgccagatgtccaacatcacagtcacatacagagatggccgagtggcacagctggagcaggtatacatccgtggcagcaaaatccgctttctgattttgcctgacatgctgaagaacgcacccatgttaaagagcatgaaaaataaaaaccaaggctcaggggctggccgaggaaaagctgcyattctcaaggcccaagtggccgcaagaggaagaggacgtggaatgggacgtggaaacatctttcaaaagcgaagataattttytaagttgaacagaactttgtccttttttctttcaggctctggctccgctactgcatcgtgtgcttctgtccaagaggcagagagactgaaactatctgctgccgcctggattctcccagagattgcctggaacaccagctcgggtcctcgcacaccatcctgcrggtgcagcccaraactgtcttctgaggaagaggtgctctcctgggcccccactgtccccaggcctcagcaaggcaagtgaggtgctgccgtcatccaggctggacagttcagtgatttgcctgaggccccacagcagagttcaactggagacagagaaaccagctagaggcagagggaggtaacacggagtcccccagaaaggtctgggctgcgcgtgcttcaggtaacctcccttgaccttcaggagaacgagaaggctgcctgatcagagagtccctgaagaagattctgtggctacaggcttcagcagagtgtgagggagaccccggttatttcctcagctatttccaccaaatcctcctgtctttcgtggccaacaccccaggcaaggcttggggcccccgtctgctgctggacgcagagccatgaagaagaagttagtggtgctgggcctgctggccgtggtcctggtgctggtcattgtcggcctctgtctctggctgccctcagcctccaaggaacctgacaaccatgtgtacaccagggctrccgtggccgcggatgccaagcagtgctygragattgggagggatgcactgcgggacggtggctctgcggtggatgcagccattgcagccctgttgtgtgtggggctcatgaatgcccacagcatgggcatcgggkgaaaagctgaggtcatcaacgcccgcgaggtggcccccaggctggcctttgccaccatgttcaacagctcggagcagggggctgtcggtggcggtgcctggggagatccgaggctatgagctggcacaccagcggcatgggcggctgccctgggctcgcctcttccagcccagcatccagctggcccgccagggcttccccgtgggcaagggcttggcggcagycctggaaaacaagcggacygtcatcgagcagcagcctgtcttgtgtgaggtgttctgccgggatagaaaggtgcttcgggagggggagagactgaccctgccgcagctggctgacacctacgagacgctggccatcgagggtgcccaggccttctacaacggcagcctcacggcccagattgtgaaggacatccaggcggccgggggcattgtgacagctgaggacctgaacaactaccgtgctgagctgatcgagcacccgctgaacatcagcctgggagacgcggtgctgtacatgcccagtgcgccgctcagcgggcccgtgctggccctcatcctcaacatcctcaaagggtacaacttctcccgggagagcgtggagacccccgagcagaagggcctgacgtacyaccgcatcgtagaggctttccggtttgcctacgccaagaggaccctgcttggggaccccaagtttgtggatgtgactgaggtggtccgcaacatgacctccgagttcttcgctgcccagctccgggcccagatctctgacgacaccactcacccgatctcctactacaagcccgagttctacacgccggatgacgggggcactgctcacctgtctgtcgtcgcagaggacggcagtgctgtgtccgccaccagcaccatcaacctctactttggctccaaggtccgctccccggtcagcgggatcctgttcaatratgaaatggaygacttcagctctcccagcatcaccaacgagtttggggtacccccctcacctgccaatttcatccagccagggaagcagccgctctcgtccatgtgcccgacgatcatggtgggccaggacggccaggtccggatggtggtgggagctgctgggggcacacagatcaccacggccactgcactggccatcatctacaacctctggttcggctatgacgtgaagcgggccgtggaggagccccggctgcacaaccagcttctgcccaacgtcacgacagtggagagaaacattgaccaggcagtgactgcagccctggagacccggcaccatcacacccagatcgcgtccaccttcatcgctgtggtgcaagccatcgtccgcacggctggtggctgggcagctgcctcggactccaggaarggcggggagcctgcyggctactgagtgctccaggaggacaaggctgacaagcaatccagggacaagatactcaccaggaccaggaaggggactctgggggacyggcttcccctgtgagcagcagagcagcacaataaatgaggccactgtgccaggctccaggtggcctccctgccctgtctccccactc

SEQ ID NO: 3270 - DNA, 2570 bp, Homo sapiens
ggttttggtgtgctgctggatgaccagaccgggcgtcgggtgagcccagaagtgagagcagttggctgtgccccagtgctgtgtgacccagaggcgccgctcaccctctctgagctggtggacatcatagcrggtgcagcccaraactgtcttctgaggaagaggtgctctcctgggcccccactgtccccaggcctcagatgctgcatattgctggcccagctcctgaggctctttggacctccaggaatcggtgtctctatcaggaacccttaaccctgacccggactcccrgctgggacccrgggtgtcggagtggcaagagcactgtcaggcctggtgaagggtgtgagctgtccaacrgggcagggaggaggcagggcctgttctgcagttggacagacagagccctctagctgctttctggaagactgaagggcaggtgatcaaggcaagtgaggtgctgccgtcatccaggctggacagttcagtgatttgcctgaggccccacagcaggagaacgagaaggctgcctgatcagagagtccctgaagaagattctgtggctacaggcttcagcagagtgtgagggagaccccggttatttcctcagctatttccaccaaatcctcctgtctttcgtggccaacaccccaggcaaggcttggggcccccgtctgctgctggacgcagagccatgaagaagaagttagtggtgctgggcctgctggccgtggtcctggtgctggtcattgtcggcctctgtctctggctgccctcagcctccaaggaacctgacaaccatgtgtacaccagggctrccgtggccgcggatgccaagcagtgctygragattgggagggatgcactgcgggacggtggctctgcggtggatgcagccattgcagccctgttgtgtgtggggctcatgaatgcccacagcatgggcatcggggktggcctcttcctcaccatctacaacagcaccacwrgaaaagctgaggtcatcaacgcccgcgaggtggcccccaggctggcctttgccaccatgttcaacagctcggagcagtcccagaagggggggctgtcggtggcggtgcctggggagatccgaggctatgagctggcacaccagcggcatgggcggctgccctgggctcgcctcttccagcccagcatccagctggcccgccagggcttccccgtgggcaagggcttggcggcagycctggaaaacaagcggacygtcatcgagcagcagcctgtctttgaggtgttctgccgggatagaaaggtgcttcgggagggggagagactgaccctgccgcagctggctgacacctacgagacgctggccatcgagggtgcccaggccttctacaacggcagcctcacggcccagattgtgaaggacatccaggcggccgggggcattgtgacagctgaggacctgaacaactaccgtgctgagctgatcgagcacccgctgaacatcagcctgggagacgcggtgctgtacatgcccagtgcgccgctcagcgggcccgtgctggccctcatcctcaacatcctcaaagggtacaacttctcccgggagagcgtggagacccccgagcagaagggcctgacgtacyaccgcatcgtagaggctttccggtttgcctacgccaagaggaccctgcttggggaccccaagtttgtggatgtgactgaggtggtccgcaacatgacctccgagttcttcgctgcccagctccgggcccagatctctgacgacaccactcacccgatctcctactacaagcccgagttctacacgccggatgacgggggcactgctcacctgtctgtcgtcgcagaggacggcagtgctgtgtccgccaccagcaccatcaacctctactttggctccaaggtccgctccccggtcagcgggatcctgttcaatratgaaatggaygacttcagctctcccagcatcaccaacgagtttggggtacccccctcacctgccaatttcatccagccagggaagcagccgctctcgtccatgtgcccgacgatcatggtgggccaggacggccaggtccggatggtggtgggagctgctgggggcacacagatcaccacggccactgcactggccatcatctacaacctctggttcggctatgacgtgaagcgggccgtggaggagccccggctgcacaaccagcttctgcccaacgtcacgacagtggagagaaacattgaccaggcagtgactgcagccctggagacccggcaccatcacacccagatcgcgtccaccttcatcgctgtggtgcaagccatcgtccgcacggctggtggctgggcagctgcctcggactccaggaarggcggggagcctgcyggctactgagtgctccaggaggacaaggctgacaagcaatccagggacaagatactcaccaggaccaggaaggggactctgggggacyggcttcccctgtgagcagcagagcagcacaataaatgaggccactgtgccaggctccaggtggcctccctgccctgtctccccactc

SEQ ID NO: 3271 - DNA, 2568 bp, Homo sapiens
ggttttggtgtgctgctggatgaccagaccgggcgtcgggtgagcccagaagtgagagcagttggctgtgccccagtgctgtgtgacccagaggcgccgctcaccctctctgagctggtggacatcatagcrggtgcagcccaraactgtcttctgaggaagaggtgctctcctgggcccccactgtccccaggcctcagatgctgcatattgctggcccagctcctgaggctctttggacctccaggaatcggtgtctctatcaggaacccttaaccctgacccggactcccrgctgggacccrgggtgtcggagtggcaagagcactgtcaggcctggtgaagggtgtgagctgtccaacrgggcagggaggaggcagggcctgttctgcagttggacagacagagccctctagctgctttctggaagactgaagggcagcaaggcaagtgaggtgctgccgtcatccaggctggacagttcagtgatttgcctgaggccccacagcaggagaacgagaaggctgcctgatcagagagtccctgaagaagattctgtggctacaggcttcagcagagtgtgagggagaccccggttatttcctcagctatttccaccaaatcctcctgtctttcgtggccaacaccccaggcaaggcttggggcccccgtctgctgctggacgcagagccatgaagaagaagttagtggtgctgggcctgctggccgtggtcctggtgctggtcattgtcggcctctgtctctggctgccctcagcctccaaggaacctgacaaccatgtgtacaccagggctrccgtggccgcggatgccaagcagtgctygragattgggagggatgcactgcgggacggtggctctgcggtggatgcagccattgcagccctgttgtgtgtggggctcatgaatgcccacagcatgggcatcggggktggcctcttcctcaccatctacaacagcaccacwrgaaaagctgaggtcatcaacgcccgcgaggtggcccccaggctggcctttgccaccatgttcaacagctcggagcagtcccagaagggggggctgtcggtggcggtgcctggggagatccgaggctatgagctggcacaccagcggcatgggcggctgccctgggctcgcctcttccagcccagcatccagctggcccgccagggcttccccgtgggcaagggcttggcggcagycctggaaaacaagcggacygtcatcgagcagcagcctgtcttgtgtgaggtgttctgccgggatagaaaggtgcttcgggagggggagagactgaccctgccgcagctggctgacacctacgagacgctggccatcgagggtgcccaggccttctacaacggcagcctcacggcccagattgtgaaggacatccaggcggccgggggcattgtgacagctgaggacctgaacaactaccgtgctgagctgatcgagcacccgctgaacatcagcctgggagacgcggtgctgtacatgcccagtgcgccgctcagcgggcccgtgctggccctcatcctcaacatcctcaaagggtacaacttctcccgggagagcgtggagacccccgagcagaagggcctgacgtacyaccgcatcgtagaggctttccggtttgcctacgccaagaggaccctgcttggggaccccaagtttgtggatgtgactgaggtggtccgcaacatgacctccgagttcttcgctgcccagctccgggcccagatctctgacgacaccactcacccgatctcctactacaagcccgagttctacacgccggatgacgggggcactgctcacctgtctgtcgtcgcagaggacggcagtgctgtgtccgccaccagcaccatcaacctctactttggctccaaggtccgctccccggtcagcgggatcctgttcaatratgaaatggaygacttcagctctcccagcatcaccaacgagtttggggtacccccctcacctgccaatttcatccagccagggaagcagccgctctcgtccatgtgcccgacgatcatggtgggccaggacggccaggtccggatggtggtgggagctgctgggggcacacagatcaccacggccactgcactggccatcatctacaacctctggttcggctatgacgtgaagcgggccgtggaggagccccggctgcacaaccagcttctgcccaacgtcacgacagtggagagaaacattgaccaggcagtgactgcagccctggagacccggcaccatcacacccagatcgcgtccaccttcatcgctgtggtgcaagccatcgtccgcacggctggtggctgggcagctgcctcggactccaggaarggcggggagcctgcyggctactgagtgctccaggaggacaaggctgacaagcaatccagggacaagatactcaccaggaccaggaaggggactctgggggacyggcttcccctgtgagcagcagagcagcacaataaatgaggccactgtgccaggctccaggtggcctccctgccctgtctccccactc

SEQ ID NO: 3272 - DNA, 2431 bp, Homo sapiens
gctctggctccgctactgcatcgtgtgcttctgtccaagaggcagagagactgaaactatctgctgccgcctggattctcccagagattgcctggaacaccagctcgggtcctcgcacaccatcctgcrggtgcagcccaraactgtcttctgaggaagaggtgctctcctgggcccccactgtccccaggcctcagcaaggcaagtgaggtgctgccgtcatccaggctggacagttcagtgatttgcctgaggccccacagcagagttcaactggagacagagaaaccagctagaggcagagggaggtaacacggagtcccccagaaaggtctgggctgcgcgtgcttcaggtaacctcccttgaccttcaggagaacgagaaggctgcctgatcagagagtccctgaagaagattctgtggctacaggcttcagcagagtgtgagggagaccccggttatttcctcagctatttccaccaaatcctcctgtctttcgtggccaacaccccaggcaaggcttggggcccccgtctgctgctggacgcagagccatgaagaagaagttagtggtgctgggcctgctggccgtggtcctggtgctggtcattgtcggcctctgtctctggctgccctcagcctccaaggaacctgacaaccatgtgtacaccagggctrccgtggccgcggatgccaagcagtgctygragattgggagggatgcactgcgggacggtggctctgcggtggatgcagccattgcagccctgttgtgtgtggggctcatgaatgcccacagcatgggcatcggggktggcctcttcctcaccatctacaacagcaccacwrgaaaagctgaggtcatcaacgcccgcgaggtggcccccaggctggcctttgccaccatgttcaacagctcggagcagtcccagaagggggggctgtcggtggcggtgcctggggagatccgaggctatgagctggcacaccagcggcatgggcggctgccctgggctcgcctcttccagcccagcatccagctggcccgccagggcttccccgtgggcaagggcttggcggcagycctggaaaacaagcggacygtcatcgagcagcagcctgtcttgtgtgaggtgttctgccgggatagaaaggtgcttcgggagggggagagactgaccctgccgcagctggctgacacctacgagacgctggccatcgagggtgcccaggccttctacaacggcagcctcacggcccagattgtgaaggacatccaggcggccgggggcattgtgacagctgaggacctgaacaactaccgtgctgagctgatcgagcacccgctgaacatcagcctgggagacgcggtgctgtacatgcccagtgcgccgctcagcgggcccgtgctggccctcatcctcaacatcctcaaagggtacaacttctcccgggagagcgtggagacccccgagcagaagggcctgacgtacyaccgcatcgtagaggctttccggtttgcctacgccaagaggaccctgcttggggaccccaagtttgtggatgtgactgaggtggtccgcaacatgacctccgagttcttcgctgcccagctccgggcccagatctctgacgacaccactcacccgatctcctactacaagcccgagttctacacgccggatgacgggggcactgctcacctgtctgtcgtcgcagaggacggcagtgctgtgtccgccaccagcaccatcaacctctactttggctccaaggtccgctccccggtcagcgggatcctgttcaatratgaaatggaygacttcagctctcccagcatcaccaacgagtttggggtacccccctcacctgccaatttcatccagccagggaagcagccgctctcgtccatgtgcccgacgatcatggtgggccaggacggccaggtccggatggtggtgggagctgctgggggcacacagatcaccacggccactgcactggccatcatctacaacctctggttcggctatgacgtgaagcgggccgtggaggagccccggctgcacaaccagcttctgcccaacgtcacgacagtggagagaaacattgaccaggcagtgactgcagccctggagacccggcaccatcacacccagatcgcgtccaccttcatcgctgtggtgcaagccatcgtccgcacggctggtggctgggcagctgcctcggactccaggaarggcggggagcctgcyggctactgagtgctccaggaggacaaggctgacaagcaatccagggacaagatactcaccaggaccaggaaggggactctgggggacyggcttcccctgtgagcagcagagcagcacaataaatgaggccactgtgccaggctccaggtggcctccctgccctgtctccccactc

SEQ ID NO: 3273 - DNA, 3499 bp, Homo sapiens
gtgtaagccctgatcccgcccagtgcatccccgaggccccaagcaactctcctccaactgtctttagggataaccctgagcgggcagccgctctactctatacctaactttatccgtaccagatayctagcctcactcagggccccccttacctggcggtgccgggatcaacaaatgaaattgtgacgggaagtcctggcccttggcccaacctcctgctgtccccggtctgagggcccaagccccgcgtctccgccttgccgtccagcctgtccttggtgtggggtgcttggaagtgtgagcaccctctctggctctttgccggccccaagggtcgttgcggcggcccccgggcccagtcatcagccctcttttccggtgccggaactatcgtactggtgccctagtttcccagccggcaggcggagtgaggaggaagcggaggcgagaccgcgctcaacactggggaaaggaaggaggcgggccctgcgcgcagcattttgggaaagagtggaattctgggtgttaggcccgccattcgcttgactcacgccttcgccgtagcatctttcgcagcggaccgaagagaagaaaagtaggccagagccgaactctcttcctgccaagatgtctattggtgtgccgattaaagtactgcatgaggccgagggccacattgtgacatgtgagacgaacaccggtgaggtatatcgggggaagctcattgaagcagaggacaacatgaactgccagatgtccaacatcacagtcacatacagagatggccgagtggcacagctggagcaggtatacatccgtggcagcaaaatccgctttctgattttgcctgacatgctgaagaacgcacccatgttaaagagcatgaaaaataaaaaccaaggctcaggggctggccgaggaaaagctgcyattctcaaggcccaagtggccgcaagaggaagaggacgtggaatgggacgtggaaacatctttcaaaagcgaagataattttytaagttgaacagaactttgtccttttttctttcaggctctggctccgctactgcatcgtgtgcttctgtccaagaggcagagagactgaaactatctgctgccgcctggattctcccagagattgcctggaacaccagctcgggtcctcgcacaccatcctgcrggtgcagcccaraactgtcttctgaggaagaggtgctctcctgggcccccactgtccccaggcctcagcaaggcaagtgaggtgctgccgtcatccaggctggacagttcagtgatttgcctgaggccccacagcagagttcaactggagacagagaaaccagctagaggcagagggaggtaacacggagtcccccagaaaggtctgggctgcgcgtgcttcaggtaacctcccttgaccttcaggagaacgagaaggctgcctgatcagagagtccctgaagaagattctgtggctacaggcttcagcagagtgtgagggagaccccggttatttcctcagctatttccaccaaatcctcctgtctttcgtggccaacaccccaggcaaggcttggggcccccgtctgctgctggacgcagagccatgaagaagaagttagtggtgctgggcctgctggccgtggtcctggtgctggtcattgtcggcctctgtctctggctgccctcagcctccaaggaacctgacaaccatgtgtacaccagggctrccgtggccgcggatgccaagcagtgctygragattgggagggatgcactgcgggacggtggctctgcggtggatgcagccattgcagccctgttgtgtgtggggctcatgaatgcccacagcatgggcatcggggktggcctcttcctcaccatctacaacagcaccacwrgaaaagctgaggtcatcaacgcccgcgaggtggcccccaggctggcctttgccaccatgttcaacagctcggagcagtcccagaagggggggctgtcggtggcggtgcctggggagatccgaggctatgagctggcacaccagcggcatgggcggctgccctgggctcgcctcttccagcccagcatccagctggcccgccagggcttccccgtgggcaagggcttggcggcagycctggaaaacaagcggacygtcatcgagcagcagcctgtcttgtgtgaggtgttctgccgggatagaaaggtgcttcgggagggggagagactgaccctgccgcagctggctgacacctacgagacgctggccatcgagggtgcccaggccttctacaacggcagcctcacggcccagattgtgaaggacatccaggcggccgggggcattgtgacagctgaggacctgaacaactaccgtgctgagctgatcgagcacccgctgaacatcagcctgggagacgcggtgctgtacatgcccagtgcgccgctcagcgggcccgtgctggccctcatcctcaacatcctcaaagggtacaacttctcccgggagagcgtggagacccccgagcagaagggcctgacgtacyaccgcatcgtagaggctttccggtttgcctacgccaagaggaccctgcttggggaccccaagtttgtggatgtgactgaggccagctctggggtctcggcaggtggtccgcaacatgacctccgagttcttcgctgcccagctccgggcccagatctctgacgacaccactcacccgatctcctactacaagcccgagttctacacgccggatgacgggggcactgctcacctgtctgtcgtcgcagaggacggcagtgctgtgtccgccaccagcaccatcaacctctactttggctccaaggtccgctccccggtcagcgggatcctgttcaatratgaaatggaygacttcagctctcccagcatcaccaacgagtttggggtacccccctcacctgccaatttcatccagccagggaagcagccgctctcgtccatgtgcccgacgatcatggtgggccaggacggccaggtccggatggtggtgggagctgctgggggcacacagatcaccacggccactgcactggccatcatctacaacctctggttcggctatgacgtgaagcgggccgtggaggagccccggctgcacaaccagcttctgcccaacgtcacgacagtggagagaaacattgaccaggcagtgactgcagccctggagacccggcaccatcacacccagatcgcgtccaccttcatcgctgtggtgcaagccatcgtccgcacggctggtggctgggcagctgcctcggactccaggaarggcggggagcctgcyggctactgagtgctccaggaggacaaggctgacaagcaatccagggacaagatactcaccaggaccaggaaggggactctgggggacyggcttcccctgtgagcagcagagcagcacaataaatgaggccactgtgccaggctccagcagtccccccatctcagtctcccaaa

SEQ ID NO: 3274 - DNA, 3241 bp, Homo sapiens
gtgtaagccctgatcccgcccagtgcatccccgaggccccaagcaactctcctccaactgtctttagggataaccctgagcgggcagccgctctactctatacctaactttatccgtaccagatayctagcctcactcagggccccccttacctggcggtgccgggatcaacaaatgaaattgtgacgggaagtcctggcccttggcccaacctcctgctgtccccggtctgagggcccaagccccgcgtctccgccttgccgtccagcctgtccttggtgtggggtgcttggaagtgtgagcaccctctctggctctttgccggccccaagggtcgttgcggcggcccccgggcccagtcatcagccctcttttccggtgccggaactatcgtactggtgccctagtttcccagccggcaggcggagtgaggaggaagcggaggcgagaccgcgctcaacactggggaaaggaaggaggcgggccctgcgcgcagcattttgggaaagagtggaattctgggtgttaggcccgccattcgcttgactcacgccttcgccgtagcatctttcgcagcggaccgaagagaagaaaagtaggccagagccgaactctcttcctgccaagatgtctattggtgtgccgattaaagtactgcatgaggccgagggccacattgtgacatgtgagacgaacaccggtgaggtatatcgggggaagctcattgaagcagaggacaacatgaactgccagatgtccaacatcacagtcacatacagagatggccgagtggcacagctggagcaggtatacatccgtggcagcaaaatccgctttctgattttgcctgacatgctgaagaacgcacccatgttaaagagcatgaaaaataaaaaccaaggctcaggggctggccgaggaaaagctgcyattctcaaggcccaagtggccgcaagaggaagaggacgtggaatgggacgtggaaacatctttcaaaagcgaagataattttytaagttgaacagaactttgtccttttttctttcaggctctggctccgctactgcatcgtgtgcttctgtccaagaggcagagagactgaaactatctgctgccgcctggattctcccagagattgcctggaacaccagctcgggtcctcgcacaccatcctgcrggtgcagcccaraactgtcttctgaggaagaggtgctctcctgggcccccactgtccccaggcctcagcaaggcaagtgaggtgctgccgtcatccaggctggacagttcagtgatttgcctgaggccccacagcagagttcaactggagacagagaaaccagctagaggcagagggaggtaacacggagtcccccagaaaggtctgggctgcgcgtgcttcagctatttccaccaaatcctcctgtctttcgtggccaacaccccaggcaaggcttggggcccccgtctgctgctggacgagccatgaagaagaagttagtggtgctgggcctgctggccgtggtcctggtgctggtcattgtcggcctctgtctctggctgccctcagcctccaaggaacctgacaaccatgtgtacaccagggctrccgtggccgcggatgccaagcagtgctygragattgggaggggggctgtcggtggcggtgcctggggagatccgaggctatgagctggcacaccagcggcatgggcggctgccctgggctcgcctcttccagcccagcatccagctggcccgccagggcttccccgtgggcaagggcttggcggcagycctggaaaacaagcggacygtcatcgagcagcagcctgtcttgtgtgaggtgttctgccgggatagaaaggtgcttcgggagggggagagactgaccctgccgcagctggctgacacctacgagacgctggccatcgagggtgcccaggccttctacaacggcagcctcacggcccagattgtgaaggacatccaggcggccgggggcattgtgacagctgaggacctgaacaactaccgtgctgagctgatcgagcacccgctgaacatcagcctgggagacgcggtgctgtacatgcccagtgcgccgctcagcgggcccgtgctggccctcatcctcaacatcctcaaagggtacaacttctcccgggagagcgtggagacccccgagcagaagggcctgacgtacyaccgcatcgtagaggctttccggtttgcctacgccaagaggaccctgcttggggaccccaagtttgtggatgtgactgaggccagctctggggtctcggcaggtggtccgcaacatgacctccgagttcttcgctgcccagctccgggcccagatctctgacgacaccactcacccgatctcctactacaagcccgagttctacacgccggatgacgggggcactgctcacctgtctgtcgtcgcagaggacggcagtgctgtgtccgccaccagcaccatcaacctctactttggctccaaggtccgctccccggtcagcgggatcctgttcaatratgaaatggaygacttcagctctcccagcatcaccaacgagtttggggtacccccctcacctgccaatttcatccagccagggaagcagccgctctcgtccatgtgcccgacgatcatggtgggccaggacggccaggtccggatggtggtgggagctgctgggggcacacagatcaccacggccactgcactggtatgtgtcacaccttttctccctggccgtgcccaccctgcacagcccccaagccatgctgatcacactcccatgccccaggccatcatctacaacctctggttcggctatgacgtgaagcgggccgtggaggagccccggctgcacaaccagcttctgcccaacgtcacgacagtggagagaaacattgaccaggcagtgactgcagccctggagacccggcaccatcacacccagatcgcgtccaccttcatcgctgtggtgcaagccatcgtccgcacggctggtggctgggcagctgcctcggactccaggaarggcggggagcctgcyggctactgagtgctccaggaggacaaggctgacaagcaatccagggacaagatactcaccaggaccaggaaggggactctgggggacyggcttcccctgtgagcagcagagcagcacaataaatgaggccactgtgccaggctccagcagtccccccatctcagtctcccaaa

SEQ ID NO: 3275 - DNA, 3476 bp, Homo sapiens
gtgtaagccctgatcccgcccagtgcatccccgaggccccaagcaactctcctccaactgtctttagggataaccctgagcgggcagccgctctactctatacctaactttatccgtaccagatayctagcctcactcagggccccccttacctggcggtgccgggatcaacaaatgaaattgtgacgggaagtcctggcccttggcccaacctcctgctgtccccggtctgagggcccaagccccgcgtctccgccttgccgtccagcctgtccttggtgtggggtgcttggaagtgtgagcaccctctctggctctttgccggccccaagggtcgttgcggcggcccccgggcccagtcatcagccctcttttccggtgccggaactatcgtactggtgccctagtttcccagccggcaggcggagtgaggaggaagcggaggcgagaccgcgctcaacactggggaaaggaaggaggcgggccctgcgcgcagcattttgggaaagagtggaattctgggtgttaggcccgccattcgcttgactcacgccttcgccgtagcatctttcgcagcggaccgaagagaagaaaagtaggccagagccgaactctcttcctgccaagatgtctattggtgtgccgattaaagtactgcatgaggccgagggccacattgtgacatgtgagacgaacaccggtgaggtatatcgggggaagctcattgaagcagaggacaacatgaactgccagatgtccaacatcacagtcacatacagagatggccgagtggcacagctggagcaggtatacatccgtggcagcaaaatccgctttctgattttgcctgacatgctgaagaacgcacccatgttaaagagcatgaaaaataaaaaccaaggctcaggggctggccgaggaaaagctgcyattctcaaggcccaagtggccgcaagaggaagaggacgtggaatgggacgtggaaacatctttcaaaagcgaagataattttytaagttgaacagaactttgtccttttttctttcaggctctggctccgctactgcatcgtgtgcttctgtccaagaggcagagagactgaaactatctgctgccgcctggattctcccagagattgcctggaacaccagctcgggtcctcgcacaccatcctgcrggtgcagcccaraactgtcttctgaggaagaggtgctctcctgggcccccactgtccccaggcctcagcaaggcaagtgaggtgctgccgtcatccaggctggacagttcagtgatttgcctgaggccccacagcagagttcaactggagacagagaaaccagctagaggcagagggaggtaacacggagtcccccagaaaggtctgggctgcgcgtgcttcaggtaacctcccttgaccttcaggagaacgagaaggctgcctgatcagagagtccctgaagaagattctgtggctacaggcttcagcagagtgtgagggagaccccggttatttcctcagctatttccaccaaatcctcctgtctttcgtggccaacaccccaggcaaggcttggggcccccgtctgctgctggacgcagagccatgaagaagaagttagtggtgctgggcctgctggccgtggtcctggtgctggtcattgtcggcctctgtctctggctgccctcagcctccaaggaacctgacaaccatgtgtacaccagggctrccgtggccgcggatgccaagcagtgctygragattgggagggatgcactgcgggacggtggctctgcggtggatgcagccattgcagccctgttgtgtgtggggctcatgaatgcccacagcatgggcatcggggktggcctcttcctcaccatctacaacagcaccacwrgggggctgtcggtggcggtgcctggggagatccgaggctatgagctggcacaccagcggcatgggcggctgccctgggctcgcctcttccagcccagcatccagctggcccgccagggcttccccgtgggcaagggcttggcggcagycctggaaaacaagcggacygtcatcgagcagcagcctgtcttgtgtgaggtgttctgccgggatagaaaggtgcttcgggagggggagagactgaccctgccgcagctggctgacacctacgagacgctggccatcgagggtgcccaggccttctacaacggcagcctcacggcccagattgtgaaggacatccaggcggccgggggcattgtgacagctgaggacctgaacaactaccgtgctgagctgatcgagcacccgctgaacatcagcctgggagacgcggtgctgtacatgcccagtgcgccgctcagcgggcccgtgctggccctcatcctcaacatcctcaaagggtacaacttctcccgggagagcgtggagacccccgagcagaagggcctgacgtacyaccgcatcgtagaggctttccggtttgcctacgccaagaggaccctgcttggggaccccaagccagctctggggtctcggcaggtggtccgcaacatgacctccgagttcttcgctgcccagctccgggcccagatctctgacgacaccactcacccgatctcctactacaagcccgagttctacacgccggatgacgggggcactgctcacctgtctgtcgtcgcagaggacggcagtgctgtgtccgccaccagcaccatcaacctctactttggctccaaggtccgctccccggtcagcgggatcctgttcaatratgaaatggaygacttcagctctcccagcatcaccaacgagtttggggtacccccctcacctgccaatttcatccagccagggaagcagccgctctcgtccatgtgcccgacgatcatggtgggccaggacggccaggtccggatggtggtgggagctgctgggggcacacagatcaccacggccactgcactggtatgtgtcacaccttttctccctggccgtgcccaccctgcacagcccccaagccatgctgatcacactcccatgccccaggccatcatctacaacctctggttcggctatgacgtgaagcgggccgtggaggagccccggctgcacaaccagcttctgcccaacgtcacgacagtggagagaaacattgaccaggcagtgactgcagccctggagacccggcaccatcacacccagatcgcgtccaccttcatcgctgtggtgcaagccatcgtccgcacggctggtggctgggcagctgcctcggactccaggaarggcggggagcctgcyggctactgagtgctccaggaggacaaggctgacaagcaatccagggacaagatactcaccaggaccaggaaggggactctgggggacyggcttcccctgtgagcagcagagcagcacaataaatgaggccactgtgccaggctccaggtggcctccctgccctgtctccccactc

SEQ ID NO: 3276 - DNA, 3479 bp, Homo sapiens
gtgtaagccctgatcccgcccagtgcatccccgaggccccaagcaactctcctccaactgtctttagggataaccctgagcgggcagccgctctactctatacctaactttatccgtaccagatayctagcctcactcagggccccccttacctggcggtgccgggatcaacaaatgaaattgtgacgggaagtcctggcccttggcccaacctcctgctgtccccggtctgagggcccaagccccgcgtctccgccttgccgtccagcctgtccttggtgtggggtgcttggaagtgtgagcaccctctctggctctttgccggccccaagggtcgttgcggcggcccccgggcccagtcatcagccctcttttccggtgccggaactatcgtactggtgccctagtttcccagccggcaggcggagtgaggaggaagcggaggcgagaccgcgctcaacactggggaaaggaaggaggcgggccctgcgcgcagcattttgggaaagagtggaattctgggtgttaggcccgccattcgcttgactcacgccttcgccgtagcatctttcgcagcggaccgaagagaagaaaagtaggccagagccgaactctcttcctgccaagatgtctattggtgtgccgattaaagtactgcatgaggccgagggccacattgtgacatgtgagacgaacaccggtgaggtatatcgggggaagctcattgaagcagaggacaacatgaactgccagatgtccaacatcacagtcacatacagagatggccgagtggcacagctggagcaggtatacatccgtggcagcaaaatccgctttctgattttgcctgacatgctgaagaacgcacccatgttaaagagcatgaaaaataaaaaccaaggctcaggggctggccgaggaaaagctgcyattctcaaggcccaagtggccgcaagaggaagaggacgtggaatgggacgtggaaacatctttcaaaagcgaagataattttytaagttgaacagaactttgtccttttttctttcaggctctggctccgctactgcatcgtgtgcttctgtccaagaggcagagagactgaaactatctgctgccgcctggattctcccagagattgcctggaacaccagctcgggtcctcgcacaccatcctgcrggtgcagcccaraactgtcttctgaggaagaggtgctctcctgggcccccactgtccccaggcctcagcaaggcaagtgaggtgctgccgtcatccaggctggacagttcagtgatttgcctgaggccccacagcagagttcaactggagacagagaaaccagctagaggcagagggaggtaacacggagtcccccagaaaggtctgggctgcgcgtgcttcaggtaacctcccttgaccttcaggagaacgagaaggctgcctgatcagagagtccctgaagaagattctgtggctacaggcttcagcagagtgtgagggagaccccggttatttcctcagctatttccaccaaatcctcctgtctttcgtggccaacaccccaggcaaggcttggggcccccgtctgctgctggacgcagagccatgaagaagaagttagtggtgctgggcctgctggccgtggtcctggtgctggtcattgtcggcctctgtctctggctgccctcagcctccaaggaacctgacaaccatgtgtacaccagggctrccgtggccgcggatgccaagcagtgctygragattgggagggatgcactgcgggacggtggctctgcggtggatgcagccattgcagccctgttgtgtgtggggctcatgaatgcccacagcatgggcatcggggktggcctcttcctcaccatctacaacagcaccacwrgaaaagctgaggtcatcaacgcccgcgaggtggcccccaggctggcctttgccaccatgttcaacagctcggagcagtcccagaagggggggctgtcggtggcggtgcctggggagatccgaggctatgagctggcacaccagcggcatgggcggctgccctgggctcgcctcttccagcccagcatccagctggcccgccagggcttccccgtgggcaagggcttggcggcagycctggaaaacaagcggacygtcatcgagcagcagcctgtcttgtggtatgtgttctgccgggatagaaaggtgcttcgggagggggagagactgaccctgccgcagctggctgacacctacgagacgctggccatcgagggtgcccaggccttctacaacggcagcctcacggcccagattgtgaaggacatccaggcggccgggggcattgtgacagctgaggacctgaacaactaccgtgctgagctgatcgagcacccgctgaacatcagcctgggagacgcggtgctgtacatgcccagtgcgccgctcagcgggcccgtgctggccctcatcctcaacatcctcaaagggtacaacttctcccgggagagcgtggagacccccgagcagaagggcctgacgtacyaccgcatcgtagaggctttccggtttgcctacgccaagaggaccctgcttggggaccccaagtttgtggatgtgactgaggtggtccgcaacatgacctccgagttcttcgctgcccagctccgggcccagatctctgacgacaccactcacccgatctcctactacaagcccgagttctacacgccggatgacgggggcactgctcacctgtctgtcgtcgcagaggacggcagtgctgtgtccgccaccagcaccatcaacctctactttggctccaaggtccgctccccggtcagcgggatcctgttcaatratgaaatggaygacttcagctctcccagcatcaccaacgagtttggggtacccccctcacctgccaatttcatccagccagggaagcagccgctctcgtccatgtgcccgacgatcatggtgggccaggacggccaggtccggatggtggtgggagctgctgggggcacacagatcaccacggccactgcactggccatcatctacaacctctggttcggctatgacgtgaagcgggccgtggaggagccccggctgcacaaccagcttctgcccaacgtcacgacagtggagagaaacattgaccaggcagtgactgcagccctggagacccggcaccatcacacccagatcgcgtccaccttcatcgctgtggtgcaagccatcgtccgcacggctggtggctgggcagctgcctcggactccaggaarggcggggagcctgcyggctactgagtgctccaggaggacaaggctgacaagcaatccagggacaagatactcaccaggaccaggaaggggactctgggggacyggcttcccctgtgagcagcagagcagcacaataaatgaggccactgtgccaggctccaggtggcctccctgccctgtctccccactc

SEQ ID NO: 3277 - DNA, 2532 bp, Homo sapiens
ggttttggtgtgctgctggatgaccagaccgggcgtcgggtgagcccagaagtgagagcagttggctgtgccccagtgctgtgtgacccagaggcgccgctcaccctctctgagctggtggacatcatagcrggtgcagcccaraactgtcttctgaggaagaggtgctctcctgggcccccactgtccccaggcctcagatgctgcatattgctggcccagctcctgaggctctttggacctccaggaatcggtgtctctatcaggaacccttaaccctgacccggactcccrgctgggacccrgggtgtcggagtggcaagagcactgtcaggcctggtgaagggtgtgagctgtccaacrgggcagggaggaggcagggcctgttctgcagttggacagacagagccctctagctgctttctggaagactgaagggcagcaaggcaagtgaggtgctgccgtcatccaggctggacagttcagtgatttgcctgaggccccacagcaggagaacgagaaggctgcctgatcagagagtccctgaagaagattctgtggctacaggcttcagcagagtgtgagggagaccccggttatttcctcagctatttccaccaaatcctcctgtctttcgtggccaacaccccaggcaaggcttggggcccccgtctgctgctggacgcagagccatgaagaagaagttagtggtgctgggcctgctggccgtggtcctggtgctggtcattgtcggcctctgtctctggctgccctcagcctccaaggaacctgacaaccatgtgtacaccagggctrccgtggccgcggatgccaagcagtgctygragattgggagggatgcactgcgggacggtggctctgcggtggatgcagccattgcagccctgttgtgtgtggggctcatgaatgcccacagcatgggcatcgggkgaaaagctgaggtcatcaacgcccgcgaggtggcccccaggctggcctttgccaccatgttcaacagctcggagcagtcccagaagggggggctgtcggtggcggtgcctggggagatccgaggctatgagctggcacaccagcggcatgggcggctgccctgggctcgcctcttccagcccagcatccagctggcccgccagggcttccccgtgggcaagggcttggcggcagycctggaaaacaagcggacygtcatcgagcagcagcctgtcttgtgtgaggtgttctgccgggatagaaaggtgcttcgggagggggagagactgaccctgccgcagctggctgacacctacgagacgctggccatcgagggtgcccaggccttctacaacggcagcctcacggcccagattgtgaaggacatccaggcggccgggggcattgtgacagctgaggacctgaacaactaccgtgctgagctgatcgagcacccgctgaacatcagcctgggagacgcggtgctgtacatgcccagtgcgccgctcagcgggcccgtgctggccctcatcctcaacatcctcaaagggtacaacttctcccgggagagcgtggagacccccgagcagaagggcctgacgtacyaccgcatcgtagaggctttccggtttgcctacgccaagaggaccctgcttggggaccccaagtttgtggatgtgactgaggtggtccgcaacatgacctccgagttcttcgctgcccagctccgggcccagatctctgacgacaccactcacccgatctcctactacaagcccgagttctacacgccggatgacgggggcactgctcacctgtctgtcgtcgcagaggacggcagtgctgtgtccgccaccagcaccatcaacctctactttggctccaaggtccgctccccggtcagcgggatcctgttcaatratgaaatggaygacttcagctctcccagcatcaccaacgagtttggggtacccccctcacctgccaatttcatccagccagggaagcagccgctctcgtccatgtgcccgacgatcatggtgggccaggacggccaggtccggatggtggtgggagctgctgggggcacacagatcaccacggccactgcactggccatcatctacaacctctggttcggctatgacgtgaagcgggccgtggaggagccccggctgcacaaccagcttctgcccaacgtcacgacagtggagagaaacattgaccaggcagtgactgcagccctggagacccggcaccatcacacccagatcgcgtccaccttcatcgctgtggtgcaagccatcgtccgcacggctggtggctgggcagctgcctcggactccaggaarggcggggagcctgcyggctactgagtgctccaggaggacaaggctgacaagcaatccagggacaagatactcaccaggaccaggaaggggactctgggggacyggcttcccctgtgagcagcagagcagcacaataaatgaggccactgtgccaggctccaggtggcctccctgccctgtctccccactc

SEQ ID NO: 3278 - DNA, 2308 bp, Homo sapiens
tcccagccaggctggayctcygtgagaggcctgcctgtcctgcaccctgtgcrgatgcctcccactgtccrccrgggctgctgggcacsccctggctggtctcttggactagcrggtgcagcccaraactgtcttctgaggaagaggtgctctcctgggcccccactgtccccaggcctcagcaaggcaagtgaggtgctgccgtcatccaggctggacagttcagtgatttgcctgaggccccacagcaggagaacgagaaggctgcctgatcagagagtccctgaagaagattctgtggctacaggcttcagcagagtgtgagggagaccccggttatttcctcagctatttccaccaaatcctcctgtctttcgtggccaacaccccaggcaaggcttggggcccccgtctgctgctggacgcagagccatgaagaagaagttagtggtgctgggcctgctggccgtggtcctggtgctggtcattgtcggcctctgtctctggctgccctcagcctccaaggaacctgacaaccatgtgtacaccagggctrccgtggccgcggatgccaagcagtgctygragattgggagggatgcactgcgggacggtggctctgcggtggatgcagccattgcagccctgttgtgtgtggggctcatgaatgcccacagcatgggcatcggggktggcctcttcctcaccatctacaacagcaccacwrgaaaagctgaggtcatcaacgcccgcgaggtggcccccaggctggcctttgccaccatgttcaacagctcggagcagtcccagaagggggggctgtcggtggcggtgcctggggagatccgaggctatgagctggcacaccagcggcatgggcggctgccctgggctcgcctcttccagcccagcatccagctggcccgccagggcttccccgtgggcaagggcttggcggcagycctggaaaacaagcggacygtcatcgagcagcagcctgtcttgtgtgaggtgttctgccgggatagaaaggtgcttcgggagggggagagactgaccctgccgcagctggctgacacctacgagacgctggccatcgagggtgcccaggccttctacaacggcagcctcacggcccagattgtgaaggacatccaggcggccgggggcattgtgacagctgaggacctgaacaactaccgtgctgagctgatcgagcacccgctgaacatcagcctgggagacgcggtgctgtacatgcccagtgcgccgctcagcgggcccgtgctggccctcatcctcaacatcctcaaagggtacaacttctcccgggagagcgtggagacccccgagcagaagggcctgacgtacyaccgcatcgtagaggctttccggtttgcctacgccaagaggaccctgcttggggaccccaagtttgtggatgtgactgaggtggtccgcaacatgacctccgagttcttcgctgcccagctccgggcccagatctctgacgacaccactcacccgatctcctactacaagcccgagttctacacgccggatgacgggggcactgctcacctgtctgtcgtcgcagaggacggcagtgctgtgtccgccaccagcaccatcaacctctactttggctccaaggtccgctccccggtcagcgggatcctgttcaatratgaaatggaygacttcagctctcccagcatcaccaacgagtttggggtacccccctcacctgccaatttcatccagccagggaagcagccgctctcgtccatgtgcccgacgatcatggtgggccaggacggccaggtccggatggtggtgggagctgctgggggcacacagatcaccacggccactgcactggccatcatctacaacctctggttcggctatgacgtgaagcgggccgtggaggagccccggctgcacaaccagcttctgcccaacgtcacgacagtggagagaaacattgaccaggcagtgactgcagccctggagacccggcaccatcacacccagatcgcgtccaccttcatcgctgtggtgcaagccatcgtccgcacggctggtggctgggcagctgcctcggactccaggaarggcggggagcctgcyggctactgagtgctccaggaggacaaggctgacaagcaatccagggacaagatactcaccaggaccaggaaggggactctgggggacyggcttcccctgtgagcagcagagcagcacaataaatgaggccactgtgccaggctccaggtggcctccctgccctgtctccccactc

SEQ ID NO: 3279 - DNA, 3463 bp, Homo sapiens
gtgtaagccctgatcccgcccagtgcatccccgaggccccaagcaactctcctccaactgtctttagggataaccctgagcgggcagccgctctactctatacctaactttatccgtaccagatayctagcctcactcagggccccccttacctggcggtgccgggatcaacaaatgaaattgtgacgggaagtcctggcccttggcccaacctcctgctgtccccggtctgagggcccaagccccgcgtctccgccttgccgtccagcctgtccttggtgtggggtgcttggaagtgtgagcaccctctctggctctttgccggccccaagggtcgttgcggcggcccccgggcccagtcatcagccctcttttccggtgccggaactatcgtactggtgccctagtttcccagccggcaggcggagtgaggaggaagcggaggcgagaccgcgctcaacactggggaaaggaaggaggcgggccctgcgcgcagcattttgggaaagagtggaattctgggtgttaggcccgccattcgcttgactcacgccttcgccgtagcatctttcgcagcggaccgaagagaagaaaagtaggccagagccgaactctcttcctgccaagatgtctattggtgtgccgattaaagtactgcatgaggccgagggccacattgtgacatgtgagacgaacaccggtgaggtatatcgggggaagctcattgaagcagaggacaacatgaactgccagatgtccaacatcacagtcacatacagagatggccgagtggcacagctggagcaggtatacatccgtggcagcaaaatccgctttctgattttgcctgacatgctgaagaacgcacccatgttaaagagcatgaaaaataaaaaccaaggctcaggggctggccgaggaaaagctgcyattctcaaggcccaagtggccgcaagaggaagaggacgtggaatgggacgtggaaacatctttcaaaagcgaagataattttytaagttgaacagaactttgtccttttttctttcaggctctggctccgctactgcatcgtgtgcttctgtccaagaggcagagagactgaaactatctgctgccgcctggattctcccagagattgcctggaacaccagctcgggtcctcgcacaccatcctgcrggtgcagcccaraactgtcttctgaggaagaggtgctctcctgggcccccactgtccccaggcctcagcaaggcaagtgaggtgctgccgtcatccaggctggacagttcagtgatttgcctgaggccccacagcagagttcaactggagacagagaaaccagctagaggcagagggaggtaacacggagtcccccagaaaggtctgggctgcgcgtgcttcaggtaacctcccttgaccttcaggagaacgagaaggctgcctgatcagagagtccctgaagaagattctgtggctacaggcttcagcagagtgtgagggagaccccggttatttcctcagctatttccaccaaatcctcctgtctttcgtggccaacaccccaggcaaggcttggggcccccgtctgctgctggacgcagagccatgaagaagaagttagtggtgctgggcctgctggccgtggtcctggtgctggtcattgtcggcctctgtctctggctgccctcagcctccaaggaacctgacaaccatgtgtacaccagggctrccgtggccgcggatgccaagcagtgctygragattgggagggatgcactgcgggacggtggctctgcggtggatgcagccattgcagccctgttgtgtgtggggctcatgaatgcccacagcatgggcatcgggkgaaaagctgaggtcatcaacgcccgcgaggtggcccccaggctggcctttgccaccatgttcaacagctcggagcagtcccagaagggggggctgtcggtggcggtgcctggggagatccgaggctatgagctggcacaccagcggcatgggcggctgccctgggctcgcctcttccagcccagcatccagctggcccgccagggcttccccgtgggcaagggcttggcggcagycctggaaaacaagcggacygtcatcgagcagcagcctgtcttgtgtgaggtgttctgccgggatagaaaggtgcttcgggagggggagagactgaccctgccgcagctggctgacacctacgagacgctggccatcgagggtgcccaggccttctacaacggcagcctcacggcccagattgtgaaggacatccaggcggccgggggcattgtgacagctgaggacctgaacaactaccgtgctgagctgatcgagcacccgctgaacatcagcctgggagacgcggtgctgtacatgcccagtgcgccgctcagcgggcccgtgctggccctcatcctcaacatcctcaaagggtacaacttctcccgggagagcgtggagacccccgagcagaagggcctgacgtacyaccgcatcgtagaggctttccggtttgcctacgccaagaggaccctgcttggggaccccaagtttgtggatgtgactgaggccagctctggggtctcggcaggtggtccgcaacatgacctccgagttcttcgctgcccagctccgggcccagatctctgacgacaccactcacccgatctcctactacaagcccgagttctacacgccggatgacgggggcactgctcacctgtctgtcgtcgcagaggacggcagtgctgtgtccgccaccagcaccatcaacctctactttggctccaaggtccgctccccggtcagcgggatcctgttcaatratgaaatggaygacttcagctctcccagcatcaccaacgagtttggggtacccccctcacctgccaatttcatccagccagggaagcagccgctctcgtccatgtgcccgacgatcatggtgggccaggacggccaggtccggatggtggtgggagctgctgggggcacacagatcaccacggccactgcactggccatcatctacaacctctggttcggctatgacgtgaagcgggccgtggaggagccccggctgcacaaccagcttctgcccaacgtcacgacagtggagagaaacattgaccaggcagtgactgcagccctggagacccggcaccatcacacccagatcgcgtccaccttcatcgctgtggtgcaagccatcgtccgcacggctggtggctgggcagctgcctcggactccaggaarggcggggagcctgcyggctactgagtgctccaggaggacaaggctgacaagcaatccagggacaagatactcaccaggaccaggaaggggactctgggggacyggcttcccctgtgagcagcagagcagcacaataaatgaggccactgtgccaggctccagcagtccccccatctcagtctcccaaa

SEQ ID NO: 3280 - DNA, 3477 bp, Homo sapiens
gtgtaagccctgatcccgcccagtgcatccccgaggccccaagcaactctcctccaactgtctttagggataaccctgagcgggcagccgctctactctatacctaactttatccgtaccagatayctagcctcactcagggccccccttacctggcggtgccgggatcaacaaatgaaattgtgacgggaagtcctggcccttggcccaacctcctgctgtccccggtctgagggcccaagccccgcgtctccgccttgccgtccagcctgtccttggtgtggggtgcttggaagtgtgagcaccctctctggctctttgccggccccaagggtcgttgcggcggcccccgggcccagtcatcagccctcttttccggtgccggaactatcgtactggtgccctagtttcccagccggcaggcggagtgaggaggaagcggaggcgagaccgcgctcaacactggggaaaggaaggaggcgggccctgcgcgcagcattttgggaaagagtggaattctgggtgttaggcccgccattcgcttgactcacgccttcgccgtagcatctttcgcagcggaccgaagagaagaaaagtaggccagagccgaactctcttcctgccaagatgtctattggtgtgccgattaaagtactgcatgaggccgagggccacattgtgacatgtgagacgaacaccggtgaggtatatcgggggaagctcattgaagcagaggacaacatgaactgccagatgtccaacatcacagtcacatacagagatggccgagtggcacagctggagcaggtatacatccgtggcagcaaaatccgctttctgattttgcctgacatgctgaagaacgcacccatgttaaagagcatgaaaaataaaaaccaaggctcaggggctggccgaggaaaagctgcyattctcaaggcccaagtggccgcaagaggaagaggacgtggaatgggacgtggaaacatctttcaaaagcgaagataattttytaagttgaacagaactttgtccttttttctttcaggctctggctccgctactgcatcgtgtgcttctgtccaagaggcagagagactgaaactatctgctgccgcctggattctcccagagattgcctggaacaccagctcgggtcctcgcacaccatcctgcrggtgcagcccaraactgtcttctgaggaagaggtgctctcctgggcccccactgtccccaggcctcagcaaggcaagtgaggtgctgccgtcatccaggctggacagttcagtgatttgcctgaggccccacagcagagttcaactggagacagagaaaccagctagaggcagagggaggtaacacggagtcccccagaaaggtctgggctgcgcgtgcttcaggtaacctcccttgaccttcaggagaacgagaaggctgcctgatcagagagtccctgaagaagattctgtggctacaggcttcagcagagtgtgagggagaccccggttatttcctcagctatttccaccaaatcctcctgtctttcgtggccaacaccccaggcaaggcttggggcccccgtctgctgctggacgcagagccatgaagaagaagttagtggtgctgggcctgctggccgtggtcctggtgctggtcattgtcggcctctgtctctggctgccctcagcctccaaggaacctgacaaccatgtgtacaccagggctrccgtggccgcggatgccaagcagtgctygragattgggagggatgcactgcgggacggtggctctgcggtggatgcagccattgcagccctgttgtgtgtggggctcatgaatgcccacagcatgggcatcggggktggcctcttcctcaccatctacaacagcaccacwrgaaaagctgaggtcatcaacgcccgcgaggtggcccccaggctggcctttgccaccatgttcaacagctcggagcagtcccagaagggggggctgtcggtggcggtgcctggggagatccgaggctatgagctggcacaccagcggcatgggcggctgccctgggctcgcctcttccagcccagcatccagctggcccgccagggcttccccgtgggcaagggcttggcggcagycctggaaaacaagcggacygtcatcgagcagcagcctgtcttgtgtgaggtgttctgccgggatagaaaggtgcttcgggagggggagagactgaccctgccgcagctggctgacacctacgagacgctggccatcgagggtgcccaggccttctacaacggcagcctcacggcccagattgtgaaggacatccaggcggccgggggcattgtgacagctgaggacctgaacaactaccgtgctgagctgatcgagcacccgctgaacatcagcctgggagacgcggtgctgtacatgcccagtgcgccgctcagcgggcccgtgctggccctcatcctcaacatcctcaaagggtacaacttctcccgggagagcgtggagacccccgagcagaagggcctgacgtacyaccgcatcgtagaggctttccggtttgcctacgccaagaggaccctgcttggggaccccaagtttgtggatgtgactgaggtggtccgcaacatgacctccgagttcttcgctgcccagctccgggcccagatctctgacgacaccactcacccgatctcctactacaagcccgagttctacacgccggatgacgggggcactgctcacctgtctgtcgtcgcagaggacggcagtgctgtgtccgccaccagcaccatcaacctctactttggctccaaggtccgctccccggtcagcgggatcctgttcaatratgaaatggaygacttcagctctcccagcatcaccaacgagtttggggtacccccctcacctgccaatttcatccagccagggaagcagccgctctcgtccatgtgcccgacgatcatggtgggccaggacggccaggtccggatggtggtgggagctgctgggggcacacagatcaccacggccactgcactggccatcatctacaacctctggttcggctatgacgtgaagcgggccgtggaggagccccggctgcacaaccagcttctgcccaacgtcacgacagtggagagaaacattgaccaggcagtgactgcagccctggagacccggcaccatcacacccagatcgcgtccaccttcatcgctgtggtgcaagccatcgtccgcacggctggtggctgggcagctgcctcggactccaggaarggcggggagcctgcyggctactgagtgctccaggaggacaaggctgacaagcaatccagggacaagatactcaccaggaccaggaaggggactctgggggacyggcttcccctgtgagcagcagagcagcacaataaatgaggccactgtgccaggctccagcagtccccccatctcagtctcccaaa

SEQ ID NO: 3281 - DNA, 883 bp, Homo sapiens
gacagggagtcagactggtcatgcaaggtggtccgcaacatgacctccgagttcttcgctgcccagctccgggcccagatctctgacgacaccactcacccgatctcctactacaagcccgagttctacacgccggatgacgggggcactgctcacctgtctgtcgtcgcagaggacggcagtgctgtgtccgccaccagcaccatcaacctctactttggctccaaggtccgctccccggtcagcgggatcctgttcaatratgaaatggaygacttcagctctcccagcatcaccaacgagtttggggtacccccctcacctgccaatttcatccagccagggaagcagccgctctcgtccatgtgcccgacgatcatggtgggccaggacggccaggtccggatggtggtgggagctgctgggggcacacagatcaccacggccactgcactggccatcatctacaacctctggttcggctatgacgtgaagcgggccgtggaggagccccggctgcacaaccagcttctgcccaacgtcacgacagtggagagaaacattgaccaggcagtgactgcagccctggagacccggcaccatcacacccagatcgcgtccaccttcatcgctgtggtgcaagccatcgtccgcacggctggtggctgggcagctgcctcggactccaggaarggcggggagcctgcyggctactgagtgctccaggaggacaaggctgacaagcaatccagggacaagatactcaccaggaccaggaaggggactctgggggacyggcttcccctgtgagcagcagagcagcacaataaatgaggccactgtgccaggctccaggtggcctccctgccctgtctccccactc

SEQ ID NO: 3282 - DNA, 2585 bp, Homo sapiens
caggcccaccaagcctggggaggtggccacccttccaygatggcatttggatgttccctgtgtgtggggagggcacagggactccattcrtagaccacctctgggacagtgtgtctgcctctgaggtcagaygctctgcactgggacagggtggagtggagggaaatccagcttggggctcattggaggggcttgctggcagacaccgccctttgtgggaaactgactgtgggagaggggaaccccaacctctgtcaccacatccctcttccctgttgtcacacctgtcacctgctgccatagccatgagacttcccaagggtcactgctgccactcactgcacagcctggaagggagtccacaggggacatacagtgagcaagagacctgtgccactcaggcctcctgggggtgtccccagtgcagccatgatgataatcacagctaccattcaccaagccctgcccacagtctaacctactctattcacaacactcccagcagcaaggcaagtgaggtgctgccgtcatccaggctggacagttcagtgatttgcctgaggccccacagcagagttcaactggagacagagaaaccagctagaggcagagggaggtaacacggagtcccccagaaaggtctgggctgcgcgtgcttcagctatttccaccaaatcctcctgtctttcgtggccaacaccccaggcaaggcttggggcccccgtctgctgctggacgcagagccatgaagaagaagttagtggtgctgggcctgctggccgtggtcctggtgctggtcattgtcggcctctgtctctggctgccctcagcctccaaggaacctgacaaccatgtgtacaccagggctrccgtggccgcggatgccaagcagtgctygragattgggagggatgcactgcgggacggtggctctgcggtggatgcagccattgcagccctgttgtgtgtggggctcatgaatgcccacagcatgggcatcgggkgaaaagctgaggtcatcaacgcccgcgaggtggcccccaggctggcctttgccaccatgttcaacagctcggagcagtcccagaagggggggctgtcggtggcggtgcctggggagatccgaggctatgagctggcacaccagcggcatgggcggctgccctgggctcgcctcttccagcccagcatccagctggcccgccagggcttccccgtgggcaagggcttggcggcagycctggaaaacaagcggacygtcatcgagcagcagcctgtcttgtgtgaggtgttctgccgggatagaaaggtgcttcgggagggggagagactgaccctgccgcagctggctgacacctacgagacgctggccatcgagggtgcccaggccttctacaacggcagcctcacggcccagattgtgaaggacatccaggcggccgggggcattgtgacagctgaggacctgaacaactaccgtgctgagctgatcgagcacccgctgaacatcagcctgggagacgcggtgctgtacatgcccagtgcgccgctcagcgggcccgtgctggccctcatcctcaacatcctcaaagggtacaacttctcccgggagagcgtggagacccccgagcagaagggcctgacgtacyaccgcatcgtagaggctttccggtttgcctacgccaagaggaccctgcttggggaccccaagtttgtggatgtgactgaggtggtccgcaacatgacctccgagttcttcgctgcccagctccgggcccagatctctgacgacaccactcacccgatctcctactacaagcccgagttctacacgccggatgacgggggcactgctcacctgtctgtcgtcgcagaggacggcagtgctgtgtccgccaccagcaccatcaacctctactttggctccaaggtccgctccccggtcagcgggatcctgttcaatratgaaatggaygacttcagctctcccagcatcaccaacgagtttggggtacccccctcacctgccaatttcatccagccagggaagcagccgctctcgtccatgtgcccgacgatcatggtgggccaggacggccaggtccggatggtggtgggagctgctgggggcacacagatcaccacggccactgcactggccatcatctacaacctctggttcggctatgacgtgaagcgggccgtggaggagccccggctgcacaaccagcttctgcccaacgtcacgacagtggagagaaacattgaccaggcagtgactgcagccctggagacccggcaccatcacacccagatcgcgtccaccttcatcgctgtggtgcaagccatcgtccgcacggctggtggctgggcagctgcctcggactccaggaarggcggggagcctgcyggctactgagtgctccaggaggacaaggctgacaagcaatccagggacaagatactcaccaggaccaggaaggggactctgggggacyggcttcccctgtgagcagcagagcagcacaataaatgaggccactgtgccaggctccaggtggcctccctgccctgtctccccactc

SEQ ID NO: 3283 - DNA, 2234 bp, Homo sapiens
caaggcaagtgaggtgctgccgtcatccaggctggacagttcagtgatttgcctgaggccccacagcagagttcaactggagacagagaaaccagctagaggcagagggaggtaacacggagtcccccagaaaggtctgggctgcgcgtgcttcaggtaacctcccttgaccttcaggagaacgagaaggctgcctgatcagagagtccctgaagaagattctgtggctacaggcttcagcagagtgtgagggagaccccggttatttcctcagctatttccaccaaatcctcctgtctttcgtggccaacaccccaggcaaggcttggggcccccgtctgctgctggacgcagagccatgaagaagaagttagtggtgctgggcctgctggccgtggtcctggtgctggtcattgtcggcctctgtctctggctgccctcagcctccaaggaacctgacaaccatgtgtacaccagggctrccgtggccgcggatgccaagcagtgctygragattgggagggatgcactgcgggacggtggctctgcggtggatgcagccattgcagccctgttgtgtgtggggctcatgaatgcccacagcatgggcatcggggktggcctcttcctcaccatctacaacagcaccacwrgaaaagctgaggtcatcaacgcccgcgaggtggcccccaggctggcctttgccaccatgttcaacagctcggagcagtcccagaagggggggctgtcggtggcggtgcctggggagatccgaggctatgagctggcacaccagcggcatgggcggctgccctgggctcgcctcttccagcccagcatccagctggcccgccagggcttccccgtgggcaagggcttggcggcagycctggaaaacaagcggacygtcatcgagcagcagcctgtcttgtgtgaggtgttctgccgggatagaaaggtgcttcgggagggggagagactgaccctgccgcagctggctgacacctacgagacgctggccatcgagggtgcccaggccttctacaacggcagcctcacggcccagattgtgaaggacatccaggcggccgggggcattgtgacagctgaggacctgaacaactaccgtgctgagctgatcgagcacccgctgaacatcagcctgggagacgcggtgctgtacatgcccagtgcgccgctcagcgggcccgtgctggccctcatcctcaacatcctcaaagggtacaacttctcccgggagagcgtggagacccccgagcagaagggcctgacgtacyaccgcatcgtagaggctttccggtttgcctacgccaagaggaccctgcttggggaccccaagtttgtggatgtgactgaggtggtccgcaacatgacctccgagttcttcgctgcccagctccgggcccagatctctgacgacaccactcacccgatctcctactacaagcccgagttctacacgccggatgacgggggcactgctcacctgtctgtcgtcgcagaggacggcagtgctgtgtccgccaccagcaccatcaacctctactttggctccaaggtccgctccccggtcagcgggatcctgttcaatratgaaatggaygacttcagctctcccagcatcaccaacgagtttggggtacccccctcacctgccaatttcatccagccagggaagcagccgctctcgtccatgtgcccgacgatcatggtgggccaggacggccaggtccggatggtggtgggagctgctgggggcacacagatcaccacggccactgcactggccatcatctacaacctctggttcggctatgacgtgaagcgggccgtggaggagccccggctgcacaaccagcttctgcccaacgtcacgacagtggagagaaacattgaccaggcagtgactgcagccctggagacccggcaccatcacacccagatcgcgtccaccttcatcgctgtggtgcaagccatcgtccgcacggctggtggctgggcagctgcctcggactccaggaarggcggggagcctgcyggctactgagtgctccaggaggacaaggctgacaagcaatccagggacaagatactcaccaggaccaggaaggggactctgggggacyggcttcccctgtgagcagcagagcagcacaataaatgaggccactgtgccaggctccaggtggcctccctgccctgtctccccactc

SEQ ID NO: 3284 - DNA, 2080 bp, Homo sapiens
gtgtaagccctgatcccgcccagtgcatccccgaggccccaagcaactctcctccaactgtctttagggataaccctgagcgggcagccgctctactctatacctaactttatccgtaccagatayctagcctcactcagggccccccttacctggcggtgccgggatcaacaaatgaaattgtgacgggaagtcctggcccttggcccaacctcctgctgtccccggtctgagggcccaagccccgcgtctccgccttgccgtccagcctgtccttggtgtggggtgcttggaagtgtgagcaccctctctggctctttgccggccccaagggtcgttgcggcggcccccgggcccagtcatcagccctcttttccggtgccggaactatcgtactggtgccctagtttcccagccggcaggcggagtgaggaggaagcggaggcgagaccgcgctcaacactggggaaaggaaggaggcgggccctgcgcgcagcattttgggaaagagtggaattctgggtgttaggcccgccattcgcttgactcacgccttcgccgtagcatctttcgcagcggaccgaagagaagaaaagtaggccagagccgaactctcttcctgccaagatgtctattggtgtgccgattaaagtactgcatgaggccgagggccacattgtgacatgtgagacgaacaccggtgaggtatatcgggggaagctcattgaagcagaggacaacatgaactgccagatgtccaacatcacagtcacatacagagatggccgagtggcacagctggagcaggtatacatccgtggcagcaaaatccgctttctgattttgcctgacatgctgaagaacgcacccatgttaaagagcatgaaaaataaaaaccaaggctcaggggctggccgaggaaaagctgcyattctcaaggcccaagtggccgcaagaggaagaggacgtggaatgggacgtggaaacatctttcaaaagcgaagataattttytaagttgaacagaactttgtccttttttctttcaggttatctgagttcattggagtgggtgcttgtgcatatatgctaggtatcttttgccatctttctctttagatcaggggaaatgtttaagctaaataaatctggggggttttttgttctgttttgttttgttttctttgagaaaataaggactttgtgttcatttgaagtttgctttggctaaattttgacaccctgggggatgtcctgggagaatgccagtactttgaaatagcacagctattgatgagattttaagctgctgttcctggccagttgcaggttaagccccagaaaagttcaccttggagaagctccgagaacacacagattgtgtctcattcatcttcagacacaggcacatagtgtggcactttgttcagttaacatttgtggagctgtcatcagctcagctttaacaacacaggtgactctttcccttgataaagtcataggtaattcaggggctgggtgcggcggctcacgcatgtaatcccagcrctttgggaggccaaggcgggcggatcacgaggtcaggagttygagaccagcctggccaatatggtgaaacctcgtgtgtactaaaaataaaaaaattagccgggtgcggtggcatgtacctgtagtcccagctactcgggaggctgaggcagaagattcgcttgaacccaggaggtggacattgcagtgagcagagatcatgccactgtactccagcttgggtgacagagcgagactgcacctcaaaaaaaaaaaagtaattcaggggatcctagtggccagcttccttggctcgtatactggctacaacaagtagttttgtggtgatttgtggaaacagattcttgggagcatatcagagcatctcagcattgattggcacatccatagttgttaatgtaggaagggtgaccagcagctcagcacagtggcttgcttccagcactctgggaggctgaggtagaggattgtttgagaggagttcaaaaccagcccgcgagacatrgtgagaccctgtctctacaaaaaatttt

SEQ ID NO: 3285 - DNA, 1033 bp, Homo sapiens
agggagtcagactggtcatgcaagatcctgggcctgcccttgggtcctggggagccacggaaggttgtgggtgccagagggttgcggtcagagtcacagtcaagggccttctgagacctgtgccccctccccaccctccctccccacctcctcaggccagctctggggtctcggcaggtggtccgcaacatgacctccgagttcttcgctgcccagctccgggcccagatctctgacgacaccactcacccgatctcctactacaagcccgagttctacacgccggatgacgggggcactgctcacctgtctgtcgtcgcagaggacggcagtgctgtgtccgccaccagcaccatcaacctctactttggctccaaggtccgctccccggtcagcgggatcctgttcaatratgaaatggaygacttcagctctcccagcatcaccaacgagtttggggtacccccctcacctgccaatttcatccagccagggaagcagccgctctcgtccatgtgcccgacgatcatggtgggccaggacggccaggtccggatggtggtgggagctgctgggggcacacagatcaccacggccactgcactggccatcatctacaacctctggttcggctatgacgtgaagcgggccgtggaggagccccggctgcacaaccagcttctgcccaacgtcacgacagtggagagaaacattgaccaggcagtgactgcagccctggagacccggcaccatcacacccagatcgcgtccaccttcatcgctgtggtgcaagccatcgtccgcacggctggtggctgggcagctgcctcggactccaggaarggcggggagcctgcyggctactgagtgctccaggaggacaaggctgacaagcaatccagggacaagatactcaccaggaccaggaaggggactctgggggacyggcttcccctgtgagcagcagagcagcacaataaatgaggccactgtgccaggctccaggtggcctccctgccctgtctccccactc

SEQ ID NO: 3286 - DNA, 3395 bp, Homo sapiens
gtgtaagccctgatcccgcccagtgcatccccgaggccccaagcaactctcctccaactgtctttagggataaccctgagcgggcagccgctctactctatacctaactttatccgtaccagatayctagcctcactcagggccccccttacctggcggtgccgggatcaacaaatgaaattgtgacgggaagtcctggcccttggcccaacctcctgctgtccccggtctgagggcccaagccccgcgtctccgccttgccgtccagcctgtccttggtgtggggtgcttggaagtgtgagcaccctctctggctctttgccggccccaagggtcgttgcggcggcccccgggcccagtcatcagccctcttttccggtgccggaactatcgtactggtgccctagtttcccagccggcaggcggagtgaggaggaagcggaggcgagaccgcgctcaacactggggaaaggaaggaggcgggccctgcgcgcagcattttgggaaagagtggaattctgggtgttaggcccgccattcgcttgactcacgccttcgccgtagcatctttcgcagcggaccgaagagaagaaaagtaggccagagccgaactctcttcctgccaagatgtctattggtgtgccgattaaagtactgcatgaggccgagggccacattgtgacatgtgagacgaacaccggtgaggtatatcgggggaagctcattgaagcagaggacaacatgaactgccagatgtccaacatcacagtcacatacagagatggccgagtggcacagctggagcaggtatacatccgtggcagcaaaatccgctttctgattttgcctgacatgctgaagaacgcacccatgttaaagagcatgaaaaataaaaaccaaggctcaggggctggccgaggaaaagctgcyattctcaaggcccaagtggccgcaagaggaagaggacgtggaatgggacgtggaaacatctttcaaaagcgaagataattttytaagttgaacagaactttgtccttttttctttcaggctctggctccgctactgcatcgtgtgcttctgtccaagaggcagagagactgaaactatctgctgccgcctggattctcccagagattgcctggaacaccagctcgggtcctcgcacaccatcctgcrggtgcagcccaraactgtcttctgaggaagaggtgctctcctgggcccccactgtccccaggcctcagcaaggcaagtgaggtgctgccgtcatccaggctggacagttcagtgatttgcctgaggccccacagcagagttcaactggagacagagaaaccagctagaggcagagggaggtaacacggagtcccccagaaaggtctgggctgcgcgtgcttcaggtaacctcccttgaccttcaggagaacgagaaggctgcctgatcagagagtccctgaagaagattctgtggctacaggcttcagcagagtgtgagggagaccccggttatttcctcagctatttccaccaaatcctcctgtctttcgtggccaacaccccaggcaaggcttggggcccccgtctgctgctggacgcagagccatgaagaagaagttagtggtgctgggcctgctggccgtggtcctggtgctggtcattgtcggcctctgtctctggctgccctcagcctccaaggaacctgacaaccatgtgtacaccagggctrccgtggccgcggatgccaagcagtgctygragattgggagggatgcactgcgggacggtggctctgcggtggatgcagccattgcagccctgttgtgtgtggggctcatgaatgcccacagcatgggcatcggggktggcctcttcctcaccatctacaacagcaccacwrgggggctgtcggtggcggtgcctggggagatccgaggctatgagctggcacaccagcggcatgggcggctgccctgggctcgcctcttccagcccagcatccagctggcccgccagggcttccccgtgggcaagggcttggcggcagycctggaaaacaagcggacygtcatcgagcagcagcctgtcttgtgtgaggtgttctgccgggatagaaaggtgcttcgggagggggagagactgaccctgccgcagctggctgacacctacgagacgctggccatcgagggtgcccaggccttctacaacggcagcctcacggcccagattgtgaaggacatccaggcggccgggggcattgtgacagctgaggacctgaacaactaccgtgctgagctgatcgagcacccgctgaacatcagcctgggagacgcggtgctgtacatgcccagtgcgccgctcagcgggcccgtgctggccctcatcctcaacatcctcaaagggtacaacttctcccgggagagcgtggagacccccgagcagaagggcctgacgtacyaccgcatcgtagaggctttccggtttgcctacgccaagaggaccctgcttggggaccccaagccagctctggggtctcggcaggtggtccgcaacatgacctccgagttcttcgctgcccagctccgggcccagatctctgacgacaccactcacccgatctcctactacaagcccgagttctacacgccggatgacgggggcactgctcacctgtctgtcgtcgcagaggacggcagtgctgtgtccgccaccagcaccatcaacctctactttggctccaaggtccgctccccggtcagcgggatcctgttcaatratgaaatggaygacttcagctctcccagcatcaccaacgagtttggggtacccccctcacctgccaatttcatccagccagggaagcagccgctctcgtccatgtgcccgacgatcatggtgggccaggacggccaggtccggatggtggtgggagctgctgggggcacacagatcaccacggccactgcactggccatcatctacaacctctggttcggctatgacgtgaagcgggccgtggaggagccccggctgcacaaccagcttctgcccaacgtcacgacagtggagagaaacattgaccaggcagtgactgcagccctggagacccggcaccatcacacccagatcgcgtccaccttcatcgctgtggtgcaagccatcgtccgcacggctggtggctgggcagctgcctcggactccaggaarggcggggagcctgcyggctactgagtgctccaggaggacaaggctgacaagcaatccagggacaagatactcaccaggaccaggaaggggactctgggggacyggcttcccctgtgagcagcagagcagcacaataaatgaggccactgtgccaggctccaggtggcctccctgccctgtctccccactc

SEQ ID NO: 3287 - DNA, 3479 bp, Homo sapiens
gtgtaagccctgatcccgcccagtgcatccccgaggccccaagcaactctcctccaactgtctttagggataaccctgagcgggcagccgctctactctatacctaactttatccgtaccagatayctagcctcactcagggccccccttacctggcggtgccgggatcaacaaatgaaattgtgacgggaagtcctggcccttggcccaacctcctgctgtccccggtctgagggcccaagccccgcgtctccgccttgccgtccagcctgtccttggtgtggggtgcttggaagtgtgagcaccctctctggctctttgccggccccaagggtcgttgcggcggcccccgggcccagtcatcagccctcttttccggtgccggaactatcgtactggtgccctagtttcccagccggcaggcggagtgaggaggaagcggaggcgagaccgcgctcaacactggggaaaggaaggaggcgggccctgcgcgcagcattttgggaaagagtggaattctgggtgttaggcccgccattcgcttgactcacgccttcgccgtagcatctttcgcagcggaccgaagagaagaaaagtaggccagagccgaactctcttcctgccaagatgtctattggtgtgccgattaaagtactgcatgaggccgagggccacattgtgacatgtgagacgaacaccggtgaggtatatcgggggaagctcattgaagcagaggacaacatgaactgccagatgtccaacatcacagtcacatacagagatggccgagtggcacagctggagcaggtatacatccgtggcagcaaaatccgctttctgattttgcctgacatgctgaagaacgcacccatgttaaagagcatgaaaaataaaaaccaaggctcaggggctggccgaggaaaagctgcyattctcaaggcccaagtggccgcaagaggaagaggacgtggaatgggacgtggaaacatctttcaaaagcgaagataattttytaagttgaacagaactttgtccttttttctttcaggctctggctccgctactgcatcgtgtgcttctgtccaagaggcagagagactgaaactatctgctgccgcctggattctcccagagattgcctggaacaccagctcgggtcctcgcacaccatcctgcrggtgcagcccaraactgtcttctgaggaagaggtgctctcctgggcccccactgtccccaggcctcagcaaggcaagtgaggtgctgccgtcatccaggctggacagttcagtgatttgcctgaggccccacagcagagttcaactggagacagagaaaccagctagaggcagagggaggtaacacggagtcccccagaaaggtctgggctgcgcgtgcttcaggtaacctcccttgaccttcaggagaacgagaaggctgcctgatcagagagtccctgaagaagattctgtggctacaggcttcagcagagtgtgagggagaccccggttatttcctcagctatttccaccaaatcctcctgtctttcgtggccaacaccccaggcaaggcttggggcccccgtctgctgctggacgcagagccatgaagaagaagttagtggtgctgggcctgctggccgtggtcctggtgctggtcattgtcggcctctgtctctggctgccctcagcctccaaggaacctgacaaccatgtgtacaccagggctrccgtggccgcggatgccaagcagtgctygragattgggagggatgcactgcgggacggtggctctgcggtggatgcagccattgcagccctgttgtgtgtggggctcatgaatgcccacagcatgggcatcggggktggcctcttcctcaccatctacaacagcaccacwrgaaaagctgaggtcatcaacgcccgcgaggtggcccccaggctggcctttgccaccatgttcaacagctcggagcagtcccagaagggggggctgtcggtggcggtgcctggggagatccgaggctatgagctggcacaccagcggcatgggcggctgccctgggctcgcctcttccagcccagcatccagctggcccgccagggcttccccgtgggcaagggcttggcggcagycctggaaaacaagcggacygtcatcgagcagcagcctgtcttgtgtgaggtgttctgccgggatagaaaggtgcttcgggagggggagagactgaccctgccgcagctggctgacacctacgagacgctggccatcgagggtgcccaggccttctacaacggcagcctcacggcccagattgtgaaggacatccaggcggccgggggcattgtgacagctgaggacctgaacaactaccgtgctgagctgatcgagcacccgctgaacatcagcctgggagacgcggtgctgtacatgcccagtgcgccgctcagcgggcccgtgctggccctcatcctcaacatcctcaaagggtacaacttctcccgggagagcgtggagacccccgagcagaagggcctgacgtacyaccgcatcgtagaggctttccggtttgcctacgccaagaggaccctgcttggggaccccaagtttgtggatgtgactgaggtggtccgcaacatgacctccgagttcttcgctgcccagctccgggcccagatctctgacgacaccactcacccgatctcctactacaagcccgagttctacacgccggatgacgggggcactgctcacctgtctgtcgtcgcagaggacggcagtgctgtgtccgccaccagcaccatcaacctctactttggctccaaggtccgctccccggtcagcgggatcctgttcaatratgaaatggaygacttcagctctcccagcatcaccaacgagtttggggtacccccctcacctgccaatttcatccagccagggaagcagccgctctcgtccatgtgcccgacgatcatggtgggccaggacggccaggtccggatggtggtgggagctgctgggggcacacagatcaccacggccactgcactggccatcatctacaacctctggttcggctatgacgtgaagcgggccgtggaggagccccggctgcacaaccagcttctgcccaacgtcacgacagtggagagaaacattgaccaggcagtgactgcagccctggagacccggcaccatcacacccagatcgcgtccaccttcatcgctgtggtgcaagccatcgtccgcacggctggtggctgggcagctgcctcggactccaggaarggcggggagcctgcyggctactgagtgctccaggaggacaaggctgacaagcaatccagggacaagatactcaccaggaccaggaaggggactctgggggacyggcttcccctgtgagcagcagagcagcacaataaatgaggccactgtgccaggctccaggtggcctccctgccctgtctccccactc

SEQ ID NO: 3288 - DNA, 1112 bp, Homo sapiens
agggagtcagactggtcatgcaagatcctgggcctgcccttgggtcctggggagccacggaaggttgtgggtgccagagggttgcggtcagagtcacagtcaagggccttctgagacctgtgccccctccccaccctccctccccacctcctcaggccagctctggggtctcggcaggtggtccgcaacatgacctccgagttcttcgctgcccagctccgggcccagatctctgacgacaccactcacccgatctcctactacaagcccgagttctacacgccggatgacgggggcactgctcacctgtctgtcgtcgcagaggacggcagtgctgtgtccgccaccagcaccatcaacctctactttggctccaaggtccgctccccggtcagcgggatcctgttcaatratgaaatggaygacttcagctctcccagcatcaccaacgagtttggggtacccccctcacctgccaatttcatccagccagggaagcagccgctctcgtccatgtgcccgacgatcatggtgggccaggacggccaggtccggatggtggtgggagctgctgggggcacacagatcaccacggccactgcactggtatgtgtcacaccttttctccctggccgtgcccaccctgcacagcccccaagccatgctgatcacactcccatgccccaggccatcatctacaacctctggttcggctatgacgtgaagcgggccgtggaggagccccggctgcacaaccagcttctgcccaacgtcacgacagtggagagaaacattgaccaggcagtgactgcagccctggagacccggcaccatcacacccagatcgcgtccaccttcatcgctgtggtgcaagccatcgtccgcacggctggtggctgggcagctgcctcggactccaggaarggcggggagcctgcyggctactgagtgctccaggaggacaaggctgacaagcaatccagggacaagatactcaccaggaccaggaaggggactctgggggacyggcttcccctgtgagcagcagagcagcacaataaatgaggccactgtgccaggctccagcagtccccccatctcagtctcccaaa

SEQ ID NO: 3289 - DNA, 2621 bp, Homo sapiens
caggcccaccaagcctggggaggtggccacccttccaygatggcatttggatgttccctgtgtgtggggagggcacagggactccattcrtagaccacctctgggacagtgtgtctgcctctgaggtcagaygctctgcactgggacagggtggagtggagggaaatccagcttggggctcattggaggggcttgctggcagacaccgccctttgtgggaaactgactgtgggagaggggaaccccaacctctgtcaccacatccctcttccctgttgtcacacctgtcacctgctgccatagccatgagacttcccaagggtcactgctgccactcactgcacagcctggaagggagtccacaggggacatacagtgagcaagagacctgtgccactcaggcctcctgggggtgtccccagtgcagccatgatgataatcacagctaccattcaccaagccctgcccacagtctaacctactctattcacaacactcccagcagcaaggcaagtgaggtgctgccgtcatccaggctggacagttcagtgatttgcctgaggccccacagcagagttcaactggagacagagaaaccagctagaggcagagggaggtaacacggagtcccccagaaaggtctgggctgcgcgtgcttcagctatttccaccaaatcctcctgtctttcgtggccaacaccccaggcaaggcttggggcccccgtctgctgctggacgcagagccatgaagaagaagttagtggtgctgggcctgctggccgtggtcctggtgctggtcattgtcggcctctgtctctggctgccctcagcctccaaggaacctgacaaccatgtgtacaccagggctrccgtggccgcggatgccaagcagtgctygragattgggagggatgcactgcgggacggtggctctgcggtggatgcagccattgcagccctgttgtgtgtggggctcatgaatgcccacagcatgggcatcggggktggcctcttcctcaccatctacaacagcaccacwrgaaaagctgaggtcatcaacgcccgcgaggtggcccccaggctggcctttgccaccatgttcaacagctcggagcagtcccagaagggggggctgtcggtggcggtgcctggggagatccgaggctatgagctggcacaccagcggcatgggcggctgccctgggctcgcctcttccagcccagcatccagctggcccgccagggcttccccgtgggcaagggcttggcggcagycctggaaaacaagcggacygtcatcgagcagcagcctgtcttgtgtgaggtgttctgccgggatagaaaggtgcttcgggagggggagagactgaccctgccgcagctggctgacacctacgagacgctggccatcgagggtgcccaggccttctacaacggcagcctcacggcccagattgtgaaggacatccaggcggccgggggcattgtgacagctgaggacctgaacaactaccgtgctgagctgatcgagcacccgctgaacatcagcctgggagacgcggtgctgtacatgcccagtgcgccgctcagcgggcccgtgctggccctcatcctcaacatcctcaaagggtacaacttctcccgggagagcgtggagacccccgagcagaagggcctgacgtacyaccgcatcgtagaggctttccggtttgcctacgccaagaggaccctgcttggggaccccaagtttgtggatgtgactgaggtggtccgcaacatgacctccgagttcttcgctgcccagctccgggcccagatctctgacgacaccactcacccgatctcctactacaagcccgagttctacacgccggatgacgggggcactgctcacctgtctgtcgtcgcagaggacggcagtgctgtgtccgccaccagcaccatcaacctctactttggctccaaggtccgctccccggtcagcgggatcctgttcaatratgaaatggaygacttcagctctcccagcatcaccaacgagtttggggtacccccctcacctgccaatttcatccagccagggaagcagccgctctcgtccatgtgcccgacgatcatggtgggccaggacggccaggtccggatggtggtgggagctgctgggggcacacagatcaccacggccactgcactggccatcatctacaacctctggttcggctatgacgtgaagcgggccgtggaggagccccggctgcacaaccagcttctgcccaacgtcacgacagtggagagaaacattgaccaggcagtgactgcagccctggagacccggcaccatcacacccagatcgcgtccaccttcatcgctgtggtgcaagccatcgtccgcacggctggtggctgggcagctgcctcggactccaggaarggcggggagcctgcyggctactgagtgctccaggaggacaaggctgacaagcaatccagggacaagatactcaccaggaccaggaaggggactctgggggacyggcttcccctgtgagcagcagagcagcacaataaatgaggccactgtgccaggctccaggtggcctccctgccctgtctccccactc

SEQ ID NO: 3290 - DNA, 4246 bp, Homo sapiens
gtcaccgcccggccaagagtgcgtgggcggcggcgcgcgggtgcgatcgcggagctgtgaggcgcaggcagggctctggggcacctagagaccggggccggagacgtggcagccgccctgcccgccagaaagtttcctagaagtttgctgggcgcgggcgcacgactgactggctggaccatgaacgtgttccgaatcctcggcgacctgagccacctcctggccatgatcttgctgctggggaagatctggaggtccaagtgctgcaagggcatctctgggaagagccagatcctgtttgctctcgtcttcaccaccaggtacctggacctgttcaccaacttcatctccatctacaacacagtaatgaaggtggtttttctcctctgtgcctatgttacagtgtacatgatatatgggaaattccgtaaaacttttgacagtgagaatgacacattccgcctggagtttcttctggtcccagtcattggcctttccttccttgaaaactacagtttcactctgctggagatcctctggactttctctatctatctggaatcagtggctatcctgccccagctcttcatgatcagcaagactggagaggctgagaccataactactcactacctgttctttctgggtctgtaccgggcactctacctggctaactggatcaggcggtaccagactgagaatttctatgaccaaattgcagtcgtgtctggagtagtacaaaccatcttctactgtgacttcttctacttgtatgkgaccaaagtccttaagggaaagaagttaagtcttccaatgccaatctgaggaccttcagagacagtctacgccttaacaagcacatgaaggaaactattttgaatgttctctttggcaacttatccataatttgggatcaaatgttaaaaccagaaaagtgtttagtgtggatttcagcaaaacctgatcatcccacccagaagaccttctcatcaatagatcgcccttaaagacccattgtaaggtcataaaaaacctcggccamctgcacaaagatggtgcctcactgcaacaagaaaccttaaggtgtcttaccgacgaaataaaaaacataaatgattgttctccaaggcctgagggcaagactcatgatgagcaagtcaaccccaatctggaacaatgtccctcctcttagaatgtcccaactaaagaccagttaaaatattagggtacgttcttgtgaatttccactttccaggtagatgaccaaatttaggtggtcaagatataaaggtgwcagctagttttaagtgtgaaacttatttcactttcacactgccttcaggccagaagcaaaccaaatttaccaggtttggctggaggagttttgtgactcatcttttactggtttgaattttttcaaaccagtggctgatacctgccttgtacttagtaccttaataccaataacctaatggtacttaggcgagtaccatttgcacaatcactgttttacttatgagcagatacagatatatccaaacccttacctactaggtatcctgctagggttttcaattccaattcttgtattaagttttttcctttcagttttaggtgcgaaagtaatcagtcaatccaatatcccccatctttgtcttgaaacaaaaactgttttaagacgtctacgttgaattattcagagaattaagcaataaaagctcacaccttattgtcaacagtgtttttatttatacctacaaaaagaaaacaagatgatggtatcaaaaggacaatttacaaactaagaatagtaacatagctttcagcatcctgtgcctgaacatcacacatytacaagtctytcaagtcttaatgcaacaggaatgtgtctggagaccagcaagaacatcaatagagagcactgatcccaagcaaaagccactaaccttttagatgagaagtccacacaacraattgttagggaggattggggagaagcagcccattgcttaatacattggaaccctttccctaagttgagtttcaaccatgaatgcaataactagcataaaacgattcttctgctcatgttctgaagccaacagcagaacctgaattataagtgacagacatggaggcagaagagttaaactctgctagatttcagctgtgctcaggccataatagtttttgaggtttggaatttactgttattttatgattrcaatgtcccaggtggaaaaagggaagcaagcaatccaaataaccacttgcttgcccagagacctttccctcaaacagatgctttcaagagctgcgagagagtagggcatcccttgtggtggtacctctatgtttaaagaaagaagaaaaaaacccagaatttggttgtagaaaacaatgcccacaacagactggccagtgcttagacaaatttggggttggggggaacactttggtttgaaagcacagagcagtttgccatgtttcttctgtgcctaccattctcccttggcctcaacttctgtaagatgggggggggacaaaaagagaagtaaagttaagaagaaagtggaaaattaaaaaaaaagatgtcaaagtttttacatgcatatatttcagcttatgctgaagacctacctgtatgttgcacattgaatcatactttcagaacccctcagaaaccatccctctctccctaaagaattttaaaaggaaaacaaaacctcgagtatagatcttacagatgagcaagcattcaggccttagccaaagaatgcagtggagccttcccccttcaactgcattgtgaatgaataccaattaacagcataaaaattaatagtcccatatcagatctggaaggggtttctggggctgtctgatgtccctatcctgttgtagtgaacacaatagcagaaaattctttctgggtccatctgctataaagtcttggtaaaacagcattacyatgaagaggatgaactcacctaccttcagatggaggaaaagtgaaaaggacttaggctttagtcctccatgacttttcttaagcactacctacctgtaataagctgagtgcaaaaggatgccgaagaaaatctgcacccagaagctgttagaaagcactgcagagaacagggtatgaagaaaataaagagttcttaataaacccttaagattctttgttcaaggtaactttgccaaaagggcagagtaggtggcaaagagttgcttttaatctagctctacactgcatttgaaaataaaatttgcccattttgaatatattgtttataattaaatgtgctttttacactgcaggtcaatataaaaactggttagtaaatttccagcgagcatttatgttcatttgctcacagcagctgtctggatggaaaattaatttcacagatggtccccagttaaactgggaaraaatataggcagcttccacccagatgctgagatgctacagtttaaccactacaataaacacttgtggtttttaatttaaaggatacacaaaactcagcaattcaatttctagcctgacactaaaatggttatttttcagtaacggggggagaagtggggaggcagagtgtgaagggaaataaaaccaattagtaatttttaactatcaaatgcactccagcaatcagtcaaaacaggcccgaggaaacctgttccaacttaagaaacatttaaaagcacaaaagaaaatgtgcagggcamtccctctttgttttctaacccagtaatgagaaatttaaagcacagatgccatcttcctctgcaaaacaattcagccctccccctccctccctccccaccaactcagaaaaacaaaacatggggctcccacaaaagggcctaataccttactcttttagatgaaaaatagctcaaatatcttcaacatgcaagaagttgggggaagaaattaatctcttccagtcagctatatatatatatatatatwttttttttttacaaaatgttattccagactggatcattttggtgggcagaagaaacctggcagtgaattctaactaatctgcatgaaaagacaaatcacgatggttggggggaaaaattaaaaaaaaaaaaaagaaaaaaggaaaaaaaaagaaaaggcgaagaggaaaaaaaaaggaaagacagtgttccttaaaatgtaattaagtctgctggagtcactaccacttgagtggtttcatttacgtgaaggaggaggagg

SEQ ID NO: 3291 - DNA, 4225 bp, Homo sapiens
gtcaccgcccggccaagagtgcgtgggcggcggcgcgcgggtgcgatcgcggagctgtgaggcgcaggcagggctctggggcacctagagaccggggccggagacgtggcagccgccctgcccgccagaaagtttcctagaagtttgctgggcgcgggcgcacgactgactggctggaccatgaacgtgttccgaatcctcggcgacctgagccacctcctggccatgatcttgctgctggggaagatctggaggtccaagtgctgcaagggcatctctgggaagagccagatcctgtttgctctcgtcttcaccaccaggtacctggacctgttcaccaacttcatctccatctacaacacagtaatgaaggtggtttttctcctctgtgcctatgttacagtgtacatgatatatgggaaattccgtaaaacttttgacagtgagaatgacacattccgcctggagtttcttctggtcccagtcattggcctttccttccttgaaaactacagtttcactctgctggagatcctctggactttctctatctatctggaatcagtggctatcctgccccagctcttcatgatcagcaagactggagaggctgagaccataactactcactacctgttctttctgggtctgtaccgggcactctacctggctaactggatcaggcggtaccagactgagaatttctatgaccaaattgcagtcgtgtctggagtagtacaaaccatcttctactgtgacttcttctacttgtatgkgaccaaagtccttaagggaaagaagttaagtcttccaatgccaatctgaggaccttcagagacagtctacgccttaacaagcacatgaaggaaactattttgaatgttctctttggcaacttatccataatttgggatcaaatgttaaaaccagaaaagtgtttagtgtggatttcagcaaaacctgatcatcccacccagaagaccttctcatcaatagatcgcccttaaagacccattgtaaggtcataaaaaacctcggccamctgcacaaagatggtgcctcactgcaacaagaaaccttaaggtgtcttaccgacgaaataaaaaacataaatgattgttctccaaggcctgagggcaagactcatgatgagcaagtcaaccccaatctggaacaatgtccctcctcttagaatgtcccaactaaagaccagttaaaatattagggtacgttcttgtgaatttccactttccaggtagatgaccaaatttaggtggtcaagatataaaggtgwcagctagttttaagtgtgaaacttatttcactttcacactgccttcaggccagaagcaaaccaaatttaccaggtttggctggaggagttttgtgactcatcttttactggtttgaattttttcaaaccagtggctgatacctgccttgtacttagtaccttaataccaataacctaatggtacttaggcgagtaccatttgcacaatcactgttttacttatgagcagatacagatatatccaaacccttacctactaggtatcctgctagggttttcaattccaattcttgtattaagttttttcctttcagttttaggtgcgaaagtaatcagtcaatccaatatcccccatctttgtcttgaaacaaaaactgttttaagacgtctacgttgaattattcagagaattaagcaataaaagctcacaccttattgtcaacagtgtttttatttatacctacaaaaagaaaacaagatgatggtatcaaaaggacaatttacaaactaagaatagtaacatagctttcagcatcctgtgcctgaacatcacacatytacaagtctytcaagtcttaatgcaacaggaatgtgtctggagaccagcaagaacatcaatagagagcactgatcccaagcaaaagccactaaccttttagatgagaagtccacacaacraattgttagggaggattggggagaagcagcccattgcttaatacattggaaccctttccctaagttgagtttcaaccatgaatgcaataactagcataaaacgattcttctgctcatgttctgaagccaacagcagaacctgaattataagtgacagacatggaggcagaagagttaaactctgctagatttcagctgtgctcaggccataatagtttttgaggtttggaatttactgttattttatgattrcaatgtcccaggtggaaaaagggaagcaagcaatccaaataaccacttgcttgcccagagacctttccctcaaacagatgctttcaagagctgcgagagagtagggcatcccttgtggtggtacctctatgtttaaagaaagaagaaaaaaacccagaatttggttgtagaaaacaatgcccacaacagactggccagtgcttagacaaatttggggttggggggaacactttggtttgaaagcacagagcagtttgccatgtttcttctgtgcctaccattctcccttggcctcaacttctgtaagatgggggggggacaaaaagagaatttttacatgcatatatttcagcttatgctgaagacctacctgtatgttgcacattgaatcatactttcagaacccctcagaaaccatccctctctccctaaagaattttaaaaggaaaacaaaacctcgagtatagatcttacagatgagcaagcattcaggccttagccaaagaatgcatgaataccaattaacagcataaaaattaatagtcccatatcagatctggaaggggtttctggggctgtctgatgtccctatcctgttgtagtgaacacaatagcagaaaattctttctgggtccatctgctataaagtcttggtaaaacagcattacyatgaagaggatgaactcacctaccttcagatggaggaaaagtgaaaaggacttaggctttagtcctccatgacttttcttaagcactacctacctgtaataagctgagtgcaaaaggatgccgaagaaaatctgcacccagaagctgttagaaagcactgcagagaacagggtatgaagaaaataaagagttcttaataaacccttaagattctttgttcaaggtaactttgccaaaagggcagagtaggtggcaaagagttgcttttaatctagctctacactgcatttgaaaataaaatttgcccattttgaatatattgtttataattaaatgtgctttttacactgcaggtcaatataaaaactggttagtaaatttccagcgagcatttatgttcatttgctcacagcagctgtctggatggaaaattaatttcacagatggtccccagttaaactgggaaraaatataggcagcttccacccagatgctgagatgctacagtttaaccactacaataaacacttgtggtttttaatttaaaggatacacaaaactcagcaattcaatttctagcctgacactaaaatggttatttttcagtaacggggggagaagtggggaggcagagtgtgaagggaaataaaaccaattagtaatttttaactatcaaatgcactccagcaatcagtcaaaacaggcccgaggaaacctgttccaacttaagaaacatttaaaagcacaaaagaaaatgtgcagggcamtccctctttgttttctaacccagtaatgagaaatttaaagcacagatgccatcttcctctgcaaaacaattcagccctccccctccctccctccccaccaactcagaaaaacaaaacatggggctcccacaaaagggcctaataccttactcttttagatgaaaaatagctcaaatatcttcaacatgcaagaagttgggggaagaaattaatctcttccagtcagctatatatatatatatatatwttttttttttacaaaatgttattccagactggatcattttggtgggcagaagaaacctggcagtgaattctaactaatctgcatgaaaagacaaatcacgatggttggggggaaaaattaaaaaaaaaaaaaagaaaaaaggaaaaaaaaagaaaaggcgaagaggaaaaaaaaaggaaagacagtgttccttaaaatgtaattaagtctgctggagtcactaccacttgagtggtttcatttacgtgaaggaggaggagggggagatyaaaaaaaaaaaattagctgttgttacagggcttgtgaagaaggggcatt

SEQ ID NO: 3292 - DNA, 4175 bp, Homo sapiens
gtcaccgcccggccaagagtgcgtgggcggcggcgcgcgggtgcgatcgcggagctgtgaggcgcaggcagggctctggggcacctagagaccggggccggagacgtggcagccgccctgcccgccagaaagtttcctagaagtttgctgggcgcgggcgcacgactgactggctggaccatgaacgtgttccgaatcctcggcgacctgagccacctcctggccatgatcttgctgctggggaagatctggaggtccaagtgctgcaagggcatctctgggaagagccagatcctgtttgctctcgtcttcaccaccaggtacctggacctgttcaccaacttcatctccatctacaacacagtaatgaaggtggtttttctcctctgtgcctatgttacagtgtacatgatatatgggaaattccgtaaaacttttgacagtgagaatgacacattccgcctggagtttcttctggtcccagtcattggcctttccttccttgaaaactacagtttcactctgctggagatcctctggactttctctatctatctggaatcagtggctatcctgccccagctcttcatgatcagcaagactggagaggctgagaccataactactcactacctgttctttctgggtctgtaccgggcactctacctggctaactggatcaggcggtaccagactgagaatttctatgaccaaattgcagtcgtgtctggagtagtacaaaccatcttctactgtgacttcttctacttgtatgkgaccaaagtccttaagggaaagaagttaagtcttccaatgccaatctgaggaccttcagagacagtctacgccttaacaagcacatgaaggaaactattttgaatgttctctttggcaacttatccataatttgggatcaaatgttaaaaccagaaaagtgtttagtgtggatttcagcaaaacctgatcatcccacccagaagaccttctcatcaatagatcgcccttaaagacccattgtaaggtcataaaaaacctcggccamctgcacaaagatggtgcctcactgcaacaagaaaccttaaggtgtcttaccgacgaaataaaaaacataaatgattgttctccaaggcctgagggcaagactcatgatgagcaagtcaaccccaatctggaacaatgtccctcctcttagaatgtcccaactaaagaccagttaaaatattagggtacgttcttgtgaatttccactttccaggtagatgaccaaatttaggtggtcaagatataaaggtgwcagctagttttaagtgtgaaacttatttcactttcacactgccttcaggccagaagcaaaccaaatttaccaggtttggctggaggagttttgtgactcatcttttactggtttgaattttttcaaaccagtggctgatacctgccttgtacttagtaccttaataccaataacctaatggtacttaggcgagtaccatttgcacaatcactgttttacttatgagcagatacagatatatccaaacccttacctactaggtatcctgctagggttttcaattccaattcttgtattaagttttttcctttcagttttaggtgcgaaagtaatcagtcaatccaatatcccccatctttgtcttgaaacaaaaactgttttaagacgtctacgttgaattattcagagaattaagcaataaaagctcacaccttattgtcaacagtgtttttatttatacctacaaaaagaaaacaagatgatggtatcaaaaggacaatttacaaactaagaatagtaacatagctttcagcatcctgtgcctgaacatcacacatytacaagtctytcaagtcttaatgcaacaggaatgtgtctggagaccagcaagaacatcaatagagagcactgatcccaagcaaaagccactaaccttttagatgagaagtccacacaacraattgttagggaggattggggagaagcagcccattgcttaatacattggaaccctttccctaagttgagtttcaaccatgaatgcaataactagcataaaacgattcttctgctcatgttctgaagccaacagcagaacctgaattataagtgacagacatggagtttttgaggtttggaatttactgttattttatgattrcaatgtcccaggtggaaaaagggaagcaagcaatccaaataaccacttgcttgcccagagacctttccctcaaacagatgctttcaagagctgcgagagagtagggcatcccttgtggtggtacctctatgtttaaagaaagaagaaaaaaacccagaatttggttgtagaaaacaatgcccacaacagactggccagtgcttagacaaatttggggttggggggaacactttggtttgaaagcacagagcagtttgccatgtttcttctgtgcctaccattctcccttggcctcaacttctgtaagatgggggggggacaaaaagagaatttttacatgcatatatttcagcttatgctgaagacctacctgtatgttgcacattgaatcatactttcagaacccctcagaaaccatccctctctccctaaagaattttaaaaggaaaacaaaacctcgagtatagatcttacagatgagcaagcattcaggccttagccaaagaatgcatgaataccaattaacagcataaaaattaatagtcccatatcagatctggaaggggtttctggggctgtctgatgtccctatcctgttgtagtgaacacaatagcagaaaattctttctgggtccatctgctataaagtcttggtaaaacagcattacyatgaagaggatgaactcacctaccttcagatggaggaaaagtgaaaaggacttaggctttagtcctccatgacttttcttaagcactacctacctgtaataagctgagtgcaaaaggatgccgaagaaaatctgcacccagaagctgttagaaagcactgcagagaacagggtatgaagaaaataaagagttcttaataaacccttaagattctttgttcaaggtaactttgccaaaagggcagagtaggtggcaaagagttgcttttaatctagctctacactgcatttgaaaataaaatttgcccattttgaatatattgtttataattaaatgtgctttttacactgcaggtcaatataaaaactggttagtaaatttccagcgagcatttatgttcatttgctcacagcagctgtctggatggaaaattaatttcacagatggtccccagttaaactgggaaraaatataggcagcttccacccagatgctgagatgctacagtttaaccactacaataaacacttgtggtttttaatttaaaggatacacaaaactcagcaattcaatttctagcctgacactaaaatggttatttttcagtaacggggggagaagtggggaggcagagtgtgaagggaaataaaaccaattagtaatttttaactatcaaatgcactccagcaatcagtcaaaacaggcccgaggaaacctgttccaacttaagaaacatttaaaagcacaaaagaaaatgtgcagggcamtccctctttgttttctaacccagtaatgagaaatttaaagcacagatgccatcttcctctgcaaaacaattcagccctccccctccctccctccccaccaactcagaaaaacaaaacatggggctcccacaaaagggcctaataccttactcttttagatgaaaaatagctcaaatatcttcaacatgcaagaagttgggggaagaaattaatctcttccagtcagctatatatatatatatatatwttttttttttacaaaatgttattccagactggatcattttggtgggcagaagaaacctggcagtgaattctaactaatctgcatgaaaagacaaatcacgatggttggggggaaaaattaaaaaaaaaaaaaagaaaaaaggaaaaaaaaagaaaaggcgaagaggaaaaaaaaaggaaagacagtgttccttaaaatgtaattaagtctgctggagtcactaccacttgagtggtttcatttacgtgaaggaggaggagggggagatyaaaaaaaaaaaattagctgttgttacagggcttgtgaagaaggggcatt

SEQ ID NO: 3293 - DNA, 762 bp, Homo sapiens
mtgactgggggcagcagcctgagcagtgccgaccacagcgcacacgcagaaccaggagccatggagccccaccgtgtgccccaccgtgcagcctcctcggccaccttcaaacagctgcatcctcaacaggttatgaggccccaaggagaacaggaaaagatgatctctaggtgccaagatgaaattgcacactggcaaaaggaaggcttgtggataccagcaaaatcactcttctcctcggggacaactggttttgccagtgctctgcaaagcaagcagtggggcatgggctgcaacgagtgtacgcacccctcctgccagcactcgctgagcatgctgggcatcggccagtgcgtggaatgtgagagcggggtgctggtgctggaccccacctcgggccccaagtggaaggtggcctgcaacaagtgcaacgtggtagcgcactgcttcgagaacgcccaccgcgtgcgggtgtccgccgacacctgcagtgtctgtgaggccgccttgcttgatgtggacttcaacaaggccaagtccccactcccgggcgatgagacgcagcacatgggctgcgtcttttgtgaccccgtcttccaggagctggtggagctgaagcatgcggcctcctgccaccccatgcaccgcggtggaccagggagaaggcagggtcgagggcggggccgggccaggaggccccctgggaagcccaaccccagacggcccaaggacaagatgtcagccctggccgcctactttgta

SEQ ID NO: 3294 - DNA, 2784 bp, Homo sapiens
cagaagcggctggacccggaaataggggttgtcggtagccgccccgggaacaaggaccggagctggatccgcggtgcggctgtggctctttagggtgagatctgctgtaccagtctcacaggagtcagcattggtaatagtgctgtgctgcggaagagtggagtctaaactttttcattgccagtgccccgaamctggagtgtgaaggaccgagacaaratgaagactgtgctcatggttgctgaaaagccgtccttggcacagtcaattgccaaaatcctctctagagggagcctgtcctcacacaaagggctgaacggggcctgctcagtccacgagtacactgggacctttgctggccagccagtgcgcttcaagatgacgtctgtctgtggtcacgtgatgaccctggatttcctgggaaaatacaacaaatgggacaaagtggaccccgcagaactgttcagccaagctcccacggagaagaaagaagctaaccccaagctgaacatggtgaagttcctgcaggtggagggcagaggctgcgactayatcgtgctgtggctggactgcgacaaggagggggagaacatctgctttgaggttaacactgacaaagacagatctctccttttggactgggaccgagtaagagtgtttgaccgggagatcgcacagatgtttttaaacatgacaaagctggagaaggaagcccaggtggaggccacaagcaggaaagaaaaggccaagcagaggcccctggccctgaacactgtggagatgctgcgtgtggccagctcttctctgggcatggggccgcagcaygccatgcagacggctgagcggctctacacgcaaggctacatcagctacccacggacagagaccacccactaccctgagaactttgacctgaagggctctctgcggcagcaggccaaccacccctactgggccracacggtgaagcggttgttagcagaaggtatcaaccgcccgcggaaaggccatgacgccggcgaccatccccccatcacccccatgaagtctgccacagaggccgaattagggggtgacgcgtggcggctctatgagtacatcaccagacacttcatcgccacggtcagccatgactgcaagtacctkcagagcaccatctccttcagaattgggcccgagctcttcacctgctccgggaagaccgtcctctcaccaggtcacaccacgggcccagccttcctcctctgtgccttcatgggcagacaaacattctacatcgtgaaccctggggccttgtacattgcaggcacggatgccagcatccctgtgcatatcaacaacatctgccagcgcaactatgtcacggtggagagcgggcgccggctcaagcccaccaacctcggcatcgtcctggtgcacggctactataagattgatgcagagctggtgctccccaccatccgcagtgcagtggagaagcagctgaacctgatcgcccagggcaaggccgactaccgccaggtcctgggccacaccctggacgtgttcaagaggaagttccactactttgtcgactccattgctggtagagtctgcctctggcctgcccctcaccagaggggtgtctctctgtcagcaaggccagtacctggggacccaggtccccacgtgggaccagctyccagatctgggcttcaggcctccgtaggccaggkcagtgacacctcctggctgggttgaaagagcaggtgcattaacaccacacatggccaggaacacgtgcctctgacgcacagggctgctgccctgccgtgctgccaggacagtagaaaccaccgcctatagggaccctttcacactcagacccttgaccaygtgttgcggagccttttgctggggactgggagggagatgactcctgcactctgcttgcccgcaggcatggatgagttgatggaggtgtctttctcgcccctggcggccacaggcaagcccctctcacgctgtgggaagtgccaccgcttcatgaagtacatccaggccaagccaagccgcctgcactgctcccactgcgatgagacctacacgctcccccagaacggcaccatcaagctctacaaggagctccgctgccctctggatgacttcgagctggtcctgtggtcatcaggctctcggggcaagagctacccgctgtgcccctactgctacaaccacccacccttccgagacatgaagaaaggcagcagagggcaggtgggcacagtgggcgtgcctttacagggctcccttctcccgccaggcatgggctgcaacgagtgtacgcacccctcctgccagcactcgctgagcatgctgggcatcggccagtgcgtggaatgtgagagcggggtgctggtgctggaccccacctcgggccccaagtggaaggtggcctgcaacaagtgcaacgtggtagcgcactgcttcgagaacgcccaccgcgtgcgggtgtccgccgacacctgcagtgtctgtgaggccgccttgcttgatgtggacttcaacaaggccaagtccccactcccgggcgatgagacgcagcacatgggctgcgtcttttgtgaccccgtcttccaggagctggtggagctgaagcatgcggcctcctgccaccccatgcaccgcggtggaccagggagaaggcagggtcgagggcggggccgggccaggaggccccctgggaagcccaaccccagacggcccaaggacaagatgtcagccctggccgcctactttgtatga

SEQ ID NO: 3295 - DNA, 2484 bp, Homo sapiens
cagaagcggctggacccggaaataggggttgtcggtagccgccccgggaacaaggaccggagctggatccgcggtgcggctgtggctctttagggtgagatctgctgtaccagtctcacaggagtcagcattggtaatagtgctgtgctgcggaagagtggagtctaaactttttcattgccagtgccccgaamctggagtgtgaaggaccgagacaaratgaagactgtgctcatggttgctgaaaagccgtccttggcacagtcaattgccaaaatcctctctagagggagcctgtcctcacacaaagggctgaacggggcctgctcagtccacgagtacactgggacctttgctggccagccagtgcgcttcaagatgacgtctgtctgtggtcacgtgatgaccctggatttcctgggaaaatacaacaaatgggacaaagtggaccccgcagaactgttcagccaagctcccacggagaagaaagaagctaaccccaagctgaacatggtgaagttcctgcaggtggagggcagaggctgcgactayatcgtgctgtggctggactgcgacaaggagggggagaacatctgctttgaggttcttgatgctgttctgcccgtcatgaacaaggcccatggtggcgagaagaccgtgttccgggccaggtttagctccatcacggacacagacatctgtaatgccatggcctgcctaggcgagcctgaccacaacgaggcgctctcagtggatgctcgccaggagctggacctgcgaatcggctgtgcattcaccagctctctcatctcctttgggccgtgtcagactccaaccctgggattctgtgtggagagacatgataaaatccagtccttcaaaccagagacctactgggtgctgcaggccaaggttaacactgacaaagacagatctctccttttggactgggaccgagtaagagtgtttgaccgggagatcgcacagatgtttttaaacatgacaaagctggagaaggaagcccaggtggaggccacaagcaggaaagaaaaggccaagcagaggcccctggccctgaacactgtggagatgctgcgcatggggccgcagcaygccatgcagacggctgagcggctctacacgcaaggctacatcagctacccacggacagagaccacccactaccctgagaactttgacctgaagggctctctgcggcagcaggccaaccacccctactgggccracacggtgaagcggttgttagcagaaggtatcaaccgcccgcggaaaggccatgacgccggcgaccatccccccatcacccccatgaagtctgccacagaggccgaattaggtaccgctctcatcccatacccggtgtgcttccagggagggaagggcgagctgcgacaacacttcatcgccacggtcagccatgactgcaagtacctkcagagcaccatctccttcagaattgggcccgagctcttcacctgctccgggaagaccgtcctctcaccaggtcacaccacgggcccagccttcctcctctgtgccttcatgggcagacaaacattctacatcgtgtctggggatgggaggcccaggagcgtgcccctggaggagagcctgcccacttgccagcggggtgatgccttccctgtgggcgaggtgaagatgctggagaagcagacgaacccacccgactacctgacggaggccgagctcatcacgctcatggagaagcatggcatcggcacggatgccagcatccctgtgcatatcaacaacatctgccagcgcaactatgtcacggtggagagcgggcgccggctcaagcccaccaacctcggcatcgtcctggtgcacggctactataagattgatgcagagctggtgctccccaccatccgcagtgcagtggagaagcagctgaacctgatcgcccagggcaaggccgactaccgccaggtcctgggccacaccctggacgtgttcaagaggaagttccactactttgtcgactccattgctggcatggatgagttgatggaggtgtctttctcgcccctggcggccacaggcaagcccctctcacgctgtgggaagtgccaccgcttcatgaagtacatccaggccaagccaagccgcctgcactgctcccactgcgatgagacctacacgctcccccagaacggcaccatcaagctctacaaggagctccgctgccctctggatgacttcgagctggtcctgtggtcatcaggctctcggggcaagagctacccgctgtgcccctactgctacaaccacccacccttccgagacatgaagaaagaagtagcagaaggaagcagaggagggaaccagaggtggcagtgtgagaaaggctcaactggccattgctggcttcgaggctgtaggaaggggccacgagccaagccgcccacccaaagctgcagaagagaagcaagaggctgg

SEQ ID NO: 3296 - DNA, 2875 bp, Homo sapiens
gcacaccggacgcggggacgccagaagcggctggacccggaaataggggttgtcggtagccgccccgggaacaaggaccggagctggatccgcggtgcggctgtgggagtcagcattggtaatagtgctgtgctgcggaagagtggagtctaaactttttcattgccagtgccccgaamctggagtgtgaaggaccgagacaaratgaagactgtgctcatggttgctgaaaagccgtccttggcacagtcaattgccaaaatcctctctagagggagcctgtcctcacacaaagggctgaacggggcctgctcagtccacgagtacactgggacctttgctggccagccagtgcgcttcaagatgacgtctgtctgtggtcacgtgatgaccctggatttcctgggaaaatacaacaaatgggacaaagtggaccccgcagaactgttcagccaagctcccacggagaagaaagaagctaaccccaagctgaacatggtgaagttcctgcaggtggagggcagaggctgcgactayatcgtgctgtggctggactgcgacaaggagggggagaacatctgctttgaggttcttgatgctgttctgcccgtcatgaacaaggcccatggtggcgagaagaccgtgttccgggccaggtttagctccatcacggacacagacatctgtaatgccatggcctgcctaggcgagcctgaccacaacgaggcgctctcagtggatgctcgccaggagctggacctgcgaatcggctgtgcattcaccaggtttcagactaaatatttccaggggaaatacggtgatttagacagctctctcatctcctttgggccgtgtcagactccaaccctgggattctgtgtggagagacatgataaaatccagtccttcaaaccagagacctactgggtgctgcaggccaaggttaacactgacaaagacagatctctccttttggactgggaccgagtaagagtgtttgaccgggagatcgcacagatgtttttaaacatgacaaagctggagaaggaagcccaggtggaggccacaagcaggaaagaaaaggccaagcagaggcccctggccctgaacactgtggagatgctgcgtgtggccagctcttctctgggcatggggccgcagcaygccatgcagacggctgagcggctctacacgcaaggctacatcagctacccacggacagagaccacccactaccctgagaactttgacctgaagggctctctgcggcagcaggccaaccacccctactgggccracacggtgaagcggttgttagcagaaggtatcaaccgcccgcggaaaggccatgacgccggcgaccatccccccatcacccccatgaagtctgccacagaggccgaattagggggtgacgcgtggcggctctatgagtacatcaccagacacttcatcgccacggtcagccatgactgcaagtacctkcagagcaccatctccttcagaattgggcccgagctcttcacctgctccgggaagaccgtcctctcaccaggcttcacggaggtcatgccctggcagagcgtgcccctggaggagagcctgcccacttgccagcggggtgatgccttccctgtgggcgaggtgaagatgctggagaagcagacgaacccacccgactacctgacggaggccgagctcatcacgctcatggagaagcatggcatcggcacggatgccagcatccctgtgcatatcaacaacatctgccagcgcaactatgtcacggtggagagcgggcgccggctcaagcccaccaacctcggcatcgtcctggtgcacggctactataagattgatgcagagctggtgctccccaccatccgcagtgcagtggagaagcagctgaacctgatcgcccagggcaaggccgactaccgccaggtcctgggccacaccctggacgtgttcaagaggaagttccactactttgtcgactccattgctggcatggatgagttgatggaggtgtctttctcgcccctggcggccacaggcaagcccctctcacgctgtgggaagtgccaccgcttcatgaagtacatccaggccaagccaagccgcctgcactgctcccactgcgatgagacctacacgctcccccagaacggcaccatcaagctctacaaggagctccgctgccctctggatgacttcgagctggtcctgtggtcatcaggctctcggggcaagagctacccgctgtgcccctactgctacaaccacccacccttccgagacatgaagaaaggcatgggctgcaacgagtgtacgcacccctcctgccagcactcgctgagcatgctgggcatcggccagtgcgtggaatgtgagagcggggtgctggtgctggaccccacctcgggccccaagtggaaggtggcctgcaacaagtgcaacgtggtagcgcactgcttcgagaacgcccaccgcgtgcgggtgtccgccgacacctgcagtgtctgtgaggccgccttgcttgatgtggacttcaacaaggccaagtccccactcccgggcgatgagacgcagcacatgggctgcgtcttttgtgaccccgtcttccaggagctggtggagctgaagcatgcggcctcctgccaccccatgcaccgcggtggaccagggagaaggcagggtcgagggcggggccgggccaggaggccccctgggaagcccaaccccagacggcccaaggacaagatgtcagccctggccgcctactttgtatgatgaccctgtcctccctcacccaggctgcagtgccatgcagacacctcatggcacttcaaactattaaaatgcattttatctt

SEQ ID NO: 3297 - DNA, 2890 bp, Homo sapiens
cagaagcggctggacccggaaataggggttgtcggtagccgccccgggaacaaggaccggagctggatccgcggtgcggctgtggctctttagggtgagatctgctgtaccagtctcacaggagtcagcattggtaatagtgctgtgctgcggaagagtggagtctaaactttttcattgccagtgccccgaamctggagtgtgaaggaccgagacaaratgaagactgtgctcatggttgctgaaaagccgtccttggcacagtcaattgccaaaatcctctctagagggagcctgtcctcacacaaagggctgaacggggcctgctcagtccacgagtacactgggacctttgctggccagccagtgcgcttcaagatgacgtctgtctgtggtcacgtgatgaccctggatttcctgggaaaatacaacaaatgggacaaagtggaccccgcagaactgttcagccaagctcccacggagaagaaagaagctaaccccaagctgaacatggtgaagttcctgcaggtggagggcagaggctgcgactayatcgtgctgtggctggactgcgacaaggagggggagaacatctgctttgaggttcttgatgctgttctgcccgtcatgaacaaggcccatggtggcgagaagaccgtgttccgggccaggtttagctccatcacggacacagacatctgtaatgccatggcctgcctaggcgagcctgaccacaacgaggcgctctcagtggatgctcgccaggagctggacctgcgaatcggctgtgcattcaccaggtttcagactaaatatttccaggggaaatacggtgatttagacagctctctcatctcctttgggccgtgtcagactccaaccctgggattctgtgtggagagacatgataaaatccagtccttcaaaccagagacctactgggtgctgcaggccaaggttaacactgacaaagacagatctctccttttggactgggaccgagtaagagtgtttgaccgggagatcgcacagatgtttttaaacatgacaaagctggagaaggaagcccaggtggaggccacaagcaggaaagaaaaggccaagcagaggcccctggccctgaacactgtggagatgctgcgtgtggccagctcttctctgggcatggggccgcagcaygccatgcagacggctgagcggctctacacgcaaggctacatcagctacccacggacagagaccacccactaccctgagaactttgacctgaagggctctctgcggcagcaggccaaccacccctactgggccracacggtgaagcggttgttagcagaaggtatcaaccgcccgcggaaaggccatgacgccggcgaccatccccccatcacccccatgaagtctgccacagaggccgaattagggggtgacgcgtggcggctctatgagtacatcaccagacacttcatcgccacggtcagccatgactgcaagtacctkcagagcaccatctccttcagaattgggcccgagctcttcacctgctccgggaagaccgtcctctcaccaggcttcacggaggtcatgccctggcagagcgtgcccctggaggagagcctgcccacttgccagcggggtgatgccttccctgtgggcgaggtgaagatgctggagaagcagacgaacccacccgactacctgacggaggccgagctcatcacgctcatggagaagcatggcatcggcacggatgccagcatccctgtgcatatcaacaacatctgccagcgcaactatgtcacggtggagagcgggcgccggctcaagcccaccaacctcggcatcgtcctggtgcacggctactataagattgatgcagagctggtgctccccaccatccgcagtgcagtggagaagcagctgaacctgatcgcccagggcaaggccgactaccgccaggtcctgggccacaccctggacgtgttcaagaggaagttccactactttgtcgactccattgctggcatggatgagttgatggaggtgtctttctcgcccctggcggccacaggcaagcccctctcacgctgtgggaagtgccaccgcttcatgaagtacatccaggccaagccaagccgcctgcactgctcccactgcgatgagacctacacgctcccccagaacggcaccatcaagctctacaaggagctccgctgccctctggatgacttcgagctggtcctgtggtcatcaggctctcggggcaagagctacccgctgtgcccctactgctacaaccacccacccttccgagacatgaagaaaggcatgggctgcaacgagtgtacgcacccctcctgccagcactcgctgagcatgctgggcatcggccagtgcgtggaatgtgagagcggggtgctggtgctggaccccacctcgggccccaagtggaaggtggcctgcaacaagtgcaacgtggtagcgcactgcttcgagaacgcccaccgcgtgcgggtgtccgccgacacctgcagtgtctgtgaggccgccttgcttgatgtggacttcaacaaggccaagtccccactcccgggcgatgagacgcagcacatgggctgcgtcttttgtgaccccgtcttccaggagctggtggagctgaagcatgcggcctcctgccaccccatgcaccgcggtggaccagggagaaggcagggtcgagggcggggccgggccaggaggccccctgggaagcccaaccccagacggcccaaggacaagatgtcagccctggccgcctactttgtatgatgaccctgtcctccctcacccaggctgcagtgccatgcagacacctcatggcacttcaaactattaaaatgcattttatctt

SEQ ID NO: 3298 - DNA, 4301 bp, Homo sapiens
gacaatgctctttcctcccccaacaggctggcagagaagtaccgagagtgcctatctaacaaggagaagattctcaaggagattgaggtgaagaaggagtacctgagcagcctccagccccgcctcaacagcatcatgcaggcttcccttccggtgcaggagtacctgtttatgccattcgaccaggctcacaagcagtatgagacagccagacacctgccgcctcccctctatgtcctctttgttcaggccactgcgtatgggcaggcctgtgataagacrttatctgtggcaatcgaaggcagtgtggatgaagccaaggctctgttcaaacctccagaggactcccaagatgacgagagtgactcagatgccgaggaggagcagactacgaagcgccggagacccacactgggggttcagttggacgacaaacgcaaggagatgctgaagaggcacccactgtctgtcatgctcgacctgaagtgcaaagatgacagtgtgcttcacctgactttctactacctcatgaacctcaacatcatgacagtaaaagccaaagtgacaactgccatggagctgatcacccccatcagtgcaggtgacttgctgtctcctgactcagtcctgagttgcttgtatcctggggatcatggaaagaaaactccgaatccagccaatcagtatcagtttgataaagttggcatcctgactttgagcgactatgtacttgagctaggtcacccctatttgtgggtgcagaagctgggtggcctccacttccccaaagagcagccccagcaaacagtgattgctgaccactcgctgagcgccagccacatggagaccaccatgaaacttctgaagaccagggtgcagtcccgcctggccctccacaaacagtttgcatccctagaacatggcattgtgccagttaccagtgattgccagtacctcttccctgccaaggttgtctctcgcctggtgaaatggrtgacarttgcccatgaggattacatggagctgcacttcaccaaagacattgtggatgcgggactggctggggacaccaatctctactacatggcgctcatcgaaaggggcacagccaaactgcaggccgctgtggtgttgaaccctggctactcctccatcccacctrttttccagctctgtttgaactggaaaggggagaaaaccaacagcaacgatgacaacattcgggccatggagggcgaagtcaatgtgtgctacaaggagctgtgtggcccttggcccagccaccagctgttgaccaaccagctgcagcggctgtgtgtgctgctggatgtttacctggagaccgagagccatgacgacagtgtggaggggcccaaggaatttccccaggagaagatgtgtctgcggctcttcaggggtcctagcaggatgaagccatttaaatacaaccatcctcagggattcttcagccatcgctgatctcccgcgcagaccgttgtttcccccaaggcctcaccctgagcactgggcttctgctttctgctctggcccacatgtgactcttgatattytccaaagacaccagccaattaaaaagcgtcacctgaccagtggcctttgtctgtggttcctggcaaggtggctttgcagtctggaagggcaggtgggagctgtgacacagtgtgaaaaagcatttgtagagagactttttctcagcagccaataaaagcagagtggaaaaagattccaattctgcagagagatgctcacctcttgtctacgcacaccctatttgtgctttgcggggtgaggtcctcatgatcttgtatttattatcccaagttcctgctgttaagaggtggtaggagaagccaaaggcagcagagcacaaaaagcaaaactcttccctccccacccgctcttcccattagtcctgtcagggttgccgatggacaaattgtctctgatcgttggatgttataaatgtctgacagtgcagtgcaaacagaagacaaactcagttgatccttgaacaactcaggggttaggggcaccaacaccccctgccctgcacagttgaaaaatccgtgtataacttttgactccctaaaaacttaactaatagcctgctgttgaccagtagtatgctattagtagttacttactgctaacatagtcagtacatattttcagtatatattttgtatcttatacactgtattcttacaatacagtaaactagagaaaagaaaatgttataaggaaagtcacaagggggcctgagtgcagtggctcacgtctgtaatcccagcactttgggaggccaaggcgggtggatcacttgaggtcaggagtttgagaccagcctggccgacatggtgaaaccctgtctctactaaaaacatggaaattagccaagcgtggtggcgcatgcctgtagtcccagttactcaggaggctgaggcagaattacttgaacccatgaggcagaggttgcagtaagccaagatcacgctcctgcgctccggcttgggcgagagtgagactccgtctcaaaaataaataaataagaaagccataaggaagaaaatatatatctactattaagtagaagtggatcaccataaaggtcttcacatactgtctcagggttgaatagtctaaggaagaggaggggttggtcttggtgtctcagggatggcagaggcagaaaaagtgggggaggtggagggggaggcaggcaccactgttatttttattgaacaaaatctgtgcagggactcatgactgtaatcctagtactttggaaagctaaggcgggaggatcccttgaggccaggagttcaggtccagcctgggcaacgtagtgagagaccctgtatctacaaaaaatttaaaaatcagccaggtgtggtggtatgcaccaatagtcccagttactcagaaggctgaggtgggcggatgactggagtccaggagttcaaggtagcagtgagctattcatcgtgcctgtactgtactccagcctgggaaacaatgcgagtccctatctctaaaaaattttaaaaaaagaaatctgcatataatagacccacagagtccaaactattgttcagagatcaactgtacttcacagagagtaattctaagtcttacaggatttcatggagatggcgagagtggtgttggagaatcaatcacatacagagatacaggacagtgagaccaggtaacatttgaggagaatattttttttttattgagacagggtcttgctctgttgtccaggctggagtgcagtggcacgaacacagctcactgccgcctcaacctctcctgggttcaagtgatcctcctgcctcagcctccsaagtrgctgggaccacaggtgtgtgccaccatttctggctaatttttaaattttttgtagaggcgggatcccactatttttcccaggctggtctcaaactcctgggctcaaatgatcctcccacctcggcctcccaaagtgctaggattataggcatgagccaccacacccggcctgagtagagtctttaaggtaatgacaaaagtgcctcaaaatataattatttgattaagagaagtcttgggaagataggtaacaacctttaaaatgttcataaaattacatcctttgtaatactcctgcaagtcaaagtaaaggatggcatagactattcttggacagttttgtcaaaaagtgtatctkgaccccaccatcagtactccattcttcattttaaaaaataagatgggctgggcacagtggcttacgcctttaatatcagtactttgggaggctggtgggcggatcacctgagatcaggagttcaagaccagcctggccaacatggtgaaaccccgtctctactaaaaatacaaaaattagctgggcatggtggtgygcgcctgtaatcccagccactcgggaggctgaggcaggagaattgcttgaatccccgaggcggaggttgcactgagccgagatggtgccactgcaccatctggacaacagagcaagactccgtcttggaaaaaaaaaaaaagatgtagaaatgtaaaaatatttgagaattattacatagttgcagatatagtttgctaactccaagaggaaacacattttattttttgtgattgtcctgatgaaactttatccccccacaacatgctgttaagcttggttcccatcataagcatattccccctaagtggacttttactgattttccatggataatgcagacctccagtataaaagctattcctccaggtct

SEQ ID NO: 3299 - DNA, 6889 bp, Homo sapiens
ctggagaaaggggtctcgctatattgcccaggcaggtctcgaactcctgggctcaagctatcctcccacctcttgcctccctgagagttgggattacaggcgtgagccaccgcacccgctccctctttgttcacaaagtggatccccggaaggatgcccactccaccctgctgtccaagaaggaaaccagcaacctctataagatccagtttcacaatgtaaagcctgaatacctggatgcctacaacagcctcacggaggctgtgctgcccaagcttcacctggatgaggactacccatgctcactcgtgggcaactggaacacgtggtatggggagcaggaccaggcagtgcacctgtggcgattctcaggtggctacccagccctcatggactgcatgaacaagctcaaaaacaataaggagtacctggagttccgaagggagcggagccagatgctgctgtccaggagaaaccagctgctcctygagttcagcttctggaatgagccacagcccagaatgggtcccaacatctatgagctgaggacatacaagctcaagccaggaaccatgatcgagtgggggaacaactgggctcgggccatcaagtaccggcaggagaaccaggaggcagtgggcggcttcttctcacagataggagagctctacgtggtgcaccatctctgggcctataaagacctgcagtctcgggaggagactcgaaacgctgcctggaggaagagaggctgggatgaaaatgtctactatacagtccccctggtgcgacacatggagtctaggatcatgatccccttgaagatctcgcctctgcagtgatgctgcctacacctccacctccttccccttctccctcaggcaaccccgacagacagtggcactcctggtcctgctgtcttggttttgtcttggctctgggaggactctgaggggcagtgctcagttcagacaagggggaactgaaggctgacaagttctgaggattacagctctgcccaggccctttctactttccctgcctgcctccctccccctgctagaagtagtttctgatttccctgaatgaaagatagtgatcttttaggccttcatwtatcttctaaaattcctcatctcaaggccaccagtccccagttatcacccttggaaatcctctgtttagcttagttgcacaaaaggtagtatgtccagtggctagaggtggggtgggaagagaggaggccaggccaggccctcaggaattccctggtttccactgggccacccacttgctggacagtctgagccaagtccctcctgctggagaaaagcctggaactgccaaaacaaaaaaacaaatacaaacaaacctcgtcaccacggtcaggaggaggttcagacattctgcccagaggggctggggaaagggatgggagccaggaaagatttaggggcaggagacagacacgtaacaggaactcggaaggtagaacttagaattcagaacttgggtttcaattgtagaatttggaatctggaatacagaattgggaagaagaacagagatgacaaaagaccacttgaagagaggttcctaatactagacagatggagagtggcttggctgtttccccctgcatattggggttgaaaacttaaatgtgtagttccagtccttctawgcagagtctctcctgccctccctccttcctgcagtctcaccacgccaccacctccctcgggggcctccgcgctgagcttccggcctctacgcctcgcttccggtcggccgccccttccttacttccggttctctatggtgcgcgggcaagctttgctccgcctccggcagtggcttactcccggtgccaggttcttggagctgtgaggtgttcagcattatttaagatcacctatgcatcatctgaagccacagtcccaggtcatcttcatcaccttccccagtggaatgcctcctgtgttaaagcccacaacaacccctgtggaggaacaaccatgtcatcagaatcgagcaaaaaacggaagcccaaagtgatccgaagcgatggagccccagctgaaggaaagcggaatcgatctgacaccgagcaggaaggtaaatactacagtgaggaggccgaggtggatstgcgggaccctggcagagactatgagttatacaagtacacctgccaggagctacagaggctgatggctgagatccaagacctgaagagcaggggtggcaaggatgtggcaatagaaatagaagaacggaggatccagagctgtgtgcatttcatgactctaaagaagcttaaccgattagcccacatcaggttgaagaaaggaagagatcagacccacgaggctaagcagaaagtagatgcctatcatctgcagctccagaacctgttgtatgaggtgatgcacctacagaaggagatcaccaaatgtttggagtttaagtcaaagcatgaagaaattgatctggtcagtttagaggagttttataaggaggctccaccagatatcagcaaggccgaagtcaccatgggagaccctcaccagcaaacactggcacgtctggactgggagctggagcagcggaaaaggctggcagagaagtaccgagagtgcctatctaacaaggagaagattctcaaggagattgaggtgaagaaggagtacctgagcagcctccagccccgcctcaacagcatcatgcaggcttcccttccggtgcaggagtacctgtttatgccattcgaccaggctcacaagcagtatgagacagccagacacctgccgcctcccctctatgtcctctttgttcaggccactgcgtatgggcaggcctgtgataagacrttatctgtggcaatcgaaggcagtgtggatgaagccaaggctctgttcaaacctccagaggactcccaagatgacgagagtgactcagatgccgaggaggagcagactacgaagcgccggagacccacactgggggttcagttggacgacaaacgcaaggagatgctgaagaggcacccactgtctgtcatgctcgacctgaagtgcaaagatgacagtgtgcttcacctgactttctactacctcatgaacctcaacatcatgacagtaaaagccaaagtgacaactgccatggagctgatcacccccatcagtgcaggtgacttgctgtctcctgactcagtcctgagttgcttgtatcctggggatcatggaaagaaaactccgaatccagccaatcagtatcagtttgataaagttggcatcctgactttgagcgactatgtacttgagctaggtcacccctatttgtgggtgcagaagctgggtggcctccacttccccaaagagcagccccagcaaacagtgattgctgaccactcgctgagcgccagccacatggagaccaccatgaaacttctgaagaccagggtgcagtcccgcctggccctccacaaacagtttgcatccctagaacatggcattgtgccagttaccagtgattgccagtacctcttccctgccaaggttgtctctcgcctggtgaaatggrtgacarttgcccatgaggattacatggagctgcacttcaccaaagacattgtggatgcgggactggctggggacaccaatctctactacatggcgctcatcgaaaggggcacagccaaactgcaggccgctgtggtgttgaaccctggctactcctccatcccacctrttttccagctctgtttgaactggaaaggggagaaaaccaacagcaacgatgacaacattcgggccatggagggcgaagtcaatgtgtgctacaaggagctgtgtggcccttggcccagccaccagctgttgaccaaccagctgcagcggctgtgtgtgctgctggatgtttacctggagaccgagagccatgacgacagtgtggaggggcccaaggaatttccccaggagaagatgtgtctgcggctcttcaggggtcctagcaggatgaagccatttaaatacaaccatcctcagggattcttcagccatcgctgatctcccgcgcagaccgttgtttcccccaaggcctcaccctgagcactgggcttctgctttctgctctggcccacatgtgactcttgatattytccaaagacaccagccaattaaaaagcgtcacctgaccagtggcctttgtctgtggttcctggcaaggtggctttgcagtctggaagggcaggtgggagctgtgacacagtgtgaaaaagcatttgtagagagactttttctcagcagccaataaaagcagagtggaaaaagattccaattctgcagagagatgctcacctcttgtctacgcacaccctatttgtgctttgcggggtgaggtcctcatgatcttgtatttattatcccaagttcctgctgttaagaggtggtaggagaagccaaaggcagcagagcacaaaaagcaaaactcttccctccccacccgctcttcccattagtcctgtcagggttgccgatggacaaattgtctctgatcgttggatgttataaatgtctgacagtgcagtgcaaacagaagacaaactcagttgatccttgaacaactcaggggttaggggcaccaacaccccctgccctgcacagttgaaaaatccgtgtataacttttgactccctaaaaacttaactaatagcctgctgttgaccagtagtatgctattagtagttacttactgctaacatagtcagtacatattttcagtatatattttgtatcttatacactgtattcttacaatacagtaaactagagaaaagaaaatgttataaggaaagtcacaagggggcctgagtgcagtggctcacgtctgtaatcccagcactttgggaggccaaggcgggtggatcacttgaggtcaggagtttgagaccagcctggccgacatggtgaaaccctgtctctactaaaaacatggaaattagccaagcgtggtggcgcatgcctgtagtcccagttactcaggaggctgaggcagaattacttgaacccatgaggcagaggttgcagtaagccaagatcacgctcctgcgctccggcttgggcgagagtgagactccgtctcaaaaataaataaataagaaagccataaggaagaaaatatatatctactattaagtagaagtggatcaccataaaggtcttcacatactgtctcagggttgaatagtctaaggaagaggaggggttggtcttggtgtctcagggatggcagaggcagaaaaagtgggggaggtggagggggaggcaggcaccactgttatttttattgaacaaaatctgtgcagggactcatgactgtaatcctagtactttggaaagctaaggcgggaggatcccttgaggccaggagttcaggtccagcctgggcaacgtagtgagagaccctgtatctacaaaaaatttaaaaatcagccaggtgtggtggtatgcaccaatagtcccagttactcagaaggctgaggtgggcggatgactggagtccaggagttcaaggtagcagtgagctattcatcgtgcctgtactgtactccagcctgggaaacaatgcgagtccctatctctaaaaaattttaaaaaaagaaatctgcatataatagacccacagagtccaaactattgttcagagatcaactgtacttcacagagagtaattctaagtcttacaggatttcatggagatggcgagagtggtgttggagaatcaatcacatacagagatacaggacagtgagaccaggtaacatttgaggagaatattttttttttattgagacagggtcttgctctgttgtccaggctggagtgcagtggcacgaacacagctcactgccgcctcaacctctcctgggttcaagtgatcctcctgcctcagcctccsaagtrgctgggaccacaggtgtgtgccaccatttctggctaatttttaaattttttgtagaggcgggatcccactatttttcccaggctggtctcaaactcctgggctcaaatgatcctcccacctcggcctcccaaagtgctaggattataggcatgagccaccacacccggcctgagtagagtctttaaggtaatgacaaaagtgcctcaaaatataattatttgattaagagaagtcttgggaagataggtaacaacctttaaaatgttcataaaattacatcctttgtaatactcctgcaagtcaaagtaaaggatggcatagactattcttggacagttttgtcaaaaagtgtatctkgaccccaccatcagtactccattcttcattttaaaaaataagatgggctgggcacagtggcttacgcctttaatatcagtactttgggaggctggtgggcggatcacctgagatcaggagttcaagaccagcctggccaacatggtgaaaccccgtctctactaaaaatacaaaaattagctgggcatggtggtgygcgcctgtaatcccagccactcgggaggctgaggcaggagaattgcttgaatccccgaggcggaggttgcactgagccgagatggtgccactgcaccatctggacaacagagcaagactccgtcttggaaaaaaaaaaaaagatgtagaaatgtaaaaatatttgagaattattacatagttgcagatatagtttgctaactccaagaggaaacacattttattttttgtgattgtcctgatgaaactttatccccccacaacatgctgttaagcttggttcccatcataagcatattccccctaagtggacttttactgattttccatggataatgcagacctccagtataaaagctattcctccaggtct

SEQ ID NO: 3300 - DNA, 6879 bp, Homo sapiens
ctggagaaaggggtctcgctatattgcccaggcaggtctcgaactcctgggctcaagctatcctcccacctcttgcctccctgagagttgggattacaggcgtgagccaccgcacccgctccctctttgttcacaaagtggatccccggaaggatgcccactccaccctgctgtccaagaaggaaaccagcaacctctataagatccagtttcacaatgtaaagcctgaatacctggatgcctacaacagcctcacggaggctgtgctgcccaagcttcacctggatgaggactacccatgctcactcgtgggcaactggaacacgtggtatggggagcaggaccaggcagtgcacctgtggcgattctcaggtggctacccagccctcatggactgcatgaacaagctcaaaaacaataaggagtacctggagttccgaagggagcggagccagatgctgctgtccaggagaaaccagctgctcctygagttcagcttctggaatgagccacagcccagaatgggtcccaacatctatgagctgaggacatacaagctcaagccaggaaccatgatcgagtgggggaacaactgggctcgggccatcaagtaccggcaggagaaccaggaggcagtgggcggcttcttctcacagataggagagctctacgtggtgcaccatctctgggcctataaagacctgcagtctcgggaggagactcgaaacgctgcctggaggaagagaggctgggatgaaaatgtctactatacagtccccctggtgcgacacatggagtctaggatcatgatccccttgaagatctcgcctctgcagtgatgctgcctacacctccacctccttccccttctccctcaggcaaccccgacagacagtggcactcctggtcctgctgtcttggttttgtcttggctctgggaggactctgaggggcagtgctcagttcagacaagggggaactgaaggctgacaagttctgaggattacagctctgcccaggccctttctactttccctgcctgcctccctccccctgctagaagtagtttctgatttccctgaatgaaagatagtgatcttttaggccttcatwtatcttctaaaattcctcatctcaaggccaccagtccccagttatcacccttggaaatcctctgtttagcttagttgcacaaaaggtagtatgtccagtggctagaggtggggtgggaagagaggaggccaggccaggccctcaggaattccctggtttccactgggccacccacttgctggacagtctgagccaagtccctcctgctggagaaaagcctggaactgccaaaacaaaaaaacaaatacaaacaaacctcgtcaccacggtcaggaggaggttcagacattctgcccagaggggctggggaaagggatgggagccaggaaagatttaggggcaggagacagacacgtaacaggaactcggaaggtagaacttagaattcagaacttgggtttcaattgtagaatttggaatctggaatacagaattgggaagaagaacagagatgacaaaagaccacttgaagagaggttcctaatactagacagatggagagtggcttggctgtttccccctgcatattggggttgaaaacttaaatgtgtagttccagtccttctawgcagagtctctcctgccctccctccttcctgcagtctcaccacgccaccacctccctcgggggcctccgcgctgagcttccggcctctacgcctcgcttccggtcggccgccccttccttacttccggttctctatggtgcgcgggcaagctttgctccgcctccggcagtggcttactcccggtgccaggttcttggagctgtgaggtgttcagcattatttaagatcacctatgcatcatctgaagccacagtcccaggtcatcttcatcaccttccccagtggaatgcctcctgtgttaaagcccacaacaacccctgtgcatgtcatcagaatcgagcaaaaaacggaagcccaaagtgatccgaagcgatggagccccagctgaaggaaagcggaatcgatctgacaccgagcaggaaggtaaatactacagtgaggaggccgaggtggatstgcgggaccctggcagagactatgagttatacaagtacacctgccaggagctacagaggctgatggctgagatccaagacctgaagagcaggggtggcaaggatgtggcaatagaaatagaagaacggaggatccagagctgtgtgcatttcatgactctaaagaagcttaaccgattagcccacatcaggttgaagaaaggaagagatcagacccacgaggctaagcagaaagtagatgcctatcatctgcagctccagaacctgttgtatgaggtgatgcacctacagaaggagatcaccaaatgtttggagtttaagtcaaagcatgaagaaattgatctggtcagtttagaggagttttataaggaggctccaccagatatcagcaaggccgaagtcaccatgggagaccctcaccagcaaacactggcacgtctggactgggagctggagcagcggaaaaggctggcagagaagtaccgagagtgcctatctaacaaggagaagattctcaaggagattgaggtgaagaaggagtacctgagcagcctccagccccgcctcaacagcatcatgcaggcttcccttccggtgcaggagtacctgtttatgccattcgaccaggctcacaagcagtatgagacagccagacacctgccgcctcccctctatgtcctctttgttcaggccactgcgtatgggcaggcctgtgataagacrttatctgtggcaatcgaaggcagtgtggatgaagccaaggctctgttcaaacctccagaggactcccaagatgacgagagtgactcagatgccgaggaggagcagactacgaagcgccggagacccacactgggggttcagttggacgacaaacgcaaggagatgctgaagaggcacccactgtctgtcatgctcgacctgaagtgcaaagatgacagtgtgcttcacctgactttctactacctcatgaacctcaacatcatgacagtaaaagccaaagtgacaactgccatggagctgatcacccccatcagtgcaggtgacttgctgtctcctgactcagtcctgagttgcttgtatcctggggatcatggaaagaaaactccgaatccagccaatcagtatcagtttgataaagttggcatcctgactttgagcgactatgtacttgagctaggtcacccctatttgtgggtgcagaagctgggtggcctccacttccccaaagagcagccccagcaaacagtgattgctgaccactcgctgagcgccagccacatggagaccaccatgaaacttctgaagaccagggtgcagtcccgcctggccctccacaaacagtttgcatccctagaacatggcattgtgccagttaccagtgattgccagtacctcttccctgccaaggttgtctctcgcctggtgaaatggrtgacarttgcccatgaggattacatggagctgcacttcaccaaagacattgtggatgcgggactggctggggacaccaatctctactacatggcgctcatcgaaaggggcacagccaaactgcaggccgctgtggtgttgaaccctggctactcctccatcccacctrttttccagctctgtttgaactggaaaggggagaaaaccaacagcaacgatgacaacattcgggccatggagggcgaagtcaatgtgtgctacaaggagctgtgtggcccttggcccagccaccagctgttgaccaaccagctgcagcggctgtgtgtgctgctggatgtttacctggagaccgagagccatgacgacagtgtggaggggcccaaggaatttccccaggagaagatgtgtctgcggctcttcaggggtcctagcaggatgaagccatttaaatacaaccatcctcagggattcttcagccatcgctgatctcccgcgcagaccgttgtttcccccaaggcctcaccctgagcactgggcttctgctttctgctctggcccacatgtgactcttgatattytccaaagacaccagccaattaaaaagcgtcacctgaccagtggcctttgtctgtggttcctggcaaggtggctttgcagtctggaagggcaggtgggagctgtgacacagtgtgaaaaagcatttgtagagagactttttctcagcagccaataaaagcagagtggaaaaagattccaattctgcagagagatgctcacctcttgtctacgcacaccctatttgtgctttgcggggtgaggtcctcatgatcttgtatttattatcccaagttcctgctgttaagaggtggtaggagaagccaaaggcagcagagcacaaaaagcaaaactcttccctccccacccgctcttcccattagtcctgtcagggttgccgatggacaaattgtctctgatcgttggatgttataaatgtctgacagtgcagtgcaaacagaagacaaactcagttgatccttgaacaactcaggggttaggggcaccaacaccccctgccctgcacagttgaaaaatccgtgtataacttttgactccctaaaaacttaactaatagcctgctgttgaccagtagtatgctattagtagttacttactgctaacatagtcagtacatattttcagtatatattttgtatcttatacactgtattcttacaatacagtaaactagagaaaagaaaatgttataaggaaagtcacaagggggcctgagtgcagtggctcacgtctgtaatcccagcactttgggaggccaaggcgggtggatcacttgaggtcaggagtttgagaccagcctggccgacatggtgaaaccctgtctctactaaaaacatggaaattagccaagcgtggtggcgcatgcctgtagtcccagttactcaggaggctgaggcagaattacttgaacccatgaggcagaggttgcagtaagccaagatcacgctcctgcgctccggcttgggcgagagtgagactccgtctcaaaaataaataaataagaaagccataaggaagaaaatatatatctactattaagtagaagtggatcaccataaaggtcttcacatactgtctcagggttgaatagtctaaggaagaggaggggttggtcttggtgtctcagggatggcagaggcagaaaaagtgggggaggtggagggggaggcaggcaccactgttatttttattgaacaaaatctgtgcagggactcatgactgtaatcctagtactttggaaagctaaggcgggaggatcccttgaggccaggagttcaggtccagcctgggcaacgtagtgagagaccctgtatctacaaaaaatttaaaaatcagccaggtgtggtggtatgcaccaatagtcccagttactcagaaggctgaggtgggcggatgactggagtccaggagttcaaggtagcagtgagctattcatcgtgcctgtactgtactccagcctgggaaacaatgcgagtccctatctctaaaaaattttaaaaaaagaaatctgcatataatagacccacagagtccaaactattgttcagagatcaactgtacttcacagagagtaattctaagtcttacaggatttcatggagatggcgagagtggtgttggagaatcaatcacatacagagatacaggacagtgagaccaggtaacatttgaggagaatattttttttttattgagacagggtcttgctctgttgtccaggctggagtgcagtggcacgaacacagctcactgccgcctcaacctctcctgggttcaagtgatcctcctgcctcagcctccsaagtrgctgggaccacaggtgtgtgccaccatttctggctaatttttaaattttttgtagaggcgggatcccactatttttcccaggctggtctcaaactcctgggctcaaatgatcctcccacctcggcctcccaaagtgctaggattataggcatgagccaccacacccggcctgagtagagtctttaaggtaatgacaaaagtgcctcaaaatataattatttgattaagagaagtcttgggaagataggtaacaacctttaaaatgttcataaaattacatcctttgtaatactcctgcaagtcaaagtaaaggatggcatagactattcttggacagttttgtcaaaaagtgtatctkgaccccaccatcagtactccattcttcattttaaaaaataagatgggctgggcacagtggcttacgcctttaatatcagtactttgggaggctggtgggcggatcacctgagatcaggagttcaagaccagcctggccaacatggtgaaaccccgtctctactaaaaatacaaaaattagctgggcatggtggtgygcgcctgtaatcccagccactcgggaggctgaggcaggagaattgcttgaatccccgaggcggaggttgcactgagccgagatggtgccactgcaccatctggacaacagagcaagactccgtcttggaaaaaaaaaaaaagatgtagaaatgtaaaaatatttgagaattattacatagttgcagatatagtttgctaactccaagaggaaacacattttattttttgtgattgtcctgatgaaactttatccccccacaacatgctgttaagcttggttcccatcataagcatattccccctaagtggacttttactgattttccatggataatgcagacctccagtataaaagctattcctccaggtct

SEQ ID NO: 3301 - DNA, 2239 bp, Homo sapiens
ttccacgctcccattttaccgaggtggatcctgaggcccagagtgggcaaagggcttgccaaggtcgcagagcgcgcagaggattagaaccctgacttcygtccagcacctgcggagttggagacgcccacaggaaacgcccacctgaccgggtgagtgagggggcgggcgagccggaggggtggagtttattcgcgccccgcctccgccaccagggcttgggggcggggccttcctgcaacctttgcggctccaacatggctccgcggctgtgcagcatctctgtgacggcgcggcggctgctggggggcccggggcctcgcgctggggacgttgcgtctgcagctgcggcgcgtttctattccaaggacaatgaaggcagctggttccgctccctctttgttcacaaagtggatccccggaaggatgcccactccaccctgctgtccaagaaggaaaccagcaacctctataagatccagtttcacaatgtaaagcctgaatacctggatgcctacaacagcctcacggaggctgtgctgcccaagcttcacctggatgaggactacccatgctcactcgtgggcaactggaacacgtggtatggggagcaggaccaggcagtgcacctgtggcgattctcaggtggctacccagccctcatggactgcatgaacaagctcaaaaacaataaggagtacctggagttccgaagggagcggagccagatgctgctgtccaggagaaaccagctgctcctygagttcagcttctggaatgagccacagcccagaatgggtcccaacatctatgagctgaggacatacaagctcaagccaggaaccatgatcgagtgggggaacaactgggctcgggccatcaagtaccggcaggagaaccaggaggcagtgggcggcttcttctcacagataggagagctctacgtggtgcaccatctctgggcctataaagacctgcagtctcgggaggagactcgaaacgctgcctggaggaagagaggctgggatgaaaatgtctactatacagtccccctggtgcgacacatggagtctaggatcatgatccccttgaagatctcgcctctgcagtgatgctgcctacacctccacctccttccccttctccctcaggcaaccccgacagacagtggcactcctggtcctgctgtcttggttttgtcttggctctgggaggactctgaggggcagtgctcagttcagacaagggggaactgaaggctgacaagttctgaggattacagctctgcccaggccctttctactttccctgcctgcctccctccccctgctagaagtagtttctgatttccctgaatgaaagatagtgatcttttaggccttcatwtatcttctaaaattcctcatctcaaggccaccagtccccagttatcacccttggaaatcctctgtttagcttagttgcacaaaaggtagtatgtccagtggctagaggtggggtgggaagagaggaggccaggccaggccctcaggaattccctggtttccactgggccacccacttgctggacagtctgagccaagtccctcctgctggagaaaagcctggaactgccaaaacaaaaaaacaaatacaaacaaacctcgtcaccacggtcaggaggaggttcagacattctgcccagaggggctggggaaagggatgggagccaggaaagatttaggggcaggagacagacacgtaacaggaactcggaaggtagaacttagaattcagaacttgggtttcaattgtagaatttggaatctggaatacagaattgggaagaagaacagagatgacaaaagaccacttgaagagaggttcctaatactagacagatggagagtggcttggctgtttccccctgcatattggggttgaaaacttaaatgtgtagttccagtccttctawgcagagtctctcctgccctccctccttcctgcaggcaaatatacaagctagaccctgttccctcaccctgtatcctgtctcccctaattgacattctatcagcccaaccctcattctgcagggccacctggtgtgtggaggtggcgggaggggtcagtgactctgggggtctcctcagtgacccccatacctcatcatgaacccttgggtagcttgattctgcctaccatccaggaaaacttgtgctggaattgctgatggaaacaattaaatatttactataaa

SEQ ID NO: 3302 - DNA, 7195 bp, Homo sapiens
ttccacgctcccattttaccgaggtggatcctgaggcccagagtgggcaaagggcttgccaaggtcgcagagcgcgcagaggattagaaccctgacttcygtccagcacctgcggagttggagacgcccacaggaaacgcccacctgaccgggtgagtgagggggcgggcgagccggaggggtggagtttattcgcgccccgcctccgccaccagggcttgggggcggggccttcctgcaacctttgcggctccaacatggctccgcggctgtgcagcatctctgtgacggcgcggcggctgctggggggcccggggcctcgcgctggggacgttgcgtctgcagctgcggcgcgtttctattccaaggacaatgaaggcagctggttccgctccctctttgttcacaaagtggatccccggaaggatgcccactccaccctgctgtccaagaaggaaaccagcaacctctataagatccagtttcacaatgtaaagcctgaatacctggatgcctacaacagcctcacggaggctgtgctgcccaagcttcacctggatgaggactacccatgctcactcgtgggcaactggaacacgtggtatggggagcaggaccaggcagtgcacctgtggcgattctcaggtggctacccagccctcatggactgcatgaacaagctcaaaaacaataaggagtacctggagttccgaagggagcggagccagatgctgctgtccaggagaaaccagctgctcctygagttcagcttctggaatgagccacagcccagaatgggtcccaacatctatgagctgaggacatacaagctcaagccaggaaccatgatcgagtgggggaacaactgggctcgggccatcaagtaccggcaggagaaccaggaggcagtgggcggcttcttctcacagataggagagctctacgtggtgcaccatctctgggcctataaagacctgcagtctcgggaggagactcgaaacgctgcctggaggaagagaggctgggatgaaaatgtctactatacagtccccctggtgcgacacatggagtctaggatcatgatccccttgaagatctcgcctctgcagtgatgctgcctacacctccacctccttccccttctccctcaggcaaccccgacagacagtggcactcctggtcctgctgtcttggttttgtcttggctctgggaggactctgaggggcagtgctcagttcagacaagggggaactgaaggctgacaagttctgaggattacagctctgcccaggccctttctactttccctgcctgcctccctccccctgctagaagtagtttctgatttccctgaatgaaagatagtgatcttttaggccttcatwtatcttctaaaattcctcatctcaaggccaccagtccccagttatcacccttggaaatcctctgtttagcttagttgcacaaaaggtagtatgtccagtggctagaggtggggtgggaagagaggaggccaggccaggccctcaggaattccctggtttccactgggccacccacttgctggacagtctgagccaagtccctcctgctggagaaaagcctggaactgccaaaacaaaaaaacaaatacaaacaaacctcgtcaccacggtcaggaggaggttcagacattctgcccagaggggctggggaaagggatgggagccaggaaagatttaggggcaggagacagacacgtaacaggaactcggaaggtagaacttagaattcagaacttgggtttcaattgtagaatttggaatctggaatacagaattgggaagaagaacagagatgacaaaagaccacttgaagagaggttcctaatactagacagatggagagtggcttggctgtttccccctgcatattggggttgaaaacttaaatgtgtagttccagtccttctawgcagagtctctcctgccctccctccttcctgcagtctcaccacgccaccacctccctcgggggcctccgcgctgagcttccggcctctacgcctcgcttccggtcggccgccccttccttacttccggttctctatggtgcgcgggcaagctttgctccgcctccggcagtggcttactcccggtgccaggttcttggagctgtgaggtgttcagcattatttaagatcacctatgcatcatctgaagccacagtcccaggtcatcttcatcaccttccccagtggaatgcctcctgtgttaaagcccacaacaacccctgtggaggaacaaccatgtcatcagaatcgagcaaaaaacggaagcccaaagtgatccgaagcgatggagccccagctgaaggaaagcggaatcgatctgacaccgagcaggaaggtaaatactacagtgaggaggccgaggtggatstgcgggaccctggcagagactatgagttatacaagtacacctgccaggagctacagaggctgatggctgagatccaagacctgaagagcaggggtggcaaggatgtggcaatagaaatagaagaacggaggatccagagctgtgtgcatttcatgactctaaagaagcttaaccgattagcccacatcaggttgaagaaaggaagagatcagacccacgaggctaagcagaaagtagatgcctatcatctgcagctccagaacctgttgtatgaggtgatgcacctacagaaggagatcaccaaatgtttggagtttaagtcaaagcatgaagaaattgatctggtcagtttagaggagttttataaggaggctccaccagatatcagcaaggccgaagtcaccatgggagaccctcaccagcaaacactggcacgtctggactgggagctggagcagcggaaaaggctggcagagaagtaccgagagtgcctatctaacaaggagaagattctcaaggagattgaggtgaagaaggagtacctgagcagcctccagccccgcctcaacagcatcatgcaggcttcccttccggtgcaggagtacctgtttatgccattcgaccaggctcacaagcagtatgagacagccagacacctgccgcctcccctctatgtcctctttgttcaggccactgcgtatgggcaggcctgtgctcatatgaaatcctcccagccccctagacaggataagacrttatctgtggcaatcgaaggcagtgtggatgaagccaaggctctgttcaaacctccagaggactcccaagatgacgagagtgactcagatgccgaggaggagcagactacgaagcgccggagacccacactgggggttcagttggacgacaaacgcaaggagatgctgaagaggcacccactgtctgtcatgctcgacctgaagtgcaaagatgacagtgtgcttcacctgactttctactacctcatgaacctcaacatcatgacagtaaaagccaaagtgacaactgccatggagctgatcacccccatcagtgcaggtgacttgctgtctcctgactcagtcctgagttgcttgtatcctggggatcatggaaagaaaactccgaatccagccaatcagtatcagtttgataaagttggcatcctgactttgagcgactatgtacttgagctaggtcacccctatttgtgggtgcagaagctgggtggcctccacttccccaaagagcagccccagcaaacagtgattgctgaccactcgctgagcgccagccacatggagaccaccatgaaacttctgaagaccagggtgcagtcccgcctggccctccacaaacagtttgcatccctagaacatggcattgtgccagttaccagtgattgccagtacctcttccctgccaaggttgtctctcgcctggtgaaatggrtgacarttgcccatgaggattacatggagctgcacttcaccaaagacattgtggatgcgggactggctggggacaccaatctctactacatggcgctcatcgaaaggggcacagccaaactgcaggccgctgtggtgttgaaccctggctactcctccatcccacctrttttccagctctgtttgaactggaaaggggagaaaaccaacagcaacgatgacaacattcgggccatggagggcgaagtcaatgtgtgctacaaggagctgtgtggcccttggcccagccaccagctgttgaccaaccagctgcagcggctgtgtgtgctgctggatgtttacctggagaccgagagccatgacgacagtgtggaggggcccaaggaatttccccaggagaagatgtgtctgcggctcttcaggggtcctagcaggatgaagccatttaaatacaaccatcctcagggattcttcagccatcgctgatctcccgcgcagaccgttgtttcccccaaggcctcaccctgagcactgggcttctgctttctgctctggcccacatgtgactcttgatattytccaaagacaccagccaattaaaaagcgtcacctgaccagtggcctttgtctgtggttcctggcaaggtggctttgcagtctggaagggcaggtgggagctgtgacacagtgtgaaaaagcatttgtagagagactttttctcagcagccaataaaagcagagtggaaaaagattccaattctgcagagagatgctcacctcttgtctacgcacaccctatttgtgctttgcggggtgaggtcctcatgatcttgtatttattatcccaagttcctgctgttaagaggtggtaggagaagccaaaggcagcagagcacaaaaagcaaaactcttccctccccacccgctcttcccattagtcctgtcagggttgccgatggacaaattgtctctgatcgttggatgttataaatgtctgacagtgcagtgcaaacagaagacaaactcagttgatccttgaacaactcaggggttaggggcaccaacaccccctgccctgcacagttgaaaaatccgtgtataacttttgactccctaaaaacttaactaatagcctgctgttgaccagtagtatgctattagtagttacttactgctaacatagtcagtacatattttcagtatatattttgtatcttatacactgtattcttacaatacagtaaactagagaaaagaaaatgttataaggaaagtcacaagggggcctgagtgcagtggctcacgtctgtaatcccagcactttgggaggccaaggcgggtggatcacttgaggtcaggagtttgagaccagcctggccgacatggtgaaaccctgtctctactaaaaacatggaaattagccaagcgtggtggcgcatgcctgtagtcccagttactcaggaggctgaggcagaattacttgaacccatgaggcagaggttgcagtaagccaagatcacgctcctgcgctccggcttgggcgagagtgagactccgtctcaaaaataaataaataagaaagccataaggaagaaaatatatatctactattaagtagaagtggatcaccataaaggtcttcacatactgtctcagggttgaatagtctaaggaagaggaggggttggtcttggtgtctcagggatggcagaggcagaaaaagtgggggaggtggagggggaggcaggcaccactgttatttttattgaacaaaatctgtgcagggactcatgactgtaatcctagtactttggaaagctaaggcgggaggatcccttgaggccaggagttcaggtccagcctgggcaacgtagtgagagaccctgtatctacaaaaaatttaaaaatcagccaggtgtggtggtatgcaccaatagtcccagttactcagaaggctgaggtgggcggatgactggagtccaggagttcaaggtagcagtgagctattcatcgtgcctgtactgtactccagcctgggaaacaatgcgagtccctatctctaaaaaattttaaaaaaagaaatctgcatataatagacccacagagtccaaactattgttcagagatcaactgtacttcacagagagtaattctaagtcttacaggatttcatggagatggcgagagtggtgttggagaatcaatcacatacagagatacaggacagtgagaccaggtaacatttgaggagaatattttttttttattgagacagggtcttgctctgttgtccaggctggagtgcagtggcacgaacacagctcactgccgcctcaacctctcctgggttcaagtgatcctcctgcctcagcctccsaagtrgctgggaccacaggtgtgtgccaccatttctggctaatttttaaattttttgtagaggcgggatcccactatttttcccaggctggtctcaaactcctgggctcaaatgatcctcccacctcggcctcccaaagtgctaggattataggcatgagccaccacacccggcctgagtagagtctttaaggtaatgacaaaagtgcctcaaaatataattatttgattaagagaagtcttgggaagataggtaacaacctttaaaatgttcataaaattacatcctttgtaatactcctgcaagtcaaagtaaaggatggcatagactattcttggacagttttgtcaaaaagtgtatctkgaccccaccatcagtactccattcttcattttaaaaaataagatgggctgggcacagtggcttacgcctttaatatcagtactttgggaggctggtgggcggatcacctgagatcaggagttcaagaccagcctggccaacatggtgaaaccccgtctctactaaaaatacaaaaattagctgggcatggtggtgygcgcctgtaatcccagccactcgggaggctgaggcaggagaattgcttgaatccccgaggcggaggttgcactgagccgagatggtgccactgcaccatctggacaacagagcaagactccgtcttggaaaaaaaaaaaaagatgtagaaatgtaaaaatatttgagaattattacatagttgcagatatagtttgctaactccaagaggaaacacattttattttttgtgattgtcctgatgaaactttatccccccacaacatgctgttaagcttggttcccatcataagcatattccccctaagtggacttttactgattttccatggataatgcagacctccagtataaaagctattcctccaggtct

SEQ ID NO: 3303 - DNA, 5042 bp, Homo sapiens
ggactgaggtgctgatcgcccaaagggcgcccctgggctggggtctgacccggcttctcctccctcactacccgcggtccccggcctctcggcgytgcgctgttacctcatccgaaaagtgttcgctgcagcatcctcaggcttcacgttggagcctcttgattgtgcatgtcatcagaatcgagcaaaaaacggaagcccaaagtgatccgaagcgatggagccccagctgaaggaaagcggaatcgatctgacaccgagcaggaaggtaaatactacagtgaggaggccgaggtggatstgcgggaccctggcagagactatgagttatacaagtacacctgccaggagctacagaggctgatggctgagatccaagacctgaagagcaggggtggcaaggatgtggcaatagaaatagaagaacggaggatccagagctgtgtgcatttcatgactctaaagaagcttaaccgattagcccacatcaggttgaagaaaggaagagatcagacccacgaggctaagcagaaagtagatgcctatcatctgcagctccagaacctgttgtatgaggtgatgcacctacagaaggagatcaccaaatgtttggagtttaagtcaaagcatgaagaaattgatctggtcagtttagaggagttttataaggaggctccaccagatatcagcaaggccgaagtcaccatgggagaccctcaccagcaaacactggcacgtctggactgggagctggagcagcggaaaaggctggcagagaagtaccgagagtgcctatctaacaaggagaagattctcaaggagattgaggtgaagaaggagtacctgagcagcctccagccccgcctcaacagcatcatgcaggcttcccttccggtgcaggagtacctgtttatgccattcgaccaggctcacaagcagtatgagacagccagacacctgccgcctcccctctatgtcctctttgttcaggccactgcgtatgggcaggcctgtgataagacrttatctgtggcaatcgaaggcagtgtggatgaagccaaggctctgttcaaacctccagaggactcccaagatgacgagagtgactcagatgccgaggaggagcagactacgaagcgccggagacccacactgggggttcagttggacgacaaacgcaaggagatgctgaagaggcacccactgtctgtcatgctcgacctgaagtgcaaagatgacagtgtgcttcacctgactttctactacctcatgaacctcaacatcatgacagtaaaagccaaagtgacaactgccatggagctgatcacccccatcagtgcaggtgacttgctgtctcctgactcagtcctgagttgcttgtatcctggggatcatggaaagaaaactccgaatccagccaatcagtatcagtttgataaagttggcatcctgactttgagcgactatgtacttgagctaggtcacccctatttgtgggtgcagaagctgggtggcctccacttccccaaagagcagccccagcaaacagtgattgctgaccactcgctgagcgccagccacatggagaccaccatgaaacttctgaagaccagggtgcagtcccgcctggccctccacaaacagtttgcatccctagaacatggcattgtgccagttaccagtgattgccagtacctcttccctgccaaggttgtctctcgcctggtgaaatggrtgacarttgcccatgaggattacatggagctgcacttcaccaaagacattgtggatgcgggactggctggggacaccaatctctactacatggcgctcatcgaaaggggcacagccaaactgcaggccgctgtggtgttgaaccctggctactcctccatcccacctrttttccagctctgtttgaactggaaaggggagaaaaccaacagcaacgatgacaacattcgggccatggagggcgaagtcaatgtgtgctacaaggagctgtgtggcccttggcccagccaccagctgttgaccaaccagctgcagcggctgtgtgtgctgctggatgtttacctggagaccgagagccatgacgacagtgtggaggggcccaaggaatttccccaggagaagatgtgtctgcggctcttcaggggtcctagcaggatgaagccatttaaatacaaccatcctcagggattcttcagccatcgctgatctcccgcgcagaccgttgtttcccccaaggcctcaccctgagcactgggcttctgctttctgctctggcccacatgtgactcttgatattytccaaagacaccagccaattaaaaagcgtcacctgaccagtggcctttgtctgtggttcctggcaaggtggctttgcagtctggaagggcaggtgggagctgtgacacagtgtgaaaaagcatttgtagagagactttttctcagcagccaataaaagcagagtggaaaaagattccaattctgcagagagatgctcacctcttgtctacgcacaccctatttgtgctttgcggggtgaggtcctcatgatcttgtatttattatcccaagttcctgctgttaagaggtggtaggagaagccaaaggcagcagagcacaaaaagcaaaactcttccctccccacccgctcttcccattagtcctgtcagggttgccgatggacaaattgtctctgatcgttggatgttataaatgtctgacagtgcagtgcaaacagaagacaaactcagttgatccttgaacaactcaggggttaggggcaccaacaccccctgccctgcacagttgaaaaatccgtgtataacttttgactccctaaaaacttaactaatagcctgctgttgaccagtagtatgctattagtagttacttactgctaacatagtcagtacatattttcagtatatattttgtatcttatacactgtattcttacaatacagtaaactagagaaaagaaaatgttataaggaaagtcacaagggggcctgagtgcagtggctcacgtctgtaatcccagcactttgggaggccaaggcgggtggatcacttgaggtcaggagtttgagaccagcctggccgacatggtgaaaccctgtctctactaaaaacatggaaattagccaagcgtggtggcgcatgcctgtagtcccagttactcaggaggctgaggcagaattacttgaacccatgaggcagaggttgcagtaagccaagatcacgctcctgcgctccggcttgggcgagagtgagactccgtctcaaaaataaataaataagaaagccataaggaagaaaatatatatctactattaagtagaagtggatcaccataaaggtcttcacatactgtctcagggttgaatagtctaaggaagaggaggggttggtcttggtgtctcagggatggcagaggcagaaaaagtgggggaggtggagggggaggcaggcaccactgttatttttattgaacaaaatctgtgcagggactcatgactgtaatcctagtactttggaaagctaaggcgggaggatcccttgaggccaggagttcaggtccagcctgggcaacgtagtgagagaccctgtatctacaaaaaatttaaaaatcagccaggtgtggtggtatgcaccaatagtcccagttactcagaaggctgaggtgggcggatgactggagtccaggagttcaaggtagcagtgagctattcatcgtgcctgtactgtactccagcctgggaaacaatgcgagtccctatctctaaaaaattttaaaaaaagaaatctgcatataatagacccacagagtccaaactattgttcagagatcaactgtacttcacagagagtaattctaagtcttacaggatttcatggagatggcgagagtggtgttggagaatcaatcacatacagagatacaggacagtgagaccaggtaacatttgaggagaatattttttttttattgagacagggtcttgctctgttgtccaggctggagtgcagtggcacgaacacagctcactgccgcctcaacctctcctgggttcaagtgatcctcctgcctcagcctccsaagtrgctgggaccacaggtgtgtgccaccatttctggctaatttttaaattttttgtagaggcgggatcccactatttttcccaggctggtctcaaactcctgggctcaaatgatcctcccacctcggcctcccaaagtgctaggattataggcatgagccaccacacccggcctgagtagagtctttaaggtaatgacaaaagtgcctcaaaatataattatttgattaagagaagtcttgggaagataggtaacaacctttaaaatgttcataaaattacatcctttgtaatactcctgcaagtcaaagtaaaggatggcatagactattcttggacagttttgtcaaaaagtgtatctkgaccccaccatcagtactccattcttcattttaaaaaataagatgggctgggcacagtggcttacgcctttaatatcagtactttgggaggctggtgggcggatcacctgagatcaggagttcaagaccagcctggccaacatggtgaaaccccgtctctactaaaaatacaaaaattagctgggcatggtggtgygcgcctgtaatcccagccactcgggaggctgaggcaggagaattgcttgaatccccgaggcggaggttgcactgagccgagatggtgccactgcaccatctggacaacagagcaagactccgtcttggaaaaaaaaaaaaagatgtagaaatgtaaaaatatttgagaattattacatagttgcagatatagtttgctaactccaagaggaaacacattttattttttgtgattgtcctgatgaaactttatccccccacaacatgctgttaagcttggttcccatcataagcatattccccctaagtggacttttactgattttccatggataatgcagacctccagtataaaagctattcctccaggtct

SEQ ID NO: 3304 - DNA, 4950 bp, Homo sapiens
ctatggtgcgcgggcaagctttgctccgcctccggcagtggcttactcccggtgccaggttcttggagctgtgagcatgtcatcagaatcgagcaaaaaacggaagcccaaagtgatccgaagcgatggagccccagctgaaggaaagcggaatcgatctgacaccgagcaggaaggtaaatactacagtgaggaggccgaggtggatstgcgggaccctggcagagactatgagttatacaagtacacctgccaggagctacagaggctgatggctgagatccaagacctgaagagcaggggtggcaaggatgtggcaatagaaatagaagaacggaggatccagagctgtgtgcatttcatgactctaaagaagcttaaccgattagcccacatcaggttgaagaaaggaagagatcagacccacgaggctaagcagaaagtagatgcctatcatctgcagctccagaacctgttgtatgaggtgatgcacctacagaaggagatcaccaaatgtttggagtttaagtcaaagcatgaagaaattgatctggtcagtttagaggagttttataaggaggctccaccagatatcagcaaggccgaagtcaccatgggagaccctcaccagcaaacactggcacgtctggactgggagctggagcagcggaaaaggctggcagagaagtaccgagagtgcctatctaacaaggagaagattctcaaggagattgaggtgaagaaggagtacctgagcagcctccagccccgcctcaacagcatcatgcaggcttcccttccggtgcaggagtacctgtttatgccattcgaccaggctcacaagcagtatgagacagccagacacctgccgcctcccctctatgtcctctttgttcaggccactgcgtatgggcaggcctgtgataagacrttatctgtggcaatcgaaggcagtgtggatgaagccaaggctctgttcaaacctccagaggactcccaagatgacgagagtgactcagatgccgaggaggagcagactacgaagcgccggagacccacactgggggttcagttggacgacaaacgcaaggagatgctgaagaggcacccactgtctgtcatgctcgacctgaagtgcaaagatgacagtgtgcttcacctgactttctactacctcatgaacctcaacatcatgacagtaaaagccaaagtgacaactgccatggagctgatcacccccatcagtgcaggtgacttgctgtctcctgactcagtcctgagttgcttgtatcctggggatcatggaaagaaaactccgaatccagccaatcagtatcagtttgataaagttggcatcctgactttgagcgactatgtacttgagctaggtcacccctatttgtgggtgcagaagctgggtggcctccacttccccaaagagcagccccagcaaacagtgattgctgaccactcgctgagcgccagccacatggagaccaccatgaaacttctgaagaccagggtgcagtcccgcctggccctccacaaacagtttgcatccctagaacatggcattgtgccagttaccagtgattgccagtacctcttccctgccaaggttgtctctcgcctggtgaaatggrtgacarttgcccatgaggattacatggagctgcacttcaccaaagacattgtggatgcgggactggctggggacaccaatctctactacatggcgctcatcgaaaggggcacagccaaactgcaggccgctgtggtgttgaaccctggctactcctccatcccacctrttttccagctctgtttgaactggaaaggggagaaaaccaacagcaacgatgacaacattcgggccatggagggcgaagtcaatgtgtgctacaaggagctgtgtggcccttggcccagccaccagctgttgaccaaccagctgcagcggctgtgtgtgctgctggatgtttacctggagaccgagagccatgacgacagtgtggaggggcccaaggaatttccccaggagaagatgtgtctgcggctcttcaggggtcctagcaggatgaagccatttaaatacaaccatcctcagggattcttcagccatcgctgatctcccgcgcagaccgttgtttcccccaaggcctcaccctgagcactgggcttctgctttctgctctggcccacatgtgactcttgatattytccaaagacaccagccaattaaaaagcgtcacctgaccagtggcctttgtctgtggttcctggcaaggtggctttgcagtctggaagggcaggtgggagctgtgacacagtgtgaaaaagcatttgtagagagactttttctcagcagccaataaaagcagagtggaaaaagattccaattctgcagagagatgctcacctcttgtctacgcacaccctatttgtgctttgcggggtgaggtcctcatgatcttgtatttattatcccaagttcctgctgttaagaggtggtaggagaagccaaaggcagcagagcacaaaaagcaaaactcttccctccccacccgctcttcccattagtcctgtcagggttgccgatggacaaattgtctctgatcgttggatgttataaatgtctgacagtgcagtgcaaacagaagacaaactcagttgatccttgaacaactcaggggttaggggcaccaacaccccctgccctgcacagttgaaaaatccgtgtataacttttgactccctaaaaacttaactaatagcctgctgttgaccagtagtatgctattagtagttacttactgctaacatagtcagtacatattttcagtatatattttgtatcttatacactgtattcttacaatacagtaaactagagaaaagaaaatgttataaggaaagtcacaagggggcctgagtgcagtggctcacgtctgtaatcccagcactttgggaggccaaggcgggtggatcacttgaggtcaggagtttgagaccagcctggccgacatggtgaaaccctgtctctactaaaaacatggaaattagccaagcgtggtggcgcatgcctgtagtcccagttactcaggaggctgaggcagaattacttgaacccatgaggcagaggttgcagtaagccaagatcacgctcctgcgctccggcttgggcgagagtgagactccgtctcaaaaataaataaataagaaagccataaggaagaaaatatatatctactattaagtagaagtggatcaccataaaggtcttcacatactgtctcagggttgaatagtctaaggaagaggaggggttggtcttggtgtctcagggatggcagaggcagaaaaagtgggggaggtggagggggaggcaggcaccactgttatttttattgaacaaaatctgtgcagggactcatgactgtaatcctagtactttggaaagctaaggcgggaggatcccttgaggccaggagttcaggtccagcctgggcaacgtagtgagagaccctgtatctacaaaaaatttaaaaatcagccaggtgtggtggtatgcaccaatagtcccagttactcagaaggctgaggtgggcggatgactggagtccaggagttcaaggtagcagtgagctattcatcgtgcctgtactgtactccagcctgggaaacaatgcgagtccctatctctaaaaaattttaaaaaaagaaatctgcatataatagacccacagagtccaaactattgttcagagatcaactgtacttcacagagagtaattctaagtcttacaggatttcatggagatggcgagagtggtgttggagaatcaatcacatacagagatacaggacagtgagaccaggtaacatttgaggagaatattttttttttattgagacagggtcttgctctgttgtccaggctggagtgcagtggcacgaacacagctcactgccgcctcaacctctcctgggttcaagtgatcctcctgcctcagcctccsaagtrgctgggaccacaggtgtgtgccaccatttctggctaatttttaaattttttgtagaggcgggatcccactatttttcccaggctggtctcaaactcctgggctcaaatgatcctcccacctcggcctcccaaagtgctaggattataggcatgagccaccacacccggcctgagtagagtctttaaggtaatgacaaaagtgcctcaaaatataattatttgattaagagaagtcttgggaagataggtaacaacctttaaaatgttcataaaattacatcctttgtaatactcctgcaagtcaaagtaaaggatggcatagactattcttggacagttttgtcaaaaagtgtatctkgaccccaccatcagtactccattcttcattttaaaaaataagatgggctgggcacagtggcttacgcctttaatatcagtactttgggaggctggtgggcggatcacctgagatcaggagttcaagaccagcctggccaacatggtgaaaccccgtctctactaaaaatacaaaaattagctgggcatggtggtgygcgcctgtaatcccagccactcgggaggctgaggcaggagaattgcttgaatccccgaggcggaggttgcactgagccgagatggtgccactgcaccatctggacaacagagcaagactccgtcttggaaaaaaaaaaaaagatgtagaaatgtaaaaatatttgagaattattacatagttgcagatatagtttgctaactccaagaggaaacacattttattttttgtgattgtcctgatgaaactttatccccccacaacatgctgttaagcttggttcccatcataagcatattccccctaagtggacttttactgattttccatggataatgcagacctccagtataaaagctattcctccaggtct

SEQ ID NO: 3305 - DNA, 4188 bp, Homo sapiens
cgccggcgcctcgggcggcttctcgccgctcccaggtctggctggctggaggagtctcagctctcagccgctcgcccgcccccgctccgggccctcccctagtcgccgctgtggggcagcgcctggcgggcggcccgcgggcgggtcgcctcccctcctgtagcccacacccttcttaaagcggcggcgggaagatgaggcttcgggagccgctcctgagcggcagcgccgcgatgccaggcgcgtccctacagygggcctgccgcctgctcgtggccgtctgcgctctgcaccttggcgtcaccctcgtttactacctggctggccgcgacctgagccgcctgccccaactggtcggagtctccacaccgctgcagggcggstcgaacagtgccgccgccatcgggcagtcctccggggagctccggaccggaggggcccggccgccgcctcctctaggcgcctcctcccagccgcgcccgggtggcgactccagcccagtcgtggattctggccctggccccgctagcaacttgacctcggtcccagtgccccacaccaccgcactgtcgctgcccgcctgccctgaggagtccccgctgcttgtgggccccatgctgattgagtttaacatgcctgtggacctggagctcgtggcaaagcagaacccaaatgtgaagatgggcggccgctatgcccccagggactgcgtctctcctcacaargtggccatcatcattccattccgcaaccggcaggagcacctcaagtactggctatattatttgcayccagtcctgcagcgccagcagctggactatggcatctatgttatcaaccaggcgggagacactatattcaatcgtgctaagctcctcaatgttggctttcaagaagccttgaaggactatgactacacctgctttgtgtttagtgacgtggacctcatyccaatgaatgaycrtaatgcgtacaggtgtttttcacagccacggcacatttccgttgcaatggataagtttggattcagcctaccttatgttcagtattttggaggtgtctctgctctaagtaaacaacagtttctaaccatcaatggatttcctaataattattggggctggggaggagaagatgatgacatttttaacagattagtttttagaggcatgtctatatctcgcccaaatgctgtggtcgggaggtgtcgcatgatccgccactcaagagacaagaaaaatgaacccaatcctcagaggtttgaccgaattgcacacacaaaggagacaatgctctctgatggtttgaactcactcacctaccaggtgctggatgtacagagatacccattgtatacccaaatcacagtggacatcgggacaccgagctagcgttttggtacacggataagagacctgaaattagccagggacctctgctgtgtgtctctgccaatctgctgggctggtccctctcatttttaccagtctgagtgacaggtccccttcgctcatcattcaratggctttccagatgaccaggacgagtgggatattttgcccccaacttggctcggcatgtgaattcttagctctgcaaggtgtttatgcctttgcgggtttcttgatgtgttcgcagtgtcacccaagagtcagaactgtacacatcccaaaatttggtggccgtggaacacattcccggtgatagaattgcyaaattgtygtgaaataggttagaatttttctttaaattatggttttcttattcgtgaaaattcggagagtgctgctaaaattggattggtgtgatctttttggtagttgtaatttaacagaaaaacacaaaatttcaaccattcttaatgttacgtcctccccccacccccttctttcagtggtatgcaaccactgcaatcactgtgcatatgtcttttcttagcaaaaggattttaaaacttgagccctggaccttttgtcctatgtgtgtggattccagggcaactctagcatcagagcaaaagccttgggtttctcgcattcagtggcctatctccagattgtctgatttctgaatgtaaagttgttgtgtttttttttaaatagtagtttgtagtattttaaagaaagaacagatcgagttctaattatgatctagcttgattttgtgttgatccaaatttgcatagctgtttaatgttaagtcatgacaatttatttttcttggcatgctatgtaaacttgaatttcctatgtatttttattgtggtgttttaaatatggggaggggtattgagcattttttagggagaaaaataaatatatgctgtagtggccacaaataggcctatgatttagctggcaggccaggttttctcaagagcaaaatcaccctctggccccttggcaggtaaggcctcccggtcagcattatcctgccagacctcggggaggatacctgggagacagaagcctctgcacctactgtgcagaactctccacttccccaaccctccccaggtgggcagggcggagggagcctcagcctccttagactgacccctcaggcccctaggctggggggttgtaaataacagcagtcaggttgtttaccagccctttgcacctccccaggcagagggagcctctgttctggtgggggccacctccctcagaggctctgctagccacactccgtggcccaccctttgttaccagttcttcctccttcctcttttcccctgcctttctcattccttccttcgtctccctttttgttcctttgcctcttgcctgtcccctaaaacttgactgtggcactcagggtcaaacagactatccattccccagcatgaatgtgccttttaattagtgatctagaaagaagttcagccgaacccacaccccaactccctcccaagaacttcggtgcctaaagcctcctgttccacctcaggttttcacaggtgctcccaccccagttgaggctcccacccacagggctgtctgtcacaaacccacctctgttgggagctattgagccacctgggatgagatgacacaaggcactcctaccactgagcgcctttgccaggtccagcctgggctcaggttccaagactcagctgcctaatcccagggttgagccttgtgctcgtggcggaccccaaaccactgccctcctgggtaccagccctcagtgtggaggctgagctggtgcctggccccagtcttatctgtgcctttactgctttgcgcatctcagatgctaacttggttctttttccagaagcctttgtattggttaaaaattattttccattgcagaagcagctggactatgcaaaaagtatttctctgtcagttccccactctataccaaggatattattaaaactagaaatgactgcattgakagggagttgtgggaaataagaagaatgaaagcctctctttctgtccgcagatcctgacttttccaaagtgccttaaaagaaatcagacaaatgccctgagtggtaacttctgtgttattttactcttaaaaccaaactctaccttttcttgttgtttkttttttttttkggktaccttctcattcatgtcaagtatgtggttcattcttagaaccaagggaaatactgctccccccatttgctgacgtagtgctctcatgggctcacctgggcccaaggcacagccagggcacagttaggcctggatgtttgcctggtccgtgagatgccgcgggtcctgtttccttactggggatttcagggctgggggttcagggagcatttccttttcctgggagttatgaccgcgaagttgtcatgtgccgtgcccttttctgtttctgtgtatcctattgctggtgactctgtgtgaamtggcctttgggaaagatcagagagggcagaggtggcacaggacagtaaaggagatgctgtgctggccttcagcctggacagggtctctgctgactgccaggggcrggggctctgcatagccaggatgacggctttcatgtcccagagacctgttgtgctgtgtattttgatttcctgtgtatgcaaatgtgtgtatttaccattgtgtagggggctgtgtctgatcttggtgttcaaaacagaactgtatktttgcctttaaaattaaataatataacgtgaataaatgaccctatctttgt

SEQ ID NO: 3306 - DNA, 4344 bp, Homo sapiens
ccgcccgctgcccaccctcccgaggccccgcccagcgcgcccatcccgccacgggctgccccgccttcccgccctcgtccagaaaaccccgcgcccggccccgcccccgccttcgccggggccccgcccctcccctctccgccggcgcctcgggcggcttctcgccgctcccaggtctggctggctggaggagtctcagctctcagccgctcgcccgcccccgctccgggccctcccctagtcgccgctgtggggcagcgcctggcgggcggcccgcgggcgggtcgcctcccctcctgtagcccacacccttcttaaagcggcggcgggaagatgaggcttcgggagccgctcctgagcggcagcgccgcgatgccaggcgcgtccctacagygggcctgccgcctgctcgtggccgtctgcgctctgcaccttggcgtcaccctcgtttactacctggctggccgcgacctgagccgcctgccccaactggtcggagtctccacaccgctgcagggcggstcgaacagtgccgccgccatcgggcagtcctccggggagctccggaccggaggggcccggccgccgcctcctctaggcgcctcctcccagccgcgcccgggtggcgactccagcccagtcgtggattctggccctggccccgctagcaacttgacctcggtcccagtgccccacaccaccgcactgtcgctgcccgcctgccctgaggagtccccgctgcttgtgggccccatgctgattgagtttaacatgcctgtggacctggagctcgtggcaaagcagaacccaaatgtgaagatgggcggccgctatgcccccagggactgcgtctctcctcacaargtggccatcatcattccattccgcaaccggcaggagcacctcaagtactggctatattatttgcayccagtcctgcagcgccagcagctggactatggcatctatgttatcaaccaggcgggagacactatattcaatcgtgctaagctcctcaatgttggctttcaagaagccttgaaggactatgactacacctgctttgtgtttagtgacgtggacctcatyccaatgaatgaycrtaatgcgtacaggtgtttttcacagccacggcacatttccgttgcaatggataagtttggattcagcctaccttatgttcagtattttggaggtgtctctgctctaagtaaacaacagtttctaaccatcaatggatttcctaataattattggggctggggaggagaagatgatgacatttttaacagattagtttttagaggcatgtctatatctcgcccaaatgctgtggtcgggaggtgtcgcatgatccgccactcaagagacaagaaaaatgaacccaatcctcagaggtttgaccgaattgcacacacaaaggagacaatgctctctgatggtttgaactcactcacctaccaggtgctggatgtacagagatacccattgtatacccaaatcacagtggacatcgggacaccgagctagcgttttggtacacggataagagacctgaaattagccagggacctctgctgtgtgtctctgccaatctgctgggctggtccctctcatttttaccagtctgagtgacaggtccccttcgctcatcattcaratggctttccagatgaccaggacgagtgggatattttgcccccaacttggctcggcatgtgaattcttagctctgcaaggtgtttatgcctttgcgggtttcttgatgtgttcgcagtgtcacccaagagtcagaactgtacacatcccaaaatttggtggccgtggaacacattcccggtgatagaattgcyaaattgtygtgaaataggttagaatttttctttaaattatggttttcttattcgtgaaaattcggagagtgctgctaaaattggattggtgtgatctttttggtagttgtaatttaacagaaaaacacaaaatttcaaccattcttaatgttacgtcctccccccacccccttctttcagtggtatgcaaccactgcaatcactgtgcatatgtcttttcttagcaaaaggattttaaaacttgagccctggaccttttgtcctatgtgtgtggattccagggcaactctagcatcagagcaaaagccttgggtttctcgcattcagtggcctatctccagattgtctgatttctgaatgtaaagttgttgtgtttttttttaaatagtagtttgtagtattttaaagaaagaacagatcgagttctaattatgatctagcttgattttgtgttgatccaaatttgcatagctgtttaatgttaagtcatgacaatttatttttcttggcatgctatgtaaacttgaatttcctatgtatttttattgtggtgttttaaatatggggaggggtattgagcattttttagggagaaaaataaatatatgctgtagtggccacaaataggcctatgatttagctggcaggccaggttttctcaagagcaaaatcaccctctggccccttggcaggtaaggcctcccggtcagcattatcctgccagacctcggggaggatacctgggagacagaagcctctgcacctactgtgcagaactctccacttccccaaccctccccaggtgggcagggcggagggagcctcagcctccttagactgacccctcaggcccctaggctggggggttgtaaataacagcagtcaggttgtttaccagccctttgcacctccccaggcagagggagcctctgttctggtgggggccacctccctcagaggctctgctagccacactccgtggcccaccctttgttaccagttcttcctccttcctcttttcccctgcctttctcattccttccttcgtctccctttttgttcctttgcctcttgcctgtcccctaaaacttgactgtggcactcagggtcaaacagactatccattccccagcatgaatgtgccttttaattagtgatctagaaagaagttcagccgaacccacaccccaactccctcccaagaacttcggtgcctaaagcctcctgttccacctcaggttttcacaggtgctcccaccccagttgaggctcccacccacagggctgtctgtcacaaacccacctctgttgggagctattgagccacctgggatgagatgacacaaggcactcctaccactgagcgcctttgccaggtccagcctgggctcaggttccaagactcagctgcctaatcccagggttgagccttgtgctcgtggcggaccccaaaccactgccctcctgggtaccagccctcagtgtggaggctgagctggtgcctggccccagtcttatctgtgcctttactgctttgcgcatctcagatgctaacttggttctttttccagaagcctttgtattggttaaaaattattttccattgcagaagcagctggactatgcaaaaagtatttctctgtcagttccccactctataccaaggatattattaaaactagaaatgactgcattgakagggagttgtgggaaataagaagaatgaaagcctctctttctgtccgcagatcctgacttttccaaagtgccttaaaagaaatcagacaaatgccctgagtggtaacttctgtgttattttactcttaaaaccaaactctaccttttcttgttgtttktttttgtttttttttttttttttkggktaccttctcattcatgtcaagtatgtggttcattcttagaaccaagggaaatactgctccccccatttgctgacgtagtgctctcatgggctcacctgggcccaaggcacagccagggcacagttaggcctggatgtttgcctggtccgtgagatgccgcgggtcctgtttccttactggggatttcagggctgggggttcagggagcatttccttttcctgggagttatgaccgcgaagttgtcatgtgccgtgcccttttctgtttctgtgtatcctattgctggtgactctgtgtgaamtggcctttgggaaagatcagagagggcagaggtggcacaggacagtaaaggagatgctgtgctggccttcagcctggacagggtctctgctgactgccaggggcrggggctctgcatagccaggatgacggctttcatgtcccagagacctgttgtgctgtgtattttgatttcctgtgtatgcaaatgtgtgtatttaccattgtgtagggggctgtgtctgatcttggtgttcaaaacagaactgtatktttgcctttaaaattaaataatataacgtgaataaatgaccctatctttgtaact

SEQ ID NO: 3307 - DNA, 4563 bp, Homo sapiens
ggagagagcaccccttcttctcccgtgagaaggggagagagcaccccttcttctcccgtgagaaggggagagagcaccccttcttctcccgtgagaaggggagagagcaccccttcttctcccgtgagaaggggagagagcaccccttcttctcccgtgagaaggggagagagcaccccttcttctcccgtgagaaggggagagagcaccccttctcagccgcccgctgcccaccctcccgaggccccgcccagcgcgcccatcccgccacgggctgccccgccttcccgccctcgtccagaaaaccccgcgcccggccccgcccccgccttcgccggggccccgcccctcccctctccgccggcgcctcgggcggcttctcgccgctcccaggtctggctggctggaggagtctcagctctcagccgctcgcccgcccccgctccgggccctcccctagtcgccgctgtggggcagcgcctggcgggcggcccgcgggcgggtcgcctcccctcctgtagcccacacccttcttaaagcggcggcgggaagatgaggcttcgggagccgctcctgagcggcagcgccgcgatgccaggcgcgtccctacagygggcctgccgcctgctcgtggccgtctgcgctctgcaccttggcgtcaccctcgtttactacctggctggccgcgacctgagccgcctgccccaactggtcggagtctccacaccgctgcagggcggstcgaacagtgccgccgccatcgggcagtcctccggggagctccggaccggaggggcccggccgccgcctcctctaggcgcctcctcccagccgcgcccgggtggcgactccagcccagtcgtggattctggccctggccccgctagcaacttgacctcggtcccagtgccccacaccaccgcactgtcgctgcccgcctgccctgaggagtccccgctgcttgtgggccccatgctgattgagtttaacatgcctgtggacctggagctcgtggcaaagcagaacccaaatgtgaagatgggcggccgctatgcccccagggactgcgtctctcctcacaargtggccatcatcattccattccgcaaccggcaggagcacctcaagtactggctatattatttgcayccagtcctgcagcgccagcagctggactatggcatctatgttatcaaccaggcgggagacactatattcaatcgtgctaagctcctcaatgttggctttcaagaagccttgaaggactatgactacacctgctttgtgtttagtgacgtggacctcatyccaatgaatgaycrtaatgcgtacaggtgtttttcacagccacggcacatttccgttgcaatggataagtttggattcagcctaccttatgttcagtattttggaggtgtctctgctctaagtaaacaacagtttctaaccatcaatggatttcctaataattattggggctggggaggagaagatgatgacatttttaacagattagtttttagaggcatgtctatatctcgcccaaatgctgtggtcgggaggtgtcgcatgatccgccactcaagagacaagaaaaatgaacccaatcctcagaggtttgaccgaattgcacacacaaaggagacaatgctctctgatggtttgaactcactcacctaccaggtgctggatgtacagagatacccattgtatacccaaatcacagtggacatcgggacaccgagctagcgttttggtacacggataagagacctgaaattagccagggacctctgctgtgtgtctctgccaatctgctgggctggtccctctcatttttaccagtctgagtgacaggtccccttcgctcatcattcaratggctttccagatgaccaggacgagtgggatattttgcccccaacttggctcggcatgtgaattcttagctctgcaaggtgtttatgcctttgcgggtttcttgatgtgttcgcagtgtcacccaagagtcagaactgtacacatcccaaaatttggtggccgtggaacacattcccggtgatagaattgcyaaattgtygtgaaataggttagaatttttctttaaattatggttttcttattcgtgaaaattcggagagtgctgctaaaattggattggtgtgatctttttggtagttgtaatttaacagaaaaacacaaaatttcaaccattcttaatgttacgtcctccccccacccccttctttcagtggtatgcaaccactgcaatcactgtgcatatgtcttttcttagcaaaaggattttaaaacttgagccctggaccttttgtcctatgtgtgtggattccagggcaactctagcatcagagcaaaagccttgggtttctcgcattcagtggcctatctccagattgtctgatttctgaatgtaaagttgttgtgtttttttttaaatagtagtttgtagtattttaaagaaagaacagatcgagttctaattatgatctagcttgattttgtgttgatccaaatttgcatagctgtttaatgttaagtcatgacaatttatttttcttggcatgctatgtaaacttgaatttcctatgtatttttattgtggtgttttaaatatggggaggggtattgagcattttttagggagaaaaataaatatatgctgtagtggccacaaataggcctatgatttagctggcaggccaggttttctcaagagcaaaatcaccctctggccccttggcaggtaaggcctcccggtcagcattatcctgccagacctcggggaggatacctgggagacagaagcctctgcacctactgtgcagaactctccacttccccaaccctccccaggtgggcagggcggagggagcctcagcctccttagactgacccctcaggcccctaggctggggggttgtaaataacagcagtcaggttgtttaccagccctttgcacctccccaggcagagggagcctctgttctggtgggggccacctccctcagaggctctgctagccacactccgtggcccaccctttgttaccagttcttcctccttcctcttttcccctgcctttctcattccttccttcgtctccctttttgttcctttgcctcttgcctgtcccctaaaacttgactgtggcactcagggtcaaacagactatccattccccagcatgaatgtgccttttaattagtgatctagaaagaagttcagccgaacccacaccccaactccctcccaagaacttcggtgcctaaagcctcctgttccacctcaggttttcacaggtgctcccaccccagttgaggctcccacccacagggctgtctgtcacaaacccacctctgttgggagctattgagccacctgggatgagatgacacaaggcactcctaccactgagcgcctttgccaggtccagcctgggctcaggttccaagactcagctgcctaatcccagggttgagccttgtgctcgtggcggaccccaaaccactgccctcctgggtaccagccctcagtgtggaggctgagctggtgcctggccccagtcttatctgtgcctttactgctttgcgcatctcagatgctaacttggttctttttccagaagcctttgtattggttaaaaattattttccattgcagaagcagctggactatgcaaaaagtatttctctgtcagttccccactctataccaaggatattattaaaactagaaatgactgcattgakagggagttgtgggaaataagaagaatgaaagcctctctttctgtccgcagatcctgacttttccaaagtgccttaaaagaaatcagacaaatgccctgagtggtaacttctgtgttattttactcttaaaaccaaactctaccttttcttgttgtttktttttgtttttttttttttttttkggktaccttctcattcatgtcaagtatgtggttcattcttagaaccaagggaaatactgctccccccatttgctgacgtagtgctctcatgggctcacctgggcccaaggcacagccagggcacagttaggcctggatgtttgcctggtccgtgagatgccgcgggtcctgtttccttactggggatttcagggctgggggttcagggagcatttccttttcctgggagttatgaccgcgaagttgtcatgtgccgtgcccttttctgtttctgtgtatcctattgctggtgactctgtgtgaamtggcctttgggaaagatcagagagggcagaggtggcacaggacagtaaaggagatgctgtgctggccttcagcctggacagggtctctgctgactgccaggggcrggggctctgcatagccaggatgacggctttcatgtcccagagacctgttgtgctgtgtattttgatttcctgtgtatgcaaatgtgtgtatttaccattgtgtagggggctgtgtctgatcttggtgttcaaaacagaactgtatktttgcctttaaaattaaataatataacgtgaataaatgaccctatctttgtaact

SEQ ID NO: 3308 - DNA, 3822 bp, Homo sapiens
gagccacaactttgcgcgagtgtcttggttgagcgcagcgcccattcattgcccgcgagcgtccatccatctgtccggccgactgtccagcgaaaggggctccaggccgggcgcagccgccacccgggggaccgaggccaggagaggggccaagagcgcggctgacccttgcgggccggggcaggggacggtggccgcggccatgcagtcctgtgccagggcgtgggggctgcgcctgggccgcggggtcgggggcggccgccgcctggctgggggatcggggccgtgctgggcgccgcggagccgggacagcagcagtggcggcggggacagcgccgcggctggggcctcgcgcctcctggagcgccttctgcccagacacgacgacttcgctcggaggcacatcggccctggggacaaagaccagagagagatgctgcagaccttggggctggcgagcattgatgaattgatcgagaagacggtccctgccaacatccgtttgaaaagacccttgaaaatggaagaccctgtttgtgaaaatgaaatccttgcaactctgcatgccatttcaagcaaaaaccagatctggagatcgtatattggcatgggctattataactgctcagtgccacagacrattttgcggaacttactggagaactcaggatggatcacccagtatactccataccagcctgargtgtctcaggggaggctggagagtttactcaactaccagaccatggtgtgtgacatcacaggcctggacatggccaatgcatccctgctggatgaggggactgcagccgcagaggcactgcagctgtgctacagacacaacaagaggaggaaatttctygttgayccccgttgccayccacagacaatagctgttgtccagactcgagccaaatatactggagtcctcactgagctgaagttaccctgtgaaatggacttcagtggaaaagatgtcagtggagtgttgttccagtacccagacacggaggggaaggtggaagactttacggaactcgtggagagagctcatcagagtgggagcctggcctgctgtgctactgaccttttagctttgtgcatcttgaggccacctggagaatttggggtagacatcgccctgggcagctcccagagatttggagtgccactgggctatgggggamcccatgcagcattttttgctgtccgagaaagcttggtgagaatgatgcctggaagaatggtgggggtaacaagagatgccactgggaaagaagtgtatcgtcttgctcttcaaaccagggagcaacacattcggagagacaaggctaccagcaacatctgtacagctcaggccctcttggcgaatatggctgccatgtttgcaatctaccatggttcccatgggctggagcatattgctaggagggtacataatgccactttgattttgtcagaaggtctcaagcgagcagggcatcaactccagcatgacctgttctttgataccttgaagattcagtgtggctgctcagtgaaggaggtcttgggcagggccgctcagcggcagatcaattttcggctttttgaggatggcacacttggtatttctcttgatgaaacagtcaatgaaaaagatctggacgatttgttgtggatctttggttgtgagtcatctgcagaactggttgctgaaagcatgggagaggagtgcagaggtattccagggtctgtgttcaagaggaccagcccgttcctcacccatcaagtgttcaacagctaccactctgaaacaaacattgtccggtacatgaagaaactggaaaataaagacatttcccttgttcacagcatgattccactgggatcctgcaccatgaaactgaacagttcgtctgaactcgcacctatcacatggaaagaatttgcaaacatccacccctttgtgcctctggatcaagctcaaggatatcagcagcttttccgagagcttgagaaggatttgtgtgaactcacaggttatgaccaggtctgtttccagccaaacagcggagcccagggagaatatgctggactggccactatccgagcctacttaaaccagaaaggagaggggcacagaacggtttgcctcattccgaaatcagcacatgggaccaacccagcaagtgcccacatggcaggcatgaagattcagcctgtggaggtggataaatatgggaatatcgatgcagttcacctcaaggccatggtggataagcacaaggagaacctagcagctatcatgattacatacccatccaccaatggggtgtttgaagagaacatcagtgacgtgtgtgacctcatccatcaacatggaggacaggtctacctagacggggcaaatatgaatgctcaggtgggaatctgtcgccctggagacttcgggtctgatgtctcgcacctaaatcttcacaagaccttctgcattccccacggaggaggtggtcctggcatggggcccatcggagtgaagaaacatctcgccccgtttttgcccaatcatcccgtcatttcactaaagcggaatgaggatgcctgtcctgtgggaaccgtcagtgcggccccatggggctccagttccatcttgcccatttcctgggcttatatcaagatgatgggaggcaagggtcttaaacaagccacggaaactgcgatattaaatgccaactacatggccaagcgattagaaacacactacagaattcttttcaggggtgcaagaggcaagttatgtgggtcatgaatttattttggacacgagacccttcaaaaagtctgcaaatattgaggctgtggatgtggccaagagactccaggattatggatttcacgcccctaccatgtcctggcctgtggcagggaccctcatggtggagcccactgagtcggaggacaaggcagagctggacagattctgtgatgccatgatcagcattcggcaggaaattgctgacattgaggagggccgcatcgaccccagggtcaatccgctgaagatgtctccacactccctgacctgcgttacatcttcccactgggaccggccttattccagagaggtggcagcattcccactccccttcgtgaaaccagagaacaaattctggccaacgattgcccggattgatgacatatatggagatcagcacctggtttgtacctgcccacccatggaagtttatgagtctccattttctgaacaaaagagggcgtcttcttagtcctctstccctaagtttaaaggactgatttgatgcctctccccagagcatttgataagcaagaaagatttcatctcccaccccagcctcaagtaggagttttatatactgtgtatatctctgtaatctctgtcaaggtaaatgtaaatacagtagctggagggagtcgaagctgatggttggaagacggatttgctttggtattctgcttccacatgtgccagttgcctggattgggagccattttgtgttttgcgtagaaagttttaggaactttaacttttaatgtggcaagtttgcagatgtcatagaggctatcctggagacttaatagacatttttttgttccaaaagagtccatgtggactgtgccatctgtgggaaatcccagggcaaatgtttacattttgtataccctgaagaactctttttcctctaatatgcctaatctgtaatcacatttctgagtgttytcctctttttctgtgtgaggtttttttttttttaatctgcatttattagtattctaataaaagcatyttgatcggaagaa

SEQ ID NO: 3309 - DNA, 3818 bp, Homo sapiens
gagccacaactttgcgcgagtgtcttggttgagcgcagcgcccattcattgcccgcgagcgtccatccatctgtccggccgactgtccagcgaaaggggctccaggccgggcgcagccgccacccgggggaccgaggccaggagaggggccaagagcgcggctgacccttgcgggccggggcaggggacggtggccgcggccatgcagtcctgtgccagggcgtgggggctgcgcctgggccgcggggtcgggggcggccgccgcctggctgggggatcggggccgtgctgggcgccgcggagccgggacagcagcagtggcggcggggacagcgccgcggctggggcctcgcgcctcctggagcgccttctgcccagacacgacgacttcgctcggaggcacatcggccctggggacaaagaccagagagagatgctgcagaccttggggctggcgagcattgatgaattgatcgagaagacggtccctgccaacatccgtttgaaaagacccttgaaaatggaagaccctgtttgtgaaaatgaaatccttgcaactctgcatgccatttcaagcaaaaaccagatctggagatcgtatattggcatgggctattataactgctcagtgccacagacrattttgcggaacttactggagaactcaggatggatcacccagtatactccataccagcctgargtgtctcaggggaggctggagagtttactcaactaccagaccatggtgtgtgacatcacaggcctggacatggccaatgcatccctgctggatgaggggactgcagccgcagaggcactgcagctgtgctacagacacaacaagaggaggaaatttctygttgayccccgttgccayccacagacaatagctgttgtccagactcgagccaaatatactggagtcctcactgagctgaagttaccctgtgaaatggacttcagtggaaaagatgtcagtggagtgttgttccagtacccagacacggaggggaaggtggaagactttacggaactcgtggagagagctcatcagagtgggagcctggcctgctgtgctactgaccttttagctttgtgcatcttgaggccacctggagaatttggggtagacatcgccctgggcagctcccagagatttggagtgccactgggctatgggggamcccatgcagcattttttgctgtccgagaaagcttggtgagaatgatgcctggaagaatggtgggggtaacaagagatgccactgggaaagaagtgtatcgtcttgctcttcaaaccagggagcaacacattcggagagacaaggctaccagcaacatctgtacagctcaggccctcttggcgaatatggctgccatgtttgcaatctaccatggttcccatgggctggagcatattgctaggagggtacataatgccactttgattttgtcagaaggtctcaagcgagcagggcatcaactccagcatgacctgttctttgataccttgaagattcagtgtggctgctcagtgaaggaggtcttgggcagggccgctcagcggcagatcaattttcggctttttgaggatggcacacttggtatttctcttgatgaaacagtcaatgaaaaagatctggacgatttgttgtggatctttggttgtgagtcatctgcagaactggttgctgaaagcatgggagaggagtgcagaggtattccagggtctgtgttcaagaggaccagcccgttcctcacccatcaagtgttcaacagctaccactctgaaacaaacattgtccggtacatgaagaaactggaaaataaagacatttcccttgttcacagcatgattccactgggatcctgcaccatgaaactgaacagttcgtctgaactcgcacctatcacatggaaagaatttgcaaacatccacccctttgtgcctctggatcaagctcaaggatatcagcagcttttccgagagcttgagaaggatttgtgtgaactcacaggttatgaccaggtctgtttccagccaaacagcggagcccagggagaatatgctggactggccactatccgagcctacttaaaccagaaaggagaggggcacagaacggtttgcctcattccgaaatcagcacatgggaccaacccagcaagtgcccacatggcaggcatgaagattcagcctgtggaggtggataaatatgggaatatcgatgcagttcacctcaaggccatggtggataagcacaaggagaacctagcagctatcatgattacatacccatccaccaatggggtgtttgaagagaacatcagtgacgtgtgtgacctcatccatcaacatggaggacaggtctacctagacggggcaaatatgaatgctcaggtgggaatctgtcgccctggagacttcgggtctgatgtctcgcacctaaatcttcacaagaccttctgcattccccacggaggaggtggtcctggcatggggcccatcggagtgaagaaacatctcgccccgtttttgcccaatcatcccgtcatttcactaaagcggaatgaggatgcctgtcctgtgggaaccgtcagtgcggccccatggggctccagttccatcttgcccatttcctgggcttatatcaagatgatgggaggcaagggtcttaaacaagccacggaaactgcgatattaaatgccaactacatggccaagcgattagaaacacactacagaattcttttcaggggtgcaagaggttatgtgggtcatgaatttattttggacacgagacccttcaaaaagtctgcaaatattgaggctgtggatgtggccaagagactccaggattatggatttcacgcccctaccatgtcctggcctgtggcagggaccctcatggtggagcccactgagtcggaggacaaggcagagctggacagattctgtgatgccatgatcagcattcggcaggaaattgctgacattgaggagggccgcatcgaccccagggtcaatccgctgaagatgtctccacactccctgacctgcgttacatcttcccactgggaccggccttattccagagaggtggcagcattcccactccccttcgtgaaaccagagaacaaattctggccaacgattgcccggattgatgacatatatggagatcagcacctggtttgtacctgcccacccatggaagtttatgagtctccattttctgaacaaaagagggcgtcttcttagtcctctstccctaagtttaaaggactgatttgatgcctctccccagagcatttgataagcaagaaagatttcatctcccaccccagcctcaagtaggagttttatatactgtgtatatctctgtaatctctgtcaaggtaaatgtaaatacagtagctggagggagtcgaagctgatggttggaagacggatttgctttggtattctgcttccacatgtgccagttgcctggattgggagccattttgtgttttgcgtagaaagttttaggaactttaacttttaatgtggcaagtttgcagatgtcatagaggctatcctggagacttaatagacatttttttgttccaaaagagtccatgtggactgtgccatctgtgggaaatcccagggcaaatgtttacattttgtataccctgaagaactctttttcctctaatatgcctaatctgtaatcacatttctgagtgttytcctctttttctgtgtgaggtttttttttttttaatctgcatttattagtattctaataaaagcatyttgatcggaagaa

SEQ ID NO: 3310 - DNA, 2504 bp, Homo sapiens
acacactcttttacgttatttataaaagagtctcactcaatgraagctggatttcctctcctgtaaaatgagaaattggcgtgttagccaaggctttcattgaccaagggaaactcatcccagatgatgtcatgactcggctggcccttcatgagctgaaaaatctcacccagtatagctggctgttggatggttttccaaggacacttccacaggcagaagccctagatagagcttatcagatcgacacagtgattaacctgaatgtgccctttgaggtcattaaacaacgccttactgctcgctggattcatcccgccagtggccgagtctataacattgaattcaaccctcccaaaactgtgggcattgatgacctgactggggagcctctcattcagcgtgaggatgataaaccagagacggttatcaagagactaaaggcttatgaagaccaaacaaagccagtcctggaatattaccagaaaaaaggggtgctggaaacattctccggaacagaaaccaacaagatttggccctatgtatatgctttcctacaaactaaagttccacaaagaagccagaaagcttcagttactccatgaggagaaatgtgtgtaactattaatagtaagatgggcaaacctcctagtccttgcatttagaagctgcttttcctaagacttctagtatgtatgamttctttgaaaattatattacttttatttctactgattttattttggatactaaggatgtgccaaatgattcggatactaagatgcatcgtttgaaatcatctagtgtgttgtatgcagttatcctcaaaaacatcagcgatgtctgaacctttaaaacatctgttagagcaaaattaaaagagcatttggtagtaatctaactttttgttcagttaataagtggttgataaagtttccatatttttctggaaaagttaaaaaaagttacatgtcatttggagaaaatacgtaatcagaaatttgtgcatagattgatgccaaaaaagacatttccagcattgtggaacatggtgagacactatataaaattccagaaagaaagcaactggatttacagatttattgtgagacacaaattcactgctgcctttacactaagaaatgtatatgttaaccatatatgctgtatttattttgtcgttaagcatactttcagtttactcagaattttcaatttgctataaagatgtatcaattagcatatagaaaaatattactttaagatgacttgtttcctttgaaaatacctgtgtactgagggttatgatttktgtcaaaaattgacataagtgctyttacaagcaccaaagttgaatgaattttcaacaaaatgtaattaaagtctatgttttcagttatgactcaggttaagaaatgtgttttaggatctacttgctggtttttctttttgatccaaatgtgtgatctgccctgataaataacaagttatagtaccatctcccccgccaataaaaaagagaagaaaaaagagaaacccgtggcactatgtaaataaagtaagcatactttgttgttagtaaatagatgaggcatgcctgggaaatgctcccttggcataaatagcaatcaatyataattagtaaacaggtgtaccaataaaaagaatttacatgataggttaacaaggaccaggaaagtgagtttcctgaaggagttctttgttcctgatcaaagaaattgatacctgttagcattcactgccaccatattttaaggagaaagaactctattggtgtcgtctgagcagccatttaaaaattggaatctaaaggatggttgctgatgtactgtgtggyctggtagaagtggggaaatatgagagatggaggaaaaacttgattatgtcttccatggcatatttactcttactttacttcgtgccaaatcaaatgaaacaagccgtcttacaagtcgttattgcctttaaaaatctgttccgtttttttcccaggtacttaaaatacaagtgccagtaagtgrttcttatgtgttttggggggaaaattttatttcccttttcttctgatatttaaaaaattcatcgatctttcaagatgaaccaaggttttttaaaagaawtataggaaacacttcattctttataaaactttctataatgccttatttgaatgttaatcttatgtgctttctraaaaatgttgtgaaataccaaacttatggattatcactaggttatcaagcatatattagtctttatcagaataaaatgaaatttcataactgtggctattactttgttcttggtccttcacagggcctgctccatcccacctkcctttytgctgcctgatgtctcaatggcttctgaatgactgttctaataaatgatcttaaaacagtccataggctggtttcagtttatgcaatacttcatctcctgctatggtagccataccggccttcataatacccttaggggat

SEQ ID NO: 3311 - DNA, 1193 bp, Homo sapiens
gtcgggggcggggggtgcgccggggtagccgagaggcggacgcaacagcggggtcccgcgctgtctgggcggccccaggggctgtcggctcacttccgggaacgccggggaaccgcagtagccgcctgctagtggcgctgctagccggccggcgcaggctgccgagcgggtgagcgcgcaggccaggccaaagccctggtacccgcgcggtgcgggcctcagtctgcggccatgggggcgtccgcgcggctgctgcgagcggtgatcatgggggccccgggctcgggcaagggcaccgtgtcgtcgcgcatcactacacacttcgagctgaagcacctctccagcggggacctgctccgggacaacatgctgcggggcacagaaattggcgtgttagccaaggctttcattgaccaagggaaactcatcccagatgatgtcatgactcggctggcccttcatgagctgaaaaatctcacccagtatagctggctgttggatggttttccaaggacacttccacaggcagaagccctagatagagcttatcagatcgacacagtgattaacctgaatgtgccctttgaggtcattaaacaacgccttactgctcgctggattcatcccgccagtggccgagtctataacattgaattcaaccctcccaaaactgtgggcattgatgacctgactggggagcctctcattcagcgtgaggatgataaaccagagacggttatcaagagactaaaggcttatgaagaccaaacaaagccagtcctggaatattaccagaaaaaaggggtgctggaaacattctccggaacagaaaccaacaagatttggccctatgtatatgctttcctacaaactaaagttccacaaagaagccagaaagcttcagttactccatgaggagaaatacagggcctcactctgttgcccagactagagtgcagtggcataattgggtcactgtaacgttgaactcctgggctcaygcaattcttctacctcagcctcccaagtrgctgaaactacaggcttsttacatcatggttgcaggatggctgctacagctctggacatcacatcaaaatatggcagaagctaaagcaggaagacagagaaggaggcaaaacagctttattcacttgtggctctcatatgaagaataaagmtatttctcgaaa

SEQ ID NO: 3312 - DNA, 2814 bp, Homo sapiens
gtcgggggcggggggtgcgccggggtagccgagaggcggacgcaacagcggggtcccgcgctgtctgggcggccccaggggctgtcggctcacttccgggaacgccggggaaccgcagtagccgcctgctagtggcgctgctagccggccggcgcaggctgccgagcgggtgagcgcgcaggccaggccaaagccctggtacccgcgcggtgcgggcctcagtctgcggccatgggggcgtccgcgcggctgctgcgagcggtgatcatgggggccccgggctcgggcaagggcaccgtgtcgtcgcgcatcactacacacttcgagctgaagcacctctccagcggggacctgctccgggacaacatgctgcggggcacagaaattggcgtgttagccaaggctttcattgaccaagggaaactcatcccagatgatgtcatgactcggctggcccttcatgagctgaaaaatctcacccagtatagctggctgttggatggttttccaaggacacttccacaggcagaagccctagatagagcttatcagatcgacacagtgattaacctgaatgtgccctttgaggtcattaaacaacgccttactgctcgctggattcatcccgccagtggccgagtctataacattgaattcaaccctcccaaaactgtgggcattgatgacctgactggggagcctctcattcagcgtgaggatgataaaccagagacggttatcaagagactaaaggcttatgaagaccaaacaaagccagtcctggaatattaccagaaaaaaggggtgctggaaacattctccggaacagaaaccaacaagatttggccctatgtatatgctttcctacaaactaaagttccacaaagaagccagaaagcttcagttactccatgaggagaaatgtgtgtaactattaatagtaagatgggcaaacctcctagtccttgcatttagaagctgcttttcctaagacttctagtatgtatgamttctttgaaaattatattacttttatttctactgattttattttggatactaaggatgtgccaaatgattcggatactaagatgcatcgtttgaaatcatctagtgtgttgtatgcagttatcctcaaaaacatcagcgatgtctgaacctttaaaacatctgttagagcaaaattaaaagagcatttggtagtaatctaactttttgttcagttaataagtggttgataaagtttccatatttttctggaaaagttaaaaaaagttacatgtcatttggagaaaatacgtaatcagaaatttgtgcatagattgatgccaaaaaagacatttccagcattgtggaacatggtgagacactatataaaattccagaaagaaagcaactggatttacagatttattgtgagacacaaattcactgctgcctttacactaagaaatgtatatgttaaccatatatgctgtatttattttgtcgttaagcatactttcagtttactcagaattttcaatttgctataaagatgtatcaattagcatatagaaaaatattactttaagatgacttgtttcctttgaaaatacctgtgtactgagggttatgatttktgtcaaaaattgacataagtgctyttacaagcaccaaagttgaatgaattttcaacaaaatgtaattaaagtctatgttttcagttatgactcaggttaagaaatgtgttttaggatctacttgctggtttttctttttgatccaaatgtgtgatctgccctgataaataacaagttatagtaccatctcccccgccaataaaaaagagaagaaaaaagagaaacccgtggcactatgtaaataaagtaagcatactttgttgttagtaaatagatgaggcatgcctgggaaatgctcccttggcataaatagcaatcaatyataattagtaaacaggtgtaccaataaaaagaatttacatgataggttaacaaggaccaggaaagtgagtttcctgaaggagttctttgttcctgatcaaagaaattgatacctgttagcattcactgccaccatattttaaggagaaagaactctattggtgtcgtctgagcagccatttaaaaattggaatctaaaggatggttgctgatgtactgtgtggyctggtagaagtggggaaatatgagagatggaggaaaaacttgattatgtcttccatggcatatttactcttactttacttcgtgccaaatcaaatgaaacaagccgtcttacaagtcgttattgcctttaaaaatctgttccgtttttttcccaggtacttaaaatacaagtgccagtaagtgrttcttatgtgttttggggggaaaattttatttcccttttcttctgatatttaaaaaattcatcgatctttcaagatgaaccaaggttttttaaaagaawtataggaaacacttcattctttataaaactttctataatgccttatttgaatgttaatcttatgtgctttctraaaaatgttgtgaaataccaaacttatggattatcactaggttatcaagcatatattagtctttatcagaataaaatgaaatttcataactgtggctattactttgttcttggtccttcacagggcctgctccatcccacctkcctttytgctgcctgatgtctcaatggcttctgaatgactgttctaataaatgatcttaaaacagtccataggctggtttcagtttatgcaatacttcatctcctgctatggtagccataccggccttcataatacccttaggggat

SEQ ID NO: 3313 - DNA, 4794 bp, Homo sapiens
  misc_feature (1)...(4794): n = A,T,C or G
gtgtcgttatttgtgcamcaacattgaaaaacaagcagaaataaaacattgacggaacggatacgaccgcagattgcgggagctgtcctctcaatcrgcccggcagcggcggcccacaatttacgcgtgtgcaaccctaaccccggcccaagcttgacctacaatttgcgcaggcgcagatcctaactttggcgtccctgtgggcggcctttggtgtgagacgcgtggtattctgggaacgtcggagacggaagttacttcgtctttagctcctggcgctgctggyttctgggcggtttttgtcttttgatttcaagagttaggagctcgagaaccgtktggcaatatgtacgacgcggatgaggatatgcaatatgatgaggatgatgatgaaatcaccccggatttgtggcaagaagcatgctggattgtaatcagttcctattttgacgagaaaggcttggttagacaacagctggattcttttgatgagtttattcagatgtctgttcaaagaattgtggaagacgctcctcctatagacctacaggctgaagctcagcatgctagtggagaagttgaagaaccgccacgatatttgctgaagtttgaacaaatttatctttccaagcctacccattgggaaagagatggtgctccttcaccaatgatgcccaatgaagctagattaaggaatctcacgtattctgctccgctttatgttgatataacaaaaacagtcattaaagaaggtgaagaacaacttcagactcagcatcagaaaacttttataggaaaaattccaattatgttgcggtcaacttactgccttttgaatggcttgacagatcgtgatctttgtgagttaaatgaatgccctttggatcctggtggctatttcattattaatggatcagaaaaggttctgattgcccaagagaaaatggcaacaaacacagtttatgtgtttgccaaaaaggattctaaatatgcctacacaggagagtgtagatcatgtcttgagaattcttcccgacccaccagtactatatgggttagcatgctggcaagaggaggacagggtgccaagaagagtgctattggtcagcgcattgtggcaactctaccatatatcaagcaagaagttcccatcattattgtgttcagagcattaggttttgtgtccgacagagatattttagaacatattatttatgattttgaagatccagagatgatggaaatggttaaaccttctctcgatgaagcttttgtcatccaagaacagaatgttgcactaaatttcattggttcaagaggagcaaagcctggtgttactaaagagaaaagaattaaatatgcaaaggaagttttacaaaaagaaatgctccctcatgttggtgtcagtgatttttgtgagaccaaaaaagcctatttcttgggatacatggttcataggttacttctggcagctttgggtagaagagaactagatgacagagatcactatggaaacaagagattggatcttgctgggccgctgcttgcattcttatttagaggtatgtttaagaatttgcttaaagaagtgcggatctatgcacagaaatttattgatcgaggaaaggattttaacttggagttggcaattaaaacacggatcatatctgatggcctaaaatactctttagctactggaaactggggtgatcaaaagaaagctcatcaagccagagctggagtatctcaggtgttaaaccgcctgacttttgcgtctactctttctcacctgcgtcgtttaaattctcctattggtagagacggcaagctagcaaaaccaagacagttgcataatacgttgtggggaatggtgtgtcctgccgagaccccagagggccatgctgtaggacttgtgaagaatttagccttgatggcrtatatttcagttggatctcaaccatctccaattctggaatttttagaagaatggagtatggaaaatttagaagaaatttctcctgcagctattgctgatgcaaccaagatttttgttaatggctgctgggttggaatacataaagatcccgaacaacttatgaacaccctaaggaaaytgagacgtcagatggacatcattgtgtctgaagtttctatgatcagagatattcgagagagggagattcggatctatacrgatgcaggccgtatttgtagaccacttctgattgtggaaaaacaaaagctacttttgaagaagaggcatattgaccaattgaaagagagagaatataacaactatagttggcaggatcttgtggccagtggggtagtggagtatattgataccctggaagaagaaacagtgatgcttgcaatgactccagatgatttacaggagaaagaagtagcttattgttccacatatacacactgtgagattcatccctcaatgatccttggtgtctgtgcatctattattccctttcctgatcataaccagtcccctagaaacacataccagtctgctatgggtaagcaggctatgggagtttacatcaccaacttccatgttcgcatggacacattggcccatgttctctattatcctcaaaagccacttgtgactacacggtctatggaatatctacgatttagagagctgccagcaggcatcaactcaattgtggccattgcatcatacactggatataatcaggaagactctgttatcatgaatcgttcagctgtagaccgyggcttcttcaggtctgttttctatcgctcatacaaagaacaggagtctaaaaaaggatttgatcaagaagaagtttttgagaagcctacacgtgaaacatgccagggcatgaggcatgccatttacgacaagctggatgatgatggtttgatagctccaggggttcgtgtatcaggagatgatgttattataggcaaaacagtcaccttgcctgaaaatgaagatgaattggagagcaccaatagacgctataccaagagagactgtagcacttttctcagaactagngagacgggcattgtggatcaggttatggtaactctcaatcaggaaggatataaattttgtaaaataagggtacgctctgttaggattccacagattggagacaaatttgctagtcgacatggtcaaaagggtacttgtggtattcagtatagacaagaggatatgcctttcacctgtgaaggtatcacccctgatatcatcatcaatccccatgccatcccctctcgtatgactattggtcacttaattgaatgccttcaagggaaggtatcggctaacaagggtgaaattggtgatgccactccatttaatgatgctgttaacgtgcagaagatttctaatcttttatctgattatggctatcatctcagaggaaatgaggtcctgtacaatgggttcactggtcgaaaaatcacatcacaaatatttattggccccacttattaccagcgtttgaagcatatggtggatgataagattcactctcgtgctaggggacctattcagatcctcaatagacagcccatggagggtagatctcgtgatggtggcctgcgttttggagaaatggaacgagattgtcagattgcccatggagcagcccagtttttaagggaaagattgtttgaggcatcagatccatatcaggttcatgtttgcaatctttgtggaataatggcgattgccaacaccaggacccatacatatgaatgcaggggctgccgcaataaaacccagatttctttggtgcgaatgccttacgcatgcaaactattgtttcagraacttatgtctatgagtattgcaccgcgaatgatgagtgtttagctattttacaggagtcaacaagataattaaatatcttggtgtcttgtttctattgtgtggctttttaaaaatgacaaatatgtactgtgttgtgataaaaagtattttatttgtttaatgatatgcatgcttttcttctgtaaatatataataaatttttgtagatagtcttgatgtgtgatctttattttgtatttctctgtgtaaaaccagtgaatataactaaagtgttagtggattggattaaaagaaacttattaggcaagaacaggtaatgtagttatccatgactacttttaaccatgcagactaataatattctggaggtttatagctcggcaccttcacctgtttaaaaaaaaaaaaagataaaaattagttacatatggggatgtggttgacttttgaattggcakgtagttgagtgtttccaaataaatgaagatgttaaaatatggggataaaggatatatgagtaattgtataaatgatatgctggagtgctctgtggaactcaagttacatgattttagctatgaaaggcaattttgctgtattggttgatgcatcaaaggtacatcttattatagaactggaagagcacatttcacaatgagattcagagaggttaaagacctttcctttgtagtccggatctccttcaaaaggtaaagtggaggaataattagtagcagagctgagactcaaaygcatggyttgactcttagctactgttctgtttcattgcctgacattacacattatggctgaagagaatctgaccaaatacttctttacttaatatttcttttcatatcacagctgagtgatctgcacagtggaatggtttgacacatggtgacggtaaattttgttcttttgtctaagggaaagccaattcagacatcagtttcatagaacta

SEQ ID NO: 3314 - DNA, 4867 bp, Homo sapiens
  misc_feature (1)...(4867): n = A,T,C or G
tctgagactgagaacctacttaaagctatggcaaaggcactggaggattgagctaggtgggcagaaaagagcagtgtcgttatttgtgcamcaacattgaaaaacaagcagaaataaaacattgacggaacggatacgaccgcagattgcgggagctgtcctctcaatcrgcccggcagcggcggcccacaatttacgcgtgtgcaaccctaaccccggcccaagcttgacctacaatttgcgcaggcgcagatcctaactttggcgtccctgtgggcggcctttggtgtgagacgcgtggtattctgggaacgtcggagacggaagttacttcgtctttagctcctggcgctgctggyttctgggcggtttttgtcttttgatttcaagagttaggagctcgagaaccgtktggcaatatgtacgacgcggatgaggatatgcaatatgatgaggatgatgatgaaatcaccccggatttgtggcaagaagcatgctggattgtaatcagttcctattttgacgagaaaggcttggttagacaacagctggattcttttgatgagtttattcagatgtctgttcaaagaattgtggaagacgctcctcctatagacctacaggctgaagctcagcatgctagtggagaagttgaagaaccgccacgatatttgctgaagtttgaacaaatttatctttccaagcctacccattgggaaagagatggtgctccttcaccaatgatgcccaatgaagctagattaaggaatctcacgtattctgctccgctttatgttgatataacaaaaacagtcattaaagaaggtgaagaacaacttcagactcagcatcagaaaacttttataggaaaaattccaattatgttgcggtcaacttactgccttttgaatggcttgacagatcgtgatctttgtgagttaaatgaatgccctttggatcctggtggctatttcattattaatggatcagaaaaggttctgattgcccaagagaaaatggcaacaaacacagtttatgtgtttgccaaaaaggattctaaatatgcctacacaggagagtgtagatcatgtcttgagaattcttcccgacccaccagtactatatgggttagcatgctggcaagaggaggacagggtgccaagaagagtgctattggtcagcgcattgtggcaactctaccatatatcaagcaagaagttcccatcattattgtgttcagagcattaggttttgtgtccgacagagatattttagaacatattatttatgattttgaagatccagagatgatggaaatggttaaaccttctctcgatgaagcttttgtcatccaagaacagaatgttgcactaaatttcattggttcaagaggagcaaagcctggtgttactaaagagaaaagaattaaatatgcaaaggaagttttacaaaaagaaatgctccctcatgttggtgtcagtgatttttgtgagaccaaaaaagcctatttcttgggatacatggttcataggttacttctggcagctttgggtagaagagaactagatgacagagatcactatggaaacaagagattggatcttgctgggccgctgcttgcattcttatttagaggtatgtttaagaatttgcttaaagaagtgcggatctatgcacagaaatttattgatcgaggaaaggattttaacttggagttggcaattaaaacacggatcatatctgatggcctaaaatactctttagctactggaaactggggtgatcaaaagaaagctcatcaagccagagctggagtatctcaggtgttaaaccgcctgacttttgcgtctactctttctcacctgcgtcgtttaaattctcctattggtagagacggcaagctagcaaaaccaagacagttgcataatacgttgtggggaatggtgtgtcctgccgagaccccagagggccatgctgtaggacttgtgaagaatttagccttgatggcrtatatttcagttggatctcaaccatctccaattctggaatttttagaagaatggagtatggaaaatttagaagaaatttctcctgcagctattgctgatgcaaccaagatttttgttaatggctgctgggttggaatacataaagatcccgaacaacttatgaacaccctaaggaaaytgagacgtcagatggacatcattgtgtctgaagtttctatgatcagagatattcgagagagggagattcggatctatacrgatgcaggccgtatttgtagaccacttctgattgtggaaaaacaaaagctacttttgaagaagaggcatattgaccaattgaaagagagagaatataacaactatagttggcaggatcttgtggccagtggggtagtggagtatattgataccctggaagaagaaacagtgatgcttgcaatgactccagatgatttacaggagaaagaagtagcttattgttccacatatacacactgtgagattcatccctcaatgatccttggtgtctgtgcatctattattccctttcctgatcataaccagtcccctagaaacacataccagtctgctatgggtaagcaggctatgggagtttacatcaccaacttccatgttcgcatggacacattggcccatgttctctattatcctcaaaagccacttgtgactacacggtctatggaatatctacgatttagagagctgccagcaggcatcaactcaattgtggccattgcatcatacactggatataatcaggaagactctgttatcatgaatcgttcagctgtagaccgyggcttcttcaggtctgttttctatcgctcatacaaagaacaggagtctaaaaaaggatttgatcaagaagaagtttttgagaagcctacacgtgaaacatgccagggcatgaggcatgccatttacgacaagctggatgatgatggtttgatagctccaggggttcgtgtatcaggagatgatgttattataggcaaaacagtcaccttgcctgaaaatgaagatgaattggagagcaccaatagacgctataccaagagagactgtagcacttttctcagaactagngagacgggcattgtggatcaggttatggtaactctcaatcaggaaggatataaattttgtaaaataagggtacgctctgttaggattccacagattggagacaaatttgctagtcgacatggtcaaaagggtacttgtggtattcagtatagacaagaggatatgcctttcacctgtgaaggtatcacccctgatatcatcatcaatccccatgccatcccctctcgtatgactattggtcacttaattgaatgccttcaagggaaggtatcggctaacaagggtgaaattggtgatgccactccatttaatgatgctgttaacgtgcagaagatttctaatcttttatctgattatggctatcatctcagaggaaatgaggtcctgtacaatgggttcactggtcgaaaaatcacatcacaaatatttattggccccacttattaccagcgtttgaagcatatggtggatgataagattcactctcgtgctaggggacctattcagatcctcaatagacagcccatggagggtagatctcgtgatggtggcctgcgttttggagaaatggaacgagattgtcagattgcccatggagcagcccagtttttaagggaaagattgtttgaggcatcagatccatatcaggttcatgtttgcaatctttgtggaataatggcgattgccaacaccaggacccatacatatgaatgcaggggctgccgcaataaaacccagatttctttggtgcgaatgccttacgcatgcaaactattgtttcagraacttatgtctatgagtattgcaccgcgaatgatgagtgtttagctattttacaggagtcaacaagataattaaatatcttggtgtcttgtttctattgtgtggctttttaaaaatgacaaatatgtactgtgttgtgataaaaagtattttatttgtttaatgatatgcatgcttttcttctgtaaatatataataaatttttgtagatagtcttgatgtgtgatctttattttgtatttctctgtgtaaaaccagtgaatataactaaagtgttagtggattggattaaaagaaacttattaggcaagaacaggtaatgtagttatccatgactacttttaaccatgcagactaataatattctggaggtttatagctcggcaccttcacctgtttaaaaaaaaaaaaagataaaaattagttacatatggggatgtggttgacttttgaattggcakgtagttgagtgtttccaaataaatgaagatgttaaaatatggggataaaggatatatgagtaattgtataaatgatatgctggagtgctctgtggaactcaagttacatgattttagctatgaaaggcaattttgctgtattggttgatgcatcaaaggtacatcttattatagaactggaagagcacatttcacaatgagattcagagaggttaaagacctttcctttgtagtccggatctccttcaaaaggtaaagtggaggaataattagtagcagagctgagactcaaaygcatggyttgactcttagctactgttctgtttcattgcctgacattacacattatggctgaagagaatctgaccaaatacttctttacttaatatttcttttcatatcacagctgagtgatctgcacagtggaatggtttgacacatggtgacggtaaattttgttcttttgtctaagggaaagccaattcagacatcagtttcatagaacta

SEQ ID NO: 3315 - DNA, 2541 bp, Homo sapiens
tgttaggtacaacaactatgaccgggctgtcatcaataccgttccttatgatgtcgtccatcgctggtatacagcacaccggactctaacgatagagttgaggagacctgagaatgagttttgggtcaaactaaagcctggcagggtcctatttatagacaactggcgtgtcctacatggcagggaatgcttcactggctaccgccaactgtgtggctgctatttaacaagagatgatgtattaaacactgctcgcctcttggggcttcaggcttaaaattgacagcatctggattatgaatacacctggcaccctggctaccagaatttcatatgggcagaataatattgtgtcaaactctacttcagattgtctccttatcccatcccacaaaacagaatctgtccgtttctctagtaagggagacttgttggagaggcgggactctgagttatctaatgtcagacatctagtggggcagctctcttcctcatgttataacatggatccacttgtttkatttaaaccttttaatataattttggtcagtctccttcagaaatataatctccatattgataggaaagcaataattgccatgaggtaacgatttttttcccaagtagatcagttagaaagaaatgcattctagaaataacaaaaatcctgataaagcaacaatttgcaaaatgtttggtcttaggacaccttaacactcttaaaagttattgaaggccccaaggagttcttgggtgtgggttctatctattgatactaattattttaggtattaagactgagaaatatttaaagctcaagaagaacacagaagcacacatccctcagctatgagagagatgacataaccatatgtcatgtagcctctggaaaagtcctctgtatcctcatgagataacgagagggggaaaaaaagctactactgcctttgtaacttccacttagcctactacagggctatgcacatcttagtttccaaaagtctgcttaatttcaaaagaaaaatgcctaattgaatgtaactcatcttggtgttattatacaaaataatttttaatctgcagacccacgaaaagggtctcagggactcctccaggggtcttcagaccatactttgagaacccatgggctagcgactaccttgagacagtcctttacctaggcctgtggattaaagggtttagctgaaaccctagattcttctctgtagtctaatagaactccaaacattgtaagaattgcttggtagcataagctcagggataaggtgggaattgagttcaaatatagtgttttatcttccacacaaatcatctctataggagttaaattaggaagtcacaacagcgcctgttgaacaaactcatcagtgtggtaatcctatgagggataattgcagaaaggttttagagacttgtgaggttccatatgataattctttacacctcccccccccaagagaaagtacacagggctattctgtaatattgttcagggaaatcagcatgatagatgctgtgcctccagagagttctctggagattactacccaaatgtgtattttggcaatttggtggtatttaggatgtaatatgttttcctccatttctgctaattttctctctctctctctcataacatactatacatgctaattgccaagatttgaatgagtcaaatttagtagcttgctgcttttattttttaaatggcttcttttacgtattggcgggggcgggkggggggggcagggtatgaggcttcttttccctcagctttcattgaaagtgaagctgtacaataaccacattgaccactgtagaatgatgaaagagaatataggctaggatgcacacaagaggggggaaaaggcattattagtgaagataggagttacaaagcaaagcaaagtcagtattcagatagagaatagagcctaatctgatgtttgcagggagttcctagatcacatttggcaatttacacattattttattgacctatccagtgctccaaaatgtgttccaaaatattttggcattttatttgtactayataggaatctttaggggagtccctgaaatttgttttcctcttaggtcaaaggactgataattaactttggttcttaaggagtatgccctttagcaataagaacagcaataacattttaccctgcagttttttctctatacctactattatgcactcctaaaatatgtcatcattagtcttcatgaggatgtttaccatttctgaagttttgcgtaaattagccttgaagattacactataactgaggtcatcagcattgacttatggccagcaaaggacatgctcatggccctggagagatgaggacacaaaacaaatcaatttccccacttactgaaggactccccttaccttctgtctctcctgagaccttgactcattaattattttactctcctttttggaaatttgcaaccggtccttctcaacaatgtgctccctttagtacactgaagaaaaagagaagg

SEQ ID NO: 3316 - DNA, 4263 bp, Homo sapiens
tctgtcagtggaggcagcagcggtagaggcggcggcgaggactggcgacggcgaggaggatgctgaagttccgaacagtccatgggggcctgaggctcctgggaatccgccgaacctccaccgcccccgctgcctccccaaatgtccggcgcctggagtataagcccatcaagaaagtcatggtggccaacagaggtgagattgccatccgtgtgttccgggcctgcacggagctgggcatccgcaccrtagccatctactctgagcaggacacgggccagatgcaccggcagaaagcagatgaagcctatctcatcggccgcggcctggcccccgtgcaggcctacctgcacatcccagacatcatcaaggtggccaaggagaacaacgtagatgcagtgcaccctggctacgggttcctctctgagcgagcggacttcgcccaggcctgccaggatgcaggggtccggtttattgggccaagcccagaagtggtccgcaagatgggagacaaggtggaggcccgggccatcgccattgctgcgggtgttcccgttgtccctggcacagatgcccccatcacgtccctgcatgaggcccacgagttctccaacacctacggcttccccatcatcttcaaggcggcctatgggggtggagggcgtggcatgagggtggtgcacagctacgaggagctggaggagaattacacccgggcctactcagaggctctggccgcctttgggaatggggcgctgtttgtggagaagttcatcgagaagccacggcacatcgaggtgcagatcttgggggaccagtatgggaacatcctgcacctgtacgagcgagactgctccatccagcggcggcaccagaaggtggtcgagattgcccccgccgcccacctggacccgcagcttcggactcggctcaccagcgactctgtgaaactcgctaaacaggtgggctacgagaacgcaggcaccgtggagttcctggtggacaggcacggcaagcactacttcatcgaggtcaactcccgcctgcaggtggagcacacggtcacagaggagatcaccgacgtagacctggtccatgctcagatccacgtggctgagggcaggagcctacccgacctgggcctgcggcaggagaacatccgcatcaacgggtgtgccatccagtgccgggtcaccaccgaggaccccgcgcgcagcttccagccggacaccggccgcattgaggtgttccggagcggagagggcatgggcatccgcctggataatgcttccgccttccaaggagccgtcatctcgccccactacgactccctgctggtcaaagtcattgcccacggcaaagaccaccccacggccgccaccaagatgagcagggcccttgcggagttccgcgtccgaggtgtgaagaccaacatcgccttcctgcagaatgtgctcaacaaccagcagttcctggcaggcactgtggacacccagttcatcgacgagaacccagagctgttccagctgcggcctgcacagaaccgggcccaaaagctgttgcactacctcggccatgtcatggtaaacggtccaaccaccccgattcccgtcaaggccagccccagccccacggaccccgttgtccctgcagtgcccataggcccgcccccggctggtttcagagacatcctgctgcgagaggggcctgagggctttgctcgagctgtgcggaaccacccggggctgctgctgatggacacgaccttcagggacgcccaccagtcactgctggccactcgtgtgcgcacccacgatctcaaaaagatcgccccctatgttgcccacaacttcagcaagctcttcagcatggagaactggggaggarccacgtttgacgtcgccatgcgcttcctgtatgagtgcccctggcggcggctgcaggagctccgggagctcatccccaacatccctttccagatgctgctgcggggggccaatgctgtgggctacaccaactacccagacaacgtggtcttcaagttctgtgaagtggccaaagagaatggcatggatgtcttccgtgtgtttgactccctcaactacttgcccaacatgctgctgggcatggaggcggcaggaagtgccggaggcgtggtggaggctgccatctcatacacgggcgacgtggccgaccccagccgcaccaagtactcactgcagtactacatgggcttggccgaagagctggtgcgagctggcacccacatcctgtgcatcaaggacatkgccgggctgctgaagcccacggcctgcaccatgctggtcagctccctccgggaccgsttccccgacctcccactscacatccacacccacgacacgtcaggggcaggcgtggcagccatgctggcctgtgcccaggctggagctgatgtggtggatgtggcagctgattccatgtctgggatgacttcacagcccagcatgggggccctggtggcctgtaccagagggactcccctggacacagaggtgcccatggagcgcgtgtttgactacagtgagtactgggagggggctcggggactgtacgcggccttcgactgcacggccaccatgaagtctggcaactcggaygtgtatgaaaatgagatcccagggggccagtacaccaayctgcacttccaggcccacagcatggggcttggctccaagttcaaggaggtcaagaaggcctatgtggaggccaaccagatgctgggcgatctcatcaaggtgacgccctcctccaagatcgtgggggacctggcccagtttatggtgcagaatggattgagccgggcagaggccgaagctcaggcggaagagctgtcctttccccgctccgtggtggagttcctgcagggctacatcggtgtcccccatggggggttccccgaaccctttcgctctaaggtactgaaggacctgccaagggtggaggggcggcctggagcctccctccctcccctggatctgcaggcactggagaaggagctggtagaccggcatggggaggaggtgacgccggaagatgtgctctcagcagctatgtaccccgatgtgtttgcccacttcaaggacttcactgccacctttggccccctggatagcctgaatactcgcctcttcctgcagggacccaagatcgcagaggagtttgaggtggagctggagcggggcaaracgctgcacatcaaagccctggccgkgagcgacctgaaccgggccggccagaggcaggtcttctttgagctcaatgggcagctgcggtccatcttggtcaaggacacccaggccatgaaggagatgcacttccaccccaaggccctaaaggacgtgaagggccagatcggggcgcccatgcctgggaaggtgatagacatcaaagtggtggcaggggccaaggtggccaagggccagcccctgtgtgtgctcagtgccatgaagatggagactgtggtgacctcacccatggagggtactgtccgcaaggttcatgtgaccaaggacatgacactggaaggtgacgacctcatcctggagatcgagtgatcttgccccagaccggcagcctggccatccccaagccttcaacagaagctgtgctgccacggcaggcccaggccagccagtgcccgaggccaggaaggccgggccgtggaggtcctgtccacagctggacaggagagacaccgcctgcggtggttcattcctttcagccatcgtcctttcctccggcggacagctgcttacatgttcatctcttgccaaataagggtcccctcctcactggagactacaagtggtgggtcaggtggtcctaggacccaggggaggtttaggggtcctatctcctgggggaaggggagatctaagatgtcccaggtcctgggaagtttactcaataaagctggctttcccctgccctccatgctggatcctgtgcagcccccagcctgcaccactcagcagtggggggctgcctttcaagctccccatgggtgggcaggtcagttgtgtcgttctcctcagagggtagtgagaatgaccatcgtggccctgttttaagtcactattgggtgcctactgtgtatactccccaaacaggactagtagtactgaacttgcttgaggggtggggcctgttctaagtatttaacacctattaacacagggaattaaccttcatcctcttatggacacagaaatcaagtcacag

SEQ ID NO: 3317 - DNA, 4335 bp, Homo sapiens
agttctggaaagtcattgacaggggattaacctagaacatcaattataaacaggcagcaggcctcaggcccagacttgggtgttacaggaacagtgtggcctctctggaactctgcagaccaactgccgtgatgctgaagttccgaacagtccatgggggcctgaggctcctgggaatccgccgaacctccaccgcccccgctgcctccccaaatgtccggcgcctggagtataagcccatcaagaaagtcatggtggccaacagaggtgagattgccatccgtgtgttccgggcctgcacggagctgggcatccgcaccgtagccatctactctgagcaggacacgggccagatgcaccggcagaaagcagatgaagcctatctcatcggccgcggcctggcccccgtgcaggcctacctgcacatcccagacatcatcaaggtggccaaggagaacaacgtagatgcagtgcaccctggctacgggttcctctctgagcgagcggacttcgcccaggcctgccaggatgcaggggtccggtttattgggccaagcccagaagtggtccgcaagatgggagacaaggtggaggcccgggccatcgccattgctgcgggtgttcccgttgtccctggcacagatgcccccatcacgtccctgcatgaggcccacgagttctccaacacctacggcttccccatcatcttcaaggcggcctatgggggtggagggcgtggcatgagggtggtgcacagctacgaggagctggaggagaattacacccgggcctactcagaggctctggccgcctttgggaatggggcgctgtttgtggagaagttcatcgagaagccacggcacatcgaggtgcagatcttgggggaccagtatgggaacatcctgcacctgtacgagcgagactgctccatccagcggcggcaccagaaggtggtcgagattgcccccgccgcccacctggacccgcagcttcggactcggctcaccagcgactctgtgaaactcgctaaacaggtgggctacgagaacgcaggcaccgtggagttcctggtggacaggcacggcaagcactacttcatcgaggtcaactcccgcctgcaggtggagcacacggtcacagaggagatcaccgacgtagacctggtccatgctcagatccacgtggctgagggcaggagcctacccgacctgggcctgcggcaggagaacatccgcatcaacgggtgtgccatccagtgccgggtcaccaccgaggaccccgcgcgcagcttccagccggacaccggccgcattgaggtgttccggagcggagagggcatgggcatccgcctggataatgcttccgccttccaaggagccgtcatctcgccccactacgactccctgctggtcaaagtcattgcccacggcaaagaccaccccacggccgccaccaagatgagcagggcccttgcggagttccgcgtccgaggtgtgaagaccaacatcgccttcctgcagaatgtgctcaacaaccagcagttcctggcaggcactgtggacacccagttcatcgacgagaacccagagctgttccagctgcggcctgcacagaaccgggcccaaaagctgttgcactacctcggccatgtcatggtaaacggtccaaccaccccgattcccgtcaaggccagccccagccccacggaccccgttgtccctgcagtgcccataggcccgcccccggctggtttcagagacatcctgctgcgagaggggcctgagggctttgctcgagctgtgcggaaccacccggggctgctgctgatggacacgaccttcagggacgcccaccagtcactgctggccactcgtgtgcgcacccacgatctcaaaaagatcgccccctatgttgcccacaacttcagcaagctcttcagcatggagaactggggaggagccacgtttgacgtcgccatgcgcttcctgtatgagtgcccctggcggcggctgcaggagctccgggagctcatccccaacatccctttccagatgctgctgcggggggccaatgctgtgggctacaccaactacccagacaacgtggtcttcaagttctgtgaagtggccaaagagaatggcatggatgtcttccgtgtgtttgactccctcaactacttgcccaacatgctgctgggcatggaggcggcaggaagtgccggaggcgtgktggaggctgccatctcatacacgggcgacgtggccgaccccagccgcaccaagtactcactgcagtactacatgsgcttggccgaagagctggtgcgagctggcacccacatcctgtgcatcaaggacatggccgggctgctgaagcccacggcctgcaccatgctggtcagctccctccgggaccgcttccccgacctcccactgcacatccacacccacgacacgtcaggggcaggcgtggcagccatgctggcctgtgcccaggctggagctgatgtggtggatgtggcagctgattccatgtctgggatgacttcacagcccagcatgggggccctggtggcctgtaccagagggactcccctggacacagaggtgcccatggagygcgtgtttgactacagtgagtactgggagggggctcggggactgtacgcggccttcgactgcacggccaccatgaagtctggcaactcggacgtgtatgaaaatgagatcccagggggccagtacaccaacctgcacttccaggcccacagcatggggcttggctccaagttcaaggaggtcaagaaggcctatgtggaggccaaccagatgctgggcgatctcatcaaggtgacgccctcctccaagatcgtgggggacctggcccagtttatggtgcagaatggattgagccgggcagaggccgaagctcaggcggaagagctgtcctttccccgctccgtggtggagttcctgcagggctacatcggtgtcccccatggggggttccccgaaccctttcgctctaaggtactgaaggacctgccaagggtggaggggcggcctggagcctccctccctcccctggatctgcaggcactggagaaggagctggtagaccggcatggggaggaggtgacgccggaagatgtgctctcagcagctatgtaccccgatgtgtttgcccacttcaakgacttcactgccacctttggccccctggatagcctgaatactcgcctcttcctgcagggacccaagatcgcagaggagtttgaggtggagctggagcggggcaagacgctgcacatcaaagccctggccgtgagcgacctgaaccgggccggccagaggcaggtcttctttgagctcaatgggcagctgcggtccatcttggtcaaggacacccaggccatgaaggagatgcacttccaccccaaggccctaaaggacgtgaagggccagatcggggcgcccatgcctgggaaggtgatagacatcaaagtggtggcaggggccaaggtggccaagggccagcccctgtgtgtgctcagtgccatgaagatggagactgtggtgacctcacccatggagggtactgtccgcaaggttcatgtgaccaaggacatgacactggaaggtgacgacctcatcctggagatcgagtgatcttgccccagaccggcagcctggccatccccaagccttcaacagaagctgtgctgccacggcaggcccaggccagccagtgcccgaggccaggaaggccgggccgtggaggtcctgtccacagctggacaggagagacaccgcctgcggtggttcattcctttcagccatcgtcctttcctccggcggacagctgcttacatgttcatctcttgccaaataagggtcccctcctcactggagactacaagtggtgggtcaggtggtcctaggacccaggggaggtttaggggtcctatctcctgggggaaggggagatctaagatgtcccaggtcctgggaagtttactcaataaagctggctttcccctgccctccatgctggatcctgtgcagcccccagcctgcaccactcagcagtggggggctgcctttcaagctccccatgggtgggcaggtcagttgtgtcgttctcctcagagggtagtgagaatgaccatcgtggccctgttttaagtcactattgggtgcctactgtgtatactccccaaacaggactagtagtactgaacttgcttgaggggtggggcctgttctaagtatttaacacctattaacacagggaattaaccttcatcctcttatggacacagaaatcaagtcacag

SEQ ID NO: 3318 - DNA, 4277 bp, Homo sapiens
ctcaggcccagacttgggtgttacaggaacagtgtggcctctctggaactctgcagaccaattccctccctagatgctgaagttccgaacagtccatgggggcctgaggctcctgggaatccgccgaacctccaccgcccccgctgcctccccaaatgtccggcgcctggagtataagcccatcaagaaagtcatggtggccaacagaggtgagattgccatccgtgtgttccgggcctgcacggagctgggcatccgcaccrtagccatctactctgagcaggacacgggccagatgcaccggcagaaagcagatgaagcctatctcatcggccgcggcctggcccccgtgcaggcctacctgcacatcccagacatcatcaaggtggccaaggagaacaacgtagatgcagtgcaccctggctacgggttcctctctgagcgagcggacttcgcccaggcctgccaggatgcaggggtccggtttattgggccaagcccagaagtggtccgcaagatgggagacaaggtggaggcccgggccatcgccattgctgcgggtgttcccgttgtccctggcacagatgcccccatcacgtccctgcatgaggcccacgagttctccaacacctacggcttccccatcatcttcaaggcggcctatgggggtggagggcgtggcatgagggtggtgcacagctacgaggagctggaggagaattacacccgggcctactcagaggctctggccgcctttgggaatggggcgctgtttgtggagaagttcatcgagaagccacggcacatcgaggtgcagatcttgggggaccagtatgggaacatcctgcacctgtacgagcgagactgctccatccagcggcggcaccagaaggtggtcgagattgcccccgccgcccacctggacccgcagcttcggactcggctcaccagcgactctgtgaaactcgctaaacaggtgggctacgagaacgcaggcaccgtggagttcctggtggacaggcacggcaagcactacttcatcgaggtcaactcccgcctgcaggtggagcacacggtcacagaggagatcaccgacgtagacctggtccatgctcagatccacgtggctgagggcaggagcctacccgacctgggcctgcggcaggagaacatccgcatcaacgggtgtgccatccagtgccgggtcaccaccgaggaccccgcgcgcagcttccagccggacaccggccgcattgaggtgttccggagcggagagggcatgggcatccgcctggataatgcttccgccttccaaggagccgtcatctcgccccactacgactccctgctggtcaaagtcattgcccacggcaaagaccaccccacggccgccaccaagatgagcagggcccttgcggagttccgcgtccgaggtgtgaagaccaacatcgccttcctgcagaatgtgctcaacaaccagcagttcctggcaggcactgtggacacccagttcatcgacgagaacccagagctgttccagctgcggcctgcacagaaccgggcccaaaagctgttgcactacctcggccatgtcatggtaaacggtccaaccaccccgattcccgtcaaggccagccccagccccacggaccccgttgtccctgcagtgcccataggcccgcccccggctggtttcagagacatcctgctgcgagaggggcctgagggctttgctcgagctgtgcggaaccacccggggctgctgctgatggacacgaccttcagggacgcccaccagtcactgctggccactcgtgtgcgcacccacgatctcaaaaagatcgccccctatgttgcccacaacttcagcaagctcttcagcatggagaactggggaggarccacgtttgacgtcgccatgcgcttcctgtatgagtgcccctggcggcggctgcaggagctccgggagctcatccccaacatccctttccagatgctgctgcggggggccaatgctgtgggctacaccaactacccagacaacgtggtcttcaagttctgtgaagtggccaaagagaatggcatggatgtcttccgtgtgtttgactccctcaactacttgcccaacatgctgctgggcatggaggcggcaggaagtgccggaggcgtggtggaggctgccatctcatacacgggcgacgtggccgaccccagccgcaccaagtactcactgcagtactacatgggcttggccgaagagctggtgcgagctggcacccacatcctgtgcatcaaggacatkgccgggctgctgaagcccacggcctgcaccatgctggtcagctccctccgggaccgsttccccgacctcccactscacatccacacccacgacacgtcaggggcaggcgtggcagccatgctggcctgtgcccaggctggagctgatgtggtggatgtggcagctgattccatgtctgggatgacttcacagcccagcatgggggccctggtggcctgtaccagagggactcccctggacacagaggtgcccatggagcgcgtgtttgactacagtgagtactgggagggggctcggggactgtacgcggccttcgactgcacggccaccatgaagtctggcaactcggaygtgtatgaaaatgagatcccagggggccagtacaccaayctgcacttccaggcccacagcatggggcttggctccaagttcaaggaggtcaagaaggcctatgtggaggccaaccagatgctgggcgatctcatcaaggtgacgccctcctccaagatcgtgggggacctggcccagtttatggtgcagaatggattgagccgggcagaggccgaagctcaggcggaagagctgtcctttccccgctccgtggtggagttcctgcagggctacatcggtgtcccccatggggggttccccgaaccctttcgctctaaggtactgaaggacctgccaagggtggaggggcggcctggagcctccctccctcccctggatctgcaggcactggagaaggagctggtagaccggcatggggaggaggtgacgccggaagatgtgctctcagcagctatgtaccccgatgtgtttgcccacttcaaggacttcactgccacctttggccccctggatagcctgaatactcgcctcttcctgcagggacccaagatcgcagaggagtttgaggtggagctggagcggggcaaracgctgcacatcaaagccctggccgkgagcgacctgaaccgggccggccagaggcaggtcttctttgagctcaatgggcagctgcggtccatcttggtcaaggacacccaggccatgaaggagatgcacttccaccccaaggccctaaaggacgtgaagggccagatcggggcgcccatgcctgggaaggtgatagacatcaaagtggtggcaggggccaaggtggccaagggccagcccctgtgtgtgctcagtgccatgaagatggagactgtggtgacctcacccatggagggtactgtccgcaaggttcatgtgaccaaggacatgacactggaaggtgacgacctcatcctggagatcgagtgatcttgccccagaccggcagcctggccatccccaagccttcaacagaagctgtgctgccacggcaggcccaggccagccagtgcccgaggccaggaaggccgggccgtggaggtcctgtccacagctggacaggagagacaccgcctgcggtggttcattcctttcagccatcgtcctttcctccggcggacagctgcttacatgttcatctcttgccaaataagggtcccctcctcactggagactacaagtggtgggtcaggtggtcctaggacccaggggaggtttaggggtcctatctcctgggggaaggggagatctaagatgtcccaggtcctgggaagtttactcaataaagctggctttcccctgccctccatgctggatcctgtgcagcccccagcctgcaccactcagcagtggggggctgcctttcaagctccccatgggtgggcaggtcagttgtgtcgttctcctcagagggtagtgagaatgaccatcgtggccctgttttaagtcactattgggtgcctactgtgtatactccccaaacaggactagtagtactgaacttgcttgaggggtggggcctgttctaagtatttaacacctattaacacagggaattaaccttcatcctcttatggacacagaaatcaagtcacag

SEQ ID NO: 3319 - DNA, 4256 bp, Homo sapiens
gaggcagcagcggtagaggcggcggcgaggactggcgacggcgaggagctagatgctgaagttccgaacagtccatgggggcctgaggctcctgggaatccgccgaacctccaccgcccccgctgcctccccaaatgtccggcgcctggagtataagcccatcaagaaagtcatggtggccaacagaggtgagattgccatccgtgtgttccgggcctgcacggagctgggcatccgcaccrtagccatctactctgagcaggacacgggccagatgcaccggcagaaagcagatgaagcctatctcatcggccgcggcctggcccccgtgcaggcctacctgcacatcccagacatcatcaaggtggccaaggagaacaacgtagatgcagtgcaccctggctacgggttcctctctgagcgagcggacttcgcccaggcctgccaggatgcaggggtccggtttattgggccaagcccagaagtggtccgcaagatgggagacaaggtggaggcccgggccatcgccattgctgcgggtgttcccgttgtccctggcacagatgcccccatcacgtccctgcatgaggcccacgagttctccaacacctacggcttccccatcatcttcaaggcggcctatgggggtggagggcgtggcatgagggtggtgcacagctacgaggagctggaggagaattacacccgggcctactcagaggctctggccgcctttgggaatggggcgctgtttgtggagaagttcatcgagaagccacggcacatcgaggtgcagatcttgggggaccagtatgggaacatcctgcacctgtacgagcgagactgctccatccagcggcggcaccagaaggtggtcgagattgcccccgccgcccacctggacccgcagcttcggactcggctcaccagcgactctgtgaaactcgctaaacaggtgggctacgagaacgcaggcaccgtggagttcctggtggacaggcacggcaagcactacttcatcgaggtcaactcccgcctgcaggtggagcacacggtcacagaggagatcaccgacgtagacctggtccatgctcagatccacgtggctgagggcaggagcctacccgacctgggcctgcggcaggagaacatccgcatcaacgggtgtgccatccagtgccgggtcaccaccgaggaccccgcgcgcagcttccagccggacaccggccgcattgaggtgttccggagcggagagggcatgggcatccgcctggataatgcttccgccttccaaggagccgtcatctcgccccactacgactccctgctggtcaaagtcattgcccacggcaaagaccaccccacggccgccaccaagatgagcagggcccttgcggagttccgcgtccgaggtgtgaagaccaacatcgccttcctgcagaatgtgctcaacaaccagcagttcctggcaggcactgtggacacccagttcatcgacgagaacccagagctgttccagctgcggcctgcacagaaccgggcccaaaagctgttgcactacctcggccatgtcatggtaaacggtccaaccaccccgattcccgtcaaggccagccccagccccacggaccccgttgtccctgcagtgcccataggcccgcccccggctggtttcagagacatcctgctgcgagaggggcctgagggctttgctcgagctgtgcggaaccacccggggctgctgctgatggacacgaccttcagggacgcccaccagtcactgctggccactcgtgtgcgcacccacgatctcaaaaagatcgccccctatgttgcccacaacttcagcaagctcttcagcatggagaactggggaggarccacgtttgacgtcgccatgcgcttcctgtatgagtgcccctggcggcggctgcaggagctccgggagctcatccccaacatccctttccagatgctgctgcggggggccaatgctgtgggctacaccaactacccagacaacgtggtcttcaagttctgtgaagtggccaaagagaatggcatggatgtcttccgtgtgtttgactccctcaactacttgcccaacatgctgctgggcatggaggcggcaggaagtgccggaggcgtggtggaggctgccatctcatacacgggcgacgtggccgaccccagccgcaccaagtactcactgcagtactacatgggcttggccgaagagctggtgcgagctggcacccacatcctgtgcatcaaggacatkgccgggctgctgaagcccacggcctgcaccatgctggtcagctccctccgggaccgsttccccgacctcccactscacatccacacccacgacacgtcaggggcaggcgtggcagccatgctggcctgtgcccaggctggagctgatgtggtggatgtggcagctgattccatgtctgggatgacttcacagcccagcatgggggccctggtggcctgtaccagagggactcccctggacacagaggtgcccatggagcgcgtgtttgactacagtgagtactgggagggggctcggggactgtacgcggccttcgactgcacggccaccatgaagtctggcaactcggaygtgtatgaaaatgagatcccagggggccagtacaccaayctgcacttccaggcccacagcatggggcttggctccaagttcaaggaggtcaagaaggcctatgtggaggccaaccagatgctgggcgatctcatcaaggtgacgccctcctccaagatcgtgggggacctggcccagtttatggtgcagaatggattgagccgggcagaggccgaagctcaggcggaagagctgtcctttccccgctccgtggtggagttcctgcagggctacatcggtgtcccccatggggggttccccgaaccctttcgctctaaggtactgaaggacctgccaagggtggaggggcggcctggagcctccctccctcccctggatctgcaggcactggagaaggagctggtagaccggcatggggaggaggtgacgccggaagatgtgctctcagcagctatgtaccccgatgtgtttgcccacttcaaggacttcactgccacctttggccccctggatagcctgaatactcgcctcttcctgcagggacccaagatcgcagaggagtttgaggtggagctggagcggggcaaracgctgcacatcaaagccctggccgkgagcgacctgaaccgggccggccagaggcaggtcttctttgagctcaatgggcagctgcggtccatcttggtcaaggacacccaggccatgaaggagatgcacttccaccccaaggccctaaaggacgtgaagggccagatcggggcgcccatgcctgggaaggtgatagacatcaaagtggtggcaggggccaaggtggccaagggccagcccctgtgtgtgctcagtgccatgaagatggagactgtggtgacctcacccatggagggtactgtccgcaaggttcatgtgaccaaggacatgacactggaaggtgacgacctcatcctggagatcgagtgatcttgccccagaccggcagcctggccatccccaagccttcaacagaagctgtgctgccacggcaggcccaggccagccagtgcccgaggccaggaaggccgggccgtggaggtcctgtccacagctggacaggagagacaccgcctgcggtggttcattcctttcagccatcgtcctttcctccggcggacagctgcttacatgttcatctcttgccaaataagggtcccctcctcactggagactacaagtggtgggtcaggtggtcctaggacccaggggaggtttaggggtcctatctcctgggggaaggggagatctaagatgtcccaggtcctgggaagtttactcaataaagctggctttcccctgccctccatgctggatcctgtgcagcccccagcctgcaccactcagcagtggggggctgcctttcaagctccccatgggtgggcaggtcagttgtgtcgttctcctcagagggtagtgagaatgaccatcgtggccctgttttaagtcactattgggtgcctactgtgtatactccccaaacaggactagtagtactgaacttgcttgaggggtggggcctgttctaagtatttaacacctattaacacagggaattaaccttcatcctcttatggacacagaaatcaagtcacag

SEQ ID NO: 3320 - DNA, 4431 bp, Homo sapiens
ctgccttctagtctcacctgtggacactttgccaaaggagtcgggcctgacggtggaagatgggaaatggccaaaagaataaaccatttcctcttacttaccgaatgaaaagcttgcttcatcttggcgttcaagactctctaatatgattccacctgttgggctctttcttccatttgcctccgcagatagtgtctgccttctggagagctgaccaaacactaaggatgctgaagttccgaacagtccatgggggcctgaggctcctgggaatccgccgaacctccaccgcccccgctgcctccccaaatgtccggcgcctggagtataagcccatcaagaaagtcatggtggccaacagaggtgagattgccatccgtgtgttccgggcctgcacggagctgggcatccgcaccgtagccatctactctgagcaggacacgggccagatgcaccggcagaaagcagatgaagcctatctcatcggccgcggcctggcccccgtgcaggcctacctgcacatcccagacatcatcaaggtggccaaggagaacaacgtagatgcagtgcaccctggctacgggttcctctctgagcgagcggacttcgcccaggcctgccaggatgcaggggtccggtttattgggccaagcccagaagtggtccgcaagatgggagacaaggtggaggcccgggccatcgccattgctgcgggtgttcccgttgtccctggcacagatgcccccatcacgtccctgcatgaggcccacgagttctccaacacctacggcttccccatcatcttcaaggcggcctatgggggtggagggcgtggcatgagggtggtgcacagctacgaggagctggaggagaattacacccgggcctactcagaggctctggccgcctttgggaatggggcgctgtttgtggagaagttcatcgagaagccacggcacatcgaggtgcagatcttgggggaccagtatgggaacatcctgcacctgtacgagcgagactgctccatccagcggcggcaccagaaggtggtcgagattgcccccgccgcccacctggacccgcagcttcggactcggctcaccagcgactctgtgaaactcgctaaacaggtgggctacgagaacgcaggcaccgtggagttcctggtggacaggcacggcaagcactacttcatcgaggtcaactcccgcctgcaggtggagcacacggtcacagaggagatcaccgacgtagacctggtccatgctcagatccacgtggctgagggcaggagcctacccgacctgggcctgcggcaggagaacatccgcatcaacgggtgtgccatccagtgccgggtcaccaccgaggaccccgcgcgcagcttccagccggacaccggccgcattgaggtgttccggagcggagagggcatgggcatccgcctggataatgcttccgccttccaaggagccgtcatctcgccccactacgactccctgctggtcaaagtcattgcccacggcaaagaccaccccacggccgccaccaagatgagcagggcccttgcggagttccgcgtccgaggtgtgaagaccaacatcgccttcctgcagaatgtgctcaacaaccagcagttcctggcaggcactgtggacacccagttcatcgacgagaacccagagctgttccagctgcggcctgcacagaaccgggcccaaaagctgttgcactacctcggccatgtcatggtaaacggtccaaccaccccgattcccgtcaaggccagccccagccccacggaccccgttgtccctgcagtgcccataggcccgcccccggctggtttcagagacatcctgctgcgagaggggcctgagggctttgctcgagctgtgcggaaccacccggggctgctgctgatggacacgaccttcagggacgcccaccagtcactgctggccactcgtgtgcgcacccacgatctcaaaaagatcgccccctatgttgcccacracttcagcaagctcttcagcatggagaactggggaggagccacgtttgacgtcgccatgcgcttcctgtatgagtgcccctggcggcggctgcaggagctccgggagctcatccccaacatccctttccagatgctgctgcggggggccaatgctgtgggctacaccaactacccagacaacgtggtcttcaagttctgtgaagtggccaaagagaatggcatggatgtcttccgtgtgtttgactccctcaactacttgcccaacatgctgctgggcatggaggcggcaggaagtgccggaggcgtggtggaggctgccatctcatacacgggcgacgtggccgaccccagccgcaccaagtactcactgcagtactacatgggcttggccgaagagctkgtgcgagctggcacccacatcctgtgcatcaaggacatggccgggctgctgaagccsacggcctgcaccatgctsgtcagctccctccgggaccgcttccccgacctcccactgcacatccacacccacgacacgtcaggggcaggcgtggcagccatgctggcctgtgcccaggctggagctgatgtggtggatgtggcagctgattccatgtctgggatgacttcacagcccagcatgggggccctggtggcctgtaccagagggactcccctggacacagaggtgcccatggagcgcgtgtttgactacagtgagtactgggagggggctcggggactgtacgcggcyttcgactgcacggccaccatgaagtctggcaactcggaygtgtatgaaaatgagatcccagggggccagtacaccaacctgcacttccaggcccacagcatggggcttggctccaagttcaaggaggtcaagaaggcctatgtggaggccaaccagatgctgggcgatctcatcaaggtgacgccctcctccaagatcgtgggggacctggcccagtttatggtgcagaatggattgagccgggcagaggccgaagctcaggcggaagagctgtcctttccccgctccgtggtggagttcctgcagggctacatcggtgtcccccatggggggttccccgaaccctttcgctctaaggtactgaaggacctgccaagggtggaggggcggcctggagcctccctccctcccctggatctgcaggcactggagaaggagctggtagaccggcatggggaggaggtgacgccggaagatgtgctctcagcagctatgtaccccgatgtgtttgcccacttcaaggacttcactgccacctttggccccctggatagcctgaatactcgcctcttcctgcagggacccaaratcgcagaggagtttgaggtggagckggagcggggcaagacgctgcacatcaaagccctggccgtgagcgacctgaaccgggccggccagaggcaggtcttctttgagctcaatgggcagctgcggtccatcttggtcaaggacacccaggccatgaaggagatgcacttccaccccaaggccctaaaggacgtgaagggccagatcggggcgcccatgcctgggaaggtgatagacatcaaagtggtggcaggggccaaggtggccaagggccagcccctgtgtgtgctcagtgccatgaagatggagactgtggtgacctcacccatggagggtactgtccgcaaggttcatgtgaccaaggacatgacactggaaggtgacgacctcatcctggagatcgagtgatcttgccccagaccggcagcctggccatccccaagccttcaacagaagctgtgctgccacggcaggcccaggccagccagtgcccgaggccaggaaggccgggccgtggaggtcctgtccacagctggacaggagagacaccgcctgcggtggttcattcctttcagccatcgtcctttcctccggcggacagctgcttacatgttcatctcttgccaaataagggtcccctcctcactggagactacaagtggtgggtcaggtggtcctaggacccaggggaggtttaggggtcctatctcctgggggaaggggagatctaagatgtcccaggtcctgggaagtttactcaataaagctggctttcccctgccctccatgctggatcctgtgcagcccccagcctgcaccactcagcagtggggggctgcctttcaagctccccatgggtgggcaggtcagttgtgtcgttctcctcagagggtagtgagaatgaccatcgtggccctgttttaagtcactattgggtgcctactgtgtatactccccaaacaggactagtagtactgaacttgcttgaggggtggggcctgttctaagtatttaacacctattaacacagggaattaaccttcatcctcttatggacacagaaatcaagtcacag

SEQ ID NO: 3321 - DNA, 4497 bp, Homo sapiens
agctgttctctgtcagtggaggcagcagcggtagaggcggcggcgaggactggcgacggcgaggagctgccttctagtctcacctgtggacactttgccaaaggagtcgggcctgacggtggaagatgggaaatggccaaaagaataaaccatttcctcttacttaccgaatgaaaagcttgcttcatcttggcgttcaagactctctaatatgattccacctgttgggctctttcttccatttgcctccgcagatagtgtctgccttctggagagctgaccaaacactaaggatgctgaagttccgaacagtccatgggggcctgaggctcctgggaatccgccgaacctccaccgcccccgctgcctccccaaatgtccggcgcctggagtataagcccatcaagaaagtcatggtggccaacagaggtgagattgccatccgtgtgttccgggcctgcacggagctgggcatccgcaccgtagccatctactctgagcaggacacgggccagatgcaccggcagaaagcagatgaagcctatctcatcggccgcggcctggcccccgtgcaggcctacctgcacatcccagacatcatcaaggtggccaaggagaacaacgtagatgcagtgcaccctggctacgggttcctctctgagcgagcggacttcgcccaggcctgccaggatgcaggggtccggtttattgggccaagcccagaagtggtccgcaagatgggagacaaggtggaggcccgggccatcgccattgctgcgggtgttcccgttgtccctggcacagatgcccccatcacgtccctgcatgaggcccacgagttctccaacacctacggcttccccatcatcttcaaggcggcctatgggggtggagggcgtggcatgagggtggtgcacagctacgaggagctggaggagaattacacccgggcctactcagaggctctggccgcctttgggaatggggcgctgtttgtggagaagttcatcgagaagccacggcacatcgaggtgcagatcttgggggaccagtatgggaacatcctgcacctgtacgagcgagactgctccatccagcggcggcaccagaaggtggtcgagattgcccccgccgcccacctggacccgcagcttcggactcggctcaccagcgactctgtgaaactcgctaaacaggtgggctacgagaacgcaggcaccgtggagttcctggtggacaggcacggcaagcactacttcatcgaggtcaactcccgcctgcaggtggagcacacggtcacagaggagatcaccgacgtagacctggtccatgctcagatccacgtggctgagggcaggagcctacccgacctgggcctgcggcaggagaacatccgcatcaacgggtgtgccatccagtgccgggtcaccaccgaggaccccgcgcgcagcttccagccggacaccggccgcattgaggtgttccggagcggagagggcatgggcatccgcctggataatgcttccgccttccaaggagccgtcatctcgccccactacgactccctgctggtcaaagtcattgcccacggcaaagaccaccccacggccgccaccaagatgagcagggcccttgcggagttccgcgtccgaggtgtgaagaccaacatcgccttcctgcagaatgtgctcaacaaccagcagttcctggcaggcactgtggacacccagttcatcgacgagaacccagagctgttccagctgcggcctgcacagaaccgggcccaaaagctgttgcactacctcggccatgtcatggtaaacggtccaaccaccccgattcccgtcaaggccagccccagccccacggaccccgttgtccctgcagtgcccataggcccgcccccggctggtttcagagacatcctgctgcgagaggggcctgagggctttgctcgagctgtgcggaaccacccggggctgctgctgatggacacgaccttcagggacgcccaccagtcactgctggccactcgtgtgcgcacccacgatctcaaaaagatcgccccctatgttgcccacracttcagcaagctcttcagcatggagaactggggaggagccacgtttgacgtcgccatgcgcttcctgtatgagtgcccctggcggcggctgcaggagctccgggagctcatccccaacatccctttccagatgctgctgcggggggccaatgctgtgggctacaccaactacccagacaacgtggtcttcaagttctgtgaagtggccaaagagaatggcatggatgtcttccgtgtgtttgactccctcaactacttgcccaacatgctgctgggcatggaggcggcaggaagtgccggaggcgtggtggaggctgccatctcatacacgggcgacgtggccgaccccagccgcaccaagtactcactgcagtactacatgggcttggccgaagagctkgtgcgagctggcacccacatcctgtgcatcaaggacatggccgggctgctgaagccsacggcctgcaccatgctsgtcagctccctccgggaccgcttccccgacctcccactgcacatccacacccacgacacgtcaggggcaggcgtggcagccatgctggcctgtgcccaggctggagctgatgtggtggatgtggcagctgattccatgtctgggatgacttcacagcccagcatgggggccctggtggcctgtaccagagggactcccctggacacagaggtgcccatggagcgcgtgtttgactacagtgagtactgggagggggctcggggactgtacgcggcyttcgactgcacggccaccatgaagtctggcaactcggaygtgtatgaaaatgagatcccagggggccagtacaccaacctgcacttccaggcccacagcatggggcttggctccaagttcaaggaggtcaagaaggcctatgtggaggccaaccagatgctgggcgatctcatcaaggtgacgccctcctccaagatcgtgggggacctggcccagtttatggtgcagaatggattgagccgggcagaggccgaagctcaggcggaagagctgtcctttccccgctccgtggtggagttcctgcagggctacatcggtgtcccccatggggggttccccgaaccctttcgctctaaggtactgaaggacctgccaagggtggaggggcggcctggagcctccctccctcccctggatctgcaggcactggagaaggagctggtagaccggcatggggaggaggtgacgccggaagatgtgctctcagcagctatgtaccccgatgtgtttgcccacttcaaggacttcactgccacctttggccccctggatagcctgaatactcgcctcttcctgcagggacccaaratcgcagaggagtttgaggtggagckggagcggggcaagacgctgcacatcaaagccctggccgtgagcgacctgaaccgggccggccagaggcaggtcttctttgagctcaatgggcagctgcggtccatcttggtcaaggacacccaggccatgaaggagatgcacttccaccccaaggccctaaaggacgtgaagggccagatcggggcgcccatgcctgggaaggtgatagacatcaaagtggtggcaggggccaaggtggccaagggccagcccctgtgtgtgctcagtgccatgaagatggagactgtggtgacctcacccatggagggtactgtccgcaaggttcatgtgaccaaggacatgacactggaaggtgacgacctcatcctggagatcgagtgatcttgccccagaccggcagcctggccatccccaagccttcaacagaagctgtgctgccacggcaggcccaggccagccagtgcccgaggccaggaaggccgggccgtggaggtcctgtccacagctggacaggagagacaccgcctgcggtggttcattcctttcagccatcgtcctttcctccggcggacagctgcttacatgttcatctcttgccaaataagggtcccctcctcactggagactacaagtggtgggtcaggtggtcctaggacccaggggaggtttaggggtcctatctcctgggggaaggggagatctaagatgtcccaggtcctgggaagtttactcaataaagctggctttcccctgccctccatgctggatcctgtgcagcccccagcctgcaccactcagcagtggggggctgcctttcaagctccccatgggtgggcaggtcagttgtgtcgttctcctcagagggtagtgagaatgaccatcgtggccctgttttaagtcactattgggtgcctactgtgtatactccccaaacaggactagtagtactgaacttgcttgaggggtggggcctgttctaagtatttaacacctattaacacagggaattaaccttcatcctcttatggacacagaaatcaagtcacag

SEQ ID NO: 3322 - DNA, 2764 bp, Homo sapiens
ggtgaagcttctaggtatatcttcctgaccaagtttcgcaagtttctgcaggagaacgccagtggccgggggaacatgcccatgctctgcccccctgagtacatggtctgyttcttacaccggctgatctctgccctgcgctactattgggatgaatacaaggcttccaatcctcatgcttccttcagtgaggaggcctacatcccgccccaggtcttctataatggcraggtggactactttgacctgcagcgcctggggggcctcctctcgcacctgcggaagaccctcaaagatgaccttgcttccaaagccaacaytgtgatcgacccactggagctccagtcaaccgccatggatgacctagatgaggatgaggagccagccccagctatggcccagcgccccatgcaggccctggctgttggggggccactgcccctgccccggcccggctggctcagttctccaactttgggccgagccaaccgcttcctcagcacagcggctgtgagcctcatgaccccacggcggcctctgagcacctcggagaaagtgaaggtccgcacrctgagcgtggagcagaggacccgtgaggacattgaaggcagccactggaatgagggcttgctgctggggcggccccccgaggagcctgagcagcccctcaccgagaactcgctgctggaagtcctggatggggcggtcatgatgtacaacctcagcgtacaccagcagctgggcaagatggtgggtgtctccgatgatgtcaatgaatacgctatggctctgagggacacagaggacaagctccgccggtgccccaagaggaggaaggacatccttgcagagttgaccaagagccagaaggttttctcagaaaagctggaccacctgagccgccgtcttgcctgggtccatgccactgtctactcccaggagaagatgctggacatctactggctgctgcgcgtctgcctgcggaccattgagcacggtgatcrcacagggtctctctttgccttcatgcccgagttctacctgagcgtggccatcaacagctacagtgctctcaagaattactttggtcccgtgcacagcatggaggagctcccaggctatgaagagaccctgacccgcctggctgccattctcgccaaacactttgccgacgcacgcattgtgggcactgacatccgagactcactgatgcaggccctggccagctacgtgtgctacccacactccctgcgggctgtggagcgaatccccgaggagcagcgtatcgccatggtgaggaacctcctggcgccctatgagcagcggccctgggcccagaccaactggatcctggtgcggctctggaggggctgtggcttcgggtaccgctatacacggctgccacatctgctgaaaaccaaacttgaggaygccaatttgcccagcctccagaagccctgcccttccaccctgctgcagcagcacatggcggacctcctacagcagggtcctgatgtggcacccagcttcctcaacagcgtcctcaatcagctcaactgggccttctctgaattcattggcatgatccaagagatccagcaggctgctgagcgcctggagcggaactttgtggacagccggcagctcaaggtatgtgccacctgctttgacctctcggtcagcctgctgcgtgtcttggagatgactatcacactggtgcctgagatattccttgactggacccggcctacctctgagatgctgctgcggcgtcttgcacagctgctaaaccaggtgctgaaccgggtgacagctgagaggaacctgtttgatcgtgtggtcaccctacggctgcctggcctagagagcgtggaccactatcccattctggtggcagtgacgggcatcctggtgcagctcctggtgcgtggccyagcctcagagagagagcaagccacatcagtgctcctggcagatccctgcttccagctacgctcaatatgctatctcctgggacagccagagcccccagcacctggcactgctctgccagcccctgaccggaagcgcttctccctgcagagctatgcggattatatcagtgccgatgagctggcccaagtggaacagatgctggcgcacctgacctctgcatctgcccaggcagcagctgcctccctgcccaccagtgaggaggacctctgccccatctgctatgcccacccyatctctgctgtgttccagccctgtggccacaagtcctgcaaagcctgtatcaaccagcacctgatgaacaacaaggactgcttcttctgcaaaaccacccacatccaacctccttgcctgcctgtatcctcattggtgggagcccagccatggccctaattgtgcctgagcttgactttcagtcagggccacagtgagcattaaattattattccatacagccctggccctggcccttcttgagggagtggggtttgtggggtgtgcccagcagggatcctgccagatgatgtccacatgaraaggcaggtgtccaacagcttcagcttcacccagtgccccccagacaaataatgacaagtccagggtcttctgatgtgtcaggccagcactccccttgctgatgggaaaaccggggctcggccagccccactgcatcccctcacatgatgatacgaggctctggcactgactcgccaatagacttgtggggcagcacgctggctccgttgaggtagagctcatcattaactatgac

SEQ ID NO: 3323 - DNA, 4519 bp, Homo sapiens
gagtgasgggcggcagggctctgagcctggcgggttccggctattcccttcgcggtccgggctagtccastgcgagggcacctgcagcgcagggatctgrgtgcgaaactccgagcggaagctggtctggcagcccccaggaccactggctgcccatgagagatgaaggatggcatccaagggggccggcatgtctttctcccgcaagagctataggctgacctcagatgctgagaaatccagggtcacaggcattgtgcaggagaagctgctgaatgactacctgaaccgcatcttttcctcttctgaacatgcaccccsagcagccaccagcaggaaacccctgaacttccagaacctgccagaacatttggaccagttgctacaggtggacaatgaggaggaggaaagccagggacaggttgaagggcggcttggcccatccactgtggtcctggaccacacaggcggctttgaggggcttctcctggtggatgatgacctgctgggggtgattggacacagcaactttggcaccatccgctctaccacatgcgtgtacaaagggaaatggctctacgaggtcctcatctcctcccaggggctcatgcagatcggctggtgcaccatcagctgccgcttcaaccaggaggagggggttggagatacacacaactcctatgcctatgatggcaaccgcgtgcgcaagtggaatgtgaccacaacgaattatggcaaggcgtgggcagcgggggacatcgtgagctgcctgattgacctggatgatggcactctgtccttctgcctgaacggtgtatcactgggcactgcctttgagaacctgtccaggggcctgggtatggcctacttcccagccatcagcctctctttcaaggagtccgtggccttcaactttggcagccgtcctctgcgatatcattttgtgaagatggctgacccaccgagtgctgacctggtgcgggcacagaggttgctgggctgcttccgggcagtgctgagtgtggagctggaccctgtggaggggcggctgttggacaaggagagctccaagtggcggttgcggggccagcccaccgtcctcctcacactggcccacatcttccatcactttgcaccgcttctgygcaaggtgtatctggtggaggctgtgctcatgagcttcttgctgggcatcgtggagaagggcacacccacacaggcacagtccgtggtgcaccaggtcctggacctcttgtggctcttcatggaggactacgaggtacaagattgcctcaagcagttgatgatgtctctgcttcrgctgtaccgattctcacccattgtcccagacctgggcctacagatccattacctgcggctcactatcgccatcctgaggcatgagaagtcccgcaagtttctgcttagcaatgtcctcttcgacgtgctccgctccgtygtcttcttttacatcaagagccccctgcgtgtggaggaggccggcctgcaggagctcattcccaccacctggtggccccactgctccagtagggagggcaaagagagcacggagatgaaggaggagaccgcagaggagcggctgcggcggcgagcctacgaacggggctgtcagcggctcaggaagcgcatcgaagtggtggaagaactacaggtccagatcctgaagctgctgctggacaataaagatgacaatgggggtgaagcttctaggtatatcttcctgaccaagtttcgcaagtttctgcaggagaacgccagtggccgggggaacatgcccatgctctgcccccctgagtacatggtctgyttcttacaccggctgatctctgccctgcgctactattgggatgaatacaaggcttccaatcctcatgcttccttcagtgaggaggcctacatcccgccccaggtcttctataatggcraggtggactactttgacctgcagcgcctggggggcctcctctcgcacctgcggaagaccctcaaagatgaccttgcttccaaagccaacaytgtgatcgacccactggagctccagtcaaccgccatggatgacctagatgaggatgaggagccagccccagctatggcccagcgccccatgcaggccctggctgttggggggccactgcccctgccccggcccggctggctcagttctccaactttgggccgagccaaccgcttcctcagcacagcggctgtgagcctcatgaccccacggcggcctctgagcacctcggagaaagtgaaggtccgcacrctgagcgtggagcagaggacccgtgaggacattgaaggcagccactggaatgagggcttgctgctggggcggccccccgaggagcctgagcagcccctcaccgagaactcgctgctggaagtcctggatggggcggtcatgatgtacaacctcagcgtacaccagcagctgggcaagatggtgggtgtctccgatgatgtcaatgaatacgctatggctctgagggacacagaggacaagctccgccggtgccccaagaggaggaaggacatccttgcagagttgaccaagagccagaaggttttctcagaaaagctggaccacctgagccgccgtcttgcctgggtccatgccactgtctactcccaggagaagatgctggacatctactggctgctgcgcgtctgcctgcggaccattgagcacggtgatcrcacagggtctctctttgccttcatgcccgagttctacctgagcgtggccatcaacagctacagtgctctcaagaattactttggtcccgtgcacagcatggaggagctcccaggctatgaagagaccctgacccgcctggctgccattctcgccaaacactttgccgacgcacgcattgtgggcactgacatccgagactcactgatgcaggccctggccagctacgtgtgctacccacactccctgcgggctgtggagcgaatccccgaggagcagcgtatcgccatggtgaggaacctcctggcgccctatgagcagcggccctgggcccagaccaactggatcctggtgcggctctggaggggctgtggcttcgggtaccgctatacacggctgccacatctgctgaaaaccaaacttgaggaygccaatttgcccagcctccagaagccctgcccttccaccctgctgcagcagcacatggcggacctcctacagcagggtcctgatgtggcacccagcttcctcaacagcgtcctcaatcagctcaactgggccttctctgaattcattggcatgatccaagagatccagcaggctgctgagcgcctggagcggaactttgtggacagccggcagctcaaggtatgtgccacctgctttgacctctcggtcagcctgctgcgtgtcttggagatgactatcacactggtgcctgagatattccttgactggacccggcctacctctgagatgctgctgcggcgtcttgcacagctgctaaaccaggtgctgaaccgggtgacagctgagaggaacctgtttgatcgtgtggtcaccctacggctgcctggcctagagagcgtggaccactatcccattctggtggcagtgacgggcatcctggtgcagctcctggtgcgtggccyagcctcagagagagagcaagccacatcagtgctcctggcagatccctgcttccagctacgctcaatatgctatctcctgggacagccagagcccccagcacctggcactgctctgccagcccctgaccggaagcgcttctccctgcagagctatgcggattatatcagtgccgatgagctggcccaagtggaacagatgctggcgcacctgacctctgcatctgcccaggcagcagctgcctccctgcccaccagtgaggaggacctctgccccatctgctatgcccacccyatctctgctgtgttccagccctgtggccacaagtcctgcaaagcctgtatcaaccagcacctgatgaacaacaaggactgcttcttctgcaaaaccaccatcgtctccctttgcccttctcctgtatcccacaccaccacatccaacctccttgcctgcctgtatcctcattggtgggagcccagccatggccctaattgtgcctgagcttgactttcagtcagggccacagtgagcattaaattattattccatacagccctggccctggcccttcttgagggagtggggtttgtggggtgtgcccagcagggatcctgccagatgatgtccacatgaraaggcaggtgtccaacagcttcagcttcacccagtgccccccagacaaataatgacaagtccagggtcttctgatgtgtcaggccagcactccccttgctgatgggaaaaccggggctcggccagccccactgcatcccctcacatgatgatacgaggctctggcactgactcgccaatagacttgtggggcagcacgctggctccgttgaggtagagctcatcattaactatgac

SEQ ID NO: 3324 - DNA, 1766 bp, Homo sapiens
atgcctgcctctggagcccccactcccagccgacacgtctcacttcccacccttgcaggctatgaagagaccctgacccgcctggctgccattctcgccaaacactttgccgacgcacgcattgtgggcactgacatccgagactcactgatgcaggccctggccagctacgtgtgctacccacactccctgcgggctgtggagcgaatccccgaggagcagcgtatcgccatggtgaggaacctcctggcgccctatgagcagcggccctgggcccagaccaactggatcctggtgcggctctggaggggctgtggcttcgggtaccgctatacacggctgccacatctgctgaaaaccaaacttgaggaygccaatttgcccagcctccagaagccctgcccttccaccctgctgcagcagcacatggcggacctcctacagcagggtcctgatgtggcacccagcttcctcaacagcgtcctcaatcagctcaactgggccttctctgaattcattggcatgatccaagagatccagcaggctgctgagcgcctggagcggaactttgtggacagccggcagctcaaggtatgtgccacctgctttgacctctcggtcagcctgctgcgtgtcttggagatgactatcacactggtgcctgagatattccttgactggacccggcctacctctgagatgctgctgcggcgtcttgcacagctgctaaaccaggtgctgaaccgggtgacagctgagaggaacctgtttgatcgtgtggtcaccctacggctgcctggcctagagagcgtggaccactatcccattctggtggcagtgacgggcatcctggtgcagctcctggtgcgtggccyagcctcagagagagagcaagccacatcagtgctcctggcagatccctgcttccagctacgctcaatatgctatctcctgggacagccagagcccccagcacctggcactgctctgccagcccctgaccggaagcgcttctccctgcagagctatgcggattatatcagtgccgatgagctggcccaagtggaacagatgctggcgcacctgacctctgcatctgcccaggcagcagctgcctccctgcccaccagtgaggaggacctctgccccatctgctatgcccacccyatctctgctgtgttccagccctgtggccacaagtcctgcaaagcctgtatcaaccagcacctgatgaacaacaaggactgcttcttctgcaaaaccaccatcgtgtctgtagaggactgggagaagggagccaatacgagtactacctcctcagctgcctagccctcacagcctgtgccatcctggarcctccacctttgaacccagaccatggccctaattgtgcctgagcttgactttcagtcagggccacagtgagcattaaattattattccatacagccctggccctggcccttcttgagggagtggggtttgtggggtgtgcccagcagggatcctgccagatgatgtccacatgaraaggcaggtgtccaacagcttcagcttcacccagtgccccccagacaaataatgacaagtccagggtcttctgatgtgtcaggccagcactccccttgctgatgggaaaaccggggctcggccagccccactgcatcccctcacatgatgatacgaggctctggcactgactcgccaatagacttgtggggcagcacgctggctccgttgaggtagagctcatcattaactatgac

SEQ ID NO: 3325 - DNA, 2266 bp, Homo sapiens
acggcgggttcttgccagccgacggcccctactctccggttcccaggttgtgaggcggtgcggcactcttagccgcgctcccttcggcttcgctagccctctccaagcgagttcctgatcggctcctaaatactccccccaggggcggggcccgggctcctattggttcccgtttgaggaggcggggcggctacatccctttgtgcccaatggccccgcatgaccgccagatggggagcaaggccaaccccaaagtccccgtcagcctttggctggcagctctccgccgctcgtttttcctcggggagtaaaagggggagtctggaagaatgtctccaagctgctgttagtgtttatttgaagtgactttgaaggactgataatattatggggcaggcagactctcactatcttaaggkggttcgcctgagccttcttaaagtggtaccccaggccgggcgcggtggctcacgcctgtaatcccagcactttgggaagccaaggcaggtggatcacctgaggtcaggaattcgagaccagcctggccaacctggtgaaaccctgtctctactaaaaatacaacaattagccgggcgtggtggtgggcgtctgcaattccagctactcgggaggctaaagcaggagaatcacttgaacccgggaggtggaggttgcagtgagccgagatcgtgccatcgcactccagcctgggcaacagagcgagactcgtctcaagaaaaaaaaaaaaaaaacaggctgtgtggcaccttactagaatacaggacttggggtttgggaagcagggagacggaaaggatgcagggggggtgatcatgtacgagccatggcactcctcattggcaatcccaagagagacttttagccaggccccaagccttctgactgcccttgcaccctcccctacctaggagagagcaagccacatcagtgctcctggcagatccctgcttccagctacgctcaatatgctatctcctgggacagccagagcccccagcacctggcactgctctgccagcccctgaccggaagcgcttctccctgcagagctgtgagtgggctggtggggcaggtcagggaaatctggggctgggtcgggtcaggagccttaagaacagcaaagtcctaggctgggaatattcaagaggcatcacatcctcagctacctctgacttgacactacctaccactccccagatgcggattatatcagtgccgatgagctggcccaagtggaacagatgctggcgcacctgacctctgcatctgcccaggcagcagctgcctccctggtgagtgggaacacggtgcacaggtccatgccacttgaatatgtgtgcactcctacacaggcacaayggacatccacatagccaggcatccaactccagcccacccttcactctcctccctgcagcccaccagtgaggaggacctctgccccatctgctatgcccacccyatctctgctgtgttccagccctgtggccacaagtcctgcaagtaagtgggccccacagcttggtggtggggagagcagtaggtacatgcagggcagtcctcatcccctcccctgttgtagagcctgtatcaaccagcacctgatgaacaacaaggactgcttcttctgcaaaaccaccatcgtgtctgtagaggactgggagaagggagccaatacgagtactacctcctcagctgcctagccctcacagcctgtgccatcctggarcctccacctttgaacccagagccaggctgggccctatttatgagctccctttgcccttctcctgtatcccacaccaccacatccaacctccttgcctgcctgtatcctcattggtgggagcccagccatggccctaattgtgcctgagcttgactttcagtcagggccacagtgagcattaaattattattccatacagccctggccctggcccttcttgagggagtggggtttgtggggtgtgcccagcagggatcctgccagatgatgtccacatgaraaggcaggtgtccaacagcttcagcttcacccagtgccccccagacaaataatgacaagtccagggtcttctgatgtgtcaggccagcactccccttgctgatgggaaaaccggggctcggccagccccactgcatcccctcacatgatgatacgaggctctggcactgactcgccaatagacttgtggggcagcacgctggctccgttgaggtagagctcatcattaactatgac

SEQ ID NO: 3326 - DNA, 4384 bp, Homo sapiens
ctcatctcagccgccagaagtgtcatcccagggaagcccccaggaccactggctgcccatgagagatgaaggatggcatccaagggggccggcatgtctttctcccgcaagagctataggctgacctcagatgctgagaaatccagggtcacaggcattgtgcaggagaagctgctgaatgactacctgaaccgcatcttttcctcttctgaacatgcaccccsagcagccaccagcaggaaacccctgaacttccagaacctgccagaacatttggaccagttgctacaggtggacaatgaggaggaggaaagccagggacaggttgaagggcggcttggcccatccactgtggtcctggaccacacaggcggctttgaggggcttctcctggtggatgatgacctgctgggggtgattggacacagcaactttggcaccatccgctctaccacatgcgtgtacaaagggaaatggctctacgaggtcctcatctcctcccaggggctcatgcagatcggctggtgcaccatcagctgccgcttcaaccaggaggagggggttggagatacacacaactcctatgcctatgatggcaaccgcgtgcgcaagtggaatgtgaccacaacgaattatggcaaggcgtgggcagcgggggacatcgtgagctgcctgattgacctggatgatggcactctgtccttctgcctgaacggtgtatcactgggcactgcctttgagaacctgtccaggggcctgggtatggcctacttcccagccatcagcctctctttcaaggagtccgtggccttcaactttggcagccgtcctctgcgatatcattttgtgaagatggctgacccaccgagtgctgacctggtgcgggcacagaggttgctgggctgcttccgggcagtgctgagtgtggagctggaccctgtggaggggcggctgttggacaaggagagctccaagtggcggttgcggggccagcccaccgtcctcctcacactggcccacatcttccatcactttgcaccgcttctgygcaaggtgtatctggtggaggctgtgctcatgagcttcttgctgggcatcgtggagaagggcacacccacacaggcacagtccgtggtgcaccaggtcctggacctcttgtggctcttcatggaggactacgaggtacaagattgcctcaagcagttgatgatgtctctgcttcrgctgtaccgattctcacccattgtcccagacctgggcctacagatccattacctgcggctcactatcgccatcctgaggcatgagaagtcccgcaagtttctgcttagcaatgtcctcttcgacgtgctccgctccgtygtcttcttttacatcaagagccccctgcgtgtggaggaggccggcctgcaggagctcattcccaccacctggtggccccactgctccagtagggagggcaaagagagcacggagatgaaggaggagaccgcagaggagcggctgcggcggcgagcctacgaacggggctgtcagcggctcaggaagcgcatcgaagtggtggaagaactacaggtccagatcctgaagctgctgctggacaataaagatgacaatgggggtgaagcttctaggtatatcttcctgaccaagtttcgcaagtttctgcaggagaacgccagtggccgggggaacatgcccatgctctgcccccctgagtacatggtctgyttcttacaccggctgatctctgccctgcgctactattgggatgaatacaaggcttccaatcctcatgcttccttcagtgaggaggcctacatcccgccccaggtcttctataatggcraggtggactactttgacctgcagcgcctggggggcctcctctcgcacctgcggaagaccctcaaagatgaccttgcttccaaagccaacaytgtgatcgacccactggagctccagtcaaccgccatggatgacctagatgaggatgaggagccagccccagctatggcccagcgccccatgcaggccctggctgttggggggccactgcccctgccccggcccggctggctcagttctccaactttgggccgagccaaccgcttcctcagcacagcggctgtgagcctcatgaccccacggcggcctctgagcacctcggagaaagtgaaggtccgcacrctgagcgtggagcagaggacccgtgaggacattgaaggcagccactggaatgagggcttgctgctggggcggccccccgaggagcctgagcagcccctcaccgagaactcgctgctggaagtcctggatggggcggtcatgatgtacaacctcagcgtacaccagcagctgggcaagatggtgggtgtctccgatgatgtcaatgaatacgctatggctctgagggacacagaggacaagctccgccggtgccccaagaggaggaaggacatccttgcagagttgaccaagagccagaaggttttctcagaaaagctggaccacctgagccgccgtcttgcctgggtccatgccactgtctactcccaggagaagatgctggacatctactggctgctgcgcgtctgcctgcggaccattgagcacggtgatcrcacagggtctctctttgccttcatgcccgagttctacctgagcgtggccatcaacagctacagtgctctcaagaattactttggtcccgtgcacagcatggaggagctcccaggctatgaagagaccctgacccgcctggctgccattctcgccaaacactttgccgacgcacgcattgtgggcactgacatccgagactcactgatgcaggccctggccagctacgtgtgctacccacactccctgcgggctgtggagcgaatccccgaggagcagcgtatcgccatggtgaggaacctcctggcgccctatgagcagcggccctgggcccagaccaactggatcctggtgcggctctggaggggctgtggcttcgggtaccgctatacacggctgccacatctgctgaaaaccaaacttgaggaygccaatttgcccagcctccagaagccctgcccttccaccctgctgcagcagcacatggcggacctcctacagcagggtcctgatgtggcacccagcttcctcaacagcgtcctcaatcagctcaactgggccttctctgaattcattggcatgatccaagagatccagcaggctgctgagcgcctggagcggaactttgtggacagccggcagctcaaggtatgtgccacctgctttgacctctcggtcagcctgctgcgtgtcttggagatgactatcacactggtgcctgagatattccttgactggacccggcctacctctgagatgctgctgcggcgtcttgcacagctgctaaaccaggtgctgaaccgggtgacagctgagaggaacctgtttgatcgtgtggtcaccctacggctgcctggcctagagagcgtggaccactatcccattctggtggcagtgacgggcatcctggtgcagctcctggtgcgtggccyagcctcagagagagagcaagccacatcagtgctcctggcagatccctgcttccagctacgctcaatatgctatctcctgggacagccagagcccccagcacctggcactgctctgccagcccctgaccggaagcgcttctccctgcagagctatgcggattatatcagtgccgatgagctggcccaagtggaacagatgctggcgcacctgacctctgcatctgcccaggcagcagctgcctccctgcccaccagtgaggaggacctctgccccatctgctatgcccacccyatctctgctgtgttccagccctgtggccacaagtcctgcaaagcctgtatcaaccagcacctgatgaacaacaaggactgcttcttctgcaaaaccacccacatccaacctccttgcctgcctgtatcctcattggtgggagcccagccatggccctaattgtgcctgagcttgactttcagtcagggccacagtgagcattaaattattattccatacagccctggccctggcccttcttgagggagtggggtttgtggggtgtgcccagcagggatcctgccagatgatgtccacatgaraaggcaggtgtccaacagcttcagcttcacccagtgccccccagacaaataatgacaagtccagggtcttctgatgtgtcaggccagcactccccttgctgatgggaaaaccggggctcggccagccccactgcatcccctcacatgatgatacgaggctctggcactgactcgccaatagacttgtggggcagcacgctggctccgttgaggtagagctcatcattaactatgac

SEQ ID NO: 3327 - DNA, 4445 bp, Homo sapiens
ctcatctcagccgccagaagtgtcatcccagggaagcccccaggaccactggctgcccatgagagatgaaggatggcatccaagggggccggcatgtctttctcccgcaagagctataggctgacctcagatgctgagaaatccagggtcacaggcattgtgcaggagaagctgctgaatgactacctgaaccgcatcttttcctcttctgaacatgcaccccsagcagccaccagcaggaaacccctgaacttccagaacctgccagaacatttggaccagttgctacaggtggacaatgaggaggaggaaagccagggacaggttgaagggcggcttggcccatccactgtggtcctggaccacacaggcggctttgaggggcttctcctggtggatgatgacctgctgggggtgattggacacagcaactttggcaccatccgctctaccacatgcgtgtacaaagggaaatggctctacgaggtcctcatctcctcccaggggctcatgcagatcggctggtgcaccatcagctgccgcttcaaccaggaggagggggttggagatacacacaactcctatgcctatgatggcaaccgcgtgcgcaagtggaatgtgaccacaacgaattatggcaaggcgtgggcagcgggggacatcgtgagctgcctgattgacctggatgatggcactctgtccttctgcctgaacggtgtatcactgggcactgcctttgagaacctgtccaggggcctgggtatggcctacttcccagccatcagcctctctttcaaggagtccgtggccttcaactttggcagccgtcctctgcgatatcattttgtgaagatggctgacccaccgagtgctgacctggtgcgggcacagaggttgctgggctgcttccgggcagtgctgagtgtggagctggaccctgtggaggggcggctgttggacaaggagagctccaagtggcggttgcggggccagcccaccgtcctcctcacactggcccacatcttccatcactttgcaccgcttctgygcaaggtgtatctggtggaggctgtgctcatgagcttcttgctgggcatcgtggagaagggcacacccacacaggcacagtccgtggtgcaccaggtcctggacctcttgtggctcttcatggaggactacgaggtacaagattgcctcaagcagttgatgatgtctctgcttcrgctgtaccgattctcacccattgtcccagacctgggcctacagatccattacctgcggctcactatcgccatcctgaggcatgagaagtcccgcaagtttctgcttagcaatgtcctcttcgacgtgctccgctccgtygtcttcttttacatcaagagccccctgcgtgtggaggaggccggcctgcaggagctcattcccaccacctggtggccccactgctccagtagggagggcaaagagagcacggagatgaaggaggagaccgcagaggagcggctgcggcggcgagcctacgaacggggctgtcagcggctcaggaagcgcatcgaagtggtggaagaactacaggtccagatcctgaagctgctgctggacaataaagatgacaatgggggtgaagcttctaggtatatcttcctgaccaagtttcgcaagtttctgcaggagaacgccagtggccgggggaacatgcccatgctctgcccccctgagtacatggtctgyttcttacaccggctgatctctgccctgcgctactattgggatgaatacaaggcttccaatcctcatgcttccttcagtgaggaggcctacatcccgccccaggtcttctataatggcraggtggactactttgacctgcagcgcctggggggcctcctctcgcacctgcggaagaccctcaaagatgaccttgcttccaaagccaacaytgtgatcgacccactggagctccagtcaaccgccatggatgacctagatgaggatgaggagccagccccagctatggcccagcgccccatgcaggccctggctgttggggggccactgcccctgccccggcccggctggctcagttctccaactttgggccgagccaaccgcttcctcagcacagcggctgtgagcctcatgaccccacggcggcctctgagcacctcggagaaagtgaaggtccgcacrctgagcgtggagcagaggacccgtgaggacattgaaggcagccactggaatgagggcttgctgctggggcggccccccgaggagcctgagcagcccctcaccgagaactcgctgctggaagtcctggatggggcggtcatgatgtacaacctcagcgtacaccagcagctgggcaagatggtgggtgtctccgatgatgtcaatgaatacgctatggctctgagggacacagaggacaagctccgccggtgccccaagaggaggaaggacatccttgcagagttgaccaagagccagaaggttttctcagaaaagctggaccacctgagccgccgtcttgcctgggtccatgccactgtctactcccaggagaagatgctggacatctactggctgctgcgcgtctgcctgcggaccattgagcacggtgatcrcacagggtctctctttgccttcatgcccgagttctacctgagcgtggccatcaacagctacagtgctctcaagaattactttggtcccgtgcacagcatggaggagctcccaggctatgaagagaccctgacccgcctggctgccattctcgccaaacactttgccgacgcacgcattgtgggcactgacatccgagactcactgatgcaggccctggccagctacgtgtgctacccacactccctgcgggctgtggagcgaatccccgaggagcagcgtatcgccatggtgaggaacctcctggcgccctatgagcagcggccctgggcccagaccaactggatcctggtgcggctctggaggggctgtggcttcgggtaccgctatacacggctgccacatctgctgaaaaccaaacttgaggaygccaatttgcccagcctccagaagccctgcccttccaccctgctgcagcagcacatggcggacctcctacagcagggtcctgatgtggcacccagcttcctcaacagcgtcctcaatcagctcaactgggccttctctgaattcattggcatgatccaagagatccagcaggctgctgagcgcctggagcggaactttgtggacagccggcagctcaaggtatgtgccacctgctttgacctctcggtcagcctgctgcgtgtcttggagatgactatcacactggtgcctgagatattccttgactggacccggcctacctctgagatgctgctgcggcgtcttgcacagctgctaaaccaggtgctgaaccgggtgacagctgagaggaacctgtttgatcgtgtggtcaccctacggctgcctggcctagagagcgtggaccactatcccattctggtggcagtgacgggcatcctggtgcagctcctggtgcgtggccyagcctcagagagagagcaagccacatcagtgctcctggcagatccctgcttccagctacgctcaatatgctatctcctgggacagccagagcccccagcacctggcactgctctgccagcccctgaccggaagcgcttctccctgcagagctatgcggattatatcagtgccgatgagctggcccaagtggaacagatgctggcgcacctgacctctgcatctgcccaggcagcagctgcctccctgcccaccagtgaggaggacctctgccccatctgctatgcccacccyatctctgctgtgttccagccctgtggccacaagtcctgcaaagcctgtatcaaccagcacctgatgaacaacaaggactgcttcttctgcaaaaccaccatcgtgtctgtagaggactgggagaagggagccaatacgagtactacctcctcagctgcctagccctcacagcctgtgccatcctggarcctccacctttgaacccagaccatggccctaattgtgcctgagcttgactttcagtcagggccacagtgagcattaaattattattccatacagccctggccctggcccttcttgagggagtggggtttgtggggtgtgcccagcagggatcctgccagatgatgtccacatgaraaggcaggtgtccaacagcttcagcttcacccagtgccccccagacaaataatgacaagtccagggtcttctgatgtgtcaggccagcactccccttgctgatgggaaaaccggggctcggccagccccactgcatcccctcacatgatgatacgaggctctggcactgactcgccaatagacttgtggggcagcacgctggctccgttgaggtagagctcatcattaactatgac

SEQ ID NO: 3328 - DNA, 4384 bp, Homo sapiens
ctcatctcagccgccagaagtgtcatcccagggaagcccccaggaccactggctgcccatgagagatgaaggatggcatccaagggggccggcatgtctttctcccgcaagagctataggctgacctcagatgctgagaaatccagggtcacaggcattgtgcaggagaagctgctgaatgactacctgaaccgcatcttttcctcttctgaacatgcaccccsagcagccaccagcaggaaacccctgaacttccagaacctgccagaacatttggaccagttgctacaggtggacaatgaggaggaggaaagccagggacaggttgaagggcggcttggcccatccactgtggtcctggaccacacaggcggctttgaggggcttctcctggtggatgatgacctgctgggggtgattggacacagcaactttggcaccatccgctctaccacatgcgtgtacaaagggaaatggctctacgaggtcctcatctcctcccaggggctcatgcagatcggctggtgcaccatcagctgccgcttcaaccaggaggagggggttggagatacacacaactcctatgcctatgatggcaaccgcgtgcgcaagtggaatgtgaccacaacgaattatggcaaggcgtgggcagcgggggacatcgtgagctgcctgattgacctggatgatggcactctgtccttctgcctgaacggtgtatcactgggcactgcctttgagaacctgtccaggggcctgggtatggcctacttcccagccatcagcctctctttcaaggagtccgtggccttcaactttggcagccgtcctctgcgatatcattttgtgaagatggctgacccaccgagtgctgacctggtgcgggcacagaggttgctgggctgcttccgggcagtgctgagtgtggagctggaccctgtggaggggcggctgttggacaaggagagctccaagtggcggttgcggggccagcccaccgtcctcctcacactggcccacatcttccatcactttgcaccgcttctgygcaaggtgtatctggtggaggctgtgctcatgagcttcttgctgggcatcgtggagaagggcacacccacacaggcacagtccgtggtgcaccaggtcctggacctcttgtggctcttcatggaggactacgaggtacaagattgcctcaagcagttgatgatgtctctgcttcrgctgtaccgattctcacccattgtcccagacctgggcctacagatccattacctgcggctcactatcgccatcctgaggcatgagaagtcccgcaagtttctgcttagcaatgtcctcttcgacgtgctccgctccgtygtcttcttttacatcaagagccccctgcgtgtggaggaggccggcctgcaggagctcattcccaccacctggtggccccactgctccagtagggagggcaaagagagcacggagatgaaggaggagaccgcagaggagcggctgcggcggcgagcctacgaacggggctgtcagcggctcaggaagcgcatcgaagtggtggaagaactacaggtccagatcctgaagctgctgctggacaataaagatgacaatgggggtgaagcttctaggtatatcttcctgaccaagtttcgcaagtttctgcaggagaacgccagtggccgggggaacatgcccatgctctgcccccctgagtacatggtctgyttcttacaccggctgatctctgccctgcgctactattgggatgaatacaaggcttccaatcctcatgcttccttcagtgaggaggcctacatcccgccccaggtcttctataatggcraggtggactactttgacctgcagcgcctggggggcctcctctcgcacctgcggaagaccctcaaagatgaccttgcttccaaagccaacaytgtgatcgacccactggagctccagtcaaccgccatggatgacctagatgaggatgaggagccagccccagctatggcccagcgccccatgcaggccctggctgttggggggccactgcccctgccccggcccggctggctcagttctccaactttgggccgagccaaccgcttcctcagcacagcggctgtgagcctcatgaccccacggcggcctctgagcacctcggagaaagtgaaggtccgcacrctgagcgtggagcagaggacccgtgaggacattgaaggcagccactggaatgagggcttgctgctggggcggccccccgaggagcctgagcagcccctcaccgagaactcgctgctggaagtcctggatggggcggtcatgatgtacaacctcagcgtacaccagcagctgggcaagatggtgggtgtctccgatgatgtcaatgaatacgctatggctctgagggacacagaggacaagctccgccggtgccccaagaggaggaaggacatccttgcagagttgaccaagagccagaaggttttctcagaaaagctggaccacctgagccgccgtcttgcctgggtccatgccactgtctactcccaggagaagatgctggacatctactggctgctgcgcgtctgcctgcggaccattgagcacggtgatcrcacagggtctctctttgccttcatgcccgagttctacctgagcgtggccatcaacagctacagtgctctcaagaattactttggtcccgtgcacagcatggaggagctcccaggctatgaagagaccctgacccgcctggctgccattctcgccaaacactttgccgacgcacgcattgtgggcactgacatccgagactcactgatgcaggccctggccagctacgtgtgctacccacactccctgcgggctgtggagcgaatccccgaggagcagcgtatcgccatggtgaggaacctcctggcgccctatgagcagcggccctgggcccagaccaactggatcctggtgcggctctggaggggctgtggcttcgggtaccgctatacacggctgccacatctgctgaaaaccaaacttgaggaygccaatttgcccagcctccagaagccctgcccttccaccctgctgcagcagcacatggcggacctcctacagcagggtcctgatgtggcacccagcttcctcaacagcgtcctcaatcagctcaactgggccttctctgaattcattggcatgatccaagagatccagcaggctgctgagcgcctggagcggaactttgtggacagccggcagctcaaggtatgtgccacctgctttgacctctcggtcagcctgctgcgtgtcttggagatgactatcacactggtgcctgagatattccttgactggacccggcctacctctgagatgctgctgcggcgtcttgcacagctgctaaaccaggtgctgaaccgggtgacagctgagaggaacctgtttgatcgtgtggtcaccctacggctgcctggcctagagagcgtggaccactatcccattctggtggcagtgacgggcatcctggtgcagctcctggtgcgtggccyagcctcagagagagagcaagccacatcagtgctcctggcagatccctgcttccagctacgctcaatatgctatctcctgggacagccagagcccccagcacctggcactgctctgccagcccctgaccggaagcgcttctccctgcagagctatgcggattatatcagtgccgatgagctggcccaagtggaacagatgctggcgcacctgacctctgcatctgcccaggcagcagctgcctccctgcccaccagtgaggaggacctctgccccatctgctatgcccacccyatctctgctgtgttccagccctgtggccacaagtcctgcaaagcctgtatcaaccagcacctgatgaacaacaaggactgcttcttctgcaaaaccaccatcatccaacctccttgcctgcctgtatcctcattggtgggagcccagccatggccctaattgtgcctgagcttgactttcagtcagggccacagtgagcattaaattattattccatacagccctggccctggcccttcttgagggagtggggtttgtggggtgtgcccagcagggatcctgccagatgatgtccacatgaraaggcaggtgtccaacagcttcagcttcacccagtgccccccagacaaataatgacaagtccagggtcttctgatgtgtcaggccagcactccccttgctgatgggaaaaccggggctcggccagccccactgcatcccctcacatgatgatacgaggctctggcactgactcgccaatagacttgtggggcagcacgctggctccgttgaggtagagctcatcattaactatgac

SEQ ID NO: 3329 - DNA, 4422 bp, Homo sapiens
ctcatctcagccgccagaagtgtcatcccagggaagcccccaggaccactggctgcccatgagagatgaaggatggcatccaagggggccggcatgtctttctcccgcaagagctataggctgacctcagatgctgagaaatccagggtcacaggcattgtgcaggagaagctgctgaatgactacctgaaccgcatcttttcctcttctgaacatgcaccccsagcagccaccagcaggaaacccctgaacttccagaacctgccagaacatttggaccagttgctacaggtggacaatgaggaggaggaaagccagggacaggttgaagggcggcttggcccatccactgtggtcctggaccacacaggcggctttgaggggcttctcctggtggatgatgacctgctgggggtgattggacacagcaactttggcaccatccgctctaccacatgcgtgtacaaagggaaatggctctacgaggtcctcatctcctcccaggggctcatgcagatcggctggtgcaccatcagctgccgcttcaaccaggaggagggggttggagatacacacaactcctatgcctatgatggcaaccgcgtgcgcaagtggaatgtgaccacaacgaattatggcaaggcgtgggcagcgggggacatcgtgagctgcctgattgacctggatgatggcactctgtccttctgcctgaacggtgtatcactgggcactgcctttgagaacctgtccaggggcctgggtatggcctacttcccagccatcagcctctctttcaaggagtccgtggccttcaactttggcagccgtcctctgcgatatcattttgtgaagatggctgacccaccgagtgctgacctggtgcgggcacagaggttgctgggctgcttccgggcagtgctgagtgtggagctggaccctgtggaggggcggctgttggacaaggagagctccaagtggcggttgcggggccagcccaccgtcctcctcacactggcccacatcttccatcactttgcaccgcttctgygcaaggtgtatctggtggaggctgtgctcatgagcttcttgctgggcatcgtggagaagggcacacccacacaggcacagtccgtggtgcaccaggtcctggacctcttgtggctcttcatggaggactacgaggtacaagattgcctcaagcagttgatgatgtctctgcttcrgctgtaccgattctcacccattgtcccagacctgggcctacagatccattacctgcggctcactatcgccatcctgaggcatgagaagtcccgcaagtttctgcttagcaatgtcctcttcgacgtgctccgctccgtygtcttcttttacatcaagagccccctgcgtgtggaggaggccggcctgcaggagctcattcccaccacctggtggccccactgctccagtagggagggcaaagagagcacggagatgaaggaggagaccgcagaggagcggctgcggcggcgagcctacgaacggggctgtcagcggctcaggaagcgcatcgaagtggtggaagaactacaggtccagatcctgaagctgctgctggacaataaagatgacaatgggggtgaagcttctaggtatatcttcctgaccaagtttcgcaagtttctgcaggagaacgccagtggccgggggaacatgcccatgctctgcccccctgagtacatggtctgyttcttacaccggctgatctctgccctgcgctactattgggatgaatacaaggcttccaatcctcatgcttccttcagtgaggaggcctacatcccgccccaggtcttctataatggcraggtggactactttgacctgcagcgcctggggggcctcctctcgcacctgcggaagaccctcaaagatgaccttgcttccaaagccaacaytgtgatcgacccactggagctccagtcaaccgccatggatgacctagatgaggatgaggagccagccccagctatggcccagcgccccatgcaggccctggctgttggggggccactgcccctgccccggcccggctggctcagttctccaactttgggccgagccaaccgcttcctcagcacagcggctgtgagcctcatgaccccacggcggcctctgagcacctcggagaaagtgaaggtccgcacrctgagcgtggagcagaggacccgtgaggacattgaaggcagccactggaatgagggcttgctgctggggcggccccccgaggagcctgagcagcccctcaccgagaactcgctgctggaagtcctggatggggcggtcatgatgtacaacctcagcgtacaccagcagctgggcaagatggtgggtgtctccgatgatgtcaatgaatacgctatggctctgagggacacagaggacaagctccgccggtgccccaagaggaggaaggacatccttgcagagttgaccaagagccagaaggttttctcagaaaagctggaccacctgagccgccgtcttgcctgggtccatgccactgtctactcccaggagaagatgctggacatctactggctgctgcgcgtctgcctgcggaccattgagcacggtgatcrcacagggtctctctttgccttcatgcccgagttctacctgagcgtggccatcaacagctacagtgctctcaagaattactttggtcccgtgcacagcatggaggagctcccaggctatgaagagaccctgacccgcctggctgccattctcgccaaacactttgccgacgcacgcattgtgggcactgacatccgagactcactgatgcaggccctggccagctacgtgtgctacccacactccctgcgggctgtggagcgaatccccgaggagcagcgtatcgccatggtgaggaacctcctggcgccctatgagcagcggccctgggcccagaccaactggatcctggtgcggctctggaggggctgtggcttcgggtaccgctatacacggctgccacatctgctgaaaaccaaacttgaggaygccaatttgcccagcctccagaagccctgcccttccaccctgctgcagcagcacatggcggacctcctacagcagggtcctgatgtggcacccagcttcctcaacagcgtcctcaatcagctcaactgggccttctctgaattcattggcatgatccaagagatccagcaggctgctgagcgcctggagcggaactttgtggacagccggcagctcaaggtatgtgccacctgctttgacctctcggtcagcctgctgcgtgtcttggagatgactatcacactggtgcctgagatattccttgactggacccggcctacctctgagatgctgctgcggcgtcttgcacagctgctaaaccaggtgctgaaccgggtgacagctgagaggaacctgtttgatcgtgtggtcaccctacggctgcctggcctagagagcgtggaccactatcccattctggtggcagtgacgggcatcctggtgcagctcctggtgcgtggccyagcctcagagagagagcaagccacatcagtgctcctggcagatccctgcttccagctacgctcaatatgctatctcctgggacagccagagcccccagcacctggcactgctctgccagcccctgaccggaagcgcttctccctgcagagctatgcggattatatcagtgccgatgagctggcccaagtggaacagatgctggcgcacctgacctctgcatctgcccaggcagcagctgcctccctgcccaccagtgaggaggacctctgccccatctgctatgcccacccyatctctgctgtgttccagccctgtggccacaagtcctgcaaagcctgtatcaaccagcacctgatgaacaacaaggactgcttcttctgcaaaaccaccatcgtctccctttgcccttctcctgtatcccacaccaccacatccaacctccttgcctgcctgtatcctcattggtgggagcccagccatggccctaattgtgcctgagcttgactttcagtcagggccacagtgagcattaaattattattccatacagccctggccctggcccttcttgagggagtggggtttgtggggtgtgcccagcagggatcctgccagatgatgtccacatgaraaggcaggtgtccaacagcttcagcttcacccagtgccccccagacaaataatgacaagtccagggtcttctgatgtgtcaggccagcactccccttgctgatgggaaaaccggggctcggccagccccactgcatcccctcacatgatgatacgaggctctggcactgactcgccaatagacttgtggggcagcacgctggctccgttgaggtagagctcatcattaactatgac

SEQ ID NO: 3330 - DNA, 1329 bp, Homo sapiens
cggggactcgtgggtaacttgcttttgggagccagcggtatggcgtcgggctgcaagattggcccgtccatcctcaacagcgrcctggccaatttaggggccgagtgcctccggatgctagactctggggccgattatctgcacctggacgtaatggacgggcattttgttcccaacatcacctttggtcaccctgtggtagaaagccttcgaaagcagctaggccaggaccctttctttgacatgcacatgatggtgtccaagccagaacagtgggtaaagccaatggctgtagcaggagccaatcagtacacctttcatctcgaggctactgagaacccaggggctttgattaaagacattcgggagaatgggatgaaggttggccttgccatcaaaccaggaacctcagttgagtatttggcaccatgggctaatcagatagatatggccttggttatgacagtggaaccggggtttggagggcagaaattcatggaagatatgatgccaaaggttcactggttgaggacccagttcccatctttggatatagaggtcgatggtggagtaggtcctgacactgtccataaatgtgcagargcaggagctaacatgattgtgtctggcagtgctattatgaggagtgaagaccccagatctgtgatcaatctattaagaaatgtttgctcagaagctgctcagaaacgttctcttgatcggtgaaaccataaggagcccagtgttcctgttcatgaaatctcccttttactggaaaacaggaatattgactaccaaatcacaatgcaattgaagccgtactgcttttttgagcagttattcattccagtgattaaaactgattgtgcagaatattctaagaggtcagaaattgtctaattttacgctgtagcagaaccagatggctgagaaaattctggaactatggatcttgaccccaaggatatattattttattccaagaaagatcagttgtgcagaagattctgaccttatttgaggcttacatataggtttggagatgtggaaaggagtggaaaaagaaatatgtaagctgaagtgccaaactcacactgaaataaagggcatggcctaccagctgacaaggagtgtctggtttcaagatggcaaatgaccctaaacatgatagacaaataygttttacataggtacatgcacagataggcacatataaatccacatttgcaagcaaaaagtggaacctgtaaagcagaatttctgaggaatctctaaaagactaatactatatggaatttgaagaggaaacccagagcagaagcacatagt

SEQ ID NO: 3331 - DNA, 2910 bp, Homo sapiens
cggggactcgtgggtaacttgcttttgggagccagcggtatggcgtcgggctgcaagattggcccgtccatcctcaacagcgrcctggccaatttaggggccgagtgcctccggatgctagactctggggccgattatctgcacctggacgtaatggacgggcattttgttcccaacatcacctttggtcaccctgtggtagaaagccttcgaaagcagctaggccaggaccctttctttgacatgcacatgatggtgtccaagccagaacagtgggtaaagccaatggctgtagcaggagccaatcagtacacctttcatctcgaggctactgagaacccaggggctttgattaaagacattcgggagaatgggatgaaggttggccttgccatcaaaccaggaacctcagttgagtatttggcaccatgggctaatcagatagatatggccttggttatgacagtggaaccggggtttggagggcagaaattcatggaagatatgatgccaaaggttcactggttgaggacccagttcccatctttggatatagaggtcgatggtggagtaggtcctgacactgtccataaatgtgcagargagctaacatgattgtgtctggcagtgctattatgaggagtgaagaccccagatctgtgatcaatctattaagaaatgtttgctcagaagctgctcagaaacgttctcttgatcggtgaaaccataaggagcccagtgttcctgttcatgaaatctcccttttactggaaaacaggaatattgactaccaaatcacaatgcaattgaagccgtactgcttttttgagcagttattcattccagtgattaaaactgattgtgcagaatattctaagaggtcagaaattggtgtgtataactacatttttagtgatgcaatttattgattagtgagtaagatactgtttttattgagagatttgatttttataaagtaaaaatacggctgcattagggttacaaacagaaaagtgtcttaatgtctaaggagggcatattagctacactacaaaaacaaattttgtctgtacttctgaaaagaattttgttgtttctcagctgttttccaaaagcaaaggaagtctttatggtttttttctatttcatgttattgtgatttgtttataagtttgggtggggtgcataccatattcttggttcttaaaatctatcacttttcaccttayacttgatgtgtgaaaactataaaaacaatgtgtgaaacccaggggttctaaaatacaagcatagattttatcagggtgttttgtcaaagcaggttattcagtgattcctccccaccattcttaagaacgttaaataatgctgttgtgttagctctgagtagaaaggaaaaagtaaaacctctgtttggaggtaatattgggttgaattctgactgcccctttctagctggacctttaacaaatcacccaatcttttttgtgtttctctaaagtcatttatacattaaatgtaattatagcaactgtggggttctgttgagaattaagagctaacactatatatgtaaagtttccagtactagtcccagaatttagaatatgctcaacacaaagtaaacagcattatataagtttatatttttgtgagttataaagtactttgatatattctcattaaatctgtaaatcacctctataagtaagtggtaataataaagcagatatttttgtccccatttaaaaaatgaagaaattaatgcttaatagggtggtaccctggaaaggatctgggaagtggtagaatttctggtctgtacttttacaaatggagcccttgggaggtgggttaggtaaaagaagctttttacttaacgttgtcttatttccagtctaattttacgctgtagcagaaccagatggctgagaaaattctggaactatggatcttgaccccaaggatatattattttattccaagaaagatcaggtaggcgaaaagatgacaggatacagagtcaatccataaactaaatatttataactgttctgaattatacagagtctaaaaatatgtgtcagctacttcattcctgtaaatactcttgctgtgttataaatatggcaagaaataaacatgaccaatatcaatagacttcttgaggctactataagttttgagaaataaggttcaaaaaataagaatgctaacacttaagcacagactagagcttgcttgggtttcttcctgcattacaaggtaaaaatttgttaatgtttgtttttattcagcttgggaaagctttgtgccatgaatacgtcgcatttaataacaagcaacacacggcatatagaaataactttaattaaaaaacttacatagaagattataatatcagacgtgacaaagatttgagtttatttgcctggacaacttgggtttgtctggcttttgttttctttttctttaaaaataaatgtacagtaaaactacaagcaaaagtttgtcagtattgaattgaattttttaccccttaaaaggactagtataatttccaatctctaacaaaaacttagtgtcaaatctcacagataaggccaaatggccaatattttcagttatgtgggtagtacaacttgagtaaccttttttacatgacaaaaagtgagttatataaattgtcctcaactttcacataggaaaaaaatggtttaatagcttcaaaaggaattttctttcatgtatactcttcagtatccaatattgaagctttgttctttgaaaaattttaatttccaatctaggatgcaagcaagaatatatgtttatttgaatagagtaagctatggcaaagaatgaccaaattagctagaaatagaaatcagccagaattaactaatttct

SEQ ID NO: 3332 - DNA, 1332 bp, Homo sapiens
gggactcgtgggtaacttgcttttgggagccagcggtatggcgtcgggctgcaagattggcccgtccatcctcaacagcgrcctggccaatttaggggccgagtgcctccggatgctagactctggggccgattatctgcacctggacgtaatggacgggcaccctgctcttcagggaggtcagttttttacatgcacatgatggtgtccaagccagaacagtgggtaaagccaatggctgtagcaggagccaatcagtacacctttcatctcgaggctactgagaacccaggggctttgattaaagacattcgggagaatgggatgaagtcttgctctgtcacccaggctgaagtgcagtggcacagtcagggcccattgcaggttggccttgccatcaaaccaggaacctcagttgagtatttggcaccatgggctaatcagatagatatggccttggttatgacagtggaaccggggtttggagggcagaaattcatggaagatatgatgccaaaggttcactggttgaggacccagttcccatctttggatatagaggtcgatggtggagtaggtcctgacactgtccataaatgtgcagargcaggagctaacatgattgtgtctggcagtgctattatgaggagtgaagaccccagatctgtgatcaatctattaagaaatgtttgctcagaagctgctcagaaacgttctcttgatcggtgaaaccataaggagcccagtgttcctgttcatgaaatctcccttttactggaaaacaggaatattgactaccaaatcacaatgcaattgaagccgtactgcttttttgagcagttattcattccagtgattaaaactgattgtgcagaatattctaagaggtcagaaattgtctaattttacgctgtagcagaaccagatggctgagaaaattctggaactatggatcttgaccccaaggatatattattttattccaagaaagatcagttgtgcagaagattctgaccttatttgaggcttacatataggtttggagatgtggaaaggagtggaaaaagaaatatgtaagctgaagtgccaaactcacactgaaataaagggcatggcctaccagctgacaaggagtgtctggtttcaagatggcaaatgaccctaaacatgatagacaaataygttttacataggtacatgcacagataggcacatataaatccacatttgcaagcaaaaagtggaacctgtaaagcagaatttctgaggaatctctaaaagactaatactatatggaatttgaagaggaaacccagagcagaagcacatagt

SEQ ID NO: 3333 - DNA, 3390 bp, Homo sapiens
atccgggacttcagggtcagtacattacaatgcctgacaaatcctagccagttctatcaaattatatctttcttacaggcttttaagctattagtctcayaaagatacatttaatcagcgaggtaatggcatgatgagtgtttttaggttaaaaagagaacaggaactgttgscagcagaatggcgatattcaagacaacacgcacaagaagaggcgggtcctacgcgcttcgctagggaagcccgggtcagctcgctgcgcaggcgcagtgagttcgacmcaccatgccgactgtcagcgtgaagcgtgatctgctcttccaagccctgggccgcacctacactgacgaagaatttgatgaactatgttttgaatttggtctggagcttgatgaaattacatctgagaaggaaataataagtaaagaacaaggtaatgtaaaggcagcaggagcctctgatgttgttctttacaaaattgacgtccctgccaatagatatgatctcctgtgtctggaaggattggttcgaggacttcaggtcttcaaagaaaggataaaggctccagtgtataaacgggtaatgcctgatggaaaaatccagaaattgattatcacagaagagacagctaagatacgtccttttgcggtagcrgcagttctccgtaatataaagtttactaaagatcgatatgacagcttcattgaacttcaggagaaattacatcagaatatttgcaggaaaagagcactggttgccattggtacccatgatttggacactttgtcgggcccatttacttatactgcaaagcgtccttcagatatcaaattcaagcctctaaataagaccaaggagtatacagcctgtgaactgatgaacatatacaagactgacaatcacctgaaacattatttacatatcattgaaaacaaacccctgtatccagttatctatgatagcaatggtgtcgtcctttcaatgcctcccatcatcaatggggatcattccagaataacagtaaatactagaaatatttttattgaatgcacgggaactgactttactaaggcaaaaatagttcttgatattattgtcaccatgttcagtgaatattgtgagaatcaatttacggtcgaagctgctgaagtggtttttcctaatggaaaatcacatacctttccagaattagcytaccgaaaggagatggtgagagctgacctaattaacaaaaaagttggaatcagagaaactccagaaaatcttgccaaacttctgaccaggatgtatttaaaatcagaagtcataggtgatgggaatcagattgagattgaaatccctccaaccagagctgacattatccatgcatgtgatattgtagaagatgcagctattgcttatggatataacaacattcagatgactctcccgaaaacttacaccatagctaatcaatttcctcttaataagctcactgaacttctccgacatgacatggcagccgctggcttcactgaagcacttacctttgccctgtgctcccaagaagatattgctgataaactaggtgtggatatctctgcaacaaaggcagtccacataagtaatcctaaaacagctgaatttcaggtggcacgcactacccttcttcctggcctcctgaagaccatagcagcaaatcgtaagatgccccttccactgaaactgtttgaaatctctgacattgtaataaaagattctaatacagatgtaggtgcaaaaaactacagacatctctgtgctgtttattacaacaagaatcctgggtttgagatcattcatgggctgctggacagaattatgcagttgctcgatgtgcctcctggtgaagacaaggggggatatgtgatcaaagcatcagaagggcctgctttcttccccgggcratgtgcagagatctttgccaggggtcaaagcgtcgggaagcttggggtccttcatcctgacgttatcaccaaatttgagctgaccatgccctgctcctccctagaaatcaatrttggaccctttttgtgaagaytggtctctgtggtgtgattctcttcccaggtgtccctttctcctcccctagtgtccttaagtcctcctccacagggaacatctatttgggctttgatgtttaataaagtagaaagcactgtctggctgtgtgggtagagaccatcctttccctgcatrttaggccagcttgtgccatataccartgtggtgtctgtgtgtgaagctgcattgttgggtaaaagccccrtggagtgctggagaaatgcactagcagagtgcaggatctgttctgaaaggcagacgtgctcctcagacatcagaacatcacattggaacggattactcctgcataacaagatcccatttctttccttattgataaaacaagataatcgatgagaattcatgttgcatgagttcgagataactgaggggtttagctttgattttctacatttgacatgtattcatcattgagaaacactaaaataacaatatttttagaaaacgtttaagaatcaattatggtccaacaattatagcttctgaggtcagtttaaagtgaaagaaaaatctgtaatacaaggattcaaaatatgtgagggtgcataggtattttttactctatctgtgatactctaagatagagtacatgcaacaaagatctgttctgctgtaagagttaaaatggacaagtattgatatcaatgcagtatgaacattaggaaacaatgagaagcttatttttgccataggccatacatgttactgtaatcagtcagttataaaatcatggttttaaatacttaattgagctactagtttctctattgtcccagggagatattagacctctctttttctgaagctaagcttcagccaatcctccttgttttatatcctaatttcctttcttacttcaatctagaattctccagtaggtaccatctctggaaaaaagctgggtctcatgtttgagacaagttcccaggtactattgaagtaataagaaatatgataaaatataatactttaaagtcccagtagaaatagctaacaaaggctgggtgcgctgtggctcatgcctgtaatcctagcactttgggaggctgaggtgggcagatcacttgaggccaatagttcgagatcagcctgaccaacatgatgaaatgccatctccactaaaaatataaaaattagccaggcatggtggtgtgggcctgcagtcccagctacctgggaggctgagtcaggaaaatctcttgaaccaggaggtggacgttgcagtgatcccagattgtgccactgccctccagcctgggtgacagagtgagattctgtctacaaaaa

SEQ ID NO: 3334 - DNA, 1507 bp, Homo sapiens
gcagccgtctacccggtgtcgcgttctgtgttgtggcggccctggatccggcagcccgggacaccccctcaacgtccgcaggcgcgatgaaggcactgatcttagtggggggctatgggacgcggctacggccgctgacgctgagcaccccgaagccactggtggacttctgcaataagcccatcttgctgcaccaagtggaggcgctagccgcggcaggcgtggaccacgtgatcctggccgtgagctacatgtcgcaggtgctggagaaggaaatgaaggcacaggagcagaggctgggaatccgaatctccatgtcccatgaagaggagcctttggggacagctgggcccctggcgctggcccgtgacctactctctgagactgcagaccctttcttcgtcctcaacagtgacgtgatctgcgatttccccttccaagccatggtgcagttccaccggsaccatggccaggagggctccatcctggtgaccaaggtggaggaaccctccaagtacggtgtggtggtgtgtgaggctgacacaggccgcattcaccggttcgtggagaagccacaggtgtttgtgtccaataagatcaacgcaggcatgtacatcctgagccctgcagtgctgcrgcgcatccagctgcagcctacgtccattgagaaggaggtcttccccattatggccaaggaggggcagctatatgccatggagttacagggcttctggatggacattgggcagcccaaggacttcctcactggcatgtgcctcttcctgcagtcactgaggcagaagcagcctgagcggctgtgctcaggccctggcattgtgggcaacgtgctggtggacccaagtgcccgcatcggccagaactgcagcattggccccaatgtgagcctgggacctggcgtggtggtcgaagatggtgtgtgtatccggcggtgcacggtgctgcgggatgcccggatccgttcccattcctggcttgagtcctgcattgtgggctggcgctgccgcgtgggtcagtgggtaagcctgtgggctgggctgggtggggagaggggcggggagtgtgcctgcctccctgacaaggcctatcctctcctggaggtacgcatggagaacgtgacagtgctgggtgaggacgtcatagttaatgatgagctctacctcaacggagccagcgtgctgccccacaagtctattggcgagtcagtgccagagcctcgtatcatcatgtgaggggatgcagtggggctggccgagccccggttttcccatcagcaaggggagtgctggcctgacacatcagaagaccctggacttgtcattatttgtctggggggcactgggtgaagctgaagctgttggacacctgccttytcatgtggacatcatctggcaggatccctgctgggcacaccccacaaaccccactccctcaagaagggccagggccagggctgtatggaataataatttaatgctcactgtggccc

SEQ ID NO: 3335 - DNA, 1577 bp, Homo sapiens
gcgccgggtccggcctgagttcggggccagcagccgtctacccggtgtcgcgttctgtgttgtggcggccctggatccggcgtcagggcgaccgggcggacgaggtggagccagagtctgtcaggcgggttggtgaagggcgcggggccgggcacggcgttgggagtgcgcggcagggaccggccaggcgggctgcaggcacctcagagcccgggacaccccctcaacgtccgcaggcgcgatgaaggcactgatcttagtggggggctatgggacgcggctacggccgctgacgctgagcaccccgaagccactggtggacttctgcaataagcccatcttgctgcaccaagtggaggcgctagccgcggcaggcgtggaccacgtgatcctggccgtgagctacatgtcgcaggtgctggagaaggaaatgaaggcacaggagcagaggctgggaatccgaatctccatgtcccatgaagaggagcctttggggacagctgggcccctggcgctggcccgtgacctactctctgagactgcagaccctttcttcgtcctcaacagtgacgtgatctgcgatttccccttccaagccatggtgcagttccaccggsaccatggccaggagggctccatcctggtgaccaaggtggaggaaccctccaagtacggtgtggtggtgtgtgaggctgacacaggccgcattcaccggttcgtggagaagccacaggtgtttgtgtccaataagatcaacgcaggcatgtacatcctgagccctgcagtgctgcrgcgcatccagctgcagcctacgtccattgagaaggaggtcttccccattatggccaaggaggggcagctatatgccatggagttacagggcttctggatggacattgggcagcccaaggacttcctcactggcatgtgcctcttcctgcagtcactgaggcagaagcagcctgagcggctgtgctcaggccctggcattgtgggcaacgtgctggtggacccaagtgcccgcatcggccagaactgcagcattggccccaatgtgagcctgggacctggcgtggtggtcgaagatggtgtgtgtatccggcggtgcacggtgctgcgggatgcccggatccgttcccattcctggcttgagtcctgcattgtgggctggcgctgccgcgtgggtcagtgggtacgcatggagaacgtgacagtgctgggtgaggacgtcatagttaatgatgagctctacctcaacggagccagcgtgctgccccacaagtctattggcgagtcagtgccagagcctcgtatcatcatgtgaggggatgcagtggggctggccgagccccggttttcccatcagcaaggggagtgctggcctgacacatcagaagaccctggacttgtcattatttgtctggggggcactgggtgaagctgaagctgttggacacctgccttytcatgtggacatcatctggcaggatccctgctgggcacaccccacaaaccccactccctcaagaagggccagggccagggctgtatggaataataatttaatgctcactgtg

SEQ ID NO: 3336 - DNA, 1422 bp, Homo sapiens
gcagccgtctacccggtgtcgcgttctgtgttgtggcggccctggatccggcagcccgggacaccccctcaacgtccgcaggcgcgatgaaggcactgatcttagtggggggctatgggacgcggctacggccgctgacgctgagcaccccgaagccactggtggacttctgcaataagcccatcttgctgcaccaagtggaggcgctagccgcggcaggcgtggaccacgtgatcctggccgtgagctacatgtcgcaggtgctggagaaggaaatgaaggcacaggagcagaggctgggaatccgaatctccatgtcccatgaagaggagcctttggggacagctgggcccctggcgctggcccgtgacctactctctgagactgcagaccctttcttcgtcctcaacagtgacgtgatctgcgatttccccttccaagccatggtgcagttccaccggsaccatggccaggagggctccatcctggtgaccaaggtggaggaaccctccaagtacggtgtggtggtgtgtgaggctgacacaggccgcattcaccggttcgtggagaagccacaggtgtttgtgtccaataagatcaacgcaggcatgtacatcctgagccctgcagtgctgcrgcgcatccagctgcagcctacgtccattgagaaggaggtcttccccattatggccaaggaggggcagctatatgccatggagttacagggcttctggatggacattgggcagcccaaggacttcctcactggcatgtgcctcttcctgcagtcactgaggcagaagcagcctgagcggctgtgctcaggccctggcattgtgggcaacgtgctggtggacccaagtgcccgcatcggccagaactgcagcattggccccaatgtgagcctgggacctggcgtggtggtcgaagatggtgtgtgtatccggcggtgcacggtgctgcgggatgcccggatccgttcccattcctggcttgagtcctgcattgtgggctggcgctgccgcgtgggtcagtgggtacgcatggagaacgtgacagtgctgggtgaggacgtcatagttaatgatgagctctacctcaacggagccagcgtgctgccccacaagtctattggcgagtcagtgccagagcctcgtatcatcatgtgaggggatgcagtggggctggccgagccccggttttcccatcagcaaggggagtgctggcctgacacatcagaagaccctggacttgtcattatttgtctggggggcactgggtgaagctgaagctgttggacacctgccttytcatgtggacatcatctggcaggatccctgctgggcacaccccacaaaccccactccctcaagaagggccagggccagggctgtatggaataataatttaatgctcactgtg

SEQ ID NO: 3337 - DNA, 1662 bp, Homo sapiens
gcgccgggtccggcctgagttcggggccagcagccgtctacccggtgtcgcgttctgtgttgtggcggccctggatccggcgtcagggcgaccgggcggacgaggtggagccagagtctgtcaggcgggttggtgaagggcgcggggccgggcacggcgttgggagtgcgcggcagggaccggccaggcgggctgcaggcacctcagagcccgggacaccccctcaacgtccgcaggcgcgatgaaggcactgatcttagtggggggctatgggacgcggctacggccgctgacgctgagcaccccgaagccactggtggacttctgcaataagcccatcttgctgcaccaagtggaggcgctagccgcggcaggcgtggaccacgtgatcctggccgtgagctacatgtcgcaggtgctggagaaggaaatgaaggcacaggagcagaggctgggaatccgaatctccatgtcccatgaagaggagcctttggggacagctgggcccctggcgctggcccgtgacctactctctgagactgcagaccctttcttcgtcctcaacagtgacgtgatctgcgatttccccttccaagccatggtgcagttccaccggsaccatggccaggagggctccatcctggtgaccaaggtggaggaaccctccaagtacggtgtggtggtgtgtgaggctgacacaggccgcattcaccggttcgtggagaagccacaggtgtttgtgtccaataagatcaacgcaggcatgtacatcctgagccctgcagtgctgcrgcgcatccagctgcagcctacgtccattgagaaggaggtcttccccattatggccaaggaggggcagctatatgccatggagttacagggcttctggatggacattgggcagcccaaggacttcctcactggcatgtgcctcttcctgcagtcactgaggcagaagcagcctgagcggctgtgctcaggccctggcattgtgggcaacgtgctggtggacccaagtgcccgcatcggccagaactgcagcattggccccaatgtgagcctgggacctggcgtggtggtcgaagatggtgtgtgtatccggcggtgcacggtgctgcgggatgcccggatccgttcccattcctggcttgagtcctgcattgtgggctggcgctgccgcgtgggtcagtgggtaagcctgtgggctgggctgggtggggagaggggcggggagtgtgcctgcctccctgacaaggcctatcctctcctggaggtacgcatggagaacgtgacagtgctgggtgaggacgtcatagttaatgatgagctctacctcaacggagccagcgtgctgccccacaagtctattggcgagtcagtgccagagcctcgtatcatcatgtgaggggatgcagtggggctggccgagccccggttttcccatcagcaaggggagtgctggcctgacacatcagaagaccctggacttgtcattatttgtctggggggcactgggtgaagctgaagctgttggacacctgccttytcatgtggacatcatctggcaggatccctgctgggcacaccccacaaaccccactccctcaagaagggccagggccagggctgtatggaataataatttaatgctcactgtggccc

SEQ ID NO: 3338 - DNA, 2609 bp, Homo sapiens
gcagagattttatcgggagcagtgaggtgactttggcagctaacaggccactagtatcctactaaagcttttgtctggataggagcaacatgcatgtttacagtcttgcagtgtgctgagagctggtggccagtgggactgagtgagctgtgtgccgtgtattgacccgcttcctagtcctgaattcctttcagaagctccrgcagggaggatgatacagtcagacaaaggagcagatccaccagacaagaaggacatgaagctttctacagccaccaatccacagaatggcctctcccagatcctgaggcttgtgctgcaagagctgagtctgttctacrgcagagatgtgaatggagtgtgtctcttgtacgatctcctccactcgccgtggcttcaggctctgctaaagatttatgactgcctccaggaatttaaagaaaagaaactagttcctgccacaccacatgcacaggtgttatcctatgaggtagtggagttattacgtgaaacccctacttcccctgagatccaagagctgagacaaatgctccaggctccacacttcaaggcaagccttgctcagtgcccatgacacgatagctcagaaagattttgaaccccttctccctccactgccagacaatatccctgagagtgaggaagcaatgaggattgtttgtttagtgaaaaaccaacagcccctgggagccaccatcaagcgccacgagatgacaggggacatcttggtggccaggatcatccacggtgggctggcggagagaagtgggttgctatatgctggagacaaactggtagaagtgaatggagtttcagttgagggactggaccctgaacaagtgatccatattctggccatgtctcgaggcacaatcatgttcaaggtggttccagtctctgaccctcctgtgaatagccagcagatggtgtacgtccgtgccatgactgagtactggccccaggaggatcccgacatcccctgcatggacgctggattgcctttccagaagggggacatcctccagattgtggaccagaatgatgccctctggtggcaggcccgaaaaatctcagaccctgctacctgcgctgggcttgtcccttctaaccaccttctgaagaggaagcaacgggaattctggtggtctcagccgtaccagcctcacacctgcctcaagtcaaccctataagatgacatgaagattgatgagaaatgtgtggaagcagatgaagaaacatttgaatctgaggaactttcagaagacaaggaggagtttgttggctacggtcagaagttctttatagctggcttccgccgcagcatgcgcctttgtcgcaggaagtctcacctcagcccgctgcatgccagtgtgtgctgcaccggcagctgctacagtgcagtgggtgccccttacgaggaggtggtgaggtaccagcgacgcccttcagacaagtaccgcctcatagtgctcatgggaccctctggtgttggagtaaatgagctcagaagacaacttattgaatttaatcccagccattttcaaagtgctgtgccacacactactcgtactaaaaagagttacgaaatgaatgggcgtgagtatcactatgtgtccaaggaaacatttgaaaacctcatatatagtcacaggatgctggagtatggtgagtacaaaggccacctgtatggcactagtgtggatgctgttcaaacagtccttgtcgaaggaaagatctgtgtcatggacctagagcctcaggatattcaaggggttcgaacccatgaactgaagccctatgtcatatttataaagccatcgaatatgaggtgtatgaaacaatctcggaaaaatgccaagrttattactgactactatgtggacatgaagttcaaggatgaagacctacaagagatggaaaatttagcccaaagaatggaaactcagtttggccaattttttgatcatgtgattgtgaatgacagcttgcacgatgcatgtgcccagttgttgtctgccatacagaaggctcaggaggagcctcagtgggtaccagcaacatggatttcctcagatactgagtctcaatgagacttcttgtttaatgctggagttttaacactgtacccttgatacagcgatccatagttgcaatctaaaacaacagtatttgacccattttaatgtgtacaactttaaaagtgcagcartttattaattaatcttatttgaaaaaaatttttattgtatggttatgtggttacctatyttaacttaattttttttcctttacctcatatgcagctgtggtagaaatatgaataatgttaagtcactgagtatgagaacctttcgcagatttcacatgatctttttaagatttaaataaagagctttcctaaataaaataagcaatakttaactttagaaactgtactctatgaaacgtgttttatgaaaacatcttttacaaaaagtgcttacttractaactcagcaagaaaggtttaatgtacacatttcacatctaaaatcaaaacctacaagaaactgcactgccttcactatttacaaatcggcctacaagga

SEQ ID NO: 3339 - DNA, 1978 bp, Homo sapiens
gcagagattttatcgggagcagtgaggtgactttggcagctaacaggccactagtatcctactaaagcttttgtctggataggagcaacatgcatgtttacagtcttgcagtgtgctgagagctggtggccagtgggactgagtgagctgtgtgccgtgtattgacccgcttcctagtcctgaattcctttcagaagctccrgcagggaggatgatacagtcagacaaaggagcagatccaccagacaagaaggacatgaagctttctacagccaccaatccacagaatggcctctcccagatcctgaggcttgtgctgcaagagctgagtctgttctacrgcagagatgtgaatggagtgtgtctcttgtacgatctcctccactcgccgtggcttcaggctctgctaaagatttatgactgcctccaggaatttaaagaaaagaaactagttcctgccacaccacatgcacaggtgttatcctatgaggtagtggagttattacgtgaaacccctacttcccctgagatccaagagctgagacaaatgctccaggctccacacttcaaggcaaccaccatcaagcgccacgagatgacaggggacatcttggtggccaggatcatccacggtgggctggcggagagaagtgggttgctatatgctggagacaaactggtagaagtgaatggagtttcagttgagggactggaccctgaacaagtgatccatattctggccatgtctcgaggcacaatcatgttcaaggtggttccagtctctgaccctcctgtgaatagccagcagatggtgtacgtccgtgccatgactgagtactggccccaggaggatcccgacatcccctgcatggacgctggattgcctttccagaagggggacatcctccagattgtggaccagaatgatgccctctggtggcaggcccgaaaaatctcagaccctgctacctgcgctgggcttgtcccttctaaccaccttctgaagaggaagcaacgggaattctggtggtctcagccgtaccagcctcacacctgcctcaagtcaaccctatctttctatactcttttatagaagatgacatgaagattgatgagaaatgtgtggaagcagatgaagaaacatttgaatctggtaaacaaggaggagtttgttggctacggtcagaagttctttatagctggcttccgccgcagcatgcgcctttgtcgcaggaagtctcacctcagcccgctgcatgccagtgtgtgctgcaccggcagctgctacagtgcagtgggtgccccttacgaggaggtggtgaggtaccagcgacgcccttcagacaagtaccgcctcatagtgctcatgggaccctctggtgttggagtaaatgagctcagaagacaacttattgaatttaatcccagccattttcaaagtgctgtgccacacactactcgtactaaaaagagttacgaaatgaatgggcgtgagtatcactatgtgtccaaggaaacatttgaaaacctcatatatagtcacaggatgctggagtatggtgagtacaaaggccacctgtatggcactagtgtggatgctgttcaaacagtccttgtcgaaggaaagatctgtgtcatggacctagagcctcaggatattcaaggggttcgaacccatgaactgaagccctatgtcatatttataaagccatcgaatatgaggtgtatgaaacaatctcggaaaaatgccaagrttattactgactactatgtggacatgaagttcaagttttagtctgtgtgctaccaaagcaagcacaggatgaagacctacaagagatggaaaatttagcccaaagaatggaaactcagtttggccaattttttgatcatgtgattgtgaatgacagcttgcacgatgcatgtgcccagttgttgtctgccatacagaaggctcaggaggagcctcagtgggtac

SEQ ID NO: 3340 - DNA, 2498 bp, Homo sapiens
gcagagattttatcgggagcagtgaggtgactttggcagctaacaggccactagtatcctactaaagcttttgtctggataggagcaacatgcatgtttacagtcttgcagtgtgctgagagctggtggccagtgggactgagtgagctgtgtgccgtgtattgacccgcttcctagtcctgaattcctttcagaagctccrgcagggaggatgatacagtcagacaaaggagcagatccaccagacaagaaggacatgaagctttctacagccaccaatccacagaatggcctctcccagatcctgaggcttgtgctgcaagagctgagtctgttctacrgcagagatgtgaatggagtgtgtctcttgtacgatctcctccactcgccgtggcttcaggctctgctaaagatttatgactgcctccaggaatttaaagaaaagaaactagttcctgccacaccacatgcacaggtgttatcctatgaggtagtggagttattacgtgaaacccctacttcccctgagatccaagagctgagacaaatgctccaggctccacacttcaaggcaagccttgctcagtgcccatgacacgatagctcagaaagattttgaaccccttctccctccactgccagacaatatccctgagagtgaggaagcaatgaggattgtttgtttagtgaaaaaccaacagcccctgggagccaccatcaagcgccacgagatgacaggggacatcttggtggccaggatcatccacggtgggctggcggagagaagtgggttgctatatgctggagacaaactggtagaagtgaatggagtttcagttgagggactggaccctgaacaagtgatccatattctggccatgtctcgaggcacaatcatgttcaaggtggttccagtctctgaccctcctgtgaatagccagcagatggaggatcccgacatcccctgcatggacgctggattgcctttccagaagggggacatcctccagattgtggaccagaatgatgccctctggtggcaggcccgaaaaatctcagaccctgctacctgcgctgggcttgtcccttctaaccaccttctgaagaggaagcaacgggaattctggtggtctcagccgtaccagcctcacacctgcctcaagtcaaccctatacaaggaggagtttgttggctacggtcagaagttctttatagctggcttccgccgcagcatgcgcctttgtcgcaggaagtctcacctcagcccgctgcatgccagtgtgtgctgcaccggcagctgctacagtgcagtgggtgccccttacgaggaggtggtgaggtaccagcgacgcccttcagacaagtaccgcctcatagtgctcatgggaccctctggtgttggagtaaatgagctcagaagacaacttattgaatttaatcccagccattttcaaagtgctgtgccacacactactcgtactaaaaagagttacgaaatgaatgggcgtgagtatcactatgtgtccaaggaaacatttgaaaacctcatatatagtcacaggatgctggagtatggtgagtacaaaggccacctgtatggcactagtgtggatgctgttcaaacagtccttgtcgaaggaaagatctgtgtcatggacctagagcctcaggatattcaaggggttcgaacccatgaactgaagccctatgtcatatttataaagccatcgaatatgaggtgtatgaaacaatctcggaaaaatgccaagrttattactgactactatgtggacatgaagttcaaggatgaagacctacaagagatggaaaatttagcccaaagaatggaaactcagtttggccaattttttgatcatgtgattgtgaatgacagcttgcacgatgcatgtgcccagttgttgtctgccatacagaaggctcaggaggagcctcagtgggtaccagcaacatggatttcctcagatactgagtctcaatgagacttcttgtttaatgctggagttttaacactgtacccttgatacagcgatccatagttgcaatctaaaacaacagtatttgacccattttaatgtgtacaactttaaaagtgcagcartttattaattaatcttatttgaaaaaaatttttattgtatggttatgtggttacctatyttaacttaattttttttcctttacctcatatgcagctgtggtagaaatatgaataatgttaagtcactgagtatgagaacctttcgcagatttcacatgatctttttaagatttaaataaagagctttcctaaataaaataagcaatakttaactttagaaactgtactctatgaaacgtgttttatgaaaacatcttttacaaaaagtgcttacttractaactcagcaagaaaggtttaatgtacacatttcacatctaaaatcaaaacctacaagaaactgcactgccttcactatttacaaatcggcctacaagga

SEQ ID NO: 3341 - DNA, 2614 bp, Homo sapiens
gcagagattttatcgggagcagtgaggtgactttggcagctaacaggccactagtatcctactaaagcttttgtctggataggagcaacatgcatgtttacagtcttgcagtgtgctgagagctggtggccagtgggactgagtgagctgtgtgccgtgtattgacccgcttcctagtcctgaattcctttcagaagctccrgcagggaggatgatacagtcagacaaaggagcagatccaccagacaagaaggacatgaagctttctacagccaccaatccacagaatggcctctcccagatcctgaggcttgtgctgcaagagctgagtctgttctacrgcagagatgtgaatggagtgtgtctcttgtacgatctcctccactcgccgtggcttcaggctctgctaaagatttatgactgcctccaggaatttaaagaaaagaaactagttcctgccacaccacatgcacaggtgttatcctatgaggtagtggagttattacgtgaaacccctacttcccctgagatccaagagctgagacaaatgctccaggctccacacttcaaggccttgctcagtgcccatgacacgatagctcagaaagattttgaaccccttctccctccactgccagacaatatccctgagagtgaggaagcaatgaggattgtttgtttagtgaaaaaccaacagcccctgggagccaccatcaagcgccacgagatgacaggggacatcttggtggccaggatcatccacggtgggctggcggagagaagtgggttgctatatgctggagacaaactggtagaagtgaatggagtttcagttgagggactggaccctgaacaagtgatccatattctggccatgtctcgaggcacaatcatgttcaaggtggttccagtctctgaccctcctgtgaatagccagcagatggtgtacgtccgtgccatgactgagtactggccccaggaggatcccgacatcccctgcatggacgctggattgcctttccagaagggggacatcctccagattgtggaccagaatgatgccctctggtggcaggcccgaaaaatctcagaccctgctacctgcgctgggcttgtcccttctaaccaccttctgaagaggaagcaacgggaattctggtggtctcagccgtaccagcctcacacctgcctcaagtcaaccctatctttctatactcttttatagaagatgacatgaagattgatgagaaatgtgtggaagcagatgaagaaacatttgaatctggtaaacaaggaggagtttgttggctacggtcagaagttctttatagctggcttccgccgcagcatgcgcctttgtcgcaggaagtctcacctcagcccgctgcatgccagtgtgtgctgcaccggcagctgctacagtgcagtgggtgccccttacgaggaggtggtgaggtaccagcgacgcccttcagacaagtaccgcctcatagtgctcatgggaccctctggtgttggagtaaatgagctcagaagacaacttattgaatttaatcccagccattttcaaagtgctgtgccacacactactcgtactaaaaagagttacgaaatgaatgggcgtgagtatcactatgtgtccaaggaaacatttgaaaacctcatatatagtcacaggatgctggagtatggtgagtacaaaggccacctgtatggcactagtgtggatgctgttcaaacagtccttgtcgaaggaaagatctgtgtcatggacctagagcctcaggatattcaaggggttcgaacccatgaactgaagccctatgtcatatttataaagccatcgaatatgaggtgtatgaaacaatctcggaaaaatgccaagrttattactgactactatgtggacatgaagttcaaggatgaagacctacaagagatggaaaatttagcccaaagaatggaaactcagtttggccaattttttgatcatgtgattgtgaatgacagcttgcacgatgcatgtgcccagttgttgtctgccatacagaaggctcaggaggagcctcagtgggtaccagcaacatggatttcctcagatactgagtctcaatgagacttcttgtttaatgctggagttttaacactgtacccttgatacagcgatccatagttgcaatctaaaacaacagtatttgacccattttaatgtgtacaactttaaaagtgcagcartttattaattaatcttatttgaaaaaaatttttattgtatggttatgtggttacctatyttaacttaattttttttcctttacctcatatgcagctgtggtagaaatatgaataatgttaagtcactgagtatgagaacctttcgcagatttcacatgatctttttaagatttaaataaagagctttcctaaataaaataagcaatakttaactttagaaactgtactctatgaaacgtgttttatgaaaacatcttttacaaaaagtgcttacttractaactcagcaagaaaggtttaatgtacacatttcacatctaaaatcaaaacctacaagaaactgcactgccttcactatttacaaatcggcctacaagga

SEQ ID NO: 3342 - DNA, 2514 bp, Homo sapiens
ttcctcaaggcattcacggacttcctggccttcatggtcctctttaactacatcatccctgtgtccatgtacgtcacggtcgagatgcagaagttcctcggctcttacttcatcacctgggacgaagacatgtttgacgaggagactggcgaggggcctctggtgaacacgtcggacctcaatgaagagctgggacaggtggagtacatcttcacagacaagaccggcaccctcacggaaaacaacatggagttcaaggagtgctgcatcgaaggccatgtctacgtgccccacgtcatctgcaacgggcaggtcctcccagagtcgtcaggaatcgacatgattgactcgtcccccagygtcaacgggagggagcgcgaggagctgtttttccgggccctctgtctctgccacaccgtccaggtgaaagacgatgacagcgtagacggccccaggaaatcgccggacggggggaaatcctgtgtgtacatctcatcctcgcccgacgaggtggcgctggtcgaaggtgtccagagacttggctttacctacctaaggctgaaggacaattacatggagatattaaacagggagaaccacatcgaaaggtttgaattgctggaaattttgagttttgactcagtcagaaggagaatgagtgtaattgtaaaatctgctacaggagaaatttatctgttttgcaaaggagcagattcttcgatattcccccgagtgatagaaggcaaagttgaccagatccgagccagagtggagcgtaacgcagtggaggggctccgaactttgtgtgttgcttataaaaggctgatccaagaagaatatgaaggcatttgtaagctgctgcaggctgccaaagtggcccttcaagatcgagagaaaaagttagcagaagcctatgagcaaatagagaaagatcttactctgcttggtgctacagctgttgaggaccggctgcaggagaaagctgcrgacaccatcgaggccctgcagaaggccgggatcaaagtctgggttctcacgggagacaagatggagacggccgcggccacgtgctacgcctgcaagctcttccgcaggaayacgcagctgctggagctgaccaccaagaggatygaggagcagagcctgcacgacgtcctgttcgagctgagcaagacggtcctgcgccacagcgggagcctgaccagagacaacctstccggactttcagcagatatgcaggactacggtttaattatcgacggagctgcactgtctctgataatgaagcctcgagaagacgggagttccggcaactacagggagctcttcctggaaatctgccggagctgcagcgcrgtgctctgctgccgcatggcgcccttgcagaaggctcagattgttaaattaatcaaattttcaaaagagcacccaatcacgttagcaattggcgatggtgcaaatgatgtcagcatgattctggaagcgcacgtgggcataggtgtcatcggcaaggaaggccgccaggctgccaggaacagcgactatgcaatcccaaagtttaagcatttgaagaagatgctgcttgttcacgggcatttttattacattaggatctctgagctcgtgcagtacttcttctataagaacgtctgcttcatcttccctcagtttttataccagttcttctgtgggttttcacaacagactttgtacgacaccrcgtatctgaccctctacaacatcagcttcacctccctccccatcctcctgtacagcctcatggagcagcatgttggcattgacgtgctcaagagagacccgaccctgtacagggacgtcgccaagaatgccctgctgcgctggcgcgtgttcatctactggacgctcctgggactgtttgacgcactggtgttcttctttggtgcttatttcgtgtttgaaaatacaactgtgacaagcaacgggcagatatttggaaactggacgtttggaacgctggtattcaccgtgatggtgttcacagttacactaaagcttgcattggacacacactactggacttggatcaaccattttgtcatctgggggtcgctgctgttctacgttgtcttttcrcttctctggggaggagtgatctggccgttcctcaactaccagaggatgtactacgtgttcatccagatgctgtccagcgggcccgcctggctggccatcgtgctgctggtgaccatcagcctccttcccgacrtcctcaagaaagtcctgtgccggcagctgtggccaacagcaacagagagagtccagactaagagccagtgcctttctgtcgagcagtcaaccatctttatgctttctcagacttccagcagcctgagtttctgatggaacaagcctgtagagcgtggatcacaaggcctcctccctcacgcacccacttctgtgcccattctgcagctggaaagactgagggcagctaggataacacrgtttgctcaggacccatgcacatttcag

SEQ ID NO: 3343 - DNA, 5715 bp, Homo sapiens
ctgtgcctatgacgatattgcagtgaatatgagagagaaaatatctgagcaaaagttagccaaggacatgagtgggtagtgaaatgctggttgtgatgaacatgccacatttgtggccagagcacaaacttgatgtttactggccgtgcacatcttatcccatgaagacaacgtccagggatggccaccccagagcctgggggaggtgccgggccctgattctcgaggacacacgctgtgcacctttctcctcaccagggacgtcgccaagaatgccctgctgcgctggcgcgtgttcatctactggacgctcctgggactgtttgacgcactggtgttcttctttggtgcttatttcgtgtttgaaaatacaactgtgacaagcaacgggcagatatttggaaactggacgtttggaacgctggtattcaccgtgatggtgttcacagttacactaaagcttgcattggacacacactactggacttggatcaaccattttgtcatctgggggtcgctgctgttctacgttgtcttttcrcttctctggggaggagtgatctggccgttcctcaactaccagaggatgtactacgtgttcatccagatgctgtccagcgggcccgcctggctggccatcgtgctgctggtgaccatcagcctccttcccgacrtcctcaagaaagtcctgtgccggcagctgtggccaacagcaacagagagagtccagaaygggtgcgcacagcctcgggaccgcgactcagaattcacccctcttgcctctctgcagagcccaggctaccagagcacctgtccctcggccgcctggtacagctcccactctcagcaggtgacactcgyggcctggaaggagaaggtgtccacggagcccccacccatcctcggcggttcccatcaccactgcagttccatcccaagtcacagctgccctaggtcccgtgtgggaatgctcgtgtgatggatggtcctaagcctgtggagactgtgcacgtgcctcttcctggcccccagcaggcaaggaggggggtcacaggccttgccctcgarcatggcaccctggccgcctggacccagcactgtggttgttgagccacaccagtggcctctgggcattcggctcaacgcaggagggacattctgctggcccaccctgcgcgctgtcatgcagaggccattcccccaggcctgtgtcttcacccacctgccrtcattggcctttgctgtcactgggagagaagagccgtccagggacccatggtggcccacatgtggatgccacatgctgctgtttyctgcttgcccggccaccacccatgccctccatagggtgaggtggagccatggtggtgcgtcctttactcaacaaccctccaatccggatgctgtgggaagggccgggtcactcggataccatcatccctgcggatgcaccgccgtaccctgctcatctgggagtggtttccctgcggttacgtccaagcccgcctgccctgtgtgttggggctggctgagtttcggtctcyccatcaccggccgcctcgtggagaaggcagtgccacgtgggaggacaaggccacgccggcagcttccagccctgccgcagaagtgccaggatgtccatcagccactcgccagggcacggagccgtcagtccactgttacgggagaatgttgatttcgcgggtgcgagggccgggagacagatacttggctgtgatgagcagacatcctctgtccccgtggaggggtcaacaccaaggtggtgttcgtgcaccagaacctgtctcgggctgacgggggtggcacacaggacacgggtggatcccaacaggcagcaccgcacctccgcccgcctcccgcactgcagctccgcccgccgggctctgcgtcyccacgtcccctcgtcccatccccacgtcccctcatcccgtcacctcgtccccacatccccttgccccgtcacctcgtcctcatgtccccttgtcctgtcacctcgtccccacgtcccctcgtctcatccccacrtccyctcgtccccttgtcccgtccccacataccctcgtccccatgtccccacgcagggctctccttcgtcttaggatctgtccagcgctgctctgggtgggttagcaaccccagggctgctgtgataggaagtccctgttgttctccgtactggcatttctatttctagaaataatatttgacrtagccttaatggtccttaaagaagacatttcagtgtgagattcagacttcagacrctgaaactgctgcctttcaggaaagcaccaccaacgctggaggaggagccggccctcacgcccgccccgcgccacgctgtggaacggggctccggcaagtgaaacccagagggtgtttccgaggtgctcgacagtaggtatttttggaagctcagatttcaccatttgattgtataatcttttacctataaaatatttatttgaagtagagggtaaatcagcggtaagaacagtgaacacagtggttgggataaaataaggtgacaaacatcacaccaaagatgagggtagcgagcaactggcttgagcagacagaacggggaagactccactctgtcccgaggggccagccgcaggcgtccccagggccaccctgccctgaggtccttgtgtggccgccctggcttggcagccctgcccacgctgcccccgcaaacaatggtgtgtgcgtttttacagccctttttaggaacccaatatgggcataaatgtaacacctrtagcgggggcagattctctgtatgttcagttaacaaattatttgtaatgtatttttttagaaatcttaaaattgcctttgcactgaagtattttcatagctgtttatatctcttttattcatttatttaacatactgtctaattttaaaaataggtttttaaagctttcatttttaagtttatgaaattttggccactttacatttagattctggtgagagttttgactgaatgttccaatctctgatgaatgcgaattttcagatttgattttattctctacacacacctcttcttttcttggtatttctggtggcagtgattagttgaacagcacatttaaggcacgataatttgctacactttttctttacaatttgttgcaatttcatctgctttctatgtttcattgttaattgccatccttcagccttaaaaatagaagattctcacgtgaaggtttagtaagttgggtcccagctctgcctgtgtggagatagtcaccatgtacctctgacaacaagttttagtgtgaaagtcactaaacttttacacactcccaaacgtctttttaaaaattgcttgggaaattattaaatgaatgtgcctgatgatttgaaatagacaaggggcacgagataaaaaagaaaaggatgagaagatcctcagtgaatgacgttgcagggtcttcatgcaattttccacctcgcagtagttagtatttacttgccttaaactaactttgaagcaagtaatgtcaactttgagcactttgttgagttttgaaaaatcttatttctcctgcacacatgcatgcacacaaacgtgtacacaagtgtgagctcctacacgcatacacacacacacgtgtacatgcaccaaagcatgtgtgacctacagacatgcagaacatgcacgtgtacacataccacagacacgygtgtgcatgctcctacacaatacatatgcacatatcatgaacagcrtaagttcctacacacggacgtgtgatacatgcatgtacaggtaagcacacatgtacaagctcctacaggcttgctctcacacacgtgtatgcacagcagagagacgtatgagcttctactgcacacatgcacacacacacgcacacgtacattcactacamacgtgcagcctcctgcacacgtgcacattcatgtgtacaccacaaatgagttcccagacgtgtaaacacacgtgcacacatcgtacacatgtgagctcccacacgtacacacagatgcacatggacacaccccaaacacgcacaggctcctacacacatgcacacacgtgtacaccacaaacgagctcccagacatgtaaacacaygtctcccacacgtgagctcccacacatgtacacatgcacatgtacgcaccacaaacacatgcgcaggctcctgcaggcgtgaatacacacatgcacacacatatacacacaygtgccacaaacaagtgcacactgtcctggtgtcctgcactgcatcctgcctccttgctgaggggcccctgtgagaggcctctggatgggcatgggaagatgggctccctggcccccagcccatgcctccctgggatgaagagtccccctcctggcagaatgtctgggctttgcagagcaggccccgggggtgaagtcgcagcttcacttacaccagctgctctgtgagcaaggcttggtgccctggacaaggcccttcccctttagggaggtccagcctcgcaagctgaaacctcccctcggctcagccctataccaggcggccacagcaggactggccacacccacgccgcacctcatccgtgcacgcgtcggagcacggccagccttcygccacgagccagctgggaagggccgcggcygcctaaagccccagtcaacccagcctgtgtctgagcagacagggcgaacaagcaggccacaccgtctcgagggaggaggccagatgcggccagcgtctccaacagggtgaccatccgctcggcttgctgagcgtttaaacaaatgtttagacaggctgtggggactcccctgagttgagccttggccaggggtccggtgctgtcgcgggaaacctccagccttgttcttcaaaccactcagctcatgtgttttgcactgactagtactgaataatacaaccactcttatttaatgttagtattatttatttgacaactcagtgtctaacagcttgatatgcaggtccttgcatcctacatttctttaggaagttacccatttgtaactttaaaaacaggaaaaatatcagttggcaaatgcaatcttttttttttttaagctaaaggtgggtgaactggaatgaaaatctttctgatgttgtgtctataagcagccttgatgggatatgttagaagtgtcatgaaagtgtgattctacttttgcagaaaaatctaaagatcaatttatatagctttattttttactttatcaaagtatacagaattttaatatgcatatattgtgtctgacttaaaattataatgtctgcgtcaccatttaaaatgtctgttcattatgtaatgtaataaaagaaggtcttcaaaaatgtatttaacatgaatggtatccatagttgtcatcatcataaatactggagtttatttttaaattattaaacatagtaggtgcattaacataaatcagtctccacacagtaacatttaactgataattcattaatcagctttgaaaaattaaattgttaattaaaccaatctaacatttcagtaaagtttattttgtatgcttctgtttttaacttttatttctgtagataaactgactggataatattatattggacttttctctagattatctaagcaggagacctgaatctgcttgcaataaagaataaaagtctgcttcagtttctttataaa

SEQ ID NO: 3344 - DNA, 3397 bp, Homo sapiens
ctctagaacgccgcgcccgtgacccggaagagcattctccttagcaactgcgggactgcggcggcgccggcctccggggagaaacgcgaatgacaacagagctgctcaaggcgggaactctgagctaagcagtggaggtttctctggatctggagagaagagtgaccttggagccaataatgagccatcctgactacagaatgaacctccggyccctggggacccccagaggtgtgtctgctgtggctggtccacatgacattggtgcttcgccaggtgacaaaaagtcaaagaacaggtccacacgagggaagaaaaagagcatatttgaaacttacatgtccaaggaggatgtttcagaaggcttgaagagaggaacactcatccagggtgtattgagaattaatccaaagaagtttcatgaagccttcattccttccccggatggtgatcgagacatttttattgatggggttgttgctcgtaatagagccttaaatggggatctggtggtcgtgaaactgcttcccgaggagcattggaaggtagttaaaccagagagcaatgacaaagaaacagaagctgcgtatgaatcagatatccccgaggagctctgtggacaccatctcccgcarcagtccctgaaaagctataatgacagtcctgatgtcattgtagaggctcagtttgatggcagcgactcagaagatggacatggcatcacacaaaatgtgctggttgatggtgttaagaaactctcagtttgtgtttctgagaaaggaagagaggatggtgatgcaccggttacaaaagatgagaccacctgcatttcacaagacacaagagctttatcggagaaatccctgcaaagatcagcaaaggtggtttacatcttggagaaaaaacattctcgagcagcaaccggcttcctcaaactcttggctgataagaacagcgaactgtttaggaaatacgccctgttttctccctcagaccaccgagtgcctagaatttatgtgcctctcaaggactgtccccaggactttgtggcacggcctaaagattatgccaacacactgttcatctgccgcattgtggactggaaggaggactgcaattttgccctggggcagctggctaagagtcttgggcaggctggtgaaattgagcctgaaacagaaggaatactaacagagtatggcgtggatttctctgatttctcttcagaagttctagaatgtcttcctcaaggcctgccatggacaattccaccagaggagttcagcaagagaagggatttaagaaaagactgtatcttcaccattgacccatcaaccgcccgagacctcgatgatgccctctcctgcaagccactcgctgacggcaacttcaaagtgggagttcacattgctgacgtgagttactttgttccggagggatctgatctggataaagtggctgccgagagggctacaagcgtctacttggttcaaaaggtggtccccatgcttcccaggctgctgtgtgaggagctgtgcagcctcaaccccatgtccgacaagctgaccttctctgtgatctggacactgactccagagggcaagatccttgatgaatggtttggccggaccatcatccgctcctgcaccaaacttagctacgagcatgcacagagcatgattgaaagcccaactgagaaaatccctgcgaaagagctgccccccatttccccagagcatagcagcgaggaggtacaccaggccgtcttgaatctccacggaattgccaagcagttacgccagcagcgctttgtggacggcgcacttcgtttggatcagctaaagcttgctttcactctggaccacgagaccggattgcctcaaggatgtcatatctatgagtaccgcgagagcaacaagctcgtggaggagttcatgctcttggccaacatggcagtggcccacaagatccaccgcgccttccccgagcaggccctgctgcgccggcaccccccgccccaaacaaggatgctcagtgacctggtggaattctgcgaccagatggggctgcccgtggacttcagctccgcaggagccctcaataaaagcctgacccaaacatttggagatgacaagtactcactggcccgcaaggaggtgctcaccaacatgtgctcccggcccatgcagatggcactgtacttctgctcggggctgctgcaggacccagcgcagttccggcactacgcgctcaatgtgcccctgtacacacacttcacctcgcccatccgccgctttgccgacgtcctggtgcaccgcctcctggctgccgcgttaggctatagggagcgactagacatggcgcccgataccctgcagaaacaggcggaccactgtaacgaccgccgcatggcgtccaagcgcgtgcaggagctcagtaccagtctcttctttgcyrttctggtcaaggagagtggccccctggagtcagaagccatggtgatgggcatcctgaagcaagccttcgacgtgctggtgctgcgctacggcgtgcagaagcgcatctactgcaacgcactggccctgcggtcccaccacttccagaaggtgggcaagaagccggaactcacgctggtctgggagcctgaggacatggagcaggagccagcacagcaggtcatcaccatcttcagcctggtggaggtggtcctgcaggcagagtccacagccctcaagtacagcgccatcctgaagcggccaggcacccagggccacctgggccctgagaaggaggaggaggagtctgacggtgagcccgaggactcragcaccagctgagctccaccagccgcctgccccgcctgccccgcctgcctgtcccgccacactggctttaggacctgttgacacggaggggggtttttaatttggtttttaacaactcaggggtttgtttttatttttatttaatttttgcagctcaacttttaaacaaactgcaggggagagggtggggctggaaggaaggctgaggcctggtcagcagtgaccccagcagagcaggccccagtcctcctgggaggctggccccccttttttctgggccctactgccctcctctgcccaggaaatgggggggtttcagcaactcagtgtcacagaataaaatcaagtgtggagtgccatctggtgtgtagggcgcctctgggaagcctgggcagcagaatgccccttgcacccagggcaagggacccagttcaggcttcacccctcgctgctgagccgatgtcaacacctggaactttcctgtcagttccaacacgattcagagctggctgcctggcagatgattgatactggagtctcattctgcctgattaaaaatggaattagtatgc

SEQ ID NO: 3345 - DNA, 3473 bp, Homo sapiens
ctctagaacgccgcgcccgtgacccggaagagcattctccttagcaactgcgggactgcggcggcgccggcctccggggagaaacgcgaatgacaacagagctgctcaaggcgggaactctgagctaagcagtggaggtttctctggatctggagagaagagtgaccttggagccaataatgagccatcctgactacagaatgaacctccggyccctggggacccccagaggtgtgtctgctgtggctggtccacatgacattggtgcttcgccaggtgacaaaaagtcaaagaacaggtccacacgagggaagaaaaagagcatatttgaaacttacatgtccaaggaggatgtttcagaaggcttgaagagaggaacactcatccagggtgtattgagaattaatccaaagaagtttcatgaagccttcattccttccccggatggtgatcgagacatttttattgatggggttgttgctcgtaatagagccttaaatggggatctggtggtcgtgaaactgcttcccgaggagcattggaaggtagttaaaccagagagcaatgacaaagaaacagaagctgcgtatgaatcagatatccccgaggagctctgtggacaccatctcccgcarcagtccctgaaaagctataatgacagtcctgatgtcattgtagaggctcagtttgatggcagcgactcagaagatggacatggcatcacacaaaatgtgctggttgatggtgttaagaaactctcagtttgtgtttctgagaaaggaagagaggatggtgatgcaccggttacaaaagatgagaccacctgcatttcacaagacacaagagctttatcggagaaatccctgcaaagatcagcaaaggtggtttacatcttggagaaaaaacattctcgagcagcaaccggcttcctcaaactcttggctgataagaacagcgaactgtttaggaaatacgccctgttttctccctcagaccaccgagtgcctagaatttatgtgcctctcaaggactgtccccaggactttgtggcacggcctaaagattatgccaacacactgttcatctgccgcattgtggactggaaggaggactgcaattttgccctggggcagctggctaagagtcttgggcaggctggtgaaattgagcctgaaacagaaggaatactaacagagtatggcgtggatttctctgatttctcttcagaagttctagaatgtcttcctcaaggcctgccatggacaattccaccagaggagttcagcaagagaagggatttaagaaaagactgtatcttcaccattgacccatcaaccgcccgagacctcgatgatgccctctcctgcaagccactcgctgacggcaacttcaaagtgggagttcacattgctgacgtgagttactttgttccggagggatctgatctggataaagtggctgccgagagggctacaagcgtctacttggttcaaaaggtggtccccatgcttcccaggctgctgtgtgaggagctgtgcagcctcaaccccatgtccgacaagctgaccttctctgtgatctggacactgactccagagggcaagatccttgatgaatggtttggccggaccatcatccgctcctgcaccaaacttagctacgagcatgcacagagcatgattgaaagcccaactgagaaaatccctgcgaaagagctgccccccatttccccagagcatagcagcgaggaggtacaccaggccgtcttgaatctccacggaattgccaagcagttacgccagcagcgctttgtggacggcgcacttcgtttggatcagctaaagcttgctttcactctggaccacgagaccggattgcctcaaggatgtcatatctatgagtaccgcgagagcaacaagctcgtggaggagttcatgctcttggccaacatggcagtggcccacaagatccaccgcgccttccccgagcaggccctgctgcgccggcaccccccgccccaaacaaggatgctcagtgacctggtggaattctgcgaccagatggggctgcccgtggacttcagctccgcaggagccctcaataaaagcctgacccaaacatttggagatgacaagtactcactggcccgcaaggaggtgctcaccaacatgtgctcccggcccatgcagatggcactgtacttctgctcggggctgctgcaggacccagcgcagttccggcactacgcgctcaatgtgcccctgtacacacacttcacctcgcccatccgccgctttgccgacgtcctggtgcaccgcctcctggctgccgcgttaggctatagggagcgactagacatggcgcccgataccctgcagaaacaggcggaccactgtaacgaccgccgcatggcgtccaagcgcgtgcaggagctcagtaccagtctcttctttgcyrttctggtcaaggtgagccctccagcctggtgcccctcacctccctctrgctcccgaccctcctgggcacctgctcaccaggaggcctcgaggagcccagggcagtgccaggaggtgccatggctgcagcactgtccctgcaggagagtggccccctggagtcagaagccatggtgatgggcatcctgaagcaagccttcgacgtgctggtgctgcgctacggcgtgcagaagcgcatctactgcaacgcactggccctgcggtcccaccacttccagaaggtgggcaagaagccggaactcacgctggtctgggagcctgaggacatggagcaggagccagcacagcagggcattcttcctggagggggcccccattacagacaggcgagcagaggcttccagaggccgaaggaggggccaggggtcctgctgcagggatggaggcagagctgcgcctcgacatcaggccctgccatccttgtcccctcacggctgggctctgcacaggtcatcaccatcttcagcctggtggaggtggtcctgcaggcagagtccacagccctcaagtacagcgccatcctgaagcggccaggcacccagggccacctgggccctgagaaggaggaggaggagtctgacggtgagcccgaggactcragcaccagctgagctccaccagccgcctgccccgcctgccccgcctgcctgtcccgccacactggctttaggacctgttgacacggaggggggtttttaatttggtttttaacaactcaggggtttgtttttatttttatttaatttttgcagctcaacttttaaacaaactgcaggggagagggtggggctggaaggaaggctgaggcctggtcagcagtgaccccagcagagcaggccccagtcctcctgggaggctggccccccttttttctgggccctactgccctcctctgcccaggaaatgggggggtttcagcaactcagtgtcacagaataaaatcaagtgtggagtgcc

SEQ ID NO: 3346 - DNA, 2164 bp, Homo sapiens
agrgggcgttgattgggaccgagtacagggcccgcgcatgcgtggattgtcgtcttctgtccaagttggtcgcttccctgcgccaaagtgagcagtagccaacatgtcagggtgggagtcatattacaaaaccgagggcgatgaagaagcagaggaagaacaagaagagaaccttgaagcaagtggagactataaatattcaggaagagatagtttgatttttttggttgatgcctccaaggctatgtttgaatctcagagtgaagatgagttgacaccttttgacatgagcatccagtgtatccaaagtgtgtacatcagtaagatcataagcagtgatcgagatctcttggctgtggtgttctatggtaccgagaaagacaaaaattcagtgaattttaaaaatatttacgtcttacaggagctggataatccaggtgcaaaacgaattctagagcttgaccagtttaaggggcagcagggacaaaaacgtttccaagacatgatgggccacggatctgactactcactcagtgaagtgctgtgggtctgtgccaacctctttagtgatgtccaattcaagatgagtcataagaggatcatgctgttcaccaatgaagacaacccccatggcaatgacagtgccaaagccagccgggccaggaccaaagccggtgatctccgagatacaggcatcttccttgacttgatgcacctgaagaaacctgggggctttgacatatccttgttctacagagatatcatcagcatagcagaggatgaggacctcagggttcactttgaggaatccagcaagctagaagacctgttgcggaaggttcgcgccaaggagaccaggaagcgagcactcagcaggttaaagctgaagctcaacaaagatatagtgatctctgtgggcatttataatctggtccagaaggctctcaagcctcctccaataaagctctatcgggaaacaaatgaaccagtgaaaaccaagacccggacctttaatacaagtacaggcggtttgcttctgcctagcgataccaagaggtctcagatctatgggagtcgtcagattatactggagaaagaggaaacagaagagctaaaacggtttgatgatccaggtttgatgctcatgggtttcaagccgttggtactgctgaagaaacaccattacctgaggccctccctgttcgtgtacccagaggagtcgctggtgattgggagctcaaccctgttcagtgctctgctcatcaagtgtctggagaaggaggttgcagcattgtgcagatacacaccccgcaggaacatccctccttattttgtggctttggtgccacaggaagaagagttggatgaccagaaaattcaggtgactcctccaggcttccagctggtctttttaccctttgctgatgataaaaggaagatgccctttactgaaaaaatcatggcaactccagagcaggtgggcaagatgaaggctatcgttgagaagcttcgcttcacatacagaagtgacagctttgagaaccccgtgctgcagcagcacttcaggaacctggaggccttggccttggatttgatggagccggaacaagcagtggacctgacattgcccaaggttgaagcaatgaataaaagactgggctccttggtggatgagtttaaggagcttgtttacccaccagattacaatcctgaagggaaagttaccaagagaaaacacgataatgaaggttctggaagcaaaaggcccaaggtggagtattcagaagaggagctgaagacccacatcagcaagggtacgctgggcaagttcactgtgcccatgctgaaaraggcctgccgggcttacgggctgaagagtggkctgaagaagcaggagctgctggaagccctcaccaagcacttccaggactgaccagaggccgcgcgtccagctgcccttccgcagtgtggccaggctgcctggccttgtcctcagccagttaaaatgtgtttctcctgagctaggaagagtctacccgacataagtcgagggactttatgtttttgaggctttctgttgccatggtgatggtgtagccctcccactttgctgttccttactttactgcctgaataaagagccctaagtttgtactatatactg

SEQ ID NO: 3347 - DNA, 2764 bp, Homo sapiens
gattgtcgtcttctgtccaagttggtcgcttccctgcgccaaaggtaagcgggccgttatccatttgtgttgttcgccagctaggcctggcctcgtcccgcttcgctcggtcggtctcgcgcgcccccatagccttgctagagggttagcgttagccttaagtgtgcgaatccgaggagcagcgacagactcgagaccacrctccttcctcgggaaggaggcggcacctcgcgtttgaggcccgcctgcgtttgaggcccgcctgcgcttgcggcccgcctgcgcttgaggcctgtctgcgtttgagatctcattgggcgtgattgaggaatttggggaggtttttgrgcggtattgaggrcgagggggtccgttagtcagcatagaatcctggagcgggaatccctcaccgtctaaatggcgtcgggggcgggacctccgggatctggcttccgcgggccgccgccggccctgaaacgtgagggatagctgagatgaggcagctactgggatggcccccatgcgcatttacatgcagtccgactgccgagctttcgaggcagcaggatttacygtccacattcctcactactaaccaagcttttagaacagatctcacaagaacctagaggtcggtattttttcgatttaaatttgcctgttactgacgttaacgtctttcgcctagtgagcagtagccaacatgtcagggtgggagtcatattacaaaaccgagggcgatgaagaagcagaggaagaacaagaagagaaccttgaagcaagtggagactataaatattcaggaagagatagtttgatttttttggttgatgcctccaaggctatgtttgaatctcagagtgaagatgagttgacaccttttgacatgagcatccagtgtatccaaagtgtgtacatcagtaagatcataagcagtgatcgagatctcttggctgtggtgttctatggtaccgagaaagacaaaaattcagtgaattttaaaaatatttacgtcttacaggagctggataatccaggtgcaaaacgaattctagagcttgaccagtttaaggggcagcagggacaaaaacgtttccaagacatgatgggccacggatctgactactcactcagtgaagtgctgtgggtctgtgccaacctctttagtgatgtccaattcaagatgagtcataagaggatcatgctgttcaccaatgaagacaacccccatggcaatgacagtgccaaagccagccgggccaggaccaaagccggtgatctccgagatacaggcatcttccttgacttgatgcacctgaagaaacctgggggctttgacatatccttgttctacagagatatcatcagcatagcagaggatgaggacctcagggttcactttgaggaatccagcaagctagaagacctgttgcggaaggttcgcgccaaggagaccaggaagcgagcactcagcaggttaaagctgaagctcaacaaagatatagtgatctctgtgggcatttataatctggtccagaaggctctcaagcctcctccaataaagctctatcgggaaacaaatgaaccagtgaaaaccaagacccggacctttaatacaagtacaggcggtttgcttctgcctagcgataccaagaggtctcagatctatgggagtcgtcagattatactggagaaagaggaaacagaagagctaaaacggtttgatgatccaggtttgatgctcatgggtttcaagccgttggtactgctgaagaaacaccattacctgaggccctccctgttcgtgtacccagaggagtcgctggtgattgggagctcaaccctgttcagtgctctgctcatcaagtgtctggagaaggaggttgcagcattgtgcagatacacaccccgcaggaacatccctccttattttgtggctttggtgccacaggaagaagagttggatgaccagaaaattcaggtgactcctccaggcttccagctggtctttttaccctttgctgatgataaaaggaagatgccctttactgaaaaaatcatggcaactccagagcaggtgggcaagatgaaggctatcgttgagaagcttcgcttcacatacagaagtgacagctttgagaaccccgtgctgcagcagcacttcaggaacctggaggccttggccttggatttgatggagccggaacaagcagtggacctgacattgcccaaggttgaagcaatgaataaaagactgggctccttggtggatgagtttaaggagcttgtttacccaccagattacaatcctgaagggaaagttaccaagagaaaacacgataatgaaggttctggaagcaaaaggcccaaggtggagtattcagaagaggagctgaagacccacatcagcaagggtacgctgggcaagttcactgtgcccatgctgaaaraggcctgccgggcttacgggctgaagagtggkctgaagaagcaggagctgctggaagccctcaccaagcacttccaggactgaccagaggccgcgcgtccagctgcccttccgcagtgtggccaggctgcctggccttgtcctcagccagttaaaatgtgtttctcctgagctaggaagagtctacccgacataagtcgagggactttatgtttttgaggctttctgttgccatggtgatggtgtagccctcccactttgctgttccttactttactgcctgaataaagagccctaagtttgtactatatactg

SEQ ID NO: 3348 - DNA, 531 bp, Homo sapiens
ccgcagcgtmaggttgtccgcctcgggctgggggaccgccgggaccagggaagccgccgacacgttggagaccctgcggatgcccacagccacagaggggtggtccccaccgcggccgccggcacccctcgcccattgctgctccagaggacgaagccgcaggcggccaccacgagcgtcaggattagcaccttccgtttgtagatgcggaacctcatggtctccagggccgggagcgcaggcgggcgggcgcggaaaggagcagctgcttctgcacggaaggggcgggcgggcggcggccgtcgccttggcctgtcacggtcggaactggcccccgcggctccgcggctcggcttcgtctccgtcctctccattcagcaccacgggtcccggaaaaagctcagccgcggtcccaaccgcacmctagcttcgttacctgcgcctccagcggccctgcgtcctctgcgctctcatccttacaggggccctagacggccagaactgagcgacgcggcctcgcctcactccggc

SEQ ID NO: 3349 - DNA, 1271 bp, Homo sapiens
gcactgccggtaacatggcacaggagaggagggctgtttgtgcacgggcagctcctgcagctgctgccgtcgcccaccagcctcctatgccaaaccccacatcctaactcaggaacctctgagaaaaaacggagccctcgagggccccagcccttggaagggtaacctggaccgctgccgcctggttgcctgggccagaccagacatgcctgctgctccttccggcttaggaggagcacgcgtcccgctcgggcgcactctccagccttttcctggctgaggaggggccgagccctccgggtagggcgggggccggatgaggcgggaccctcaggcccggaaaactgcctgtgccacgtgacccgccgccggccagttaaaaggaggcgcctgctggcctccccttayagtgcttgttcggggcgctccgctggcttcttggacaattgcgccatgtgtgctgctcggctagcggcggcggcggcggcccagtcggtgtatgccttctcggcgcgcccgctggccggcggggagcctgtgagcctgggctccctgcggggcaaggtactacttatcgagaatgtggcgtccctctgaggcaccacggtccgggactacacccagatgaacgagctgcagcggcgcctcggaccccggggcctggtggtgctcggcttcccgtgcaaccagtttgggcatcaggagaacgccaagaacgaagagattctgaattccctcaagtacgtccggcctggtggtgggttcgagcccaacttcatgctcttcgagaagtgcgaggtgaacggtgcgggggcgcaccctctcttcgccttcctgcgggaggccctgccagctcccagcgacgacgccaccgcgcttatgaccgaccccaagctcatcacctggtctccggtgtgtcgcaacgatgttgcctggaactttgagaagttcctggtgggccctgacggtgtgcccctacgcaggtacagccgccgcttccagaccattgacatcgagcctgacatcgaagccctgctgtctcaagggcycagctgtgcctagggcgcccctcctaccccggctgcttggcagttgcagtgctgctgtctcgggggggttttcatctatgagggtgtttcctctaaacctacgagggaggaacmcctgatcttacagaaaataccmyctcgagatgggtgctggtcctgttgatcccagtytytgccagaccaaggcgagtttccccactaataaagtgccgggtgtcagca

SEQ ID NO: 3350 - DNA, 1415 bp, Homo sapiens
gcactgccggtaacatggcacaggagaggagggctgtttgtgcacgggcagctcctgcagctgctgccgtcgcccaccagcctcctatgccaaaccccacatcctaactcaggaacctctgagaaaaaacggagccctcgagggccccagcccttggaagggtaacctggaccgctgccgcctggttgcctgggccagaccagacatgcctgctgctccttccggcttaggaggagcacgcgtcccgctcgggcgcactctccagccttttcctggctgaggaggggccgagccctccgggtagggcgggggccggatgaggcgggaccctcaggcccggaaaactgcctgtgccacgtgacccgccgccggccagttaaaaggaggcgcctgctggcctccccttayagtgcttgttcggggcgctccgctggcttcttggacaattgcgccatgtgtgctgctcggctagcggcggcggcggcggcccagtcggtgtatgccttctcggcgcgcccgctggccggcggggagcctgtgagcctgggctccctgcggggcaaggtactacttatcgagaatgtggcgtccctctgaggcaccacggtccgggactacacccagatgaacgagctgcagcggcgcctcggaccccggggcctggtggtgctcggcttcccgtgcaaccagtttgggcatcagctgctgaaattcctctccgcccttgggattgcgcatggagggcaaaatcccggtgactcatagaaaatctcccttgtttgtggttagaacgtttctctcctcctcttgaccccgggttctagctgcccttctctcctgtaggagaacgccaagaacgaagagattctgaattccctcaagtacgtccggcctggtggtgggttcgagcccaacttcatgctcttcgagaagtgcgaggtgaacggtgcgggggcgcaccctctcttcgccttcctgcgggaggccctgccagctcccagcgacgacgccaccgcgcttatgaccgaccccaagctcatcacctggtctccggtgtgtcgcaacgatgttgcctggaactttgagaagttcctggtgggccctgacggtgtgcccctacgcaggtacagccgccgcttccagaccattgacatcgagcctgacatcgaagccctgctgtctcaagggcycagctgtgcctagggcgcccctcctaccccggctgcttggcagttgcagtgctgctgtctcgggggggttttcatctatgagggtgtttcctctaaacctacgagggaggaacmcctgatcttacagaaaataccmyctcgagatgggtgctggtcctgttgatcccagtytytgccagaccaaggcgagtttccccactaataaagtgccgggtgtcagcagaa

SEQ ID NO: 3351 - DNA, 3050 bp, Homo sapiens
acggggtttcaccatgttggccaggctggtcttgaactcctgacctcaagcgccaccatgcctggctgaatcagtatttttagtagagatggggtttcaccatgttggccaggctggtcttgaactcctgacctcaagtggtctgcctacctcggcctcccaaagtgctggaattacaggcgtgagcatcacgtctggcctaatttttttaatcraatttatttttgtaatgatagatgcttgtcttattcctagggaaatatttgaagtaattgagatgctgtcacctaaaataatcaaaaggctcctgattcagttaaaagaattcatttaagtacagagtgtaagcgagctacaccaaagaatggtgattagcgctcccagggtggggaaaaatgaggattgtttatataggcaaaatggaggtgccaaacagaattataacattttcrgaactaaggctcatttaaagatacaaatttgattggctactattgattrcacttgaagggatttgtttaacttccttttgtaaagaagtaacagtcataaggatctctcatctcccagtcatttagtctagttttgaataaagaatagggggtctggttaatatatacatctaaacacaaaagtcagaaagaataaaagtagtgatgttacaygagccagctgtcagtgcytaacttttccctttggcctaatgcatttggaaggtcctgaaattgtattttctttttacattgcctatgtatgtgtaagtcttcttcaggtcagttcacgctgttaaatatacgtgcgtatacatacatactatgtatgtgcgtttatgtgtgtctgtgtgttttttttttaacagacgaagcttcacaaaagatgtctaagcaacagccaactcagtttataaatccagaaacacctggctatgttggatttgcaaacctccccaatcaagttcaccgaaaatcagtgaaaaaaggttttgagttcacactgatggtggtcggtgaatcaggtctaggaaaatcgactctcataaacagcctattcctaactgatctgtacccagaaagagtcatacctggagcagcagaaaaaattgaaagaactgtccagattgaggcttcaactgttgaaattgaagagcgaggggtcaagctacgcctgacagtggtagatacccctggctatggtgacgctatcaactgcagagattgttttaagacaattatctcctatattgatgagcaatttgagaggtacctgcatgacgagagcggcttgaacaggcggcacatcattgataatagggtgcattgttgcttttactttatttcaccttttggacatgggtaagtaattgtttatcgtggagaaatgctttactacatgggtttgtaagttttacccaaactgtgtattttaatataagaattaagataatttgagrgagaagagttttgtatgtattttttttaaataagtgacaattctaaaattaattttagacttaagcccttagatgtggcrtttatgaaggcaatacacaacaaggtgaatattgtgcctgtcattgcaaaagctgacactctcaccctgaaggaacgggagcggctgaagaaaagggtgaaacatcaaaatctatcacttacctgatgcagaatcagatgaagatgaagattttaaagagcagactagacttctcaaggctagcatcccattctctgtggttggatccaatcagttgattgaagccaaaggaaagaaggtcagaggccgcctctacccctggggtgttgtggaagtggagaacccagagcacaatgactttctgaagctgagaaccatgctcatcacccacatgcaggatctccaggaggtgacccaggaccttcattatgaaaacttccgttctgagagactcaagagaggcggcaggaaagtggagaatgaggacatgaataaagaccagatcttgctggaaaaagaagctgagctccgccgcatgcaagagatgattgcaaggatgcaggcgcagatgcagatgcagatgcagggcggggatggcgatggcggggctctcgggcaccacgtgtaaggtgatgtgcacatatcaagaagtcagagaaaacactttcctggataaaaaagaaaacattccagatgcatgatccagctgtgtgttttcaatccttgggagggtgccatccacattttaacagtacctgtgcctgagaatttaatttttaaaagactttgatgtgtttttgtatgaagtacttttaacgtatgtatttcattgctgtgtcacactctgtgttttgtgaggtgaatgtcttccttttctttctccctaaccactaatgttagaattgatttccaagaatcggcatgtatacttaatactgaatttctttgatttaactgacttaacaactgactaaccattgatgagcactcctgatttttatctagaacattcagatttrccataatgttccttagtggtagaggtgtgtgcctagtgatgtagaaagatacactgacttggtgcaaggccatctgcttaccacatcacaccacttggagatctttgcttccttgcttttatgtttgtacacaacacctaaaaccagttttgctgctataattctatactgttgattcgtctgcgattttatctgttaaccaaataaaacataatagaatttcctaatgagatatatctttatacttaaacagcttttttagaggtgagttttaaagaagtctcttaattctgatgctaggttgtttttaaaaccactatgcaaagaactcaccacaagccaccttttgtagtgttctccactaatactggttatcctgtgctacagagaaaatcaaagcagtcataagctccagttttcgtattgcaaataagactcttacctacaaaatgagattcagtgaactaatttggtttttactcaaccaaattaaaaatttttttaaggaaaattagcagttggtctattcagaatcaaacctttttatattttatactgcac

SEQ ID NO: 3352 - DNA, 2701 bp, Homo sapiens
accgcgagcgctgggcgggtccgcggcgcggtcggtcggcgcctattctcgggctgtttggcggcatacagaaactgctgtaaaagaagaagttgtgggtatttttttttttttttttgtctggaggaatggggacaccaaaactcatttggcagcagaggtgagacgaagcttcacaaaagatgtctaagcaacagccaactcagtttataaatccagaaacacctggctatgttggatttgcaaacctccccaatcaagttcaccgaaaatcagtgaaaaaaggttttgagttcacactgatggtggtcggtgaatcaggtctaggaaaatcgactctcataaacagcctattcctaactgatctgtacccagaaagagtcatacctggagcagcagaaaaaattgaaagaactgtccagattgaggcttcaactgttgaaattgaagagcgaggggtcaagctacgcctgacagtggtagatacccctggctatggtgacgctatcaactgcagagattgttttaagacaattatctcctatattgatgagcaatttgagaggtacctgcatgacgagagcggcttgaacaggcggcacatcattgataatagggtgcattgttgcttttactttatttcaccttttggacatgggtaagtaattgtttatcgtggagaaatgctttactacatgggtttgtaagttttacccaaactgtgtattttaatataagaattaagataatttgagrgagaagagttttgtatgtattttttttaaataagtgacaattctaaaattaattttagacttaagcccttagatgtggcrtttatgaaggcaatacacaacaaggtgaatattgtgcctgtcattgcaaaagctgacactctcaccctgaaggaacgggagcggctgaagaaaaggataacatcaaaatctatcacttacctgatgcagaatcagatgaagatgaagattttaaagagcagactagacttctcaaggctagcatcccattctctgtggttggatccaatcagttgattgaagccaaaggaaagaaggtcagaggccgcctctacccctggggtgttgtggaagtggagaacccagagcacaatgactttctgaagctgagaaccatgctcatcacccacatgcaggatctccaggaggtgacccaggaccttcattatgaaaacttccgttctgagagactcaagagaggcggcaggaaagtggagaatgaggacatgaataaagaccagatcttgctggaaaaagaagctgagctccgccgcatgcaagagatgattgcaaggatgcaggcgcagatgcagatgcagatgcagggcggggatggcgatggcggggctctcgggcaccacgtgtaaggtgatgtgcacatatcaagaagtcagagaaaacactttcctggataaaaaagaaaacattccagatgcatgatccagctgtgtgttttcaatccttgggagggtgccatccacattttaacagtacctgtgcctgagaatttaatttttaaaagactttgatgtgtttttgtatgaagtacttttaacgtatgtatttcattgctgtgtcacactctgtgttttgtgaggtgaatgtcttccttttctttctccctaaccactaatgttagaattgatttccaagaatcggcatgtatacttaatactgaatttctttgatttaactgacttaacaactgactaaccattgatgagcactcctgatttttatctagaacattcagatttrccataatgttccttagtggtagaggtgtgtgcctagtgatgtagaaagatacactgacttggtgcaaggccatctgcttaccacatcacaccacttggagatctttgcttccttgcttttatgtttgtacacaacacctaaaaccagttttgctgctataattctatactgttgattcgtctgcgattttatctgttaaccaaataaaacataatagaatttcctaatgagatatatctttatacttaaacagcttttttagaggtgagttttaaagaagtctcttaattctgatgctaggttgtttttaaaaccactatgcaaagaactcaccacaagccaccttttgtagtgttctccactaatactggttatcctgtgctacagagaaaatcaaagcagtcataagctccagttttcgtattgcaaataagactcttacctacaaaatgagattcagtgaactaatttggtttttactcaaccaaattaaaaatttttttaaggaaaattagcagttggtctattcagaatcaaacctttttatattttatactgcacttyagtgtattttctgtcactgtaggtatagaagatctgcctcccctgtggaaattggggtctgttggtgggcktgcccctgaagcctggcttgggttgaaaagtgttcccgccctaaggccttggtgccctgaacctctgatgcctaccgggttctcctgatttgagtttcctttaaatactccctttttgagtaattttctgatgggaggaaagtagcagtcatcatctttttgtgtgcaggctgtctcatttatttttagccattgtcgtttcattcattttgtgtaatataaaccgtgtgtcatgtcaaagtgaaagacatttcaaatctgtagcataggcta

SEQ ID NO: 3353 - DNA, 4030 bp, Homo sapiens
acggggtttcaccatgttggccaggctggtcttgaactcctgacctcaagcgccaccatgcctggctgaatcagtatttttagtagagatggggtttcaccatgttggccaggctggtcttgaactcctgacctcaagtggtctgcctacctcggcctcccaaagtgctggaattacaggcgtgagcatcacgtctggcctaatttttttaatcraatttatttttgtaatgatagatgcttgtcttattcctagggaaatatttgaagtaattgagatgctgtcacctaaaataatcaaaaggctcctgattcagttaaaagaattcatttaagtacagagtgtaagcgagctacaccaaagaatggtgattagcgctcccagggtggggaaaaatgaggattgtttatataggcaaaatggaggtgccaaacagaattataacattttcrgaactaaggctcatttaaagatacaaatttgattggctactattgattrcacttgaagggatttgtttaacttccttttgtaaagaagtaacagtcataaggatctctcatctcccagtcatttagtctagttttgaataaagaatagggggtctggttaatatatacatctaaacacaaaagtcagaaagaataaaagtagtgatgttacaygagccagctgtcagtgcytaacttttccctttggcctaatgcatttggaaggtcctgaaattgtattttctttttacattgcctatgtatgtgtaagtcttcttcaggtcagttcacgctgttaaatatacgtgcgtatacatacatactatgtatgtgcgtttatgtgtgtctgtgtgttttttttttaacagacgaagcttcacaaaagatgtctaagcaacagccaactcagtttataaatccagaaacacctggctatgttggatttgcaaacctccccaatcaagttcaccgaaaatcagtgaaaaaaggttttgagttcacactgatggtggtcggtgaatcaggtctaggaaaatcgactctcataaacagcctattcctaactgatctgtacccagaaagagtcatacctggagcagcagaaaaaattgaaagaactgtccagattgaggcttcaactgttgaaattgaagagcgaggggtcaagctacgcctgacagtggtagatacccctggctatggtgacgctatcaactgcagagattgttttaagacaattatctcctatattgatgagcaatttgagaggtacctgcatgacgagagcggcttgaacaggcggcacatcattgataatagggtgcattgttgcttttactttatttcaccttttggacatggacttaagcccttagatgtggcrtttatgaaggcaatacacaacaaggtgaatattgtgcctgtcattgcaaaagctgacactctcaccctgaaggaacgggagcggctgaagaaaaggataacatcaaaatctatcacttacctgatgcagaatcagatgaagatgaagattttaaagagcagactagacttctcaaggctagcatcccattctctgtggttggatccaatcagttgattgaagccaaaggaaagaaggtcagaggccgcctctacccctggggtgttgtggaagtggagaacccagagcacaatgactttctgaagctgagaaccatgctcatcacccacatgcaggatctccaggaggtgacccaggaccttcattatgaaaacttccgttctgagagactcaagagaggcggcaggaaagtggagaatgaggacatgaataaagaccagatcttgctggaaaaagaagctgagctccgccgcatgcaagagatgattgcaaggatgcaggcgcagatgcagatgcagatgcagggcggggatggcgatggcggggctctcgggcaccacgtgtaaggtgatgtgcacatatcaagaagtcagagaaaacactttcctggataaaaaagaaaacattccagatgcatgatccagctgtgtgttttcaatccttgggagggtgccatccacattttaacagtacctgtgcctgagaatttaatttttaaaagactttgatgtgtttttgtatgaagtacttttaacgtatgtatttcattgctgtgtcacactctgtgttttgtgaggtgaatgtcttccttttctttctccctaaccactaatgttagaattgatttccaagaatcggcatgtatacttaatactgaatttctttgatttaactgacttaacaactgactaaccattgatgagcactcctgatttttatctagaacattcagatttrccataatgttccttagtggtagaggtgtgtgcctagtgatgtagaaagatacactgacttggtgcaaggccatctgcttaccacatcacaccacttggagatctttgcttccttgcttttatgtttgtacacaacacctaaaaccagttttgctgctataattctatactgttgattcgtctgcgattttatctgttaaccaaataaaacataatagaatttcctaatgagatatatctttatacttaaacagcttttttagaggtgagttttaaagaagtctcttaattctgatgctaggttgtttttaaaaccactatgcaaagaactcaccacaagccaccttttgtagtgttctccactaatactggttatcctgtgctacagagaaaatcaaagcagtcataagctccagttttcgtattgcaaataagactcttacctacaaaatgagattcagtgaactaatttggtttttactcaaccaaattaaaaatttttttaaggaaaattagcagttggtctattcagaatcaaacctttttatattttatactgcacttyagtgtattttctgtcactgtaggtatagaagatctgcctcccctgtggaaattggggtctgttggtgggcktgcccctgaagcctggcttgggttgaaaagtgttcccgccctaaggccttggtgccctgaacctctgatgcctaccgggttctcctgatttgagtttcctttaaatactccctttttgagtaattttctgatgggaggaaagtagcagtcatcatctttttgtgtgcaggctgtctcatttatttttagccattgtcgtttcattcattttgtgtaatataaaccgtgtgtcatgtcaaagtgaaagacatttcaaatctgtagcataggctagtgggcaggtccgcacagtcgaagccacacctggtctgttttctgtgcactgtagccttagtgtcacctttcttcttgtgtctccttatggtacactccagcggttgccttttttatcatttctactgaagttgggaaattcaaccccagaaattgacagatgaaaggagacaatggttgtgtagggagatggagaaaatgcttratctgaggatgagacagggttttttcatttttgtgggggctagaaaaaacataaaatgaggcagttaaataataatagttaatgaaggtgtgctacagaaaataatctggtgttcttgctaactttgcccttcactgttgcttaattgtgaacagccaaaagctrtatkttatggcttattgtgtgaaggtaactaagaagtggtgttccatgacttcagagtacatccatgcggagtccattatwtgagtttgacatttaataactttgctggaaaatctgtaaaaaagaaaaacaagtttgctagtgactaagccccgcatatgtgagtgaaagtacttcaggcacgctgmctcctggtaacagctatgcagggagggaggacccacacygctacacttctgatcccmtttggttttactacccaaatctaaatagatasttttgataatagataactgctcttttactaagacatagtctctacctatagaaatgtattttgaaaacacktattttacacagcaattttgtatccatttaaactaaccttttatcaataaagcactattgtttagatattaaa

SEQ ID NO: 3354 - DNA, 2776 bp, Homo sapiens
acggggtttcaccatgttggccaggctggtcttgaactcctgacctcaagcgccaccatgcctggctgaatcagtatttttagtagagatggggtttcaccatgttggccaggctggtcttgaactcctgacctcaagtggtctgcctacctcggcctcccaaagtgctggaattacaggcgtgagcatcacgtctggcctaatttttttaatcraatttatttttgtaatgatagatgcttgtcttattcctagggaaatatttgaagtaattgagatgctgtcacctaaaataatcaaaaggctcctgattcagttaaaagaattcatttaagtacagagtgtaagcgagctacaccaaagaatggtgattagcgctcccagggtggggaaaaatgaggattgtttatataggcaaaatggaggtgccaaacagaattataacattttcrgaactaaggctcatttaaagatacaaatttgattggctactattgattrcacttgaagggatttgtttaacttccttttgtaaagaagtaacagtcataaggatctctcatctcccagtcatttagtctagttttgaataaagaatagggggtctggttaatatatacatctaaacacaaaagtcagaaagaataaaagtagtgatgttacaygagccagctgtcagtgcytaacttttccctttggcctaatgcatttggaaggtcctgaaattgtattttctttttacattgcctatgtatgtgtaagtcttcttcaggtcagttcacgctgttaaatatacgtgcgtatacatacatactatgtatgtgcgtttatgtgtgtctgtgtgttttttttttaacagacgaagcttcacaaaagatgtctaagcaacagccaactcagtttataaatccagaaacacctggctatgttggatttgcaaacctccccaatcaagttcaccgaaaatcagtgaaaaaaggttttgagttcacactgatggtggtcggtgaatcaggtctaggaaaatcgactctcataaacagcctattcctaactgatctgtacccagaaagagtcatacctggagcagcagaaaaaattgaaagaactgtccagattgaggcttcaactgttgaaattgaagagcgaggggtcaagctacgcctgacagtggtagatacccctggctatggtgacgctatcaactgcagagattgttttaagacaattatctcctatattgatgagcaatttgagaggtacctgcatgacgagagcggcttgaacaggcggcacatcattgataatagggtgcattgttgcttttactttatttcaccttttggacatggacttaagcccttagatgtggcrtttatgaaggcaatacacaacaaggtgaatattgtgcctgtcattgcaaaagctgacactctcaccctgaaggaacgggagcggctgaagaaaagggtgaataacatcaaaatctatcacttacctgatgcagaatcagatgaagatgaagattttaaagagcagactagacttctcaaggctagcatcccattctctgtggttggatccaatcagttgattgaagccaaaggaaagaaggtcagaggccgcctctacccctggggtgttgtggaagtggagaacccagagcacaatgactttctgaagctgagaaccatgctcatcacccacatgcaggatctccaggaggtgacccaggaccttcattatgaaaacttccgttctgagagactcaagagaggcggcaggaaagtggagaatgaggacatgaataaagaccagatcttgctggaaaaagaagctgagctccgccgcatgcaagagatgattgcaaggatgcaggcgcagatgcagatgcagatgcagggcggggatggcgatggcggggctctcgggcaccacgtgtaaggtgatgtgcacatatcaagaaaaaacactttcctggataaaaaagaaaacattccagatgcatgatccagctgtgtgttttcaatccttgggagggtgccatccacattttaacagtacctgtgcctgagaatttaatttttaaaagactttgatgtgtttttgtatgaagtacttttaacgtatgtatttcattgctgtgtcacactctgtgttttgtgaggtgaatgtcttccttttctttctccctaaccactaatgttagaattgatttccaagaatcggcatgtatacttaatactgaatttctttgatttaactgacttaacaactgactaaccattgatgagcactcctgatttttatctagaacattcagatttrccataatgttccttagtggtagaggtgtgtgcctagtgatgtagaaagatacactgacttggtgcaaggccatctgcttaccacatcacaccacttggagatctttgcttccttgcttttatgtttgtacacaacacctaaaaccagttttgctgctataattctatactgttgattcgtctgcgattttatctgttaaccaaataaaacataatagaatttcctaatgagatatatctttatacttaaacagcttttttagaggtgagttttaaagaagtctcttaattctgatgctaggttgtttttaaaaccactatgcaaagaactcaccacaagccaccttttgtagtgttctccactaatactggttatcctgtgctacagagaaaatcaaagcagtcataagctccagttttcgtattgcaaataagactcttacctacaa

SEQ ID NO: 3355 - DNA, 4030 bp, Homo sapiens; identical to SEQ ID NO: 3353

SEQ ID NO: 3356 - DNA, 4923 bp, Homo sapiens
  misc_feature (1)...(4923): n = A,T,C or G
nagcctcccagatgctggcaccgaagccggggggacagccggtgtggaggacggagagcgccagtgcctgagggttggccggctagtagcgggaaaccagcttctctgaccgaagctctggactccgctgatccggagcgctaaagtgtgtccggtgccaccctgatgctctcctgggagttatgttgctcctggctgagaaatagacttacctctttcttagatagcgttcctgcgagtgattttcaggacgctggatgctaagactagacgaagcaagccaaagcccccgcgagccaggcaggccggtgtcacggccctatgattatggcaagggggaccctctgcctggctgctgcttcctgagacccgttcggaacctcacgtgtacctcgaagctcaccgttttcctcgcaaagaacctggttaaatgtccataatggctgagttttattttggaacataatttctttggttcttcaccaccactttttggagagtggtaatgtcttcctctttttgctttaggagaaagacagaataataagctgaatagaatctgaccattggctttcacctggccaggaccttctatgtagctctccttttgtggcccatgtgctgcatcctctgccctcagtgtgcaactggcccccaacgcaatgtgtgtttgtcaaaccatggaagtggggcagtatggcaagartgcaagtcgggctggagaccggggagtcctcctggagcccttcatccaccaagtaggcggacacagcagcatgatgcgttacgacgatcacactgtgtgcaagcccctcatctcccgggaacagcgcttttacgagtccctccctcccgaaatgaaggagttcacccctgaatacaaaggcgtggtatctgtctgttttgagggggacagtgatggttacatcaacttagtggcctatccttatgtggaaagtgagactgtggaacaggatgacacaacagaacgggagcaacctcggcgcaaacactcccgccggagcctgcaccggtcaggcagtggcagtgaccacaaggaggagaaagccagcctgtcccttgagacctctgagagctcacaggaggcaaagagtccgaaggtggagctgcacagccactcagaggtccctttccagatgctagatggcaacagtggcttgagttctgagaagatcagccacaacccctggagcctgcgttgtcacaagcagcagctgagccgcatgcgctccgagtccaaggaccgaaagctctacagtatcctcgttgcccctccttcaggagtgtctactgggtccataggtcagttcctcctgcttgagaacgtggtgcaccacttcaagtacccctgygtgttggacctgaagatgggcacgcggcagcatggcgatgacgcgtcagctgagaaggcagcccggcagatgcggaaatgcgagcagagcacatcagccacgctgggygtcagggtctgcggcatgcaggtgtaccagctggacacagggcattacctctgcaggaacaagtactatggccgtgggctctccattgaaggcttccgcaatgccctctatcaatatctgcacaatggcctggacctgcgacgtgacctgtttgagcctatcctgagcaaactgcggggcctgaaagctgtgctggagcggcaggcctcttaccgcttctactccagttccctgcttgtcatctatgatggcaaggagtgccgggctgagtcctgcctggaccgccggtctgagatgcgtctcaagcacctggacatggtgctccctgaggtggcgtcatcctgtggccccagcaccagccccagcaacaccagccccgaggcgggtccctcctctcagcccaaggtggatgtccgcatgattgactttgcacacagcacattcaagggcttccgggatgaccccaccgtgcatgatgggccagacagaggctacgtgtttggcctggagaacctcatcagcatcatggaacagatgcgggacgagaaccagtaggccctgttctgggcccccagaaccccttcctctccactgcaggcagggaccattgttctgaacttgccgtgaggacacacagacttgcttttaaagggttatatttctctttggtgtaaactaaaagaaatgtttttagctgtagcctggaatccatatatataaagtgaaggagggcagaccacacgccctctcagccaggctcctcagctttgtggctctgactggtgtgtccaggctgccttaggaaggaagaggtgcccctggtgggcttggcagcagggacagggtgcccttggacattggtttctcttgtctagatctttgagatctgtggctgcagggccctgctgattgtaaggtaaagccctgggctggtgcagggcccctccacgcccactcttcccttgttccccagaagtagagggctctgggtgcccatttcttgggggctttccagtcttatgctgtgggtgtcagctagctctttaataggtgccctcagggcaccacagggctgactgcacaaagctggacccatccttcggtctgaccttagcatggggctagattaatgaagctgggctgaggccaacttatggcagagggcggcgcctgggttccccaggcacctgttggcacgtgacaggttggcacctgtcctattcctgaaacagcctctctcaccaagttcccttgcctaagaaggccactccctcccaccccactgaagtgggggatagtcggtgtcctagcaggcctcagggcctctggtggctctggcccagacagtatttgcagttcttgtgctatgggtgggagtcttcttcctcaagtttcggcagctgtgctgctgctggatgggctgctcytccsasggctcaagggctgtggtcygctcagggtctcatttccccaggccaagttcaaggcagcagccctttgtgaggcgctcttggccctgggcctggagggagaactttaagcttttttgctcacagggacgtggtatgggccctgggtgcaggtgcccacattctgctaatgagagctttgtctgatcagtcctgggtccatcagtttgtccatgtgtccggctgccagcccgtcccttgggatccttcccctggggtgtagccttgttcattagtatatactcattccttcatgctttcctcagcagaacacttccacttctgaggtgagcttttgccccrtgcccttcctccacaggtgttgcctttttataaagacctgatagcagaataaattggtgtttccctgttgacccagcaccatttctgtgggcctagaatatggccctcaacccttagagtggggcagtgagggcttgaggagtgacccttcctttctcatggttttagtcattttggctgccagcccttaatggcacagatctgctgctyctaacagatggccaggaggtgacaccgatttcagccattgccaaggttagcaccctctcctttgagcctagggccacactgttcattgtcactttaggcaagtgcctgtttggctttaaaggtaagcctgccagctgtgagaagccttggtaactgatggactcatttcctggtccttaaagatgcagcctcttaagggctccttgatggatgccatctctcctagcccccagccctggtgccactggtgggcaggttcccattctttggggctgggagggacagcttgcctgtttctggtcacaaattacagtcttctctcctgtaccattctgtggcttcagccatgggggcagtagcccttcattagtgtagatagtcattccctggtagggtggagggtaagacatagggtctggaactgtttgggaccttttggggatgtcctgtgcctcccagattcctcgattctgggaggagaggctgccgcattctgctgctyctcacagcgagcaaagctgcacccacttacattcagtattttcctggcactacaaagagtgggaaggcctgggatttgctgctgctcccttagagcagggcccctyttttcagcactttggacacctggagacccagccctgttatttaatggtagtgggcaagtgtgtgtgcatactgtctgccactgctttctccctgccccatgccagagagccctgtccctgccaggcccagccttcttagccccaacttgggaacaaagtgcaacatgggatcatgggttggggtgctcaggtgagccctctctatagtgmttccctgggccaagctgacaccagcccctgagggtggggtgggacgggtggtgcttaaaagaggaaggggaccagtgtagcaacttgccagggaccccacccctccctctctgggcctgtgcagtgagcatggggattcccatcaaggggcctggcacctgtgctagttacgtagccgctgctcacgcgctcactcctgaccacatgcacgttccctagatgcagactgctttgaactttaaagctgtacaatttggttatgtttgtgctgacttaaaatatattttaatgaggaaaaaataatggagaaccctgggaaggacctggttcttttgcttctcggggaactgtaagccctcgcgttctgggaatcgctctctgctgctctttcctggaagctaagcctgtctccaccgcccgaggcctgcgccggtggctcccgccgcagttgcgtttgctttggaccttgcgtgcgggggagggggtgctcggtccgagcccgctcctttctgtacacctagcgctgcccgccccgcttgtgtctgaggtcgtgtatgtcaaaaataaagccgctagaaacggaggcgagtctgtctttgtgaaaatcccgtggcccgggagccttccctggtcaccctcggg

SEQ ID NO: 3357 - DNA, 4613 bp, Homo sapiens
cagtgggcagcgccgggagctggaccaagcggccggtgagaggccgctgtagcggtgctcagccacctgtgctgcctgccagggggcgggccgaaacctggaggcccggggggcccagctcccgtaggagccgtgggcgctcggtgcccgggccgggcagacagagtctctcgctctgttgcccaggccggagtgcagtggcgcgatctcggctcaccacagcctccacctcccgggttcaagcgattatcctgcctcagcctcccgagtaggacagaataataagctgaatagaatctgaccattggctttcacctggccaggaccttctatgtagctctccttttgtggcccatgtgctgcatcctctgccctcagtgtgcaactggcccccaacgcaatgtgtgtttgtcaaaccatggaagtggggcagtatggcaagartgcaagtcgggctggagaccggggagtcctcctggagcccttcatccaccaagtaggcggacacagcagcatgatgcgttacgacgatcacactgtgtgcaagcccctcatctcccgggaacagcgcttttacgagtccctccctcccgaaatgaaggagttcacccctgaatacaaaggcgtggtatctgtctgttttgagggggacagtgatggttacatcaacttagtggcctatccttatgtggaaagtgagactgtggaacaggatgacacaacagaacgggagcaacctcggcgcaaacactcccgccggagcctgcaccggtcaggcagtggcagtgaccacaaggaggagaaagccagcctgtcccttgagacctctgagagctcacaggaggcaaagagtccgaaggtggagctgcacagccactcagaggtccctttccagatgctagatggcaacagtggcttgagttctgagaagatcagccacaacccctggagcctgcgttgtcacaagcagcagctgagccgcatgcgctccgagtccaaggaccgaaagctctacaagttcctcctgcttgagaacgtggtgcaccacttcaagtacccctgygtgttggacctgaagatgggcacgcggcagcatggcgatgacgcgtcagctgagaaggcagcccggcagatgcggaaatgcgagcagagcacatcagccacgctgggygtcagggtctgcggcatgcaggtgtaccagctggacacagggcattacctctgcaggaacaagtactatggccgtgggctctccattgaaggcttccgcaatgccctctatcaatatctgcacaatggcctggacctgcgacgtgacctgtttgagcctatcctgagcaaactgcggggcctgaaagctgtgctggagcggcaggcctcttaccgcttctactccagttccctgcttgtcatctatgatggcaaggagtgccgggctgagtcctgcctggaccgccggtctgagatgcgtctcaagcacctggacatggtgctccctgaggtggcgtcatcctgtggccccagcaccagccccagcaacaccagccccgaggcgggtccctcctctcagcccaaggtggatgtccgcatgattgactttgcacacagcacattcaagggcttccgggatgaccccaccgtgcatgatgggccagacagaggctacgtgtttggcctggagaacctcatcagcatcatggaacagatgcgggacgagaaccagtaggccctgttctgggcccccagaaccccttcctctccactgcaggcagggaccattgttctgaacttgccgtgaggacacacagacttgcttttaaagggttatatttctctttggtgtaaactaaaagaaatgtttttagctgtagcctggaatccatatatataaagtgaaggagggcagaccacacgccctctcagccaggctcctcagctttgtggctctgactggtgtgtccaggctgccttaggaaggaagaggtgcccctggtgggcttggcagcagggacagggtgcccttggacattggtttctcttgtctagatctttgagatctgtggctgcagggccctgctgattgtaaggtaaagccctgggctggtgcagggcccctccacgcccactcttcccttgttccccagaagtagagggctctgggtgcccatttcttgggggctttccagtcttatgctgtgggtgtcagctagctctttaataggtgccctcagggcaccacagggctgactgcacaaagctggacccatccttcggtctgaccttagcatggggctagattaatgaagctgggctgaggccaacttatggcagagggcggcgcctgggttccccaggcacctgttggcacgtgacaggttggcacctgtcctattcctgaaacagcctctctcaccaagttcccttgcctaagaaggccactccctcccaccccactgaagtgggggatagtcggtgtcctagcaggcctcagggcctctggtggctctggcccagacagtatttgcagttcttgtgctatgggtgggagtcttcttcctcaagtttcggcagctgtgctgctgctggatgggctgctcytccsasggctcaagggctgtggtcygctcagggtctcatttccccaggccaagttcaaggcagcagccctttgtgaggcgctcttggccctgggcctggagggagaactttaagcttttttgctcacagggacgtggtatgggccctgggtgcaggtgcccacattctgctaatgagagctttgtctgatcagtcctgggtccatcagtttgtccatgtgtccggctgccagcccgtcccttgggatccttcccctggggtgtagccttgttcattagtatatactcattccttcatgctttcctcagcagaacacttccacttctgaggtgagcttttgccccrtgcccttcctccacaggtgttgcctttttataaagacctgatagcagaataaattggtgtttccctgttgacccagcaccatttctgtgggcctagaatatggccctcaacccttagagtggggcagtgagggcttgaggagtgacccttcctttctcatggttttagtcattttggctgccagcccttaatggcacagatctgctgctyctaacagatggccaggaggtgacaccgatttcagccattgccaaggttagcaccctctcctttgagcctagggccacactgttcattgtcactttaggcaagtgcctgtttggctttaaaggtaagcctgccagctgtgagaagccttggtaactgatggactcatttcctggtccttaaagatgcagcctcttaagggctccttgatggatgccatctctcctagcccccagccctggtgccactggtgggcaggttcccattctttggggctgggagggacagcttgcctgtttctggtcacaaattacagtcttctctcctgtaccattctgtggcttcagccatgggggcagtagcccttcattagtgtagatagtcattccctggtagggtggagggtaagacatagggtctggaactgtttgggaccttttggggatgtcctgtgcctcccagattcctcgattctgggaggagaggctgccgcattctgctgctyctcacagcgagcaaagctgcacccacttacattcagtattttcctggcactacaaagagtgggaaggcctgggatttgctgctgctcccttagagcagggcccctyttttcagcactttggacacctggagacccagccctgttatttaatggtagtgggcaagtgtgtgtgcatactgtctgccactgctttctccctgccccatgccagagagccctgtccctgccaggcccagccttcttagccccaacttgggaacaaagtgcaacatgggatcatgggttggggtgctcaggtgagccctctctatagtgmttccctgggccaagctgacaccagcccctgagggtggggtgggacgggtggtgcttaaaagaggaaggggaccagtgtagcaacttgccagggaccccacccctccctctctgggcctgtgcagtgagcatggggattcccatcaaggggcctggcacctgtgctagttacgtagccgctgctcacgcgctcactcctgaccacatgcacgttccctagatgcagactgctttgaactttaaagctgtacaatttggttatgtttgtgctgacttaaaatatattttaatgaggaaaaaataatggagaaccctgggaaggacctggttcttttgcttctcggggaactgtaagccctcgcgttctgggaatcgctctctgctgctctttcctggaagctaagcctgtctccaccgcccgaggcctgcgccggtggctcccgccgcagttgcgtttgctttggaccttgcgtgcgggggagggggtgctcggtccgagcccgctcctttctgtacacctagcgctgcccgccccgcttgtgtctgaggtcgtgtatgtcaaaaataaagccgctagaaacggaggcgagtctgtctttgtgaaaatcccgtggcccgggagccttccctggtcaccctcggg

SEQ ID NO: 3358 - DNA, 4403 bp, Homo sapiens
gccgccatcttgttgttgatccgtacccagtgggcagcgccgggagctggaccaagcggccggacagaataataagctgaatagaatctgaccattggctttcacctggccaggaccttctatgtagctctccttttgtggcccatgtgctgcatcctctgccctcagtgtgcaactggcccccaacgcaatgtgtgtttgtcaaaccatggaagtggggcagtatggcaagartgcaagtcgggctggagaccggggagtcctcctggagcccttcatccaccaagtaggcggacacagcagcatgatgcgttacgacgatcacactgtgtgcaagcccctcatctcccgggaacagcgcttttacgagtccctccctcccgaaatgaaggagttcacccctgaatacaaaggcgtggtatctgtctgttttgagggggacagtgatggttacatcaacttagtggcctatccttatgtggaaagtgagactgtggaacaggatgacacaacagaacgggagcaacctcggcgcaaacactcccgccggagcctgcaccggtcaggcagtggcagtgaccacaaggaggagaaagccagcctgtcccttgagacctctgagagctcacaggaggcaaagagtccgaaggtggagctgcacagccactcagaggtccctttccagatgctagatggcaacagtggcttgagttctgagaagatcagccacaacccctggagcctgcgttgtcacaagcagcagctgagccgcatgcgctccgagtccaaggaccgaaagctctacaagttcctcctgcttgagaacgtggtgcaccacttcaagtacccctgygtgttggacctgaagatgggcacgcggcagcatggcgatgacgcgtcagctgagaaggcagcccggcagatgcggaaatgcgagcagagcacatcagccacgctgggygtcagggtctgcggcatgcaggtgtaccagctggacacagggcattacctctgcaggaacaagtactatggccgtgggctctccattgaaggcttccgcaatgccctctatcaatatctgcacaatggcctggacctgcgacgtgacctgtttgagcctatcctgagcaaactgcggggcctgaaagctgtgctggagcggcaggcctcttaccgcttctactccagttccctgcttgtcatctatgatggcaaggagtgccgggctgagtcctgcctggaccgccggtctgagatgcgtctcaagcacctggacatggtgctccctgaggtggcgtcatcctgtggccccagcaccagccccagcaacaccagccccgaggcgggtccctcctctcagcccaaggtggatgtccgcatgattgactttgcacacagcacattcaagggcttccgggatgaccccaccgtgcatgatgggccagacagaggctacgtgtttggcctggagaacctcatcagcatcatggaacagatgcgggacgagaaccagtaggccctgttctgggcccccagaaccccttcctctccactgcaggcagggaccattgttctgaacttgccgtgaggacacacagacttgcttttaaagggttatatttctctttggtgtaaactaaaagaaatgtttttagctgtagcctggaatccatatatataaagtgaaggagggcagaccacacgccctctcagccaggctcctcagctttgtggctctgactggtgtgtccaggctgccttaggaaggaagaggtgcccctggtgggcttggcagcagggacagggtgcccttggacattggtttctcttgtctagatctttgagatctgtggctgcagggccctgctgattgtaaggtaaagccctgggctggtgcagggcccctccacgcccactcttcccttgttccccagaagtagagggctctgggtgcccatttcttgggggctttccagtcttatgctgtgggtgtcagctagctctttaataggtgccctcagggcaccacagggctgactgcacaaagctggacccatccttcggtctgaccttagcatggggctagattaatgaagctgggctgaggccaacttatggcagagggcggcgcctgggttccccaggcacctgttggcacgtgacaggttggcacctgtcctattcctgaaacagcctctctcaccaagttcccttgcctaagaaggccactccctcccaccccactgaagtgggggatagtcggtgtcctagcaggcctcagggcctctggtggctctggcccagacagtatttgcagttcttgtgctatgggtgggagtcttcttcctcaagtttcggcagctgtgctgctgctggatgggctgctcytccsasggctcaagggctgtggtcygctcagggtctcatttccccaggccaagttcaaggcagcagccctttgtgaggcgctcttggccctgggcctggagggagaactttaagcttttttgctcacagggacgtggtatgggccctgggtgcaggtgcccacattctgctaatgagagctttgtctgatcagtcctgggtccatcagtttgtccatgtgtccggctgccagcccgtcccttgggatccttcccctggggtgtagccttgttcattagtatatactcattccttcatgctttcctcagcagaacacttccacttctgaggtgagcttttgccccrtgcccttcctccacaggtgttgcctttttataaagacctgatagcagaataaattggtgtttccctgttgacccagcaccatttctgtgggcctagaatatggccctcaacccttagagtggggcagtgagggcttgaggagtgacccttcctttctcatggttttagtcattttggctgccagcccttaatggcacagatctgctgctyctaacagatggccaggaggtgacaccgatttcagccattgccaaggttagcaccctctcctttgagcctagggccacactgttcattgtcactttaggcaagtgcctgtttggctttaaaggtaagcctgccagctgtgagaagccttggtaactgatggactcatttcctggtccttaaagatgcagcctcttaagggctccttgatggatgccatctctcctagcccccagccctggtgccactggtgggcaggttcccattctttggggctgggagggacagcttgcctgtttctggtcacaaattacagtcttctctcctgtaccattctgtggcttcagccatgggggcagtagcccttcattagtgtagatagtcattccctggtagggtggagggtaagacatagggtctggaactgtttgggaccttttggggatgtcctgtgcctcccagattcctcgattctgggaggagaggctgccgcattctgctgctyctcacagcgagcaaagctgcacccacttacattcagtattttcctggcactacaaagagtgggaaggcctgggatttgctgctgctcccttagagcagggcccctyttttcagcactttggacacctggagacccagccctgttatttaatggtagtgggcaagtgtgtgtgcatactgtctgccactgctttctccctgccccatgccagagagccctgtccctgccaggcccagccttcttagccccaacttgggaacaaagtgcaacatgggatcatgggttggggtgctcaggtgagccctctctatagtgmttccctgggccaagctgacaccagcccctgagggtggggtgggacgggtggtgcttaaaagaggaaggggaccagtgtagcaacttgccagggaccccacccctccctctctgggcctgtgcagtgagcatggggattcccatcaaggggcctggcacctgtgctagttacgtagccgctgctcacgcgctcactcctgaccacatgcacgttccctagatgcagactgctttgaactttaaagctgtacaatttggttatgtttgtgctgacttaaaatatattttaatgaggaaaaaataatggagaaccctgggaaggacctggttcttttgcttctcggggaactgtaagccctcgcgttctgggaatcgctctctgctgctctttcctggaagctaagcctgtctccaccgcccgaggcctgcgccggtggctcccgccgcagttgcgtttgctttggaccttgcgtgcgggggagggggtgctcggtccgagcccgctcctttctgtacacctagcgctgcccgccccgcttgtgtctgaggtcgtgtatgtcaaaaataaagccgctagaaacggaggcgagtctgtctttgtgaaaatcccgtggcccgggagccttccctggtcaccctcggg

SEQ ID NO: 3359 - DNA, 2335 bp, Homo sapiens
ccacagctgctgctcctagggaggagctggtaccatgggtgtcaggcaacagttggccttgctgctgctgctgctgctcctgctctggggcctggggcagccagtgtggccagtcgctgtggccttgaccctgcgctggctcctgggggatcccacatgttgcgtgctacttgggctggccaygttagcayggccctggctcggcccctgggtgccccatgggctgagcctggcagctgcggccctggcactaaccctcctgccagcacggctgcccccaggactacgctggctgccggctgatgtgatcttcttggccaagatcctccacctgggcctgaagatcaggggatgcttgagccggcagccgcctgacacctttgtagatgccttcgagcggcgagcacgagcgcagcctggcagggcactcttggtgtggacggggcctggggccggctcagtcacctttggtgagctggatgcccgggcctgccaggcggcatgggccctgaaggctgagctgggtgaccctgcgagcctgtgtgccggggagcctactgccctccttgtgctggcttcccaggccgttccagccctgtgtatgtggctggggctggccaagctgggctgcccaacagcctggatcaacccgcatggccgggggatgcccctggcgcactctgtgctgagctctggggcccgggtgctggtggtggacccagacctccgggagagcctggaggagatccttcccaagctgcaggctgagaacatccgctgcttctacctcagccatacctcccctacaccaggggtgggggctctgggggctgccctggatgcagcgccctcccacccagtgcctgctgacctgcgtgctgggatcacatggagaagccctgccctcttcatctatacctcggggaccactggcctcccgaagccagccatcctcacrcatgagcgggtactgcagatgagcaagatgctgtccttatctggggccacagctgatgatgtggtttacacggtcctgcctctgtaccacgtgatgggacttgtcgttgggatcctcggctgcttagatctcggagccacctgtgttctggcccccaagttctctacttcctgcttctgggatgactgtcggcagcatggcgtgacagtgatcctgtatgtgggcgagctcctgcggtacttgtgtaacattccccagcaaccagaggaccggacacatacagtccgcctggcaatgggcaatggactacgggctgatgtgtgggagaccttccagcagcgcttcggtcctattcggatctgggaagtctacggctccacagaaggcaacatgggcttagtcaactatgtggggcgctgcggggccctgggcaagatgagctgcctcctccgaatgctgtccccctttgagctggtgcagttcgacatggaggcggcggagcctgtgagggacaatcagggcttctgcatccctgtagggctaggggagccggggctgctgctgaccaaggtggtaagccagcaacccttcgtgggctaccgcggcccccgagagctgtcggaacggaagctggtgcgcaacgtgcggcaatcgggcgacgtttactacaacaccggggacgtactggccatggaccgcgaaggcttcctctacttccgcgaccgcctcggggacaccttccgatggaagggcgagaacgtgtccacgcacgaggtggagggcgtgttgtcgcaggtggacttcttgcaacaggttaacgtgtatggcgtgtgcgtgccaggttgtgagggtaaggtgggcatggctgctgtgcagctagcccccggccagactttcgacggggagaagttgtaccagcacgttcgcgcttggctccctgcctacgctaccccccatttcatccgcatccaggacgccatggaggtcaccagcacgttcaaactgatgaagacccggttggtgcgtgagggcttcaatgtggggatcgtggttgaccctctgtttgtactggacaaccgggcccagtccttccggcccctgacggcagaaatgtaccaggctgtgtgtgagggaacctggaggctctgatcacctggccaacccactggggtagggatcaaagccagccacccccaccccaacacactcggtgtccctttcatcctgggcctgtgtgaatcccagcctggccataccctcaacctcagtgggctggaaatgacagtgggccctgtagcagtggcagaataaactcagatgtgttcacagaagtctgtatgtctgcgtggatgaaggagcaatggaggagtgcagggg

SEQ ID NO: 3360 - DNA, 2827 bp, Homo sapiens
cgcagggacgccgcaggcggcgataggatccggactacagctcccagcgcgccccagttcccgcccccgcctccggagcccgacgctgcagcggctcttctcgaaaggttctttccgcctgtgcagctcgccggctcaatactccgggggtctgggtggggggctcaaacgcagggctctgggacgcaggcactgctccaggtgatagtgcgggaacatggccttgcagctgggcaggctgagctcgggcccctgctggctcgtggcgcggggcggctgcggagggccccgcgcctggtccyagtgcggcggcggagggctccgagcctggtcccagcgcagcgcagccggacgcgtctgccggccccctggcccggctggcacggagcagagccgcgggctggggcacggctcgacgtcgagaggcggcccctgggtggggacagggctggccgcggcgctggcggggttggtggggctggccaccgccgccttcgggcatgtgcagcgggcggagatgttgcctaagacctcggggacgcgggccacttcgctggggaggccggaggaggaggaggatgagctggcccaccgctgcagcagcttcatggccccgcctgtgaccgacctgggcgagctgcgaaggaggccgggcgacatgaagaccaagatggagctgctgattctggagacccaggcccmggtgtgccaggctctggcacaggtaracgggggcgccaacttttctgtggaccggtgggagaggaaggaaggaggtggcrgcatcagctgtgtacttcaagatgggtgtgttttcraaaagrctggggtgagcatttctgttgttcatggaaatctttcagaggaagctgcaaaacaaatgagaagcagaggaaaagttctgaagactaaagatggtaaattgccattttgtgctatgggcgtgagctctgttatccacyccaagaatcctcatgctcctactatccatttcaactacagatactttgaagtaraagaagctgatggcmacaagcagtggtggtttggtggtggatgtgacctcactcyaacatacttgaatcaagaagacrctrtcsattttcacagaactctgaaggaggcttgtgaccagcatggtccagatctctaccccaaatttaaaaaatggtgtgatgattacttctttatagcccatcgtggagarcggcggggcattggtggtatcttttttgatgatcttgactctccgtccaaggaggaggtgtttygctttgtacagagctgtgccagggctgtagttccttcttacattccccttgtgaaaaagcactgtgatgactcattcaccccccaggagaagctgtggyagcagctcagaagaggayggtatgtagaatttaatctgctgtatgatcggggcacaaagtttggcctcttcactccaggatccagaattgaaagtatcttgatgtctttacctctaactgccygaygrgagtacatgcattcaccctcagagaattccaaagaagctgaaattctggaagttctaygccatccaagggactgggtgcgttgatgcaggcagaatggctgtgcaggggtttggagggcacacgatgtgtgctccccatgccactggtcggcactttgccactgtgtsgcagttacccrtgccttagtcttctccactctgcaccctacctcgtggscagatgataacatgttttggatgctgtcmgtgatgaatggtgagatggcagattgtcagagtcaattgattaaacctcatttatacttctagtgtcattttatatgactagtttacaaaataggacattgagtttccaagtattgagataagggaatataaatagtattatatgtatcaggaaatctctcatcttgtttttgtttcatgtattttttaaagttttcatttgtgccacaaaaatctgtcgtggaatatattttattttcattaattcagtgaagttgagacttcatagtaattttagaatgcaacttgaaggtaaaaattttactttgtcaatactgaagtctctgctgtaatccttatatatctttctccagagaacataatattgtcaaatagatacacatttttctaataggtatttagaagcacttgaaatattcttaatctctgcatgtgttacaattcagttatttctgtagtttgtaaactctaaagtgacattactattattttagagatgtctaagttgtaattttgatttttgtggaaccattgtttgttaatgttgggattctctgcacttttgaatgtgaaagcttatatccctgaattctgatacttaagagttttctatttcagacatctctgtgtggaagttgagactaagaataatcctagggatgtcatgaatttaggcaatgtttctcatttggaaaatgaaatgagaaataatttccttctttaaagcaagtatatatagtatgagaaacttggaggcatttcatacacacrtttcttaggaaaatggacacattgaaaatgtcctcttttttatattagagattctgcagctctttgctcttaagagcaaatcacaacaggattcttaatgtatgatttctttgttcatatattatgaatgtattattttatttgcttcgtaataaagtttataaggaagagcatctcatacatatcattatcgtggaacacgttgaatgtttgtgattctgtgtggcctttttggggctggaaaatgtatgaattcttcaactgtcttacaagagatctgctaataaattttattattaaataagactaaga

SEQ ID NO: 3361 - DNA, 6101 bp, Homo sapiens
tgcgggcctgcctgccagctagccggagccgcgggtgagcgcggcgagcggcgaccctggtgaggagcgcggcgcgggaggcacgttccttagctccgccgcggccgtcctccgcggctcgaggactccgcttccttccctcccctcccctgcgctccggcctggggtctyggcgcggggagcggagggaagggacgaaggaggagtaggtgaaagcrgggtgaggggcggaagggtcccggcgcggggtgaggcgagggctgcctcttgttctcccgccgctgccgccgtctcctggtcgggtgccgcggccagaggcgcgcggggctgccgaggcacccgcactatgcaggcagactgccggccgccgcgatggcgagccgggcggtggtgagagccaggcgctgcccgcagtgtccccaagtccgggccgcggccgccgcccccgcctgggccgcgctccccctctcccgctccctccctccctgctccaactcctcctccttctccatgcctctgttcctcctgctcttacttgtcctgctcctgctgctcgaggacgctggagcccagcaaggtgatggatgtggacacactgtactaggccctgagagtggaacccttacatccataaactacccacagacctatcccaacagcactgtttgtgaatgggagatccgtgtaaagatgggagagagagttcgcatcaaatttggtgactttgacattgaagattctgattcttgtcactttaattacttgagaatttataatggaattggagtcagcagaactgaaatrggcaaatactgtggtctggggttgcaaatgaaccattcaattgaatcaaaaggcaatgaaatcacattgctgttcatgagtggaatccatgtttctggacgcggatttttggcctcatactctgttatagataaacaagatctaattacttgtttggacactgcatccaattttttggaacctgagttcagtaagtactgcccagctggttgtctgcttccttttgctgagatatctggaacaattcctcatggatatagagattcctcgccattgtgcatggctggtgtgcatgcaggagtagtgtcaaacacgttgggcggccaaatcagtgttgtaattagtaaaggtatyccctattatgaaagttctttggctaacaacgtcacatctgtggtgggacacttatctacaagtctttttacatttaagacaagtggatgttatggaacactggggatggagtctggtgtgatcgcggatcctcaaataacagcatcatctgtgctggagtggactgaccacacagggcaagagaacagttggaaacccaaaaaagccaggctgaaaaaacctggaccgccttgggctgcttttgccactgatgaataccagtggttacaaatagatttgaataaggaaaagaaaataacaggcattataaccactggatccaccatggtggagcacaattactatgtgtctgcctacagaatcctgtacagtgatgatgggcagaaatggactgtgtacagagagcctggtgtggagcaagataagatatttcaaggaaacaaagattatcaccaggatgtgcgtaataactttttgccaccaattattgcacgttttattagagtgaatcctacccaatggcagcagaaaattgccatgaaaatggagctgctcggatgtcagtttattcctaaaggtcgtcctccaaaacttactcaacctccacctcctcggaacagcaatgacctcaaaaacactacagcccctccaaaaatagccaaaggtcgtgccccaaaatttacgcaaccactacaacctcgcagtagcaatgaatttcctgcacagacagaacaaacaactgccagtcctgatatcagaaatactaccgtaactccaaatgtaaccaaagatgtagcrctggctgcagttcttgtccctgtgctggtcatggtcctcactactctcattctcatattartgtgtgcttggcactggagaaacagaaagaaaaaaactgaaggcacctatgacttaccttactgggaccgggcaggttggtggaaaggaatgaagcagtttcttcctgcaaaagcagtggaccatgaggaaaccccagttcgctatagcagcagygaagttaatcacctgagtccaagagaagtcaccacagtgctgcaggctgactctgcagagtatgctcagccactggtaggaggaattgttggtacacttcatcaaagatctacctttaaaccagaagaaggaaaagaagcaggctatgcagacctagatccttacaactcaccagggcaggaagtttatcatgcctatgctgaaccactcccaattacggggcctgagtatgcaaccccaatcatcatggacatgtcagggcaccccacaacttcagttggtcagccctccacatccactttcaaggctacggggaaccaacctcccccactagtgggaacttacaatacacttctctccaggactgacagctgctcctcagcccaggcccagtatgataccccgaaagctgggaagccaggtctacctgccccagacgaattggtgtaccaggtgccacagagcacacaagaagtatcaggagcaggaagggatggggaatgtgatgtttttaaagaaatcctttgaagatgatgctgctttttacaaagcatcgttttaaagcacatggcctttttttttttaattattagtggtagtaatatatagaatgtattacataactgtcactgaagtggttggggaaaatgtggtgactgaggtacaggaaactactaatcttgccatcttgctttaaggtgttatggtggcacagttactgctcgcctgttaaatttcaaatgtcctgtttgatactactgtagaacactatttttaatacagaaaaagctccctataatgcacttcagagaaattaaaaatcacagagtatttattaccaatgctgcaggtacattaatgaactcgagatggctctgtaagcctgactggcaataacgcayggtactgttcttgaaatacctaatggcttgaaattctagtctgtttgtgaaagatgggtactatcatgatttcctcttctattcctatattcttttctggattttttttaataattagtgatataagcattgtttttattgcagccatatccacttatccatcttaagatctgtagctgggattttctgacttgtaatgagcagggggattgctttttcactttgtgacactctttagagctttaatgcttcacagtatatggcctggtctcatycttgcgtgttccacttgaggccctttggtgtcttgccccattcttgtgtttataaaatgtttgagtatttctgatgagtgatgcttgccttagtctcatgaattcagatcccttcatgtcctttaagtatgctcctcaatgtgtaaacaggaacaactttatgatttgaaagctttaaaggagattcttctcccacccccaactttatttgcaatgggatttttcctaggagagttatgaaaagttgaaggcttctaagggaatactgtaaacatgacccacttatatttatcacagtgaaaggcaaaattattcactcagaagtaatataaattacctctttaaaaagtaaccagaatttgtcctttttggttttatacattcacaaacatatacatttttcttgagtctcaaggtattttatatttttagtcagaaaaaataatttttcatttcagttttccataaactgttacacaaaatataaacctaacgtgtatttttcaggactgcgtgatcgtgcactttgtgtggtaagaggtttgagtagtcctrtatgtcacctagggaacagwcattatagcttmctagcaaatgaatattcatgccttgtttttgatacctcctggcagcttccatgtcaccacttgttcatacctgcccagagctagttttagacatggcaaaatagaaatcatctgtaatttattagctaacaatgtaaaaccatcttttaaagccttcagactgtcaagacgacatgagcagctcaccatatgataaaaatacataaatttgacattccctyttccataaacctttgtttgtagatttaatgttgaacagtacttttccataaagttctagtcacttctgttggcctgagccaccagattatgatgttgccagaattcactcaatttgaataaagatgaacagtatttgttttcttgtttccatgaattatatcagtattctaaaacatcgcttcagaaagagaactgtttatttctgcaggcttcctgtccttttgtggtatggttttttggccttattttcactggcttttccttctccaaactttgaggcgtgatttcattcattgaagaatcaatacatattttgtttcaaaatgtttgaaacaaaagacatagatggtagacttttattaaaacatatatggatgtggaaagcacatatattaatgcagtcatcccttttcaggtgggaagagagcaaaccagttgattttttaattcatccttagtacacagagaatatacttttcctcaagtaatatacctgtttgaagctttaagagagatgtttttggtaactatttcattttcccaaagaagtttgctattcttgtgttaattgtgtatacctgattgttttttcctggaggtttttgttgttgttgtttagttttgggtttttttttttttaagaggggcaagtgttttctgaaatgatgcatattttaagactcgattcatattgccactgtgctatccttgaactaccaataatttttataaaatatctagtttttactacttttatataaactttactttccagatgaagagctgagcstgattcaaatggtttttctgctttatacttctttttagttcattggtttttatagtagaggttttctattttttttttttttttttactacatttatatgtctgatacatatacggctttggagacaatcaagtaacaactgaaaatgtgaaagtaaccatatctgacaaaattcccttgaatttttatcctttgcttgcaacatttaagactcaaagtcactggtatattggattaagttttttcctgttaatgcaattatagaaatacatcggagacacaacaaatgtggccattacaggtttcataaaattacactgacttggctgttacttgatcttaggaaacagcacagtttaagatattgtgaattctgacttatactttattaaatgctrtaaatctaaatagatcctgttggatgtgatgggtctagtccagtttatttaagttcatgtttcactgtttgcactttgcattgaacaatgggtttattcgctgatgtaaacggttcgagtgaagaattaatgcagtaagtatgacaacacatacacacttgcctctccccatctccagaagaggggagcagagtccgagcttatctaaatatgaatgtggccacaaagctgtggaaggtgacaaagcttaaacacctttgccctggctctgcattgtcacctagagagcaagaggtctatagaaacatcatgtcacatgaaacgattctctgctttttggttctgaacttgaagtccctaaactgcaaaatctaagagttgggtggttattaaaatgcttttaaagtyaactgtggcaccaattctaatgtaatccaacttgtgactgtttttttttgttttgttttgtttttktgtgtgtgtgtgtggcactgggaaaagtggaaacaaacatgtattgaaatacatattggaaataaaaatggtttgagcgtcagtgatattctcccagaatgtacttatcttacctcggcatgtactgtagtcactcagtatttgtatatgttgctagaatttagattgtaaaatagtgaaattttaatgtgttcatttgtttttaatgtatatatgtcttgctcagattatttggtttaaataaaacaaccttgaggtttgtagcttttccttatactata

SEQ ID NO: 3362 - DNA, 5819 bp, Homo sapiens
tgcgggcctgcctgccagctagccggagccgcgggtgagcgcggcgagcggcgaccctggtgaggagcgcggcgcgggaggcacgttccttagctccgccgcggccgtcctccgcggctcgaggactccgcttccttccctcccctcccctgcgctccggcctggggtctyggcgcggggagcggagggaagggacgaaggaggagtaggtgaaagcrgggtgaggggcggaagggtcccggcgcggggtgaggcgagggctgcctcttgttctcccgccgctgccgccgtctcctggtcgggtgccgcggccagaggcgcgcggggctgccgaggcacccgcactatgcaggcagactgccggccgccgcgatggcgagccgggcggtggtgagagccaggcgctgcccgcagtgtccccaagtccgggccgcggccgccgcccccgcctgggccgcgctccccctctcccgctccctccctccctgctccaactcctcctccttctccatgcctctgttcctcctgctcttacttgtcctgctcctgctgctcgaggacgctggagcccagcaaggtgatggatgtggacacactgtactaggccctgagagtggaacccttacatccataaactacccacagacctatcccaacagcactgtttgtgaatgggagatccgtgtaaagatgggagagagagttcgcatcaaatttggtgactttgacattgaagattctgattcttgtcactttaattacttgagaatttataatggaattggagtcagcagaactgaaatrggcaaatactgtggtctggggttgcaaatgaaccattcaattgaatcaaaaggcaatgaaatcacattgctgttcatgagtggaatccatgtttctggacgcggatttttggcctcatactctgttatagataaacaagatctaattacttgtttggacactgcatccaattttttggaacctgagttcagtaagtactgcccagctggttgtctgcttccttttgctgagatatctggaacaattcctcatggatatagagattcctcgccattgtgcatggctggtgtgcatgcaggagtagtgtcaaacacgttgggcggccaaatcagtgttgtaattagtaaaggtatyccctattatgaaagttctttggctaacaacgtcacatctgtggtgggacacttatctacaagtctttttacatttaagacaagtggatgttatggaacactggggatggagtctggtgtgatcgcggatcctcaaataacagcatcatctgtgctggagtggactgaccacacagggcaagagaacagttggaaacccaaaaaagccaggctgaaaaaacctggaccgccttgggctgcttttgccactgatgaataccagtggttacaaatagatttgaataaggaaaagaaaataacaggcattataaccactggatccaccatggtggagcacaattactatgtgtctgcctacagaatcctgtacagtgatgatgggcagaaatggactgtgtacagagagcctggtgtggagcaagataagatatttcaaggaaacaaagattatcaccaggatgtgcgtaataactttttgccaccaattattgcacgttttattagagtgaatcctacccaatggcagcagaaaattgccatgaaaatggagctgctcggatgtcagtttattcctaaaggtcgtcctccaaaacttactcaacctccacctcctcggaacagcaatgacctcaaaaacactacagcccctccaaaaatagccaaaggtcgtgccccaaaatttacgcaaccactacaacctcgcagtagcaatgaatttcctgcacagacagaacaaacaactgccagtcctgatatcagaaatactaccgtaactccaaatgtaaccaaagatgtagcrctggctgcagttcttgtccctgtgctggtcatggtcctcactactctcattctcatattartgtgtgcttggcactggagaaacagaaagaaaaaaactgaaggcacctatgacttaccttactgggaccgggcaggttggtggaaaggaatgaagcagtttcttcctgcaaaagcagtggaccatgaggaaaccccagttcgctatagcagcagygaagttaatcacctgagtccaagagaagtcaccacagtgctgcaggctgactctgcagagtatgctcagccactggtaggaggaattgttggtacacttcatcaaagatctacctttaaaccagaagaaggaaaagaagcaggctatgcagacctagatccttacaactcaccagggcaggaagtttatcatgcctatgctgaaccactcccaattacggggcctgagtatgcaaccccaatcatcatggacatgtcagggcaccccacaacttcagttggtcagccctccacatccactttcaaggctacggggaaccaacctcccccactagtgggaacttacaatacacttctctccaggactgacagctgctcctcagcccaggcccagtatgataccccgaaagctgggaagccaggtctacctgccccagacgaattggtgtaccaggtgccacagagcacacaagaagtatcaggagcaggaagggatggggaatgtgatgtttttaaagaaatcctttgaagatgatgctgctttttacaaagcatcgttttaaagcacatggcctttttttttttaattattagtggtagtaatatatagaatgtattacataactgtcactgaagtggttggggaaaatgtggtgactgaggtacaggaaactactaatcttgccatcttgctttaaggtgttatggtggcacagttactgctcgcctgttaaatttcaaatgtcctgtttgatactactgtagaacactatttttaatacagaaaaagctccctataatgcacttcagagaaattaaaaatcacagagtatttattaccaatgctgcaggtacattaatgaactcgagatggctctgtaagcctgactggcaataacgcayggtactgttcttgaaatacctaatggcttgaaattctagtctgtttgtgaaagatgggtactatcatgatttcctcttctattcctatattcttttctggattttttttaataattagtgatataagcattgtttttattgcagccatatccacttatccatcttaagatctgtagctgggattttctgacttgtaatgagcagggggattgctttttcactttgtgacactctttagagctttaatgcttcacagtatatggcctggtctcatycttgcgtgttccacttgaggccctttggtgtcttgccccattcttgtgtttataaaatgtttgagtatttctgatgagtgatgcttgccttagtctcatgaattcagatcccttcatgtcctttaagtatgctcctcaatgtgtaaacaggaacaactttatgatttgaaagctttaaaggagattcttctcccacccccaactttatttgcaatgggatttttcctaggagagttatgaaaagttgaaggcttctaagggaatactgtaaacatgacccacttatatttatcacagtgaaaggcaaaattattcactcagaagtaatataaattacctctttaaaaagtaaccagaatttgtcctttttggttttatacattcacaaacatatacatttttcttgagtctcaaggtattttatatttttagtcagaaaaaataatttttcatttcagttttccataaactgttacacaaaatataaacctaacgtgtatttttcaggactgcgtgatcgtgcactttgtgtggtaagaggtttgagtagtcctrtatgtcacctagggaacagwcattatagcttmctagcaaatgaatattcatgccttgtttttgatacctcctggcagcttccatgtcaccacttgttcatacctgcccagagctagttttagacatggcaaaatagaaatcatctgtaatttattagctaacaatgtaaaaccatcttttaaagccttcagactgtcaagacgacatgagcagctcaccatatgataaaaatacataaatttgacattccctyttccataaacctttgtttgtagatttaatgttgaacagtacttttccataaagttctagtcacttctgttggcctgagccaccagattatgatgttgccagaattcactcaatttgaataaagatgaacagtatttgttttcttgtttccatgaattatatcagtattctaaaacatcgcttcagaaagagaactgtttatttctgcaggcttcctgtccttttgtggtatggttttttggccttattttcactggcttttccttctccaaactttgaggcgtgatttcattcattgaagaatcaatacatattttgtttcaaaatgtttgaaacaaaagacatagatggtagacttttattaaaacatatatggatgtggaaagcacatatattaatgcagtcatcccttttcaggtgggaagagagcaaaccagttgattttttaattcatccttagtacacagagaatatacttttcctcaagtaatatacctgtttgaagctttaagagagatgtttttggtaactatttcattttcccaaagaagtttgctattcttgtgttaattgtgtatacctgattgttttttcctggaggtttttgttgttgttgtttagttttgggtttttttttttttaagaggggcaagtgttttctgaaatgatgcatattttaagactcgattcatattgccactgtgctatccttgaactaccaataatttttataaaatatctagtttttactacttttatataaactttactttccagatgaagagctgagcstgattcaaatggtttttctgctttatacttctttttagttcattggtttttatagtagaggttttctattttttttttttttttttactacatttatatgtctgatacatatacggctttggagacaatcaagtaacaactgaaaatgtgaaagtaaccatatctgacaaaattcccttgaatttttatcctttgcttgcaacatttaagactcaaagtcactggtatattggattaagttttttcctgttaatgcaattatagaaatacatcggagacacaacaaatgtggccattacaggtttcataaaattacactgacttggctgttacttgatcttaggaaacagcacagtttaagatattgtgaattctgacttatactttattaaatgctrtaaatctaaatagatcctgttggatgtgatgggtctagtccagtttatttaagttcatgtttcactgtttgcactttgcattgaacaatgggtttattcgctgatgtaaacggttcgagtgaagaattaatgcagtaagtatgacaacacatacacacttgcctctccccatctccagaagaggggagcagagtccgagcttatctaaatatgaatgtggccacaaagctgtggaaggtgacaaagcttaaacacctttgccctggctctgcattgtcacctagagagcaagaggtctatagaaacatcatgtcacatgaaacgattctcgtyaactgtggcaccaattctaatgtaatccaacttgtgactgtttttttttgttttgttttgtttttktgtgtgtgtgtgtggcactgggaaaagtggaaacaaacatgtattgaaatacatattggaaataaaaatggttt
